United States Patent Application Publication US 2014/0057251 A1 - sequence listing, part 133

SEQ ID NO: 244213 - DNA, 6018 bp, Cannabis indica
ctaccatttcaactagcaattcagcaagaaattggaagcaagttgttagttaggaacaagatatagttcctcacctcctttctttaaattttaagactaagttaggtttcagtgtgtgttttggtaagctcagttctataaggcttttgagttgttataaactattttaaaagtttattttaaggttgttgttggtgtttttgatggctgtagtgaggttgagctgagtttgcatttatgaactcaaatttagctcaacagtagtgattttagttttagagctttgatcatgcgatttttagttgaattatattcattgtgatgttattgggtgttctggaaggtttggtaagatttgagatagaattgagtgagaagaatcgaggtttgtgattttttctaggaaacggttagttgattctgttgaaacggttaaccgtttggtctggcacgaccccaataaatagtgaactgtttggggatcagtggaccaaatgtggtagtttttgggtaactctatttccatgtttttatcaatatttagggtattgatatgctatttatcaatagggaaacttttggtttcaagtttagttccctgaaagtgttttagtaagacacttacctattttatgtaaatgtgacttagggcctttgatcgttcaacaacatattccactcaggttgaccggcacacctgattatgaagtagaggtaagattagtataaaagatgcatatttatacatgtttaatgcatgcactatgaaatataagttggttctaccaacactattacttttagagtactgagtgcatgtgttatagtgacttaaactaaccctatcaacactagtaccttcggggtactgagtgcatgtgatataaaggttagttgaattattagaaaatataaattattcctaccaactttagtacattcaaggtactgagtgtatgtggcatggtatactttcaatggggtacgacctagtgctatcaacactagtacttgtgtgatacttagtgcatgtggtatagaggtcatactattgtcaagaacatttgagactcattaatacgtgtcagacgcatgttggatttatgaataggtgtacggatacctaggatgcaaatcagattatatgttatgttttatgcttttcttattgagtttgtcgactcatggatatactttcatgtgtaggtaaaggccagagctgaactgtaaggtccagggcttcataaagattgtacatatcaagatggttagacttagagagtttggttcttcaggatagcatgggctcagctcaattatattagtcgttgggcgacactttttggtaattgaattttggatgtgtttgtaaaatgaaacgggatccagacatctgtaaacttttgtaactttataattagtaaagtttatatttattacaaagtttttgttaatcacctttttaactaaacccctttaattagcaagggttagcacataaatttagaaaagatggggatatgcctaatcacttagggccttacaattttggtattatagctgccaggttgttcttcaaagaccatcaagatatgtacaatcatcatcagagataagctcgactcacgatttagtaagtctttacatgttttaagtgttttgatcagttgagcatgattaaaaaagcgtgataagaagcatgttagtagtttaatttttgaacaagagcatgtctaagtttctatacatcggtagtttgaatacaattttgatcacttcctaataggttgacttatgaatttgtaggcttgtcctatagaatggacgcttggaaaaaataagaagccagggcaatatggttgaggctggtagtggttaggaggttaggatttccttcgcccctataaccaaagaagagtctgttggagggttcatggtgagggttatgttaattcaccacaagatctgtaagactgagagcagaggtttgtaaaagtgcaagccgaagtttagaggcaagacaagtaaatttaaaggttgttgcagcagggttcttttgttgcacatcctcctctggtacctgttgcttatgctccgttgtttccagcagaacaacatcttgttggtaactggatggagccagcgtataaagatttcagggaaaataagttcaagatggtcagcatgatggctttggaggccattacactttcttgaaatgtcccaactataaaatacatcaccaggggtgagtgtaaaggtaaagcatgttgtttttagtatggtgtaatgggacattatacgagggattgtccactatcaaagacgaaagaataatgtttttagtgtggacttacggggaatttaaagagggattgtccccaactagttagggaagaactgaaggaagaggcaaaagccactccagcttaggtgtttgtcattgctcagattgacgttgcaactagtttgtctttggagataaggtagcttctcgttaaatactctttctactttatattgtctgactctggagcctagagttattgataaattgggtaagccttgtgataattatgagatagggtttggaaccctattacctatgggagaattagttatctccaaaaggtggatcaggcctattctggttagagtggagaatagggagttgagtactgatcttattgaattgagtatagcagagtttgttattgttctcggaaaaggcttgactaagtatgcaactagtattgattataagaggaaaaatgtaactcttcaactagaatgtgaagagccatttgtatttatgggattggtttagggttttcgaatactaatcattttagtattgaaagctagggacgtattgcatgatgggtgcataggatttctagcagtggtgttggacactagtagacttaagacaattgggcctgaggacattagggtagtaaatgagtttctagatattttttcttgaagaattacctaggatgccaccgtagcaggaaatatatttcattatttatttagcaccggggtggagccagcttttgagcccctttatcagatggctccagcgaaacttaaagaattaaaggtaaaactttaggggatgcttgacctagggtttacccgacccagtgtattgccctggggagctctgatgctgtttgtaaagatgtaagatggaacactatatatgtgtatcattattgggtattaaatacgttgataatcaagaataaatattcactgcctaggatcgatgatttgttcgatcaacttcaagaaaagtgataagtcgatattttatcttacaaatatggtcaatttatgtattaaaattcttaaattgattctttaaattattgattagtgcgattttaatttgttaagttattttaaagactaaccatgcatttggagtcattggaaggaatttttgcacattttggtagaaaatagtgtaagccagcgaacttagttttacaaggcagaaattaattacaaatttcgataaccttgaaaccagatttgcacttggagctaaacgtaaaagttgtagatttcgttctcagctttctaaaatatcttgaatcgtccaatttcgagttgtattaaaaaatctatgaccaaaatactagcaagtcatggccgtaaatgagcacttcccttcgccacagtgagagcacgattccacatttttcaaaattttttctttttaggactattagggttcattttttgggacttctagactacgttattgagagagaaactcaaagaaaaagtgagagaagaagaagaagaagattgcgacattaattattcatcattatagttcttttcttctccttaattctttactttttattacaattttcatcataataattagtttgaagtagtttctttttagttaagggttattttaaaactgaagacatgaattcttgatttgtgataatgaatgttattcttgatttctttcatattaaattgtttctatttttctatttgaatactatgaatattatgaattcttattaggtgtacagctaattgaagtttttcattattatactatcatcttagaattacttctcacctaatagtttaggactctaagtacagtgataatttacaatcaatagtaatgtcaaaggtattattaattgggatgaaaaataaaacttaagttaaaagacttatatgcttcattgatttgttacctagattaacttatctccataaaattaatacttttcctaagttacatagattgtatgcttcgtggatctattacttagtaaaaatatctaattattgagcgatttgccttaattaattgtaatagggagattgaaaaaattgactacttcaacattttttacggggttaacattttaattgagaatctagaataattttgttattattgatcttgaatgattgttgagggtagagattgactcttaactatttcttaatagcgtaatatctatctttatttactttgtagtttattgtctaatctttataattaaaccctcccctttttatttcgtgttactaatttttgaataattaattgataatagtcctcgtgggatcaacctatatatactgttgtactgaaataattggtaatatagaacaaaagtaaatttgttgtggtaaacaacacgcatcaaacttttaacgccgttaccggtgactattttattcaatttgttattcatttttttcgtattactaacttgttctcctagttgtggtcttaatttttagatcattctttggaaatgtggcgatgtataatcaacattactatgatccacattatgtttcgccacaagtgcatcaatatgattcatactatgacccaatgtgaagaccacatgagtgtaacatggagttgagctaatgacgttaaacaaagtaaacttacgagagtttttccttacctttttctttttatttttctttgatgttatttagttgagccttgaggacaatacttatattaagtgtgggggaggaaacgtgtcgtgtctatccagttttttttccttattataataatatgcatatatgattacatgtatagagtgcatgtttatgaatgcctattaggtaacatatcagtaatggcagtattagaattcatagggttgcactaaataccgacggatatatatttggcaaagtgttgattgacgctatcacatcggtacaattagagtaccaagtataggctgatattatggtcaatagtactgtcgtacgaacattctagacttagtactcgtgagacgcgggatagggttataattgggtgtatgggtgcctagttatagtctggtttatgttatgtttatgcttttcttactgagtctgtcaactcacaaatattatttaattgtgtaggtaagggtaaggctaaagctaaacatcagtgaactcgagctaatgaagattgtacatattgaggcggttagacctagagtgttcgatcttcagggcagtaggctttattttgataatcactaggcgacaacttttttaactaaatattttgtaaaatagatgtaaattttaaaaacgtgatcttagattatgtaaagtgtctaatttattacgtttaaattttaattaagaaaatattaaattattcatgttttttcataaaactctttgattagaataggtgtgcacaatattaagaaatcacgataacacaaataatctagtagggtgttacaaaacgagtttgtattcaagctgcatttctatgttgtggctaggaatgaagagtaggaggtaattctataattaattatgtttagggtgtgtaaaagtttaaatagtcacccaaagtatttgtgtaaggttattgcgttattgaactaaatttgaaagtttcccaaaaatgaatatgttgttagaatatttttatattaagtataaaattatataattaatatttggagttttttcatttttata

SEQ ID NO: 244214 - DNA, 630 bp, Cannabis indica
tacttacctttactaaaagaaaaatacgtagtacacgttaaatgttgtttcaaaagactttttatttatttgggtatttaagaaaaaatttaagtataactaatggtacaatgtagttatttaagattatttatatattttcaataaattcaaaatagtttacatattttacaatattaaaaataaagtttaaatagttatttatcacagtatatataaaaaaaaaaacatcacgcgtgtaacaaattatttgaatcttattttcgacactataaacaatttgaaattatttaacagttaacaggtgaccctaataaatacaacgtacacaatgatgaaaataacaattaaactaaaagcctctctcaaatgtcaaactagataagaggtctactcgaatatctctttaaaatggtgtattatagactgttttccaaatatatgtttatatatagggtgtttttgccttgcaccccaaaaaatattgtatccatatactctcttcatgtttttgataattgtaatattaattttttataagatattttataaaatttttaaaaaatttagaataatttacaacaaagaaaacaacattcaaatagtctatctcacacaagtataaaatta

SEQ ID NO: 244215 - DNA, 697 bp, Cannabis indica
tttttaaaactaataggggttgtttttatttggaattttgcaggctgagaagctctacacaataagtttacctttcccttacacatcaaaagacgtttatgaacagagcattcgcatgcccatcggtcctgaattcaacccagcaactacagttggagctctcaatcggcctggagtaagtccctcgctaacagatcggagaatcattgaattctcgttatttatagtttaagtatacacggtttcttacatgggttgcgttgctttctttacaggtgatgaagaagccaggtcaaattatcaatcctattgaatatgaagacgtggatccttatgaaaagggtggtgagcagcagaaacgtagcggacagaagcaaaaacagaccaaaaataaaaaacaaaaacagaagaatagtaagaatactagaagttgttaaaagaggtactttcgttgcttcggaagtaggagaattttggcccctttaattaatttatttgttatatgatttatgttattttgaaatgatctgtaccatcatattattgagttatagcagattttgatttgctattgatgtatttttctttacgatttttcaaggaagagaaaacactgaagatgaatatttgtgatatatatcacaatagtgaatacttgtgattctattttaaggcaaatagcgtctaaaccttctaa

SEQ ID NO: 244216 - DNA, 2060 bp, Cannabis indica
tacttgtgagtagatctaagatcttggtaaaataatttccaacaatcacttattccaaaaattaaaacatgcacctattcaactatcaaactaataacatgcttcctactagacttgtcttaaaacatactaataaaataactactaaaacaataaaggcttactgaaccgtgagtcaagcttatctctgatgatgattgtacttgtcgtgacaatcttcggaagataacctggcgactctactaccaaattgtaacaccctactaggataggcatgtttatatgattttatattaacagtgcaatctgttgctaaccaacaagtttattgaaaatcgtgattaattaaaactttaatggattactcttaaattttaaagtaaataatatatataaacgggatcccttatttaaaatatttataattgagttataaaatatttgttatgaaagttgtcccctagcgactatacaaaatagaacctgttgtcgcaaatatcgtacgtctaggtctaactactgtcccgacatgtacaatcttcatccactcggactcattgttgtttagccttagcttttcccttacctatacatgtaaacaataactgtgagttggcagactcagtaagaaaagcaaaccatattcataaatataactcgaattacaattaggtacccatacacccaagcataatcctatccttgcgtcctacgtaatactgagtctagaacgttcatacaatagtactattaaccgtaatatcaccctatacttggtactctagtcgtaccgatgtgatagcgtcaaacagtacttatgcctaacatacattcatcggtatctaatataactctatgtatattgataccgctattctaatgtaatctaacatgcacgctaaacatgtattcacatatacatatcattatactaatcttacctcattttcgaattgatgtgccggtcaacctgagtggaaccgctgcttgacgatttacaggcccctaagtcacaatatttataaaactgatgagtgacacgctaaatcacttttcggagacttaaaataaaaataaaaaattgccctataaatggataacatggcaataccctaaacattgcaaaaacgcaaaaatctagggtgccctaaactgcctcaactagtagaccggttcccaaccaaaaaattggttttgtggggtcttcttagggatgaaccaaaattttggtccctacaggtccaaactaaaggggtcgaccagtttagtgcaagaaccctaaaaaccttctaaactattcaaatcaacccaaaccatccagagcacctaaacaagtcacaaggaacataattcaagcaactaaaacaggtataagccttagaaatcaattctaccagtaaagggaaaactttgagcttaaaagctcaaaccctgcttaagttccacaacaagatgcaaattcaacctaaaatcactcatgccagtacacaaacaccttagaaaacagatttaaacttaaaaaatttgcacagtggccctaactcagaattcatgcatgaaaacctaacttcaaacttgaaatacaaatagaaaaagggagagaagctaaccttgagctaacccttacttaatctatagaaaccttagttgaatccttgattttctagcttgaagttgaagcaaaaagtctagtttttttcttgcctagggtgaggccgaacaagggaaagagagagaaagaggtgttgaatttttctagcttagtcaattatggttaaatgaaaaactaacttaataaattcactatattcagcttattactattaataagcttacaaaaataaataagtaaattcccactaactaaaatagtactaatctagggtaaaagactaaattaccctttcttaattaggaagcaactaacataattagggataaaatggtcatataccactaacccgataactctcgacattcccaatgcctattaaacttgccccgctattacctaaaaatccaaaacatatgagaatgtgattctatcgactaatatcgtg

SEQ ID NO: 244217 - DNA, 2143 bp, Cannabis indica
attctgtaactacggaaaaactgttttcagtaccagtttcattattccgcatttaattaatcacttaattaaataatcaaactaggaatattaaaatacggaatttcacagaatactgaaagatagtgggttggattcaagttattaaaatctgaacttccattccggagctcccgaagtcaacttgggcgcaaggctaaggccccctcccaggtcgactgctatgactcgagtctactcgactttgttacatcatccttctagccacatgtcaaacatttatgttcatgtcaacagaaaaaattttcgggttaacatttgtcccacaagtcaacttcatacgtgtgtagagttgacttgatgacgtgaaccgagcccatttctcttgaatctaccagatgggcatcaattttgacaatcttaaacaattttttctattcttgaagcattaacaataaaattaggactttgaattctcttgctttgtccttgggaattttcaaaaattaattaacagagagaaagatgaaaaacttatctttttcttcacttatcatcatttatctttttgtttaaaaaaaatttaaaattttcaactactagaaaagttacaattagcaacacttttttttttaactaatcaaaattaaaagacaacacttataaaattgttgcctcctagagtgttgccaaaaatattagcattagacaacacttaaaaaagtgtgaccatatcttattactttaaaaacccatagggcaacatttcctttaaaagtgttgccatatataattttcaaaatttaaacaaataaaattaattattattttctaattcaatttatattttaattatatcaaatggtattatcgaattcaatcttcctttctgtaaattgagaaacaaatcgaaaatcttttgtttacattaaaatgcaagttcacaaccatgttttaacagtacaaaaattcaaacatattcttagtctattaaatgcatagcacaccgagaaaaaaattattttgctaataaaactattatttttctttgtaagcctccattaattccatgttattctacgataaatcagtgaagttctccaatcaataatatatatatatgtgtgtgtgtttgtgtgagaaaaactgcaataagttatatatcaatgataatttatgttttttattatatgaattgtatatataattgcacagtagttcaggcaacagtacttacaatattgtttttagaattcttcaagcaacacttatgcacgcataaatagttagaaatcaaaattattgtaaagttacaagtaattgaaataaaatttttcaaataaaagcacactaatttaaatgtataagcttcaaaagttcaataaacatacatagtattcaaaattctgagtaaattaataattaaactcaaaagatacattaactaattattataatgcatatatataattttacgtaattatagtcgttattataccattaaagtataagtgaagaaaaatttagcacacttaaaagacaattttgaaagtatttgattaaaaatatcatgatatatatatatttatatataaaatagatgaatagaaactaaaaattaagaaaaaagaataaaaaattaggtaaaaagataaccattatagctagagacaagctttaatcgtctccattaatgttttttgaggataccttcatttatgtatgcttgttttaatttgcagaaagtgcaatagtatttttctttttgtggtgcctagttagtatatataagtaaaagaagttacaatcgactaatttttcttaaatcagtttgttttataattaaatatggcatgcgttactctttatttatttatttatttttatatataaaaaataatatttgacaacagttatatatgagtgttactattgtttattattaattaattttaaaatacaaatttaaaaacatatgaattatttagcaacactttatttttaagtgtgttcaatcacaaaaagaaataaattgacaacacttttttattaagtgttgttgattaggtgttaccaaatatgatttgtcccaaattagaccctaagacactaaagtgtatctttcttggttattctcgtcttc

SEQ ID NO: 244218 - DNA, 1339 bp, Cannabis indica
cctggattagtggcatgggaattcatctgcagacccaaatctgctagtggcctaggatttcgaaatatacaacaatggaacattgcagcattgggaagatacgtttgggacatagcaagcaagaaggattgtctttttgtcaaatggatacacatggtgtacctgaaagatcagaactggtggagttatgctgcttcacaagactgtagttgggcatggaaaaaaattgttgctgtgaaggataagtttcagcaaagaggagacatggaaagctttgtacaacagagttatcgagtcaagcaagggtacctagatcttttcccagagcatcctaaactcccatggtgtaatctggtttgggacagactaatcattcccaaacatagatttattctatggttagttctttggaaaagactgaacacgaaggaaagagtaagtaagatcagtccaaacatagatactacttgtgttctgtgtggcaaaggagatgaaaacatcgagcatctgttttttcagtgcgaatatagcttaatgcttgcaagaaattaaagtgtccctgcaatggaacacactagcaaatgatgttctaaagctgctgcaatcctgtcataaaacaagaaattttctgcaactaggaagagcatggtgaatacaattgtggctagtcttgtgtatcacatatggaaggcaagaaatgaaatactttggaaacagcaaagggggctcacaagcagaacagtgcagcaaaccaagcagcttagcaagctgagaattcaagcttggccgcctaagaaagcaaggggggaagacatagaatggatgctagaagcttaattgtacatgattatattaaagggattagattgttgtaatcagtgttaaaaatacgatgtaagctgtgatgtaagtttggtgttgagcaataaaatcctcttattcatcaaaaaaaaagaaaagtaaaacacaggcaatgaacttgagaggaaactatttataagaaaacaacatactggacgaggtgcaactgagatggttaaaaatctgaaaccattcacatccacatgcaatgacaacaaccctctttgggtttctccacaggcaatgcacacctgtgtacatagaaatacaccagtaagattcaaatcaatgacatcctgccactggaatttcttcattctcatcattaagttgtccctagtgattcctaaaacaccgaaaaaacatcaagagatcgaatgtggaatgaaaacaacataagaaaacaccagtaagtctcgcgcactcaaaaatatttaacggtgtatgagatacaaagcagaaattggaaagaacaata

SEQ ID NO: 244219 - DNA, 1116 bp, Cannabis indica
gccatcacgcatgaaaagcggacaaccacttcagccacttttcatttacgtaaccgcctatggcaatcaacgacaaactcaaaccaccttgaatctaccgaaatcttctcaacggttaagcttcggtccttcgtcatcggtgatggagcttcggtccttcgttgctttgataacaattttatttggtgttatgaataatgtgtggttggcagatatatggttataggatgtcattgtgggcagagcatatggaaactattgacgattgcttcacacaaccagagagcattgattgtgtgaaaaaagtaagatcaatgggggaaatgaactggaaacagtttgctgtagaagaggtaacagagatgagaggacatcttctcaagtacccagttgaagttgatcgaaaaagcaagggtcatcggttcgcggttctgtgcgttgtggcggtggaggagatggtgttcagtggatcggaggatacgacgattcggatttggcgtggagaggaagggaactgtttacatgagtgttaatacagtgttatattaatacagtgttattttcaatttaggttaatttatgaaaatatttcaaaaataagtaaaaataaaaaaaaaattataaaaacacgattatacagaatttttaatatttttacgaattttaagattctatttacataaaatatggttttttgatgtatttttatattatactcttgttatttttttttattatttgtatattaattttttatatttgcatgttgttaatatgttgttatttttttttgttttttttttttgtagtttttgtgttatttttataaacaccatacaaatgtataaaaaaaaattctacttttatttttgtgattaaaaaatttaaaaacaaaagtgttcccaaacatcacctttggtttttaattttttgatcaccaaaataaaataaaatttgtgtttttaaaattttgtttttaataaacaaaaatgtgttctataactattattgattggatttttagccaaccgacgcggagtcgtaataaatgagatttaaaccaaaatcacaataataaatgtagttaataacaccggaattcgcaataaatgtaaa

SEQ ID NO: 244220 - DNA, 1355 bp, Cannabis indica
attttaagattaaaccttccaaaaaaacaatgtaatgtttaacattaccatttctttgctaacattaacctattccaaacactcctttagtgtaatttaattaatatatcagatcatatttattttattttaataaatattataaagaatcgttaattaagataccttaatactctatatagaacaaaaaatgctcgaaaaaaaatggtcaaattaatagtgaaaatagagtttgtggtacctaattaatgtgaacaaggaataaaaagcatataattatctcttccttatctttaataatgaaaaaagttgagaggccaataatagagaaagtgatctgtttgcccattgtgtttgcatagtacggaatgaagtgactatcggaggaaaactaacgcaattttaattttaataagcaacgtgatttaaattttcatcatcatcataaaaacattattattattactattattattattattattattattattattatctcagtagttatataatatataattggctttttttcggctcttgtattttctatattccttcagctgcactttctttttgtgatttgatctatcatgggcaaccctcagattttcaaatttcatgcattttttctcatatgaaaccaagaccataatttggaccgtaaatatactgatatttaattaaaactattttaaaaagaaaataataataattatttgaaaagtagcttattactttaatactaattaatttagggagcaaactctctctctcaagggttaatagtgagaaaaattaagattttttgttcctaaattcatagctattggctaggcttgtgggccatccttgggtctagatgtggctaattagtactcaaggttgcattttgctactataattccatttttacttctataattagtcttgtggttttgagtgttttaattttctctgtgtgcataatttttttttttgttttgttttgttgttaattcttctttgttcttcgattcgatgattcgccaagtattctctgcgactaaatgagttgttagtagtgtactttacgtactttacacaatagttgagtgctcaagtattctactattgtattttctaagcggtggatgaaacagaatataggtattctgaaggttaattgtgatgctaaaatctttctcatgtgatttattttaatttttttgtcaaattaacgatctagaaattaggaggttgattatttaactcatttttctaattttaattctgatcgagtcttcaaggaaaagatatctcgtttagattggaggctattattttagatgatgtcattaatgaaattctattat

SEQ ID NO: 244221 - DNA, 1413 bp, Cannabis indica
gggagcaataagtccaccatctgggaaagatacaaaactaacacaatctttgataaaaaaaaatgttagttcctcaagagatatcccatcggacattgagactgcttcaaaatagtgactggatccaatatgaagagttttgagattgggaaataagtccaaatggaaggatgtgaaggatgacccacaattccgcaaatgaagctcccaaagagtctttccgatgagtggagtgagagtggcaggcaaacatcctttagaagtgaaacaagaatttcttggctttattgcctcatacaatgacttcgaattctccaaatttataattctcatttgtgtgacacatggtaatcttggaagacttaataatgggcgctccttatatccatcaactctaatacttattaatgaaggaagggagcaaggcaaatctccgacgaagttaggacaatcattgatagtaagtgttttgagcttcccatatgttgttgcctcttcggtttgcattgaatgccattgctcccacaataatatcctgctgaagcttaatgtttctaatgatgaaaatggttttctcgtagaactattcccataaaactcagcacctactatcactaccgaatggaatcctgaaatgtaaagatattttagtacagagttgccaaagggtggcaaataggagcaatgcttacacccaactagacttatgctagcaatacccaactagacttatgctagcaatgttgctaaaggaatcattcccaacccaatttggaaattttgagtctgggtaattaagaattttgagttgcttcaacattgtgttaggtgaaagcatttcaagaacaccctctccacgttttggttcaaaaccaacataattaatactccatatgaaattcaattcctcaagttgatgcttttctagtacattgacttgatctgatgcttttgtaatattggccacattttctaacttctcaatggaaagctctccgtgtagagtttgaagttctgacaactcttctattttagcaccactatccttccctgcaacaaaagttgtcaacatttggagatttttcagtttacttaattgacttggcatctcttctagcataatctcactaataataagatgtctcaaattaatgagacgatgcatatctttaagcagcatttgaagatgatgacagttttctaacttcaatgtttgtaaattgtacaaaatagttacagattcgggcagcgacgccatcttggtgttagaaagatctaaataacgaagatgttttagttcaccaattgagttagataactcaatcatatcaagatcacgaaaagatagaactctcaaacatttcaacatcaatagcagattctgcagtatttcctcagaaatacttatttctg

SEQ ID NO: 244222 - DNA, 1801 bp, Cannabis indica
accacatatagttttacataaaaatatggtataaaatacaattcaatataatacaatacaatacgacctaatacggcgttccaaacgagccctttaagagtttattaatatcattgttgagtttcttttgttttttaaatttatttttctatatacataataattatttttttagctaagtgaacattaatgaaataggtcttccattagagagaagtggagattctttgctccaaattgtttttagaggggcataagaaattggcaatcgttagtgattatcttctcttccttctcactagacaaaactcgtcattgtttctcttttcttatattctttccaataacagcataaatatctaaagttttaaatttgtaaacggtataaattcaatatttattttagcggtataagtatcaaatatttatatatttgtaatgttttttcaaatttcgttagtaaaaactctattttaaatttattacacattactgtaccagatctcaaagtaggaggttaagagttcataccttatttgagattactgttacatagcctattggcctccatgaattgagcaacatcactaatgatattctcttgttgtagtcccatcaaaccaagtctcattttagctgaatgagatttcatcccctgtctagagttactattgcattgcttattcgatcctagaatatacgcgaagtctttacatatatccggttgctgtttaatagctctaagagatgagttagaagataatggctgtcttaaatcacactgtgaatcaacaccttcatcacatccccatctcctcattctcttcatcattgaaatccattggttcaatacgaagtacagaatctatggatttagtttttttaacatcagcagtagatgttggtcctctcttcttcaatttccttgtcgccaatctctgctttcctaacattttttacctcgtttttcgctatggcaccagctaggagctgcaagagcttaaacgaaagagaaacttaaggtattattcttttatacactatactctagtgtgtgtgattttgatttggatcacatatgtagatatacatgtagtgtagatgttgtgtataatttgattatgcatgaatggaccgatatgaaataacatcttttattacacatgtcgtttaccatgaaagaattattcataacaccatgatgatcattagtaaataagtctaaatcctaagtatacatgaactcttatttgtgttcattgagttctttgattcatttgttaaagtttcttagagaagatgattcttacaacttctgttttgagatcttaataacatgaatgactgggaacatgttatacaatattagttcccttagggtccgtttagtacgcaggactggactagattagacaggctaatttgtccagtccaatgtttgggcatgttggaagtctggataactaatataactaatctcatctgtatgagattatttgtcccatccagcagagtgagattaataatcccatgcaggtgagtgagattatttttattgttttttttttaattttgattttgttaatatattttaaatttaataagagtttaaatgaaagaattattataaatttatttataattttttttattaaaaacttattcattagaattattaaaaatgtataattttgaattatcatacataagcttttaaattttaaaataatattaattaaataatagttacttaaattgatgggaaatttgcggccaaagtccccaaaaaagtcacgttgat

SEQ ID NO: 244223 - DNA, 969 bp, Cannabis indica
aaaaaaatcatttagggtaatagtttaaaaccctaataataatagtctttctctttcctttttcaatagtcacaataataatttcagatccatatttttgttcctcttctcgcacctctctgtaaaaccagccctcatccctttcagatctatattaacccagccttcctccattgaagacgacgacctccaaaggcgcaaggcgagctccaccgacggacaaggaatacttccaaacttcaagcccattgtttgcctcaaaggacttcgaagtagagtttgaaccccaagtcgtctccctctattctatcgccataggtccacggttgacgtctccgccacccaaacgcacccaaaacgctggcttaatcggtacatttattttttttccatctgattatttttctctccctctctctccgtgtctctagtctatgcagcgggacggcatttgaaggtcgtcgtgggtctgggtgcacgatcgacgttcgtgttcgaagggcttcggttcgacgggcttggttttcgatagcttggtgttcgaagttctggttgacagtggctttggatatgaactttttttttttgttgtttaggtttattttattaacaggtgtacattgtgatactttgaaacatatttagttttttttttttttgtgtctttgtattttttaatagaaactgatatgaatttttattaaggctcatataatttgtaatttaagtttaaaattatgtttatagattgtattacttttttgttaataattttaataattattaataataatattttgtattttgttattttgttcatagcttttattattttaattgaaacaattgtaataatgtttacatttaataaattaaaattattatggttatatttaattgtatttatatataataaattaaattattttttataatatataaaatctgaattaaaagaattaaatatta

SEQ ID NO: 244224 - DNA, 985 bp, Cannabis indica
ttggagcctcgaatacattagagatggagtagtactccctctcaaggactattacaaagtgttctggaattacctcgaaattgccccttttcagctgattccaaactcttatagaattttggccagcttgaaagttttataccaaatcttacagtgggagtgtccaaccccactagaaattttgtatttctattctctgaaggcctgtcgcgcaaagaagcgaggattaggtggtttttattatctcgagacccacacgaatgatcaaagtatcatcatgaggctgcccaataagactgaattctgaaataacttcttctagatgtttggcctcgccccaatcaatacaaccgcatttcgcatcatatgtagtattgcctcgtctcaaaaacatggttttgagtttttaacttgtttattgtagacatttacttattttgtttgttgtattgatagcggttacgaaaaggcctattccaactcccaagatggaaaaacgacacaaaatcctttttggtcttccttttggattgcgatcagctgacttcttattgaatgggatcaatttaaagacctgcagtcttctcagcaccgactaggctacctacgattttaaaaacccaaaatattctaaatggcagcaggttccagtccctgctgacggaaaaagataaggattatgtggcttgtacccatttcttgaggaatatatcccctcggaaagctaaagaagatgcatcacgaggtaattattgtggaatgtctcccacagtacttagggccgagcgtacttccttagttaagcttaaggatagtcaatataatttttaaatctggaactgtgttgatcgcatagcccataagtttgatagttggtatcacgagtgtcatgtccaattaagttttaaaagttcttattttggaatcgcccaacaatatggtactgactttcatagggcgaaccttcaagattgggatttgtctc

SEQ ID NO: 244225 - DNA, 1340 bp, Cannabis indica
agatcctggtaaaataaattccaacaataataacacaaaataagtgggcaaagttaaatgtgcaacttactgaggccaactcctaaagaccgacagaagagagcctttgcagcttaccattaccaagcttctgcagctcgttatccacagtaggaaaggctctaacaagacacttatgaactacttccatggctctctaccccatggttgagcctactccctgactaggattctgagcattcctgcccgaaggctgatcccttctcactagagggtcatctattatgggtttcctaggtggcacaggcccaggaggagaaggaggaagagatgactccgcggcgtcaccagaatgggtggtttgggccaccttggcccttggacgacccgaaggctcatcggaaggtccaccagctaaacatctgaatctagaagacatatctgcaagaagaaagtaacaaagtcagaatacaagttacaaatattcaatgcaagacaagaatataaaagatggtgcaatcaacgatcgaataccatcatccttagaagatgaatcatctgaatcttcaaagttgccttgcccttgcctctagatgaaggcaaggggcaagtaggcctagtgaaaccctatgctccaagcctgatctgtagagtagcatccccaacggtgccctcgcaagctaagtgttggcagagggccctctctctcctctccaaaccctgggctatttgggatagaggcacatcatcatctatctaaggagcatgcccaactctaggaggctgaattcctaagcaactgggctccatctacaccaccaaatgggcccttagcccccacaactttagaatcagaaggatacaggtcgtacttctgaaagttagcaacactggacaaacttactatgttcctttttgctacggggaggaacaagatgtggtttgctctatccctcatttatagggtagggatggagcgcttgtaggtaggcactcgttggaagcaatgatgtcgaatctctagacatcccaagcaatgaagtaattctgggcatatccactaactttgaatagaggcatattgttggtgtcacccaaccactggaggccaacttgactaaagtagaagtaccccatctagttctgctttggagcagacttcaaatcaaaaatattatccaatctcgtacggagtaggctgaggccagcctagctccgcatagagaacaaacattgccgaaaggtattttataatttttagggtgatttgtgtgttgggaatattttaccaagatctagatttactaagaagtatgttgaattaacatcctaaatatgaa

SEQ ID NO: 244226 - DNA, 3148 bp, Cannabis indica
aatctccagaattgagaaattataactctaatactcatttctaaatattggggttcacaaataaacaaattcataaataattataaaattaacagaaattagtgctaattgcctttactaatccaacttactaaagcggtcattacattattgctataatcgtggaactgattcccgaagaggtatttccaagttggtgagagagatatctcgtcaaccagctagtcacgtgggaactagtgtctaaggtaaaaccctgaattctcgaactactaatgctacacctggtaaccgagcacgcactaggcaaacaccaggcatggagagctcccagaggagaagtaccttcaatttagagcctgaaaggacttaagctcaagggcgccaacaattgggtcatccacttgatgttgaatgacctcgcaacaatgagagaaccatcaagcctcctccaacaagtcatcctcaacgttctcaatagattaggcctcgagaccctgcaaggggaaatagacttgctactctaactgaaggaagtagtgggagacgctacttcaaaactagcacaaaattcggtgagtaaggactaatgagccacttcatacttggaagtactttcgagatgaaagaggggagtcatgtcgttactttgtccgtggccctgatggataatagtatgcgtatttccctcgagtacatggagaggaattgaatctcagtgacaaattcaattgtctttgcacctgtgatcctgtcaaagactacttcgagggaagtagcctctacaatgctccaaatgaacactctcatagcaggtcatctcgagacaattttgagtacattctggaggcctcatcagagttgccttcatgaccccgtggttaggagaaaactataagacctaggtcgaccgaagtacatgatcgacgtggaagacaaagagacctgtgtgacctcttgaacaaaagaagaacgatggatgtggaaacttctagagaagaccctatctaggtaattaaagctccatctcggatgcagaccaccattcacggggtcaattaggcagagttcgacaccttagctgctttagtgaaggggatcatggctaattcagagaggttatgagcctcgcttcactacctactccattctctgtgctccaagagaggagatatatacgaccactcagttaatggtgttgtatcgcaaacttcttcctttcaaagaatcaggaaagagggacatgaataagttctgtcgttaccacaacaactatggtcatgaaaccaatgagtgtaactagttgcgggacgagataaaatttctcattagacataaacatgctactctttagcggtatgtatgacctgaagatacaactggtggcaatgcttcactccagcctgcaccagttgcaggtaggttggagattgtgattggaggccctcactcaactgcgaattcaaggagagccttagaaaggtatactagagcactctgacatgaaccaagagccaaagtcctagaggtagcagagagacctccaaagtctcaacaatacaaaagtgaattaatcacatttggagaattagactcttattatcatagctaccctcacaacaatccactagttgtcgaggtccaaatagctaatattatggtggctagggtaatgatcgacgacagagcatcatcaaacatcctattcaagcaagccctactcaggatgagcttaactttagaagacttggaatcatgtgaataactcatgtatggtttcaatggagctgacatcccaccatgtggcaagatcaagttggccactcatagtcggcactgcccccaaggtagaccaccatcatggtcgcattcatagtgttggacgtgaacttgccctttataacccttaagctatctcctcattgtaccacctatccgtcaagttcccaatagtggctagtatcggttttctccttggcaatcaaggaacttcccgcaagtgctacaacacattattgtcactcgccaagaagacctcctctgctgctacaactctagaagaaatgaacaagaccttccctactattataacaccaggtgcgacgagtaaggcctctcctggaaaagatggagagacgatgaaaacctctagagaaggcaaagacgacacctaaagccacttgaaggtgtgcccaagatggggacaacattgaccctcgtattggggaatcttctcgggagttagtcctaccgaggaacttagagaacttccccttaacacatcgaacctgatcaaggttatcaagaatggaacaaacctgaggtttgagtgagatgctcatggcttgccttaggagaaatcaagacatttttgcttggtcgcacgaggacatgattgggatcaactcccaggtcatctatcatggtctcaacatagacaaagttaactttaatcctgtaaacaaaaacacatgctccttgacaaagagcgctccaaagctctcaaggaagaagttgaaagactacaggagaacaacttcatcagagaagctttctacccagtttgggtatccaaccttatactggtgcctaagcctaatgaaaagtggaggacctacatcgacttcaccgacctcaacaaagcatgccctaaagattgtttcccactaccaagaatttatcaactagtggacgcgacggccggccatgaactcttcacattcatggatgcttattctggtttaaaccagattagtatgcacacactagacaaagaacacacgagagtttttgaactaacatcgggctttattgctacaaaataatgccttttggtcccaagaatgcgggtgcaacttatcaaagactagtcaattgtatgttccataacttaattgggaacaatatggaagtctgcatcgatgatatgctggttaagttgaaaaaatccaaagaccacatcaaagatctagaggagtgcttcaacatccagcaagaatatcaaatgaagctcaaccctctaaaatgggccttcgacgtccaatcaagaaagtttcttagattcattgttaactctagaggtattaaagtgaatccaaaaagatcaaggcctgcaagacatgaagccactgtcgtagataaaagatgt

SEQ ID NO: 244227 - DNA, 1290 bp, Cannabis indica
actcttatgatcagtgtatatcttatatttctcgccatataaataattttgccaaatagtctttagcgtaaatactactgctgcgagttctaggtcgtgagtagggtacgtttgctcgtactcctttaactaccgagaagaatatgctattacctttctagcttgcataagaacacaacccacaccctatcttgaggcatcgcaataaacaacaaacttcctaactggtttataatgtctcaaattgctttctctgatgtaactttggggttgcagtcacatttggcgacagaaaccttttgagcgtactgagccatatatggcttgcctcaactaatagtaccatacccatgcctgactggaggtccagtagacgccaacggtaccgatggtctcctctcaactgctgccattacaggatcagtttctgaacaacttcaccacccagcaaaaaggcaggggaagtagttttcaaacaaaaaatctagccctcgtagcagcactggcgtaggagtctcgagctggatagagttgttaatcctaacgaccattttgagttagtcgtcgtagccacaccgggtcgtagcttctttttctggccctaacaccccttgaacttcatcgtatctgcgtggttacgtgttagtgaacgacaagaaatgcaggtctgaagatacaggtggccattcatccttacgggacgttggctggctagatctgagcttttaaggacagatattggtgcaacaggtgttctaagaccgcatgcattcgtcctttatatttttctcgtgtgaatgaaggcatcgggtcttactctgggcaacgcctccgatctgcacatttttggcctttgaccggacctcagtaggagatcaggaggtcttccttcttttcttgcacgaattctcatctgacgggcttgcatcggtaaccgccgtgcatatctctttcttcctagaagctacaaagaaaacaacaaaaatttttaccgagtttttcggtaactaaatatttttagagcttaagaaagtaataatagtgtaaatagtgaaataacaaacaagagatttttacgtggttcaggcgttaactatccttagtccacgagtctattttattaggctctttggccaataactatttatactaatatggatacaatggactaagactccttctcgccatgttctcttgaagaagagaaagcttagtagaaatattttggagttaatagtagggttacaaactgacgtgtgtttgcttgtgatgatgaagaatgggtcttcc

SEQ ID NO: 244228 - DNA, 1174 bp, Cannabis indica
agttctaacaaaatacaatcaaaaaactgaaaagtaaaatatagtcagtcagatacaacaataaacgacatagaaataaagaccttcacgacttctacagtctcagcaaaatgcccacttcctctattttgaccaaaaatatagtctgttttgagaataatatagtctgttttgaccaaaaatgattttatcattgataaaaaaatagtcaagaatttattttattattcttgatcttttctttttctcccacccccaaaaggaattccctttttatactacctcctctatttatatcattcttttacccttacgtgtcaacgtaacaagattttactttgacatatgtttattactttttatgaggtatctttatatattttgacaaatgtcctttattttataagtgtccatattttatatctcttttatacataatgtgtagctttcttataggatatttaagtcattagtcttatatatgttctttatcttgaatgtaagtcatctattttggatataccttccatcttgaatgtaagtcattattttgtttatgtttatgtcatccaggctatgtcatcccatgaaaagtatgtcacctcgccagccaaccaagatacgccagttgatctagatatgtcgaccgaccgagatatgccagccgaccgagataagtcatctcttctgagttatctcatcctatctgagatatgtcatctattttagtatctaactcttccacctatatgcttatttcacctaggatatatcttttatatatatatagtatttcttataaaatgggccttttctgacttttggcattttttataataatttgagcttgctgatttttctcccaaacataatctacactgcaaacaaaaaaaaaaagtaaattctattacctctatccataaaataaaaggcaattccatcatacgacataaattaaatcactacttcgacaattctcaaaaaaaacatcttattgtagtgtttcagcttagacaatgagaacttcaatggtgtcaatgaatggtttgaagatgaagagagcaagttttgaatacgagtattttgggggttcagctcggtttctaagaagaaaaggatgcgatatataaattacttcaattatataaaatattttttatttgaaattattaat

SEQ ID NO: 244229 - DNA, 1352 bp, Cannabis indica
aataagttcaaaatataaatactctaataataagagttcattacataaacatcccaaataaaataaaacatcttaaatagtaacagacctagaattatcattatgtgaaggcttaattgttattaaaaaaaataggttttctttacttattttatttaattttgtaggagcttttttaattttgtgtgctttaattatcaaatgaaaaaatatatatttaatttttttaatgtaatttttttttgctatagcccccacacccttaagagtgtatccgttatcttaaagtcaattaataaacacaacatgacaaagaaaaatgactctaattgtagatatctccatcctcattatggaatcaatgttgctattaatgggatctttgttaaaaaaaatctacaatatccaagtgtgtaatatgcaagagttctttcatatgcaaatttcacttctattttctccttccctttcacaaatgattgataaatatcaaaaatatatttttttcgtacgataggtacgtgaccagtactgttttttcttactacatctaaaacataagtttttcagaatttttataattattattttgagtatcttttctctttttctcaatagttgtgctatatattggagtataagagttgctattctgactattacaatgtcaaatattatttcgaccgcaatggcaattttgattatagccacgaccacttctacgattatgattatggccaccaccacaaccactattataattgttagatattgtagcattcacttaagggagtgggacaaacctagttgagcgaaattcatgatctttcattaaaattttattattttgttaagttactaaaagacatgaaatcaattcttaatattttttacttttatttctctatattattactgcaagagtacatttgaggcatgaaaagttgtgtatgttgtttctatatttcatagtcagtaactttttttcacacaaaaataactttgaagtaatacagagttataatcacttattgattttaaatcttgtactctcaggtgcaacctttcattctaagcctttggcaatataataattttttggttgatcatatattttcttttaattttttttcctaaagtcataagaggatcttttatcattaaatattcagactttaacctcttagagcagcttcaatgctcgttgctcatcaagctattgttagtctaagaaaagcaatcttgattgcttgaccactaaagaaaattgtgtgggctactgcaattgctacggtcaaacaatggtagttgaattatttttttatttttttttataatttttctatcaaaaa

SEQ ID NO: 244230 - DNA, 1409 bp, Cannabis indica
aatataattaagtattattatctttaaaaattaaacttagacatttatctataagtgaaagttacactgtaaattattttaattaaaatatatttaaaaaattattttctacgagcaaaactacacatacaatagactatttgacatttgtgtacgtatattataattaattacagcaagaaatatctgaaaataataactatatacacgtagaaagcctgaaatagaatatagttgcagcacaaaatgactcccctatatatagacatgtatgatgtatatatatatatatagccgcttaaataatacaccaaaatagtcatcaccattgccatgcagtcattaaattatatgaattttggactgtttaatgatgacaatgaataaaactttatggttctcatcatcatattatttggacctacatgacgaaatttattatattaatatttctttttggcataattaaaatttgatagtagacaatagtcttgtttagctgagtttaggtgaccaagtggtacatgttggtgtgtattatagtaatatgctgcctagttcatatgataagtgatattttcataagtatcttcaatattgtataaattaaaatagaacttggtattagtcatttattttggtctaagaatataatctcacaatcagatttgaagaactataagaattagtatatagtcatagccatatgttacagcgcaaaaaattatgtatatttctagtagaatgttaaaagttagaatgctcttttagggggagaacttgatgttagctttccaccacccctagtaccttggtgctaaatgagttactactagtcaatagaactagtaggcaggcatataaggaccacgatgtctctatgagtgaagtactcatggatatatattatcaagtcgatttggtagtgtgtatagaaaggctgccagaagttcactggtactttctgttagcttttcgatatgctacttgcatagaacatgacctaaatctttatgagacgttgtggtgccttgaccttacgagtctcaaatgaaatgccacatgtcgtcattcgtggggctaattaatttgcatacgtgcataagacagatgtaccatactagaaagagatagaggtctaatgtattctactagtctggttggttcacttgagggcctgcccacatgcatggaaacatggttccttgagaattggaccatgaatgtatgggagtccttgagccataagggagattgttcaaagtatcgaatggggcatgactatacattggcatgtcaactaattataaggaaatttgaaaaaatatgcataaaatatctacatttttttccctaatttaatatattttaaaatttaaaaaatatgatcactttacaaaaaatccaaa

SEQ ID NO: 244231 - DNA, 1337 bp, Cannabis indica
atggtatcagagcgggaaaggaaagctttcccctgatccctttctctttctctttcgctgccatagctgtgcttcttctccggcgtctttcccgtgtgactatttcagtctcggtgttcatctttcatctgtcctccccttccttcttcgatgtcgaatacaccagaggatggaagtgatatcgctgaagctgggattggaaattctactaatccaatcatacaaaactagcaacagattgtccaacagagaatcccctcgaagatccaagcgatccatactacctgcaccatggagataatccaggtaacatcttagtttctcaattgctcactggataagaacaaactaggattcttggaaggtactatccctaaacctatgcctaatgatgttgttatgtataatgcatggcttagggacaataacatagtaatttcttggattttaaactctgtttctaaagagatttcttccagcattttatgtgatgaatctgctgctgccatatggattaatctgaaaattcgttttcaacaaagaaatggtcctcacatatacaacttgaggaaaaatttgatgaatctaaggcaggacaatcagactatcagcatgtattttaccaagcttaaaaacatatgggaataactttcgaattacagacctacttgcgtttgcaatggttgcacctgtggtggtgtcaagaaatttcaagaacaccaccatatggagtacatcatgtctttcctgatgggtctttcagactcttttacccaatttcgcagcagtttattgctaatggacccgctacctgaagttaacagggtctttcatcttgtttcccaagaagaaaaaccagaaagttaacaccaatactgctgctgaacctaacctgagtatggctttgcctttcaaggagacaaaaccagcaacaacaacaaaaaggatactgcaggaaacaaatcgtatcatcccaagaaaaatagaccgttttgcacccattgcaacatacttagacacaccattgagaagtgctataaaattcatggttatccaccaggctacaacaagaataacaactcaaaggatgctgcagcaaatcaaattcagaccagtactgacaacaataaaacgactgtggacagcaaagctctcttgcctcagttcactgctacacagtaccaatagcttttgaattttcttgcaacacaacaacctggtatggctaatattgatactggaaacaccacaggtaatacaggtatcgtgctttcatctctgtctaattttcccataaaaggctcctgtattcttgacacaggagctactagacatat

SEQ ID NO: 244232 - DNA, 1671 bp, Cannabis indica
aacaatgaatcaagttgtggtggaattgaaggagtgtttagcactagagattactccagagaaggataaccttttcacaaaagatgatcttatcagaaagatgactcttaatatagacacacatgtaaaccctttaccaaggtaaagtgactttgcaattcatggatttttaatttttttaactttgtagaaagatggagtgatcatggagtaataaaagaagggacagattccttttccattcatttcttttaaacaaattgtaatttttttttaacaaattgtaattaataaatgttgatgtgagaatattttatatctttcacggtcaattttatcatcaagtgtaatgtcggaacacaatattaaactaaaataaataaaacaaacttgatataataagttttaattttacgtacaagactcaaaaccagaagtcatccacaagtttgtttagtgaaagctaatttttcttcacaaactcttccataggatccaacctcgaactctcgaactcatggataaaactgatgcttaatgttaacacctaactgttttcagttaatatagttagttgttatgtctgttagagtagttgttagttacttttcttggtcttcttgtattcttgtaacaaactctctgttattataaataaagaatttagtctaattcgtttgattagcttttgctgctaatctcaattagccttcatgttactttgttttggtattaatcacttcttgacttatatacgtccatgtcgtcttcaacctctgatcctgcctctgcaataatggccaatgcctcttcctctgctgctcctacaaatcctctctggaatcctttttccaactcccttacttcgtcccttaccctcaaattagatcgtctaaatttcttatcttggaaatctcaagttgtcccgactgtcataggtcatgatcttgatgatattctcttcaccggagctcctcatccatagaatcttgtcaatggcaaccccaaccttgagtacttacaatggaggaaaaaggatcaactcttgttatcctggcttggatctcctatgtctgagagcattcttgcctctgttgctaattacaactcctctactgttgtttggcgcgccctggagcaaaaatttgtcagtcaaaccagagctcgaaggctttaactcaagggacaattctccaatgttcaaaagggaagttaatcaatctctgagtacattgataaaattcaatcaatatctgatgcacttagtattgcaggttctcctgttgatgaccaagaccttgttcttcagcttctaaatggtcttggtcctaaattcgactcggttgtatctggaataacatcacgaagtgatgctcttactgttgaagaagttcaggcccttcttgttactcatgaatgcaggctcgaacaccatcagaatatgactgatcttgcagtcaaaatgcaagtcgatcttgcatttggaaatggcagatctggtggtgctcgaccatttgcctcatccaagaaccctactaatgaagtttcccaacccacctctggtcgtgggcgtggctatcccagatacaaccaacaacgagtcatttgtcaagtgtgtttaagaactggtcacacagcccttattttccatcaacctcctccaagggctca

SEQ ID NO: 244233 - DNA, 1454 bp, Cannabis indica
ttgttactaatttaattttaattgcaataaatattctgactaaaaacacatttaatcatgtacaacaaattataatttttattactaatacatttaatcacgaatcttttaatcacaatacaagaataataatttataaattatcacaaattacaaatttcattttaactaaactaaaattttgtgtggtgatatttaaacaataaatttgattatatatacttgtttaactatgatatagataagttagaaactaaaaaatatgtgcaaaaagatgtaggatccgtttctcaattgtgtggcactggcaccaaaccaatagtgatgttgtacaatataattaaggtttggctatgttgaaaagtggtcaaccaatcacaatttttaactatatatcaatcttcacatgttttgacaaataagtaaatatattaacatttagctagctgccaaactaataagactttgtcttttttttttttttttaaatttcacattagcctaccaggttggaatttaaataattaagtttatataagagtcaaccatgccctaagtgtacggaaacgacacttaaaacctttttgtcatctaatagaacaaattttatgtaggtattgttgaccttgctttcaattaatgaccaatttttaaggtgatgagttcataaataaacaaataataataaaataacaataaaaacatatatattttttttaatagagatttggctctattataatggtaataacttactctcatttttgttgtattaatttagtaaattattaagatcacaaggaactgatcaagtgagtttatttaataatagtaggacaaagtgtacaaatatttcgacagcataagagctctctagattgatgaattctcgatccctaaaccatgagatgacttcagtatttatagaaaaaatatagtgaatattgttactcaaaataaaaggaaaagaaacgggaagctaaatattatttctgttatcctaaatttcgcacagggtgatgtggcaactagtaagatacacgtggagagtagaagtctgaacatataattttccctcgatggtccaaccagagaagttttgtacaaaactttcaagttttcacctttagcaggaatcagctaggtacgaaatctatacgtgattgtctgcacaaatcctcatcattcagacatgtcaagtcttccaagtagggtaattcggcataagaagatctttagagatactttccttaaatattccaacactcaaatctcgatcaaatccctaattttgtgggatcgactcgcattgacaagaaataataggaaactttcctagtttttcttttagttttacttgttttgggaaacctaattattgtattttttttccctatcactactacaaaaaccacctttagaggcgatttttaagccctttcagcgtcggtttt

SEQ ID NO: 244234 - DNA, 715 bp, Cannabis indica
gatgaaatgattgggaataaaaaattataaggtaaaaaattaattgctaacatgtggatctcatcatttctcatttcttatagagagtataaaaacaaatgggtttaaaaatttcaccaattccttctagttttatttttcatattattaaattttcttctggatttgaaaattagtatttcaacactgagcaaattttttttctcttttttagttaataactcttcaactaaaattaaaattaatctgcatatattcaacgacaattccaaaaagctacgtcttaggtattcttctcgtttaattattgtataataaaacaattgattttttaagataaaaaaataaaatattaaataagtaggacctacagtataaattaatactaattttctacactataacacattgtagtggccatgtgcctccttttatatccaaaagaatataataagacccattttataataaatcctcacaaataaggtattttcaaaaaatttcaccataaaaaattcctatatatactacactatgctctagtggctatctatatgcatagatcccacaaactataaaagcaatagcaatccatttaacctagatatattattacagaaaaattttatgatctactcttcaaaaatatgtctaatacagtaattatttacgacactagtgattttcaataaatttagaatactttagcatgata

SEQ ID NO: 244235 - DNA, 1360 bp, Cannabis indica
agtttcaagtgtaacaacttggataaatgttgagtcttaagttaagcattcaactataatagactcaccataaagtgtcatacaaaatttctaagggaaccacgtatgagattaaagttgtataggctcacaaggccatgacaggattcttgctgagtcaaaagaggacagaaaactggccactcgtttggaaccaaggcctaggtcaaccagggtcccaaagctttgagagggccaacaggatcgcatgacccatgcaagaaccggctaaggtcttaagacctaagcatgaaccggccaacttcctagggtgaaaccctagagccagccaagtcttaaacaagacccctagggccggccagggtatgttttggatcaaaatacgtgtttttcaaaacttaaacacgttctttgtgactaaaagagtcaaaaatcacaacgacaaccaaaattgaatatttttttgtcaagaaatcacacattatacattctaaaactatcatgcggatcaaaataccaaaaagactacgatctaacgtgagaattaaaaaatgtataaagcatggaaaagcttgaacacaacaatggcaaatccaagaaaataagtagagaatgggatttgaaagcttacccactagtgaaaaccttcgaggtagacgatggaaagcttggatcgtcaaaacaaagcaagaatctcaagctttggaggaggggtacgtcagccacaaggggaagtaaagagctttcccttgtttctttttttgaagagagagaatgtaaagtgtggaatgaaaatgagttgcaccaagtaagcttatatagtttttggtgggcccctctctcatttaacatgcagcaaaaaaccatgcatcctgcaaaacacaagtatgcaaaatattattagtttccaactggggaatgtgagcagccaaacaagagaaaatatttcataaatggatttattgtaaaacctgcctggttaaggcagtcaaaattgaagctagaaagtccctatccgtacaaacgtccacacagggacttggagggcaaatattatcttaatttttgcctacatgacgtgcatgtcctagtaggcaagattaatgccacgtagagtacaacttgtcaacaagaaggccaagtcatcatacacaacatattcgttgacgaggagtctgaatacttaagtgagataaagagataacgaactggccaacttaaggggcctggtcggacccccatggccggccctatggccagcataggccggccaacctctagaaagggaagggctgaccaacttagtcttggcaagcacttgttatgcctctgcagcttgcatcctagacaacacctcaag

SEQ ID NO: 244236 - DNA, 3093 bp, Cannabis indica
taaataataataataattcttaaatgctatttgacaggccctttcaaaataaataaataaataaaaattgttgtttgacaagtaggtccatccataaaaaaagatcattctaagtaattcctcaatactaagacttttagttggaaggaatgaaaacacaagaatgtgaatgagaataggaatggaataaaatttaaagtgcataaaaaaactgataaaaaaattattaaattttttctcatcatgcattggaatagtctttccttctatttcaaaatggaattgtcattataccaaaatggtagaaagaccattctattaaaatgacattctaacactttaatatacaaccaaacaaaggaatagaatggaaattgtttcctttcttttctattctatttcattaccgctaaccaaacgccacctaagagttgttattttcaagaagaagaaataagaatcatagtagttaagattttcttttcctcatacttgctccttcaagtagagataattttaaggacaggaacgaataagcaagcaagcattcttaaagtaactgttacatcactcgcacatgcaaaaactttatactaagaagaatcctattcaattatccaagttgtatcctcttcaaaagaagctgaccttttcaatctgatgaaaaagatgaatattagtcactgaaaaacaagatatgacttgttggtttatgttccatcgtcttttacttataaaaaagtgaaataataataataataataataataataataataataataataaacttacctgaattttaatttattttgaagctgtaataatatataatatttcatcatggcaatgccaactcagattcctctgatcagccaattaaaagtggctgcaaaactcagcatgtttaacccccaatttaatggcatacagttggtaaaatccaccaatttagtatgagggcatgtgaatatatacacttcgttttctttcaaggaatcatgaacaaccatactgaatattttatcgcaaaaatggccctacaattttaattaatgtactaatataaaatagcactgggctttttccatgaatcaaagaataactttggcagttgaaactgcataaccattagcaggtttaagagaactgccctgaagatttttgatcccgtctcttcgaagagaatggggatttactccagccttgtgagctgctacaacaccaatggcttcccaatagtttgctacttttacctgcatgaaaaaaaaaaatcaataactcggattcagttttcctaaccaattgtctactgtactgtgggtatgttcagaatcttctgatgcaattttgactgagcctacttctcaaggaaatgaacacactcagaacgagtatcttcttttattaaaaaaataatgataatatgtttagtttagcacattaatttcaagaatagttgtttcaagattctatgaatgaaagaactataactattgggtctgctcttttggttataatctagcagtattgcaatgctctagtaattagctatgtggaacagataatgtttggagttgtggagctctaaattagcttaggttaatttatccatgtccttacaaatatttttattggcttcctttcagatattttgttcagttccatatagagctccttaataaattttatattcgtgtcaaaatttcagaaaggaatgatgaagcatattacttaatcttcctttcctctgtgtcattatatggagtaaattataagtgcgtataacaaggaatgaaaacagtgaagatgcatatgtcaattagaaaaattataatgggtggacagtactaggattcttaataaaagataagaaaattctctactggagttcaagtaatctccagcaagagtgattgtgttatttcaatagagagacattacaattgataaagaacaccctcgaggtcttagagaacctggtttccccctaaatcataccaatttcccaataatccaacaactcctattttcccaatatttattctaacccaaacagcacaccgtgccacacaaaacttgtttctcctcacataggtacattttatcaaaggcattaagaagctcgaagttctctcaagaattctcaaaagatggaaggtgttgccagttgatgaggacttccagcaggcccttgcattgtaagggagatcttccactgattcaggttaaactttcaactctaaatctacctgaagcataatgggagaaggttgggtcggagtggtagtgcccacagcgcacttcaacatagaaacatggaagacgggatgcatgggaacacttacaggcaatcacagcttgtaagcaacagctccaacgtgagattccacggaataaggaccaaaataccagggagagaactcattctgtgctgggcaagagatcaatgacgataaggcttttgacgtacaccatgtccccaaactcaaacagaacatctttcgtttaagatcaaccgcatacttcatcctttgctgtgcccgcaaaaggtggtacttgagggtggccaagatcgaatcgcgctcttggagttgctggtcaacattggacagcagtctagaactaacctcaaaacacagcaagggcggggatcttgatgttacacagcgttgaatggagtggtctgaagggaagaatgaaaagtagtgttataccaatattctgcccaggaatccaagcagcccattgcttcggcttgtcacacacaaaacagcgaagataggtgtcaattgtaatgaccgcatgttttagatatggattagtggggttataaatactaattttattattaataataattatatgtgaatatgtatttttttttttttgataaatgtgaatatgtatgttaaaatgaaaatatgttattcttgtgattctagttcggtggcgatggaaaacgcaatggagggttatttttgtcacatgggtaaatatagaaccttttgttatagagaattatagtatattaagtttgaatgttgagtttcggcggggttatggccttggaccattttacccctaggccat

SEQ ID NO: 244237 - DNA, 720 bp, Cannabis indica
gatagctaatcagattgtaaagagttttatttagggcataaaacccaacaacctcctagtgctctaaaatcagattgagccagagtaagatcaaggttgtgggtgtatccaagtgctgctaagaattgcacactaggcgttccatttgcttgtgacgcaactggaagggtaattccttgaaactgcatttcgagaacataccctggtctaccagtgggataatatcctttgaaagaagttatttgcgcttcctctaaattgatgtattttttagccctcttctgaaagtcctaaatgctagcagctccttcctgctaaagctcattctgaaaaggggtccgcgtttgaattctagcttgtagtaatgccaattgttgtccatcatccaacttttttagtcttggaagcttcttccttaaatctttttatgaaatttttcagagtttcaactggtagtttcttgatgttggtcaaagcgctgactttaaggtttatctttctggctaccacgaactaccttctaaaactaacttgaaacttgttctaacaatccacagatccaggttctagctttttaaaccactccttagcgaaccttcttaaggtcagcgggaaacactgtaatatccgctaactccgaaagggtaattttgtaattttatttagctgagagtattttttttattttacatatttctggatttaaatatgtatgggatt

SEQ ID NO: 244238 - DNA, 3064 bp, Cannabis indica
tatgtcatgagttgtttccagatctctaaaggcataatccatgaaattgaaagcatgattgggttttggtggggggaaaattcaaagaaacataagatccattggggaagttgggagaaaatgtgcaagcttaaagagaatgggggcatgggctttagagccttagaggactttaaccaagcactcttggcgaaacaaggatggaaaataatgaccaatcacgattgtcttttggctagggtcatgaaagctctttacttccccaacaacaactttcttgaggccaagttgggacatttctgttctaatatttggaggggtatattatggggcagagagttgttactaaaaggctatcgttgggttattggaagtggacagtcagttcggattaatgaggacccttggatccctagaggagctccttttacccttcgcaccaaggttcaagttccagctgatataaaagttcagacacttataaatgctaatgggggctagaaagttgaagaaatagctagctggtttcacaaagaagacattccttgggtgttggggattactccttcgcgggagagagatgatacaatcggttggagcctaactcctagtggtcattatactgtggctagtggttacaaactgcggtttagggaccctaacatagcagaatgctctgataattctgctaatagagcttggtggaaggtggtttgggggtctcggctcactcctaaaatgaagatcttcatatggcgtgtgttccacaactggattccagtcaaaacagaattaaacaagcgtggtatgtccatggataatacttgtaaccggtgtaagagtcatgtggaagatgtttgccatgctttatggaattgccccaacttacacaaagtgtggaagcacttcggttaccttcatcttttcccttcttccttgaggcaagcccctaattttctaatggttatgaagggaaagctttctaaggaagagtttctgttctttattggtattacttggctaatttggtaccgaaggaataagtgtatttttcagaataaggacattgaagataaaatttggattccttgggccatggagatgatggaattacatcttgcaactgatcaagctcatccataccagaagcattctaaggatactgttagatggtctcctccactcccgggaacattcattattaatacagacgcttctctcattgacgggcaaccgggatgtggttgaggtgtgataattagagatcatttgggtgccttagttgctgctgcgactgactttattcctggctgcctttcggtgcttttggcagaaacaatggcaatccgtttggctctgaagctcgctgaaacaagatcgctgcagaatatgtgcattgcttcggacagtcaaaccgtggttaaagctttgactgggaatactcgcataaatacggactggggccttttggttgatgattggatcctagctagcaaaagatttcataacctttcttttatttttttctcctaggaattgtaagaaagtagctcattgtttagctaattggggccggttgtaccatgttactggggtgtggacaacggttcttcctgactgtgctgctacttgtttaaaagcagatgtgcctttgggtgttgggtgctagtttgtaattcagtttttgtttcaaaaaaaaaaaaacctattaaggaaaaaaaaaaagacaaaaactcaaaatccttcgtgttccctctcatatttccactcagctccgatggagctccccaacccctaaaatccaaagctcttcttctccctcgttcacatcagcaaaggtcgattcgattgaagacgatatagcataaatcggcaaggtaaactccgttcacatccttattgcttctctttcctttcttaatttcttcgtctgttcttcatttgcaaagcgatggtaccatctcatatttcttaatttgaaatgagatgaaatggaatgttgtagtaatgtatttgtgtgattgaatatcacttgtgtttgaatatatattatccaattttgcagatctgattcatacttttacagaatcagcaataatgatggaattaacagattttaaccgaattgtgtcagagttagttgctactgttgtttactgttagacaattaggtgttagttaggtcctttccttgttagctggaattactttattttacactatgtcggttatttgtgatgctatatatatagcttttccctgtatgttgtgggtaacactttaataaagagattcatctcattcttgttcatcaatggaagttgttgttcagtcactctccatctcattccgtaatatggtatcagagcgggaaagttaagctttccctcgattcctgttctctccttccctgttgtgttttctccagcaagcgtctcgtgcttcatcgtcttctccttctggtttttctgtttcttcttctttagaacagatcaaccatatcaaataatgatcaatcagctcagtccgaagttcgatctttaaatcctcaagatccctcgattcaagaaaattagaggagtccacttgaagatccagctaatccctattatctccaccacggtgacaacccaggaattactctggtttcttaacctttgacaggtcaagacaactatgtctcgtggagcagagccatgctactttcaatttcggtaaagaacaagcttggttttcttgatggttctatccctaaaccctctcctactgatttcattttatataatgcttgggttagaaacaataatattgtgatttcttggattttaaactctgtctctaaagatatatcctctagtatactttatgatgatagtgcagctacaatttggaatgatctcaaagtgagattccaccaaagaaatggccctcacatatacaatcttagaaagggattgatgaacttaaggcaggaagctcaaaccgtgagcatgtacttcaccaaattgaagacaatttggcaagaactatccaattatagaccttcatgtacctgcaatgggtg

SEQ ID NO: 244239 - DNA, 2223 bp, Cannabis indica
gaaccaaactcttagtatatttagagttgtgatttttgcaagaaaaccataaaatataaaatcttttattttgatagttttaagtatagttctgaaaaatttataactcaatgtctacaaggaatttttgtatgagatttgttggaagttaataaagttaaaaccatctagttttatttcccactggttttgggaactttggcccaaaattacagattggatcgaccctaaggcggaactttaatctttggataatcttatcgtgaaatttctaaattatcttatgtgtttttcctaaatgtgctcatgcatcatatttagattacaaacttgatatttatttttttatttataatacttatattgcatttatatcttatttcttatgtctcgctttatttaattttattttggtctaataattacaaaatgacacactaacaatataacatggacaattattcctacaacatggtaactgaatttgatggtaattgcatatctgattggatagtagaaataaaacttctacttctcaaagagaacttatatgatcttgtagtcgaacaagattcatggctagaagtacctgaacaatcaggtcacgtagccaggaacgtattttcgcaatggcatgaaagaaatagtcgtgcaaagtatatcttgtcgaattcattcaatgaagagatcagagaaaaatgagccttgtgtatacatgtgatatttggaaggcacttcacaaccagtatggtaccgctcatgaacagttagtccaagagagaaatgttcttcaaaataagttgaatattttgatagaattgcaacataataggatgaggtaaattttatttacaaaatatccctattatattagtggaatgaattatttttggccactatcaggacccatgagaattttatttgattattaaaataaatcaaattaaattaataatttctttttaattattctattaaatatattatctaataatatatttaaaattaaaaatgtaatattaaataaaatattataactaatttatgctaatcagttatatactaattatattagaatttgaattaaaaataactatcatattttattttataggattaaataaaaggtttatttatatcattatgtatatgatatatatcaggataacaaacaagtgaaatatacgtgactttggagagatcagttttaggtttaaaaatacgatagaattttccaactctccctctctctctaacccacggctcactctctccctcagacgcctatatctatatgtggtagttgttctttcctatctcaatcacagtgtctcatgagttgagtagacattgtacttaaaaaattatattcatccaaattgaatctaatagcccactctattcctagagtattaaggctggcttggaacatcctgatgtgaactcttcaataagtttttctggattggatgttcgattgtgtaatacaaaaagatagtgaggaaaccctaataggcaacaagaggtataatctctaaacttatagttaggtttatgttatgtataattgtgttgagatttggggtttatggttcatatcagattcaaaattttttttttattgaattaaagtttattctcttgcgctatgactcttatatgaaccttaaaaatcaacaatttcaactactctagaaacgataaaggctaagaaagaaattccctaagcatcaatagtaagaggtcttatgtatgctcttgtatgcagtagaccaaacatttgatagttagtgggagttgtgagtaagtattagtttaatccaaaaaggaacattgaaagataattaaacatatcatatacaatacaagaagaaactatatgttagttacaagggtggtgtattaaaaccctatggttacatcaactcatatttttagacctgcgtcaattctagaagtctatatatgagatggtgattactctgggggtagagcaatgtttttggagaagtatataagccaattcaaaatcactaactctaccagtaagggtgagtaataaggatgccctaaaggccattaggaaattattcagactcgaaaaattttgatacagactttagcataattttagacatagaataattgcttagtgtgacactgtgataacataatgtaatttccaaacagtaaaaaatcttgtaccctaagaagagtgaaaca

SEQ ID NO: 244240 - DNA, 826 bp, Cannabis indica
ttgtgagaatattggtttacttattttaattattttaaattaattttttttattttaccttaatggatacccgatgggttccccataaccgatgagtattcccctaccccgaatccgttggttattagacggggatggggcggggataggggtatatataggtagcgaggatgggagcagggattgtattccccgtacattaaccgaacaatttccatctctaactccatattgttaaattttgtcccaattttgctcataatatgtaaaaacttatataggagttgacattgcctttttcatttcttggctggccacaaaatcaacttattaccttcaaaatcatattcactagggttaagtagttagcaatttaagacaacaaaacggcgaaacaaactaataaacgttcgatatctaatcaacttccccgcaaaggctcttctttagctattctacttcgagtgttcgcccttgccttacaaagaacaaatccaatacaacaaaaaaacgatgaaacaagtcaataagcaacattcccacaagctcaaagactactcttgttttggttatttttgtttgcaaagaacgaatgtactatattattattttatttgatagatttaatttaataatatttatctatggtaaggttataccatgttattattatttacagggtagacagaatttgtgggcctaaaaatttttcaatatttttttttataaaagaaaaaaatagatctttactttctctacatcttcttcttcgtgtattctgttaatcatgtactcatcagattaattttagagaaacttacaaaaa

SEQ ID NO: 244241 - DNA, 1569 bp, Cannabis indica
caagattggattccatttccttgtttaagaattcagaagccatagttcttgctttgcatatcctttcccccaactgattagtaaccgccccattgttgagttcatcacccattcttttttgaattccactgccagaatgttccatctgactatggggtcttgtggcctcattcatggcatccagtattgcagcagatggattaaaagaatcagttagattgatattattagcatttataacttcttgttcataattattaaataaagggactgtcttaagattaccttgtactggtttagtaccggtatgtgttacccctctctcttgtgttctctgatctgcgtctttcatagattggatcttttgattgccatggagttctcgatgattgtttgggcttggttcattgctgtgattcagttctacccttgcccccgaatccactttaagccaagaaccaaagattggtctcacctctccatcttcatgaattcccgtagctctaggttcctggcattgtcgcatttcaaggcctattctgccacagttaaagcacatatatggcagtctatcatattgaaattggagccaaatttgccgtccttcgtggaggaataggtagcctgggaagagtttggattgaatggcgttccgagcttcaaatttgaagaaaccattgactgcaattcgactaacatccgcttcttaaatgtcgatgatttcccctgccatacctgccaatcgtagcatatttgctttagttatgtctttaattggaaggtttagtatgcgacctgagattgtgaatgagcataaagtcgtttcctagttcgtcggtatgccctgcatcctttcaaaatgagaaaacaagcattaagaacccatggggtttttcctagtatcctttccaaatgaatgtttgatttgaacgaaagaaccaagaacactgctgtagccgtggttttcttgatttttaaatcccagtcggtgtcccccaaattccagaggcggcatagaatgttcttgagtaaagaacggctaaaaggcttcattgtacagagcctgccaatgaggcaggattttccgatgtctgcaactccttcctcattgatttcccatccgtcttcgtcggtaaccgttgtttgctggtgcgcgagagcaactcctccatttggtccatgcttgccgagcacatcctttgattggctcttccgaagagagcatgggagtttccagtctcaggggagaatcgccttcagagagagagaattttttcagagagagagaattttttcccaaaattttaggtgtacttattattattaatgaaaatttattatacactttatgaatttaaaagttaaattgatttggtaaaataataaaaggttaataaaaattgattgatttctcatgttattcaaacaatacgtgtatcatttattttgaaacacatttttttcaataaatcatattctaattaaataatttcaaaaggaaaaaaaaaatacgcgtcattaatatagaaaaacaaaaaattggctgatgatattctttcactcatgatc

SEQ ID NO: 244242 - DNA, 717 bp, Cannabis indica
attttgagggaaatcgtgtctccatttatttaagggtattttgggtacaatattcataaaagtgggtatgtttcaattaaatctaatataaaggtagatttggttaattaattaaaaaaaaagggacattcttcaacttgtccccaaaaattattcgtgttgggtcggactcgtgtcgggtctaaacgggctagcccgttttttataaaatggtcgaccagtaggtaaaattttttttagaatcaattaattattttcttaaaataattgaatatttagcaagacttctttcagcaattaataattataaataattttttatataaattcttgctgtaattattttgacagttaagccatttaattatgatatttataattaaactttttttttttacaaaaattagacttccttttacacaaataagaattctatcattgtataagaaatttttaaataattaagtatatttaaatgatattaaattatttttttataaccggaagaactaagtatgagtttttctatttgagtttgaggttgtttcattttctgagggagcttgtactttttttttttttttgactctggtttgattttatgatcagtaaatgactccttataaaaaaaaatggaggagttttagttttctttttttttttttgaaaaatatattcatcttatttcactttatactttttaaatatttaaataaa

SEQ ID NO: 244243 - DNA, 823 bp, Cannabis indica
ctcgggtgagattgtacatgtcaagcagcgcgacctggagtgtttggtctcggggtatttgggagttgtattttgaaagtcaacagctgtgcgaccagtaaatttgtgtattttggaatgtatattttgaaaagtaaatttcacaaagtttgaaaacgggatcccgacacttgtaaatattttattatattacaaagtttaatgtttaatgcaaaagttttaatttgacacgtttttcgagaaaattctttgattagcaaagattgcactataattgaaaaaagtactgtagcgtgcctcagcattagggcgttacaatttggccaggataatgaacacaaacagatttgttataccgaccaggtcctatcgaaggatccaaaataggaattttgcatgacattgaggtttacaatcaagaatttcaaaactttgaattagaggttaatttccactaagccaggaatgggaaagtgaaactgaatgtcatggaatcgaaatcaaagcgcagttataattaaacaacgtggttatgcagagtcaagatttcacattcctaaacgtaagttttctatggtttttctagaaccagaacaagaactttcaagtattttaagtaaaaaaaacccaaaaaatcaaatattcaagcataaaagaggaaatagatgaagaacttactcactatttgaagctttagagttgctcggatgacactaattggggtttcttagggattctttgaaggatttgagaggaaaagattttcttactctgattctccaagaacaaaaaatgttaacagtggttgattagggatttctgc

SEQ ID NO: 244244 - DNA, 1288 bp, Cannabis indica
aattgagaaattatatcactattgcctatttctaacaatatgacttattttctactaatgcacatgtaatcataattattaattaattcaataataacctactaattttcatgtctaattctatggtcattacaattatccccccattaaaaagatttagtccttgaaatttaatttgaaaaattttgaatattgagccctcatattggactctaactctcatgtggcttcatccaccttactatttctccagggtactttgacaaaaactatggtcttgtttcgaaagactttatccttcctatctaggatatgaactagttgttcatcaaaatggccaatcttaatgtagctctaaagcttcataactcaagacatgagttggagctaagacatacgtcctcaacattgatatctaaaaaaattaaacattgttgacaatgctaaaggtaaaactagacggtatgctacttttctaactttctcgtgaatctcaaatggccctataaacctagggctcaacttttctttctttctgaagcacttcacacctaactttgctgacattcgtagtaaaaaatgatctcctacctaaaatctatatttctacattttggatctgtataacttttctacctgctttgggaagcaagaatatgtgccttgatcttttctacaacatcactggtcctctgaaattattttgaacttaaatactttctttccttgattcattccagtgaatcagagagcaggactttctaccatgcaacatctcataggaagtcatccctattgtattctgataactgttgttattggataattctatcaatgataaatacttgttccacaaacttttaaaatccatcatataagctcataacatgtcctatagtatttgagttttcctctctgaatggccatctatttcagggtggaaagttgtaataaacttcagctttgtacccttagatttttggagactctcctaaaatttggaagtaaactttaaatcacaatggacttggagccccataaaggcgaactatcaccttcatctataactccacatacttatccgctaaaaatgtattttcactagtagaaaatgcactaatttggcgaaatgatccactactacccaaatcgaatcaaaaaattatgtggtcctaggtaatccaaccacaaaattcataggaacattcacccacttccactcgggaagggttaaaggttgcaacaaacccccaggtctctgatgttcagccttaatctgctgacaagt

SEQ ID NO: 244245 - DNA, 1765 bp, Cannabis indica
tcaacaaggtgcattttattttctggtagcccatcacgaaagaattctacagttaagcgtgcttgacctgggataatttcaggatgggtgacctcctggaaaattttcctaagtagcgtgcaagtgaggataaagtacgctgaaaatggtcgtgttggtttgtagggtcagtcttcagtccatgaagcagccagagtgacaaactcatgtataagagcaataattttgtgggtgtaagggcccaatggaggcttgaatcggggaatttacaaatggtatcagagcctgaacccaaccaaaatgtggtcatcgaggacgttgaaccccgtaaagaaaggtgattgtgacaactagtggatgcagtgctgtctcaagcttttgaggggcctaaggtaaaatttgaaaatggggccttttaattaaagaaaaatagccatataacttttttgttgcaatgaaaattcaacaataattgaagatggccgacctcctgactgccacatgtgattgggacattcagaaactgaattttctctttgatagaaattaatactatttctgctatcccaaaaggaggatgaccttttggtctagaaaaagataaatgaatctagacaaaaaagtgtaatgggaatttctcatgcaaatcgtcctatcttactcaagcattacatagagctccagagtgtgagattgcccccttagagaggcataagatctcttggtggtgtattttggccaaggcccttccgatcagagctattcttggcaagagattaaaggttgaggatgttacctgccctttttgtggagtggaagaggaatctttggagcacttgtttcttaaatacgatctggctttctgtttacgaaagtcttcgccatggagtatctttccaatggtcaattcaagaatccatatgtgtgggattgggttaaatttatttggaatctctataataggggcatcaacgttgatgagatctttatctatgcttctgttattgttgacactatatggcgagcccaaaataaaaaggtacataatcataagatagttaacttgaatcagtgttttgactctattcgatgctcttatgtagacttacgagctactctaattcccactccttctcctatccgggtggaggattgacatcctcctcctccagattggatcaaactgaactatgatgttaaagtgggatcagaaatctcgtgtatagcagtttttgctagatcaccatttaggtgaggtcatctaggtgagcacgacggacttggattattcggatgccctttgtggagagacgacagcttgttgcttggtgattgatttggtaaagctcaaagattacaagttcatcattgtggagagcgactctaggatagtaatcaactctctcaatcacaaaggaaatgcatgtgttgggagattgagaactactcatctttttgccttaagctttccactaattttgttggttgtgttttttctactcatcattgtggagagcgactctaggatagtaatcaactctctcaatcacaaaggaaatgcatgtgttgggagattgagaactactcatctttttgccttaagctttccactaattttgttggttgtgttttttctggtattttctgatcttgtaattttgctgcctataatgtggctaggtgggcctttatccataaacagtagggttaatttcacaaatgtacaaaaacaacaaaaaaaaaaataacaaaaatacggtttcac

SEQ ID NO: 244246 - DNA, 848 bp, Cannabis indica
gtatttctctttcttggtgaaatctgtttacacgattctcagggcaaatcttgccaagcggtcaaactgggttgtgtattcagtaacactcatgttttccttatgagtcaacttagtaaattcttttctttttgtgcttctgactgcctcattgtagtgcttcgcattgaacaactcctagaactttttccaggccatcgtcataacatcttgggttagggataccatgtccgaccatactagagcgtcttcttagaacttgaatatggcacaggccactctgtaactgccggtgacgcccataatgttcagaattttggtaataaccattagccactgctcggctttcataacatcgggacctcctagggaaattggaggtgcttgcttacggaacctttcatacaggggttccattcggttcactgcagctacaggtcctgcctgcacaacaggggcaggagctattggtatttatggagcagggattgcaggagaacctcgctatctcaaacgccggatctctttttcttgttcctttatcctggcttgcatttctgcaaacctattttcccagtcttggccagcctgggtattttatggcgggtcaacatctctccaaccgcataccctgcctctggacctctacctcggccacaaacatttgagggaatctgaactccctaaattcaaccaagttaccctgactcctggtgtttcgccaggcatccaaactactagaacgacccgcgtaaccaagagctagtctggtcagatcgcgatcaagaataacttactaattgccgcttattttggaaatttaaaaacatgcacctattcagctatca

SEQ ID NO: 244247 - DNA, 2858 bp, Cannabis indica
tttttttaattttttttttgtgtttgtttcatgaatactattttttactatctaagaaagaaaggaaagtattcatttacaacaacaaattgcttatttaatgattccatgcagtctctgtaccataaattttacaaggcaaaatttctgaaaaaccaagatgtctcatgttcatgttgctcatcctattgctcattatatcaaaggttcagaattccttgttctatgccttgacatgaagttgaccatattttattcattgtcaatcttagaaaagaaagtcattgggtttttggttgtcttgatttgaacgagagtattttatttctttataattcacttgaggactaccaagatgaatgctgcagcatggaacaccgcaacaccatgaaagcgtattctgttaggctccccttattctttgatcttcttggtttgtggaaaaataggtccactgttcctaacttgggttttcatcgtaaagctccacttacaaaatttggtacattggacaacccacttacaaaagttggtacactttaataaaatatgatataaggatatttttgattaatggatacaaaaaagagatattcctcaacttatatttttttatatttgtgctctaatgcacagagttcaaattagctataaaaatcaatattaccattaatgcttattcaaaataattaattttatttatattgttttaatatcttataaatatatcttattcaaagtcaatgaatagtattaataagtgctaaagtggtaattaaaaatgataatattaattgcagactaaaatttggcccatgctatcttttgtgccaaatttgacacttgggctaaatttggtacatattttacatcaccattgaaattaagttttagcaaaatattctaaaaaataacaatacactatatttatagttctccattcgaaatgctcttataaaatttagctcatattatattttatgctattttagaattagaactcatgacctctactatattttatgctaaatttagcacaacttttaatatatgaaatttaaaccaccttatctaatacacgaatgattgacacctaattcaatttttttaagatatgcgacacttgtaaaattaattcattatggtgggttctacttctggatcatgcggtggtgacatctcatccttgagaacaatacgaacagcccacaagggtgtattgagcccaaatatcggcccaagttccaaccatacttctcagactcacctccctggcaacctcttgccgcggtctatatatttataatatatgtgtgtggagtagacggctacggaggttgctgtcatcttctttaatactctcggcgtcgcggacattgcttggtgtttgtcgttgctgttgtttcattagccgtctctcttgaattgtcacagcaaggtatttttcttttctttctttatttgttccccggtaatggggtttctgttttttaactcttaaagaaggaaaatattcgtatgaaaacgttagttatagttagagtgtctctatttgaatgtgggtacgctctagctctgatttttgttcgtgtcggtgatattcctttttattttgatctatatagctcaactaagctagttttatagagtcagcaacactattagaccctgctaaataccgtgttttgtaaaagtgggtcttgtatttctttcttttttcacattcataattgtttcttctaagtaattcgggttggagtctctgtttgatttactctgttgcctggattgtctttattaaaagatgcttctactttaaaagaagctcaaagtatggacttgctacatcaaaataacatcccttgcagtctggctaatacatcacctgataaccaccttttttttgcttatttttatcatgggtatgtacttaggacctgatgtaacttttgataacccaagaggatctgcatttcaaacagtatctctggattatcaaacatatagatcaagtaatttaggctcatcatgtgttagtatagcttttctgaagaatttatattactacagcttaagaaaagctcaccctagcctgagattgaagccaaatatgttgcttaagtatctaaagggcactaaagactgctggcacttcacaagacttttccttacgatcttcatgaacagtgttaatgatgtaactaacagtaataacttatatggttagttaagtagttagttaatctgttgaggtattagtcagctggtttaacagctttgctgtcttcaaaattctgttgtaatctgctacagccttcttggctttctctctataaaagcaagtcttcagcttctcaaatgctacgcttgaaaattcaccattcattctcttgtcttttgcttaacttagctcagcttcaatatggcatcaaagctatcttgatctgattccaccacaaaaaattcatcttctcaatccactactttcatgaatgccaatcagtttcctaaaaatcttcttttgttgaatcttcgttcttcatttggatcgaagtaactatactttttggtgctccttagttctaccagtagcacgagcccatggactcgaaggatatctccttggcacaatccctgcaccatcaccaatggcttgtaatattcctaaccttgaatattaaatggatttcgactagtttctaatgagttggttaatgaatttgatttttgaacctatgttgggggcatatcgtgaatgcaccacttcagttgaggtctggattgctttctctcaacactttacaacaaaatcccaagctcgatggatgaaactcaaattctttctccaaactaccaag

SEQ ID NO: 244248 - DNA, 895 bp, Cannabis indica
aaaaaaaaaaaagaaacataaatgtacatttcccgtatgaacaaaaattatagtgttccttgtcctatatatgtaaaagtaatattgattggtgttattatgcatatgcgtaccgtgcatattgaatctctaacactccaatgcctcgtagtttgtgttcttggccaggaaaagccatggcaccaaaagacgatccactcaggtcgaaacccaagagacatccggggcatacatctgttattactactcgaaccgctttccctgaacaatatgggctttttgtacacttcacctacacatatatatatatttttatatattactaaatactatttggtatacataaagtaattaaccatatcttctttttggctaactgaaaaaactaattcattcaaataaaacaacaccaagtcaagccacaaaatagagtaattaatgatagaaacaaagagttctatacccttcgaaaactataacacagaggcagcccatgcagcaagacggtgtgagctgcctcgacattagctctagggcagccaaactatagtacaccataaattagaccaactgctaatgaaaataaattcaagagatatgttaaaaggtatactaataatagaacccttcaaggtattatatccttattagtataattatgtattgggtctcatatataattaatatattaaattttatgatatacttctaaataattgcaagatacaatctctacgtagggtgttcatcaaaatgctcacaccacacaaactgttcgcaccgcactacaccacataaaaaatacggtttgaaatcctttgcagtgccgttacagtttgtatttttctcaaactacatggtgcggttagcgattttgaatttattaattgcgatt

SEQ ID NO: 244249 - DNA, 401 bp, Cannabis indica
tttttttctttttcttttctatcaatggaacaatcctaatacattaaaagtgtactcatataagaataatcgacaatagttttgaagaaaaagaaaaagaaaataaatttagaggcggcagaatgagctcacttttatttttttttttcttttgaaggatgaatgtgtttacttgaagagcaattaaaggatatatgaatttgctgaagtttatttgatttgaatatatattttaagaagtttttgtagtgtactcttttttgcaaggctccctatttgtttaggctttttagaattatttttttaatttaattattttttttcattgaatgtttatacaaattataattatttaggactacctataaatttttaaaaaattatgcataatgtacaatatt

SEQ ID NO: 244250 - DNA, 831 bp, Cannabis indica
aataataaagaagaaaaacaactataaaatgtgacccaaaacttaggctaaaaatagcctaacaatgttttttctctttggagactactggcccccttttggtatttgcagagacaattattatgcattaaccgtgaggctaggtgtaataacttaatttttattttatgtatgtttgtgaactatctttactccaacttgcctctcaagtatttttaattacataactgtctttcagactactttaaatgtctcgagttcttggttccaacgacatgaactctaagacttaggctctgattatgattgatctaagtcatgcacttccatgtgcttctcgcttttggaagggttgagaagtaattttactttttacactttttggtgcttggttccaaagattagtacctaaaatcttcgattcaaacttcttctcccagataggtgtacgtcttacagacttagaaactttccatgaaatagaaacctttttcaattgttaactccaagttgtataaaaaggctgcagttacttccagatgactcctgggtttcggttaaggaggtcatgcactcgcagatttcagtctatgcttttaatcttggactagataacttagcaaattattaattttaggcatgacaatagaggggtttacttccatatcaaagcgtctttgatttcaggcagagctctttaattttgtgcttagcccaacactaatttgcgttttgaaaatatctaaaaatatttcaaattcaagaaaaaatttctactcccatgtttttaattaacaatgtaaagcggcaagatgagatcaccaacttcaa

SEQ ID NO: 244251 - DNA, 2358 bp, Cannabis indica
tctctctctctctctcttcatatacttctcacatgcaacacacattgtcatcattgtaatactaaagagagcgatagttagaaattacaaggttttagcctgtatctgcatgataatctcaagagtgaatacaactaaaatgagaataggccattacctgatcaaaggagtcgaacctttataaatctttttgtccttttacattatttatcattactcacgtgacagttataagcaaaatttgatcatagttagactcgacgtcagttggctaaattcacaatcaatattttggtgcttttattgagagaacaaaggctagctgaagttgatcctgtggtgcaagcacaactagatcaaatcaataacatgatacaaggcatgttcgacccaaagttattcgacttagaacttgacaggacccgaaggtcacctttctctgtgtgcatcaatccactgcccttgccaaccaagcttaagatgcctacttggaagatatacatagggaaaaaagatcccttggctcacatcaaatattttgaaatccagatagatttacaaaatgtggaggttgatacccattgcaggatttttcctgcaaccttgtctaaaatcgtacgatagtggtttttcaaactagctgctgagaggttcaattcgtggaactctttcataagagatttctacacgtaattctcatcttctaggcaaacaccgtacaggctagaagacttggtggaagtaaaacagaggcccaaggaacctctaaaagatgacctctaaagatttatgacttcggctaccaaagttaagaatttaacagaagaaggcaggtacatgatcatcatgagtggcatactacccttgagtgaactatggagagatatccgcagacactcaactcaaaacatgactgacttccttgatcgggcataaggctttattgagcttaaagaagatgtttgacaagcccaaactggaagcctgttaggtactggataggcccagactggaagacagccctcagttccgtccagcatacatgccaagaatattgacatcaaacatgctaggaattcaactaataatgattctccccctgggtgccaagccaagttcgtagagaaacaccacccattgaacatagtaatatacgcaacccctagtttcaaagcctttgttcttgtttcaaggacaccaaccaagccaatttttaatgaagtaatcaatttcttgacctccgcctacttattttgcttgttgatccccctaacattccaactcataattctatccatgagtttgaggaggttcaccccccattagttgttagtccaactgtctcatcttcaaactctttcatgtgttccatagttgcataattatcttcatgttcccctaaagcttaacaagcattgttaatctctgtgattcctagagggtcttgttgtaccatagtctttttcccacttttcgccttctgaaagccatcttgatccacctcatttatcttgttcttctctttctccaagaaggtcttcttgactacccatttttatttttgaattgccttcttcttgcattctaatgccacatgacctattccttgataatgagtacaaagaatcagagtccattcatataaaatatctacttccatttattaatccatttcatcgattgaaatcctgattaatatcatccatcctttgtatttgttgcaaagatgatttaggggagagaacaatctcatcaacatcctccatacccccaatatttgtttccaattctagttttgagaagtcaatagcttccacccccaaaattttgtccatcaatttaaccttaagaggctgttccgaggaagtaggtccccgtttcttcttcttcttcttccatgcgctcatgttaattctgcagaggttactcttctgcggtcgatctcggcttgccatagccacaataggatgctgaaagtcaagccctaacaaagcaaactcgagagatttttgaaaataatattttctctctttaatattatttaagaataatattatatttaactaattaatatagttttatcaaataaaacaaaatagttaaatactaattacataattttcacaaaattactattttgcccttaacaaattatttctcatagaaattaattctcactcaaaatttcttcatcaaattaaactttcccctgtacagtgttgtatagaggtgacttggggatcatggacctatattttgaagctccaataaacacaagattattattgaactcatcaatagaataatttagtttattaattctattattactccactataaatatggaattgcactct

SEQ ID NO: 244252 - DNA, 1319 bp, Cannabis indica
gaacttgatcaatctcagaagttagtatactgagattcctggaacaccaaccaatgatggctgcattctttcttcatcatcaacattcttctaatttgaactaactacgtggaatttgtggtatagttcctccaaataaaaaggtcttcacaagcatcatttctggaaagttgttcactcacggttgtcattccttgaaggagtcttgaggaatgatagtcgagttcgaaaggatgttcccaaatgactgtcatgtccactccagtttagctagccctcctctagaaatgagttccagctggctagttgccactcttggaatggtagatccggatagtcaacttcagcagtccatatcctacccagaagcgtcatcagcgagtatccttggtccatgagtttggatgctcatatatactcccggaggctctgatacttaaactaatgtggagacttcactctaaaaggaattggttaagttagttatttctaactaacttaacaaccttgtttcttgcaaccaccgactttaggatcttgatcctaagcctttaaataccatcttgtccagttatttgaagacacgaaatagagatgagatagagtttgagaaagaaaagattgagagggagagaggtgcagagaaaagagagagattgagattggattttgtaagaagaatcttctctagatgaagaagattcttgggtgtaagtgtgaaagttgaaacactttgtgagaactctacagagaatctcgtctcgactgtattgtatctattcttgctcaatcaataaagaaagatttcgggtagtgttctagaactggagtagagtcatagatcaaatcgatctataagatttaaacctaaatattttttggtgttgatttctttattttctgcatttattatttttttgatttttcattactctgtttgcccttgtttttatacaaatgttgttctcgatttgataatcttgtcattgctaatcactcgattgtttagagtttcattgatttgattttacgcatttagtcgtaatttttccacagtattgatggagattgtttgacatctttatttgttttaatatgatttgattcttccccgaattttttatgtattctacatttgacttatttcttttaattgtctggtcatcaattaaattcatgattttgatacgagatctgagaagtgagtgtcaattatgccatagtaaaagaagaataaattttaatatgggatgtgagtacctatgtggtttggatagcttatagagtttatgtgcctaatgtcttttacatgtttaaat

SEQ ID NO: 244253 - DNA, 1651 bp, Cannabis indica
ggagttgcacgaagtgcttctgcttctgtaatcaattctacatctttcatgttccttcttaattggtcttgagagcattggacttctccatctgagttattttcttgtccaaatgaccattctagtgttggattggtgtgatttacgtttccatttgttaattttttccactgtttccgcttaccgctggtcattgcctcttccaactgtggggggcgttgttatcctccaggaccaccttcatctagctattttcacttttgagtttcttgacatgttccttttgttggactaattccactccttgagttgcaattttatcatcttgggactttaatctttctaaaattttctcccatgatggaattacaggtgatgttgtgtcgtgtttattctgggcgtttgaaccatttcccttttctagatttgagttatttgcatgcaatatcatgacatcttccccctcattttccattttgaggattcctcagggaaagagactgaaaaaactatcagaagtcactagaatttcagatgtataaaaatcttcaggaagaaaaaatcagttctcatagacggtgccaaactattttgtccaaaaatggtgagtcctctttttaactaattatccaatcattgtatttttagtaggttttttttttcttctagttcataatgcatgccctttctacgtgagtttttactttttaacatcgtacatactctgcatgcatgcatggttgtgttgtgcttctttcactgcttgtggctgacacgcgtccttgtcattctgtaaatgcttgtggttaacacacgtctttatgagttgtcttaattctaccttggtcttatctcgacatggtgttcgttagtgtgccttgttgatgttttccctattttaccttggtcttatctcgacatggtgttgttagtgtcgtccctggtcttatctgagtacggtgtcattcttggtctatcttggcacggtgccatccttggtctatctcggggcggtactgtctttagtctatctcagcacggtgccgtccttggtctatcttatcatggtgtcgtccttggtttagtttttagtgctattagttccttgtatctcgactgaagctttggatttgtcttttgaggtatgaactttccttacaatcttatttcttttaccatttaatttcttatggatttttaggttgtcctttctcttctttcaggcttaaatcttgttcgatctattagactttttatattagaccttgagggtttttatctgtatttatttaatttatttctttgtttttttctctctaaacacgcaccacgcagtttaacaaaaatacaaaccacaattacacagtaaaatatttcaaattgtatttgttatgtggtatggtttggtgcaaatggtttgattaacaaccctaaatagaactacctacaaaagtagcataaaatagagttatttgcggcataacctccttaagtggttaggtttttgcaactaactcccaattctaaaattttggtgataaaacctcctaaacctaagttctgttagtagttagccctttccatccatttttgagtgttaagtgccagcttggaatgtctacgtgtacacagtgtacacgtggcacaattt

SEQ ID NO: 244254 - DNA, 1762 bp, Cannabis indica
tcttgtgataaattaaacatgtaaaagacattaaataaaaaaaatcctataagctatccaaaccacatatgtaccctcgtcttatatcaaaatttattcctacttcactatagcataattgatactcacttctcagatttcgtatcaaaattataaacaattaattgatggccagaaaattaaaagaaataagtatgaatgaaatagaacacatagaaaaactggaaagaatcaaatcatattaaaaccataaatagatgtcaaataatatccatcaataccctaataactatctagctactcatagccattgtgaacaattggtaacaactaattaagaacatgaaaaataaagtaaaagaaagaactcatggaaaaaagaatgttgaaagtcctcagagctgccttctatcgctaatttttcgtactcccaaagttgtctgctaattaagagtttttgaatttattttagttctgaaaaacctcttaaaaatactaataataatatgtttatataggctaacaaagttacctaaaagatactaaaaagatttaaaatttaaacttaaaaaaaataaaatacgcaactctacttggaaagcctttttttttagctatctttttatctttttttttagaaattttctactgggatgactgatagtatttttgttcataactctctcgatattgctcaaaattggatgattcaagaatgttccagaaatctgaaagagagatctagaacttttatgctttgactttctccaaaatctgatcaaaacatagtctaatttaggcttgaagttttaagtttattttcttacacaattttctctattttatagatcatattttttctgagatttaaccaatttatacctttcaagtgttaaaatctaaaattaaagaaaaaaagcataattatattctaaaaagtgacaatgaagaagaaaattaactctaaaaataacataaataataggctaaaaatagcctaacagccacattgtcagtaaagacgggattaaggtaggtcaaggaaggattgaatcatttagagttttaccaagaccgaagacagttttggaagtcaaaaactcccttggtgtactatcatcattttgtagaagagtttaccaagatctccatacctttaaaagaattaaccaagaaaaatcaatggtttgtgtggaccaataagtgtgaagcaagttttcgagaattgaaacaacaattaattacagctctagtgttggctttatcataagatcagaaaaagtttgtggtttatagtgatgcctccatatagggtttgaggtgttaactgatgcaagccaacatggtctttgctcgtgcttctcgttagttagaggagtatgagcaacattacccatcatataatttaaaacttgtcgcagtgatgtttgcactgaagatttgaaggcattatctctatggagagaaatgtgagatttacactaaccataagagtttcaaatatttatttacttagaaagatttaaatatgaggcaaaaatactagttagagttagtcaaggattatgattgtgagattctttatcaccccaaaaaagctattgtggcagcagatgccttgagtaggaaaggtcccaggcaggttttttagtatgaagatgatttctccttagttagcaactaacatggttaaggtaagcattgagtttatgataggaaacttagcaatttgaggcttcagtctgatttgctaaaaaagatt

SEQ ID NO: 244255 - DNA, 1181 bp, Cannabis indica
agatctcttaagcgtaatgataatgtccaataggaagttagtgttcatagaatacaaattttcctaagtcagacaaagattcctaaattgttggcctctactagttccaatttttttttgatgagacaatgaaccaagtaccgcactatttggtggagcaggcaaccaaaaacccacctaaaaccctaaaatacatggcaagtatcttacagttcctacccaaaactcgactatcccagataccgattaaaacacaaatctaagattgggaaatttacttgatgagttagaagttgggtgtgtcgagacgaggattgggagtgttggactttctggtagcgaccacaacttctcctgaaaactctgaagatggcttgtcaattcgtcaattttcctcttgaaggttgatgactcaaatattggatgtgcaaatcactagaactaagggcgcttgtggatacaaccttgaatgcaatcagagaaggatatcgagaatttctgtggttgtatcgcacattcaccgcaaagatttttctaggattgcttttggtattttaagtttttggttttggtttctctctcaaaaatttgaaatcaaaagcaagcgtggaaaaagtggtgtatgtttgacctttgctctatttatatgcaaactggcaatttgtgtgctctcaatccaatgactcagatctatcttagaaaacacaataaaatccaatggtttgggaatatgaaagggtgccatttaatgccatgtatgggatcgaggaaaattaatgatgacatttgccttagaaatcccactaacatgaagtaacgcccatatttaaaatttgctaatttgtaaatgatttaattataatatatttataaaaccttgtaaatcaggatcctgagtttaaaacttcttactgaatatatatatgtatatattttatataaagttacataatatttttttacaaactacaaaatctcagggcaaccatgaaacacagttcaaaaaaagttgaaagaccataactcttcaggttgcactgctgcgatatgtacaatccttgccaagctcatctcactgctcctccatcttagctttgcccttacctacacaaggtagtaaactgatgagtcgacagacgcagtatgtaacaccctaactaacataggcgtattacgtgatt

SEQ ID NO: 244256 - DNA, 1962 bp, Cannabis indica
ggaatgcgcgcaatgatgtagtttaaagaggaaagtgtgccacaacttctaaagtagtgctttcagcaagatcaactctaatcaatggaaggttgctcaatctaaaaacatggttgttattttttccttcgggattggacacatgacttgagcattggactaaactggtttaaacaagattaatgtaaatgtcgatggagctattttgtttcagaaggctggtatggggctggaggtgtgggccgtgattaccatggtcaacttattgaggctttttcaatgagtaagtctggctgtattgatgctgccatcgctaagatcgtcgacatcaaggagactctaagttggatcaagagaaagggttggattgaagtacaacttgaaactgattgtgtggttgctgtccaagctttgcatagctcaatctatatgctctcattctttggtcttttggttcatgattgtaagtttatcttaacttctttaaagtctcttgagattcattttgttaaacattttgtaatcaaagttgcgcatagtgtccctcgtaacttttgtttttatttagtttgcatttttactgagagtaatgctccaactaaattatcatctattgtaatggttgaagctactttctaataaagtttccatttcaattaaaaaaaataataaataaaaatttcttcataaataaacttaaatttcgtaataattttgtaataaatatttaaaataagttttatctaatttggtgtatgatttccagaaacttgagtatttatcattcctatgttgattaaaaattaattataaaataaatttagcatttcattaattaaaaattatactaaatcatgaataaatattttagatatctaattcaataaagaactcaaaatataatgttaaaaactaaaaatcaaaatttcatatattcttatattagttttttctttatttatttacaaacaatataagaaaaaccatactaaaaaaattataaaatagcatcatacaaagaaaaaataaaattatgtatatgaaaaaaaaaagactaaatcatattaaataattgttatgttaattaaataattaaaattattttttggtatgtaattatataatataattacacctaattctgatggggtaggagaattgaagagagtaattgagacctcccaattatctcaaattacatagttattgtgtctgtgtaattatgtggccagacaaatatgctaaactgtgtaattatctccaatcatgactgattctaggcataggtagactagactcgtacttaggaccaacacttttcgggaatctaaaataaaagataaaatgacctattaagtttttatttaagtaaaattaaatgtattataaataataaatattcataatttgattgattagggtacatgatacattacacaatcctaaggattcttagggtcgaccctaaggtaatgaaataaaatagaatggaaaggaaacaattttcattcaattctttgtttggttgcattttaaagtattggaatgacattccaatggaatgcttttctattattttggtgggatgactattccatttgaaaaaggaagaaaaaattatttcaatgtaacaagagaaaaaatttaatgattttttatcaatttttttttatgtattttaaattttattccattccatccttatttttattcccattcttattcttatttctatattttaattcctcctaatcaaatgccatctaaatgaaatgaattgtaggtcaagtaaaaaaaagtaaatcaatttaatttattttaaggtaaaaataacaaaattaacaataacatttaagtaattcttttgtaaggtattttaagagaaatttaattgcattgaggtaaaaaagaaaaagttcattgttagtcaactcgggcggctacatgacttgctacacaata

SEQ ID NO: 244257 - DNA, 1481 bp, Cannabis indica
atcattcgagttgacaataatgttcgcgaggatcgagctcttctgtatgtttactgtaactaactcgagtctgtttgatattatttttttttatttattttttttataagtaaccttacatgaaaaaaaatatcgtaacacaaaagtagagaaataatgtaacattaacattctgacttatataaaattctaatatttgttgtttttttgtagaaatggagcacaaaaattattgagtatgttgatagcgattggtgaagctgttgcttatgtttgctcaggaatgtatggaagtgttgatcaaattggaattggaaattccatccttattattcttcaactcttctttgcttccattattgtcatatccctagatgagcttctacaaaagggttatggcttaggctcagctatttcgcttttcatcacaacaaacgtttggtaagtaattagtcttttttcttttatgactcttttattaatgatttgattaatgattggataatgtcatatgatttttctagtgagaatataatatggaaggcgtttagcccggtcactattagcagtagtggccgcggagttgagtttgaaggtgctgttatagctctattccatcaattattaacccgaacagacaaagttggtgctcttcgcgaagcattttttaggcaaaatttgcctaatgtcacgaatttgctctcaactatcatgattttcctcgttgttgtctactttcaagggtttcgtgttcttcttcgagtgagatcgaagaatgctcgtggacaacaaggctcatatcctatcaaattgttttacacctccaacatgcctattatacttcaatctgcacttgtttccaacatttactttatctctcaggtatgtgcgatctcgatattttttttttttgtcgtaattactcttctcgattaaaaaaattaaaagggcactattaaaatttagagggattaagaaaattctcagaaagttaggcaatatttacgacgaaattcctttaatatttacaattgttacatatatgactcaaattaaaaaagtagcggcaaaagtactttatcttacgattttgttgcagtcataccagtttttagttgttaagtgtctattaagcccgttaagtgccagcttagaagcacgtgacaatatatttctttagcttatttaatatgtggttcaataatatatcgtcacatgtttctaaggtaacacataatggccaaaaaaatgtacgatcgcaacaaagttgtaagataatgtatttttgccgctaccttttttgattagggtcatatgtgtaacaattgtaaatattaaaaaaaattcgccacaaatatcccaagctaacacctaatacactatttttattgacatattaaacactatttttttgctttaccaattaatcttacatttttttattattctttatatgtatatatacagttgctctacaaaag

SEQ ID NO: 244258 - DNA, 1047 bp, Cannabis indica
ccttacggatcacgggactactgtgtataagagccagagtggcgtacttgcgtataagagccattagtccgtgggtgtaagggtccaatggaggcttgaagcggggacgttacatccaccaaggccaagaaaactacaaagatgatttgtgctagatgcaaggaaggacaaggtgcttgaagtttgactcactttcttacattggctcgaactgcggttgcagagtggataagacaacactcagccaagacttggctcgattttccattgacgtcctacaataagagggtgttagctttagctaaataagcacaaagcattaagccttagtttcttttagagacctaatcttcctcactaatatccttcgccatcagtaagcattcttgcttgacttgtcaataacaatttttatcatctgttgttcacaaaactttactatttttcctctctttcacatctttataattttttaagcatatataacttagtttataccatatcttggtgactttggaatttaagttaaatatatttttttagcgcttatgttattttgatgcttattatctttttaaaacaacgttttaaagataacattatttttgttgccaatggtggcttgtatttttactagtttgagcaaattgttggcatgtgccttaactcttcgggtactcaaatttaactcacatttactttttgatcactccttttacggagctgattgtaacaaccttctcccaataaatagtgaaagaactcactagtggagcgaacctaaaatcatattcacgcatctaagagcaccttactaaaagatattctctgtaaatactttgcgagttgtagctaaaattcactttgtctaccttagtgatttgcacgacaatatctcataatcaatacaaaaaaaaaggggactaggtcattacctacatataagggggtcaaacctctataattttgtgtgttctttctatttattttttattttcaaatccttattgatgattaatcaaagtttattagactccaagtcagttg

SEQ ID NO: 244259 - DNA, 941 bp, Cannabis indica
gatgataactctcaaataaattatatttaaaaacttatgagcaaagtctgtgtaacactaggccttccacaaaatcaacctacaaaataacaataaaactctattaccacacaatttaatgaaaaaatatgtaatgtgaataaaacttgtaaaacaattcatataataatatcaagactgaaaaatgcttatatttcaaatcttaaagtcctttgtagaagccatgaagtactaacaaaagtataaagataaaataaatatttgaagtaaatataaataatctcaaaaatttgaattgtaaaaacagtttaatagcttatttaaagtaagataataaaaaaataatgtaaatttatatgaattaatgtaataaataaaaaaaaaatcatatgaggatatacataaataaatcaattacagatataatattttatgtaaatgttctaaataaataccataaaataaactgtacttttcaaaactataaacttgtaaaaaaataccaaaattagaaaatattgttgttattctcgaaattcagcgagcacatcaaatgaagacacgtaccaggctgggaagaataaggaactcaaacacataatcataattacgctcgaaatgaataactcgttagaagaataattagcaaagtatgtttacaactcgtctgactgaacagtcttatgcgagttaaaaatgtacaaattgttgctttgtgcctcgatgagaaaccatgtaacttcaggtgtaaaagacgaggcactaacctcgtcacgtagatgagatatagcgacaatggaaatacttagtgtatagtgcacggtatacaaactaagttataactgatgggtggaccaaaagcaaagagataacgaggcatccactcgctgtaggaggggcatgcacgcgaaaaaaatgacctcgtcaccagaaactgtagt

SEQ ID NO: 244260 - DNA, 914 bp, Cannabis indica
cattccaatggaatgctctttctacctattttggtggaatgactattccaattttaaaaagaaaagaatgaccattccaatgtaacaagaaaaaaaatttaatgatttttttatcaattttttttatgcattttaaattttattccattccattcctattcctattcctattctcattcctattcccattcctatattttcattcctcccaaccaaacgcttccttagtgtctagtttctgtccagtaccaatgaatgaggttgggtcacataacatgactgcccttccattccatgcattttgaaacatttatgatttatttattatcaatctttaaatttgaaaaacaataatcaaactgagtagttcatgataatattgtctttgacctttactgacattaaccaaagaaccctgttacaacccgaaccaaaatgagagacaagacaagggaaccaactcaatgtaattgcatgtgtaatgttctattcagtataattaatttcattccacaaaacacaatacgtggcagttggctcattattattttattaaaaaccaaaagttcatatgttcacatgagtattacgacttttatgtcaaccttttggaaagaaaaataaatgaaaagtttgttttactatatagttattatttgttaggtttatataaggcatagaaaatatctaaggagagagatacataattaattagttattaattgtcagtagcaaagcgaataaggaaatatgtcaaataatcaatgttcaaatttctcatgattgagaagaatgttgaattgaaaatattggtcttgacaaactggaaaaagagaatattaattaaatttatacctagctagaaggtgatcacgcacagcctagcctagcctagcctagcctacctttataag

SEQ ID NO: 244261 - DNA, 971 bp, Cannabis indica
caaatcttaaaaaaattagaaattgaagtatataagaaaaattctagattaatgttgtttagttaataattaaaataaaaatataaaaatatttttttaaaaaaaaaaaataagaaaacgatcttgaccacattcatggtttcatgaactacttaatacttgtatttttgtaatttttatttatgcttttacatttatggccttttcttgttcatattttaaagtttgcatttttttttatatatatattctttattatttcttgttgacattcatagttttattaacacgataatcttagtactccggtgaagtggtaaacacttttaaagctcttaaaatttctaaagtttgattctcctcaactaaaaatcgaccttggcatatatttatatatatttatagaattatagtaaatttagagtatgaattattgttgtatctcttatctctcctcgttcttttatgaaataattaatattttattttcgttctacattttctattcgatcatctctttcgttccaaaatttcatcctaccaaatcttaaatagggatcctactttgttatgtgatgtatacttcattaaaactatatctctttattatcaacttgttggtaagaaattatatggtggatatttcttttatcctcaaaattgagatttttataacccacacacacttgctaaatgttcaacttaattttatgtactattacaaattcatttgagtatattcatgtaaatattgtgttccataattctaaaattatgttttttttttcacacctctaaagatatttcaaaagatcaacttcacatcattcttttctttcttgtcgaaacaattcaagttcattattgtgaaaaagcacaacatgatatgaaaggttttgttttattcttattggaatggaatgccaccttcaaatgtcatctttagcttatttccttttcaattttttttt

SEQ ID NO: 244262 - DNA, 725 bp, Cannabis indica
ttttaataaaagaaaaaattttaagcccttagactagtagtcgggcttgctaacacttgacacatccaaacatacgaagtgcatctatacataagtctgagagcgtaccaaaggcacctttcaacctatgttcttcataatttcatgcgagtactgtttgtaccatttgtgactgcaccatcgaggctcttgccaaggcttctccaagaccaaccttgtgataggtactcactagccttgcaagcactactttagagaaagggtgaactcacaagtccaatattaatatcttaatttcgaatgataatatgaattggtcttatatttatatcgtctactaatacacaattaatcaatgtttgaataaagattctttcccatattaatacatttcgagaactcacaaaaatctctttaatgtacttacctaatttgagcacctaagaagaaagcctcatgcaagtgctccaccatgcaaccctccgagtgcttcactatacgattatcaccctctaaactaatttaataattacattaaactaattaactcaatttcgattacattgtgattttcttaaataaaatattattttgtaaattaaagtcaattgtatttgtcattgaagatttcgataattggaacaatatattacatgattttctttaaatttaggatcgaccttgaaatataatagttcatagaaaaaaaaatagacccttattta

SEQ ID NO: 244263 - DNA, 1028 bp, Cannabis indica
catttaatttactttatacattatactatcttacgtcacctccagtaggtcctaattaaaattccatatatttatgtcataaataacaatatatgaaagaaaaaaaaaaaacaataacaacccacgaaattgcgcatgaattgatgaatataaatatatttacaaacatctgtatataaattaaaaacgttagatgatttttactattattattaatatattattattatgagagagggtgggtgtataactatatatatatagttaatgatgaataaaagagaattctaaaatgtcatgtaaaaaaagagttgtacgtacctgccagtgcctgtaatttctttaattatgggtaggaaataaaataaattaaagaacgcgtatacatatagagttatttaaccgtagaataaataattcatcaaaaaaactaaagagtaaataattaatgtggcccttttcaacaaaaaataaaataaaataaaattattgttgaaattatctaacttgaatataaaaataaatgtatcaacacattgtgcttttaagacaattttaattttaatatttttacatgcatgatgggtatacaatatgtatattatttaagttcgataaaattagaataatttaacgtattaaaaataaaatttaaataatttattatactagtatttttttatttatatatgaatgaaatagactgttttaaactttaattttctgtattataaattattttaatttcttaaatcttgttagtaaaattaaaattatttgaaaattaaaaatatatataaaaataaaatgttaaatgcactcatttatagagagtacttcattgtagaatcgaagtatccatttcattattttacatgtaggagagcgtatcctttttaattagaggaaattacacttagtatgggattttaaaagttcttatgataaatatggcacatttaagtttggccaatttatatggtatttttttgtttttaggtttttgtatggtatttgatatgccatat

SEQ ID NO: 244264 - DNA, 2233 bp, Cannabis indica
ggtgaggtaagtgaagaaaatgagcccacatgtattacataagtgactttttgggggaaaccttttttcacttgtcacttttaacttttcactttctctcactagaaacttgccttaggaaaatctcctcattctctctaagtggttgaatccacaagcatcattcttcttgggatttttgtgctgttttgacaatccgagcttcccaccttcttctctaataaaatcttgtagtgggtaagttttctaatcctgccattttacttgatttgattaatttttccatggatgcatgaattctattctttgctttgcacatgccttgattcttacattagattgttatccttttggtattttgatcttcatgatagccttaagatgcataatgtgtgagttttagacaaaaaaagaattgaatctgactattgttgtgattcttggctctttaagtcacaaagaacacgaagaacatgtttgagttctttaaaaaacatgtgttctgatccatgcgtatcctggctggccaagggggccttgtttaaggcctggccggccataggtggctttcatggggtctagccagccatagagactgtgtccttaggctagccagcctatgcttggaattagggttcctgcccgaccactagactaggtcttggggtctggccagccactaagacctggaaccctagccagccaaggccaaggatccaagtgggcagccaatttttctccctctttagaactcaactagggtcccgtgacggccttggaggcatatacagttgtagccttatgcatggtttctcttggaaactctgtataaggctaggtagtgagtccattatagtcaattatacaacttagggcttactatatgtcttagtaagtgtacttaagacggtacttggtcgttgatcgaccatgtacattttgttttacctggaaggtacccttgggtactattaacttgaatgtgtttgtagctttgttaagttactcacctccccttattacttccatgcaggtagtgctttgtgttgaataggggaggtgagagctacgtaagtctcttgcttgccttgtacttatggtcagaatgaaacactctgtgtagggtgcctccatatgatccccacgtggccagggtggctacaaggagtcgagttagaatggtggaggagaccgatcaaccctctgttgatgttgagccagagatagactaaggggttgagagttttgatgcaaaatcagagctggaggaggttgctccagtgaggagtatgaggaggtacaaactcgttctatcctccctaattgtcccttgggtcactatggcgcctgtggtaatccactgaaaaggctttgtgagccttcagagctaggactagaccatgtcctagagcaatctcctgggctggagatactggacgcgagatcacatggagctagttgggtctcacctacttctactctgtcgaatgaggcctttagtgagatccttgctagtggcttaataggggatgtccactgcgagattcctcgtagaaactatcggcgcatcgaccccctctaggttggttggcgtggtctgagcatcatattaaacatggggcagtgctgccgcttcaccagtattttctggatgtcactttgggatgtgcccaacataactcatgtcaaagagcataaataatctcttggcgatgttcgtcttgtatagggagctaggctggcctccgcctaccccttacgagatcaggtactactttgatctgaagtcaacgccaaagtagaacagaattggatatttttatttaacccagattggtcaccaatggctgggtgacactaattgcacaaccatgtcgaaagttggcaggtatgccaaaaagtactttattgcatatggtttttgttggattaggcactacgaatttcaactggtgccacctttcagacactctatccctactttgcaaataagggatagggaaaatcacatcatgtctctatcggatgagtagagaaatataatctggttgaccagtgtagaaaatttctgaaagtatggcttatatcctcttgctcttggagttgcaagagcgccaactgcagatgtgcctagatatgggcagctcctgacttggatgatgatgaggtcctttgtctcatatttgtaaaatttggagaagagagagaaggttctctgctggtgcctagccga

SEQ ID NO: 244265 - DNA, 757 bp, Cannabis indica
agtttatcaatacaagactatcagctaaaaaacttgcaaaacttggccatacctttgagctctaggcctttatttatagagaaatgttttacagagatagagtagaaaggaaaagagatagagagggttgttagtgttacaacaaactgactataactaactctcaacagtaaaaatggaaactgaaaaatacaaaattagttattcattatcgatcatgccctcaagtgaaagggtctagaatacacctttagtttagacttgagataagtaaatctctcatcagctacttggtcaatagaaggaacatatttaacttcaatttgtttagccaaaatttgatcacgaactttaaagtgaaaattgatttcaatttgcttagacaatgcgtggaactctggattagctgctagattacccaagttattggagcagtaggtagcttgacatgaagttcagaaagaactgaagtgatctatttgatttctgtagcagaattagttagaacacgaaactcactttcagtactcaattaagctacaacttgttgtttactagctgaccaaaatattataattcctccaaaaaaaaaaatatatcaagacaactgtcacaatttgctcaattatgattattatgatcatttcatggtttttttgtcattaccatcaattttttttttttaatgttataagatttacgtaatgttaccccataaaaaataaagatttatgtataaattgtaacgtccccgctt

SEQ ID NO: 244266 - DNA, 2474 bp, Cannabis indica
gttaaaaattagagtaatttgtgccttaaatacatatgtttaactctcagttttgaataaatatttaagtaattttatatttctgaaactctcgtagatacctgacctttaaatgtcaaatcattatccacgtttcattttttattggtatatttaaattaaattttaaataaaaaataaaaatttaatgatttggactaattaaggactaccacgtggcaatttacttaatacttaactatcgggtacttacagaagttctataattaaattttagtattataatttaatttttattttttatgagttttaaggtataagtttgtaaaagtatagttttttctaaaaaattattttattatgagaaaatttataaaaaaaaaaagtaactagttacctttttaatttccctcagattactcttacctgatttttctacattttcgtaatttttcttaaattttctcataaaataaatttttttaaaaaaaagttaatatttttacacaaatggtatataataccatgaaaacttataagttcttcataaatatgtgtactaatttttgtagaagaaaataacttgttagtttataaagatttttacaatatttatacacgtacgtacattacacatatatcatgtatatatataagtgtaattgaatatatagtacaagctagctttgccaaatgtcaaattttaaaaacggtatattgaagaaatacataaaaaaaataatatatatttttaaaaaatgatcatatatataaaatatatatatagatatatagttaattgatgtgtccgtacaatcacaccagctagggttatatatatgttttgaagtttggtcaaagatgctttgtaagataagtaaaaaaatagtggtgagaaagaccatttattgtttctttgtttgattatcctttcctcttccctaacgtatacttactgtccttaccattagtgacaaggaaataatattttggtatttcattttgatcatgtgaaaatgactatatacaaacatatttaaattttataataatatataagccactacatgcaactaatactatcgagtctatatgatgtagttggttagatgactttacaaagttcttcggagtttgagttcttaagtacggtataatatctatcctaagtcttaaaagtgacgctcctttataagccctaacttacttctcgttaatcttcgggattggtattaagagttgggaatataatgcgcaccacttaattcccttttaattatatataaaaaaaaacacttgttaggaatggttttatatatttttaataaattataattctatatgtttataactaatagttagttattaattagtggcagattcacattttttgtaaccctaatattttcgtaaaattaagtttactatctacattatttattctagttattatgaaataatttaggcgcatattgtatttaaaaccaaaaatgttaattatatatttttaaaatttaatcttaatacttttcttaattttcttttaccttattatttaattaatttcaataacctttttttgtcttgttttcatatattttttatttttattttaacaacatttttttattatattttataatatacttttctatgatttgagaaggaataaaaaacaataaaaaatagtacaaactggaaacatatattttaagtaaaataaaaatcatgaaataaaaataatttcttttagtgcaaagccataatagatgaaaccttttaatttgggcttcaattttcatcagctgggccacttttagatttaaaccattatccaatattgggccgatttgtaggcccaactttaaagctaaagattgaatatcaaatttttgagttttttctttcatttttatgggagttttctaatatgtaaggaggcaatctcatatttcacatataccaataaatatcaatataatctataaaaaaaaaacacatttaatgtataatattatttgggtaaatactattttggaccctatattttataaaatataccaattagatcttctgttttgttaaataacaaaatgaacattgtattttccaaaatggtataaataggaccttgaactgatttttgtcaaaataaaatttaataattatctaatctaaaagtgtaatgacaaaattttttacattatttttttttttgtatctgttcgtgttagaaattgtctacaaattagttatattaaaaaaaattgtcaaaaattaagctaaatttaaaaaaaaaaaatttaaagaatagcacaaatgtgatagtaattaagtataggctctcatataattaaaaaaaaaattaaagaatattgctatccaatcataagacgccacttgacaccacgggtcccaatagtaatactctattcaaataaaagtttttttttaattgagaaataaaataataa

SEQ ID NO: 244267 - DNA, 1920 bp, Cannabis indica
atatatattgtgctaatagactatactattatatagaaagttcatattatcttgatgtaggtgattttgacaagaggtattttggttcgaatcgggtttggggtccaaaattcctgaactttgtaattagagcataatttaaattatataaatgtgtgaatatattggtgtggttcttaattgttgtttatattgattttgtgtctaagggcaaaatagtcttttgattaatttttctataatgaagtacatgattcattttgtgaaaattaaaggaaaacaaaattattttctggttctctatctctcaaactgaccccctctccctctctcaatcacttttgtaatttctttagagaatcttgaagatttgaatccatttctttggtggattttgagattggaaccttgaggttttttaagtcataaatttaatctttgaattgaaattatttttagttgaaaatgcttattattgagctaaaattgcatgttaaattttgcttggtttgttgatgaaagtcttgtttataaagctaagttttggttgtaaattagctaattatttaagttttacagcttgatcttgtttaatcttttgataatttagttttgaatttagtaatttgagtatgtttaaggtattgtgcttgtggtgagtttgaagacatttgttgcttgtaactttgtcatttagaataattttagtttgtgagatgggttgtatattttaaagtgtttaaacatgttaatttgatgtatgaaatgcttaggaaatactttagtttggtttgaaaattaattgttaggttttgataagttttggtaggaattggtaaatgctcgatttcggtcaaaacttgattttttggtcatttttggatttttaagctaggtcatcgcgaccagatatagagtttgtcgtgatgaggctcgaacctagaatatggatagcccctgcccaagctctaatcgtggtgagccttaatctagtcacaacgataattggtcgcgactagatgacaacaatagttcaatttttgctattttgttttaagcataacttttgactccaaaatttgattttgaagttctatatatcgttgaaaagatcattttgagctctgttacatcatttagaattatagtcttatatgtggatatttatgaatgtgattttgggattaactctattgtgtaaaaactcaagaattatgactaggagtaccagtgcttagttagaatcacctgtggattgagatttctccacatacactagaaatcaagtaagaaatcaaactaagcacatagagtatagcgtggtggcacaattatatgatatttgattgttattgtgaaatcatgatttatggttattaccctaagtgcgtcctgtgataaatatgcactaatatgttaaacagatatttgagtagagttatgcaagtaaggcataatcagattagactgagtaactataacgcgataaatcctagtaaggccttatatgtaaaagagacgtgttagtgtaacacgtaggtctatgctatatagatatttttttaaggtatatatagacattaattatagtggtattatagtatatgaaataatgtaatatgtagtgcggtggcatatttatatatgcagatgcataatgtatgaaaggaaattttataattgttcataatgtattattttttgttttgttgggccttggctcacaggtgctctattgtgcaggcaagagtaaagcagtgtctggttaaccatgagttcaagggttgtgttatatatgttctgaccaagctagatcacgagggttgggtccatgtaacgtccccgcttcaagcctccattgggtccttacacccacggaatgaatggctcttatacacgagtacgccactctggctgctt

SEQ ID NO: 244268 - DNA, 850 bp, Cannabis indica
tatttttggtgatattctcatcacacaaaatcatatattatcatcaataaccaattacgattatgaattgtgccttacatttgtactaaaaaattgctgtcttaataaagttaccgtcattttaaataaccaggtacttatattttggataaccaattacatatattttaggtaactaggtacttatattttgggtaactgctatatttcaggtaatcaaatattaacttgggtaaccatctacttatatttttggtaactaggtactcttgggtaacaatctatttatattattatcttgggtaaccatctacttataatatcggtaaccagatactatcattggtaaccaatcacttatatttttttgcgaccaagtacttacattttgggtaactaggaacttatattttgggtaaccatctccttatattttgggtaacttggtactcttggacaacgatctacttaaattttgagtaactagatattattttaggtaaccatctacttatattgtgggtaaccaagtacttatattttggataaccaataactatactttgggcaaccatgtacttatattttgggtaatcacctacttatattttgtataactaaatactatctttgataaccaattacttatattttgtaactaggtacttatagttttggtaaccaaatacttaaattttaggtaactagaatcttatattttagataataagatacttatattttgggtaactatactattttaagtaattaattacttatattttgggtaaccagttactaatatgggaggatgaagctcttcttgtgatgagtggatcttgagaatagc

SEQ ID NO: 244269 - DNA, 1883 bp, Cannabis indica
ttttgatattttttttatatatttttgagggccccaaaatttaattcgtcttgggccctatatttccagggtcggccctgcatgtgagcccctgaggctcacaacatgcacatatgcatgcactcaacacacacacatgtgacaccacgattcgcatgtgaggcccccacatgggcttgcatgcaagccctcgagactcacaacatatgcacacactcaccatgcactaaaggtgagcaaaaaatcaaagaaaccgatcaaactgagtacaccgaccgttcgaacaccgaaaaaactaacactgaaaaaacgaaaaaacgaaaaaacccgcgttctgttaaaacttcctttgcacggtcaattttagtgtcaatggcaaatcgaccgattaaatcgataaccgaccgaacatatatattatacactatacgtaatataattatttttgtgcatatttaatatataattttattaaactagttgtatttcttatcttttttatttaaagtctcaattattcattgcttttttttattataatttgatgtatctatgtattatattcaaacattataaaataatacgagtttttgaatttaactcattaccatattagtagcacaaataattttagcaaatttaaaaaagtttattttacattctttatttaactaaaaaagttcttattcttaaattatatgatatttcatacaacattgtaatttttttagctctcaaataattatagcagatttcaagatttatttttttagaaaaaatgaggctcggtttggtcagtttaaaccgagcaaaccgtaaaccagttgcgtttttttatatctatataatggtcgatcggttttttggattataaccatgaaaatcgaaaaccgaattttgaattttttttgtgtaaaaaagcgaccaaaccgaccgttgctcacccctaccatgcagtgcttgcatgcgagcccccacatgggctcgcatgagagcctcccactcgcaacacacgcacgctgcacacactccaaacatggctcacatgtgatccccctactcacaacacacgcacgctgcacacacgtgctacacacacgggctgcacacacgccacacacggctcgcatgcaagcccccaacatgggctcgcatgcgagatacccactcgcaacacacacacacacacactacacacagctcgcatgcgagcctcccactcacaacgcatgaacaccacacacacaacgcacagctcgcatgcaagcctccacatgggatcgcatgcgagtccacaacccaagcatccacacacgatgttcacgcatccatgtatggttcacatgattggtcttggagctgtatggatgtatcccaatacccgcaagtactgactttgagaaatgtgcaccgggtgagtagactaacttaatgcgctctcgcttgtctcttggtctttaggtgactaatcctgagagttagcaacgtcaatttttggggataacataaacgacaaaacataatacatgtacactaaacatgtacatatgtgtatctgaatactaatcttatcttaattccataatcaagtgtagtagttaacctgagtggaaaattgcttgatgagcgaagaccttatgtcacattaacgtaaaactaataagtgtctcactaaaataatttcaggaacttaaactcataatttgaagtttccatattgataaatatcgttgcagtatgctaaatactgagaaaatataaaaactatggtacccaaaaattctcctaaatgggcgaccggatccctaaatagttgcccaaaattctgggcaagacacatttatttctttcccccaaatcggtaccctttttgtattagagtt

SEQ ID NO: 244270 - DNA, 2478 bp, Cannabis indica
ccctacaaaccaacataagtgttttcaacatgctttgtcctcagtgcacactttctaggaaaacttctcaagaagccacccattctttcgtcagagtgtgaaagaggagagactgtattgaggaggtagtatttattttgaaaaaaatgaggtaacaacataacaactcccatttttatacaaaacgacaatatcttatgaaaacgatagaacacaagtcttaattatttacttgtttaaccaacaacaaaaatgaatatatatatatacatagtttttttttaatttgcgtgtagttaagattgagtttgtacatatatgtacttgactcatgctttcccaattcttcaatgaacttggtgttcaaatcgaatgtgcgaactacactgtcaagcacgaacttcaatttgtagttagtacagtccagaaaagaagtggattctttcaaatagtccatctcatccaacaactccaaaaaaaaattcacgtcttctagcgtcaaatggccttgatcatgcatgacaactttcctcactttgaggattttctcactcaaatgaaaccgtacaaaacagagacatttattccaccacattggtttggaagccatcatctcctctgtaagaaagagggaacatttaccaaatctctctaatttaaaatgaaactgtcgtagcttccctcgtagaaattttctcgattcactcgtttcggtaaaagatgatgtgagaaaatgcaccatttgtgaatctatagaagtcaaagtcgagtaggtattagaataggaactcacattgtaagccctccagtgcggctgacctgaggtgtataactacgcttgccaattaggatatttcttgctctcacaacgcaataagacctttaccgtcttcgattcaacatacagatgccaaatacgatatacagcaacgggtatgggtggcaaagtgatattctgttcggtagcaggattaaaaagctagtacaactttcttctactactgtccacttcatcaaaacaatgtcatgtttaatgtcgaaaataatggcaccaatgagaggagttaaggagaggttagataatatcccatcctggaaactaattttctgattacgtttcaccataataggaaagtacttatgctcgcaatatgtgatgaaattgttaatgattcgcttccactgtttgcttactagactacaccttatcataattttcagcgatagcctactgataatttcatctaaggctttatcaagaaaatcacgattctctagggaaaatttcaaaccctttgcttccaccgttaaacaaaaaagtgaatctagactagaaatattactattcatacaaacatatcctagagagatcatactaatcttaaaatgtccaacccaaagattgatatagaatcaacataatgataaacaaaataaacaacatatataaaatcaatattacacatatataaatacattacctggtgacgcaatttgaaggaggaatgacagtgatttcggcgacaaaaaaaaatctaaaaaaaaagaagtcgagagagcaagagagagagtctggtaatggtagtagaccttctccagagagagtgtgaaagaagagagactgtattgaggcggtagtatttattttaaaaaaatggggtaacaacataacaactcccatttctctactaaacgacaatatcatatgaaaacgacaatatcaaatgaaaacgccttaacacaactcttaattatttagttgtttaaccaacaacggaaatgaatatatatatatatatttttttaatttgtgtgttgttaagattgagtttgtacaattatgtacttgactcttgctttcccgattctttaatgaacttagtgttcaaattgaatgtgcgaactacactgtcaagcacgaacttcagtttggagttagtacagtccggaaaagaagtggattctttcaaatagcccatctcatccaacaactccaaagaaagattcacgtcttctaacgtcaaatggccttgatcaagcatgacaactttcctcaccttgaggattttctcactcaaatgcaactgtacaaaacaaagacatttatcccaccacattggtttggaggccatcatctcctctgtaagaatgagagaacatttacaaaatctctctgatttaaaatgaaactatagtagctcccgcttagaaattctctcgattcactcgttctggtataagatgatgtgatgaaatgtaccgtttgtgcatctatagaagtcaaagtcgagtatgtattagaataggaactcacattataagccctccattgcggctgacctaaggtgtataagtaggctagccaattgggatacttcttgctctcacatcggaacaagacttttacggtcttcgattcaacatacagatgccaaatacgatatttaataatgggtatggatggcaaagtgattctct

SEQ ID NO: 244271 - DNA, 1587 bp, Cannabis indica
ttgaaaaaagactgaccaagattgttgatagccaaacctgatccatctcccatgtggatttggtgatcaccattgtaatcttgactgtattgcaggttttgagcatggggagtaaggtgatgagtggctccagagtcaagataccatgaagcatcaccaacagtttcagggctagcatatagaggaggcatttcagctaactgtgcacttccagcaaagttttgaaaagtagcaggtcctgtgaacaatttattgaatttatagaagcattgagtgacagtatgaccaagtttatggcataattgacactgtactttctgtccccaagcagaatattggcctctaccacgatttatgggagattgccctctgcctggtgtggaggcacgtccatttgcagaactcggataggaagcaaaacctggcggagcatggcttgcaaattatagaggaggatgttgggagctgctgtttgcattcctagtcataacagtggggtaattagatgaattttgagggatatgagaagaagaaaaagtacctcgactgtgatgaaagggtttagtgtgagccatattagcttcttatttgttgacatccaattctttggatcctttctccaatcgaacttcttgagcaatcaagagagcttcgatttcagccacagagtaattatccaatcttgtgttcatagaggtaatgaaaacatcatagtcacttgggagaccattgaagataacttcaatgtgatcttgaggagtcattggtgtccaatggaggcaagggtgtcaacaatccgtttgatcttgaggataaaataccaagagatttctgcatcttcgtgtttcagagcaatgttcgatattgactgatattggcacgatttagggttgtgtaatacactttgagagtattccagatctgagcagctgtttcacatcctaccattcttgttaaaattttctctgacattgaagataaaagccatgaaaccaagatactatcttgctgatcccaatcttcgtattcagcacttacacgattcacaactttgtcttcatcagcgaggaattgaggaggagcgcgatctggttcaagaaatctctgcaacctgcttcttttaatggcggcaaaaacttggtgcttccatggaagataattgtgctcatctaaacaaatagagagggagtgactgaatgttacaggggaggttttaggacgagtggtgttagcatttggtggatttgtttgagatgaacctccattgccattatctgaaagaacttccattgatgccaaagaaaaggctctgataccatgtaaacgatagtgaaagaaagaaaagaggaagaacaagaggaaagaagcaactgtattattccattcaataaaccagggtattacaagtatttatatactactcaacaagagaatgatagagctgaaacagttacaactgaagtgtaacaaccaaaacagaaataactaacatgacagctcatcattctcaacagattgcacaattttttttatgtgtcaacacacatatgagtgtgtatatatacagggccgtctcaaggtattgag

SEQ ID NO: 244272 - DNA, 1075 bp, Cannabis indica
gaaaatttattaaacatatgagagtttagtgaccaaaaaaaaaataatttcttgagttagaatatttttttttgcattgtatggaatgttgagtaaataattaattacttttgataacttaattatttattttgtgcatattattattgtgcgtataacaataataattatataaatttattttatattatggtgtaatatatttgttatattgttgttgttattttattagagatataatatggtaatattaataatattattatataatgatattatatggtatagttgatacacatattatttttactattttttttatacatacgattacaatagctaaaatagtgggagtgaatcgttcaaactttcagtttaaacgatccacgttattctcattttaacgtgatggggatcgactcctagggttaagaattcgtgagaaagagcaagaggcagagagtgtgtgggtcgggagcgtaacgaaccactgtagcaactaatttttttttcttttcttccttcttcgggttgggcgtgttctgggttactttgagagttttcattaggcttttgagactctaagaaagggtttgagcatattaaaacagtccaaaaacacccagaacgagattcaccattttaatgcatgttcatacacgttcttgagtgatcttgaatttaaacatgtttgaatcatttctgggtttacaaaaggttgtatttaagcgtatgggacctaaaggataatttttgacgtgaagaatcgaagctttaaggccccatacgaaaatttccatttttggctccattattgacggtacaccggagttggagaagatgactctgatctgatgcgttggggctgttatggtgggtagttcttgatcgttttgaggtcctaagcactgtggaaagcttccccaatcgaagggacgcgtcaaaagcaatcggggacaaagttacactttgctggcgacaaaaccgatgagaacaccggcgaccgtaatctgggcagttatgaggtgtttttcccatctttttttgtagattttgattctacatattattttag

SEQ ID NO: 244273 - DNA, 1703 bp, Cannabis indica
agttatggccaaaatacaattttcgatcttaaaaaaaaactgaaccgctttattctgctccaaaaacggtctaccatgttttgccggaacgaaataactcaattataaacttctcaaaaccccatcaaaacctaactaattgatttcaaatttcatagaacacctatataacatctatacaacaattctaacgtaacagaactcaaaatcatgtcgttaaacaaaaagtgccattaatgctcaagctttgagctttaaaagctcaaacttgattcataactcaaaacagtggtaaagttatcacataagcatttgatggtggtggtgatcagttttggctcgcacgagagagaggtgtttgatatgtttttgtttttaaaacattttaatatatatacatatatattagataagaatcagattaataatactaataataataataaaatattattttattatatcttagccactaaaaaatttctaaccttagggtatttggtcaaccccgagtaccctaaaatatcttggtaattctataatcaacttatctcaataatctcatcaacattaataactaaactcgatgtgatatttttgacctctgatcgaatctctaagatcaccgaacctaaaaatatttttatttcacaaatagcttacaatatattcatgtattctaaataagtctatgtaattaataaattatgtttatttatccacttatgacacattagggtatttggtcaacctcgagtaccctaaaatatcttggtaattctataatcaacttatctcaataatctcatcaacattaataactaaacccgatgtgacatttttgacctctgatcggatctttaagatcaccgaacctaaaaatattttcatttcaaaaatagcttacaatatattcatatattctaaataagtctctgtaattaataaattatgcttatttatccacttatgacaaaatttataatttatgttgaactaggttagtaggatcataattctactcattactacctaattaatccataatatataataaattataattattcattattaggcttccatgatattaattacaaccatccattccttatagtaaattttgtcctacaaaattttacttaaacaactcgggatactgctcctacatctacgtactcttaactttaaagtcacttcttccattttgttgtttctttacatcacttttaacaagttgaattgtcttattccaaattactttttatttccagtccaaaacttggataggttgtttctcatataataaatctgtctaaagctcaaagttgtcatagctcagaatatgtgtcggatctaatacatactttttcaacatggagatatgaaacacatcatacactccggttagcgtaggagtcaaagctagccaataggctaactggcctacttactccagtatcaaaaaggtctaacaaatttagggtttaacttttctttctacgtatcccttttataggtgatactcaaagagatataatatctcccacttggaactctatatttccacactttgaattagtgtagcttttctatgtaatcaatgaggtgagtatacaactcgaattcactctatggtcttatatgtgatagtcagtagtcccgtgatccgtaaagggaaacaccgggtaagctgtgcaatc

SEQ ID NO: 244274 - DNA, 772 bp, Cannabis indica
ttttggattacgaccagacccggaccaaatctcctccccatggccctggcgctgaacccggcttctgatccaaacccgaatctgaccccggacctagacccaacttaaataaaataaaaaaataaaaaaaaaatgaattttacagaacgcatttttgttttctatttttaaaattgaaaaacaaaagttgttacagaacacatttttgtttttcagaaataaattttttaaaaacaaaaattttactttcattttgtgattaaaaaattgaaaaagaaaagtgttaccaaacagcatcttaaataatttataatcataaaatcacaacattttattttgaaatatattttatacttgtatgaaataagttattttggaatcagttttgacattataaattatttggagtattaaaaatttaaatgttttaaataattataatatatattttaaaaaaaaaaactataatatacactattatataaaattaatttagattataatagtaaaaagcacacgtactcttactatacaaatgtcctatattcatactctaagtataggcgtattaagcctatgtttagggcccatctaacacagaggttgaaaaaaaattcaattttaaaattatatattttttttattgattttaaaaattattattttttcttttaaagaagggttccaatttttttttttcttatgacacattatattttaaagtcggccctttctaaatctatatcgatcatgcatatatatacatatatat

SEQ ID NO: 244275 - DNA, 941 bp, Cannabis indica
atgagcaccaaattgatgccttccgacctgccattgacagttgtggtttacaagaaattgatttctcaggtgacagattcacatggcataacaagcatactcaaaactctaatgtcaaagaaaggcttgattatggttttcttaatcactacgggtctgatagttttgttataccaacaattgagcatttggatttctttggttccgatcatagagcactacgagttcatatatccgtgccttctgctacacctgtgcagaaattaaaatcacgttttcgatttgaaaaaatatggctgaaggaagatcaatgcctagacatcatctcccacaattggcttaataccgagactgatcccaccagcaaccttcttaataatctgactaattgtgcttctcagcttcagcaatggcaccgctccaagtttggtgatttgcctaaaaaaataaaaatttcacagcaaaagattgaagctctcaacaacaaacacgatacaagcacggccattttgaagagcttaaattgagtgagtccatacttgatgaattattgtctcaagaagaagaatactggaagcagcgttctcgaatctcatggttgcaatcaggtgactctgatactcgatttttttcatcaaaaagcatcgagttgaagaaccaataatactattcgcatgctaactgatgaccaaggcattgaacatacttaaactgatggaattactcatgttgttcagtcctattttcaatctttatacagttctgaaggtattgatgctgctgctctccatcaggtcatttccacaatcccgagtctcatcacaacagaaaccaatcagattctaactcgtccatacacggctgctgaagtatatgaggctcttaaatctatgcaatcttatggcagccctggaattgacggtatgtccgtcatgttttac

SEQ ID NO: 244276 - DNA, 682 bp, Cannabis indica
tatttatttatttatatataacaatatgtatgtggttgtaaatattagattatatcatattttatgataaattatataccacaaaatattttgcatgaacatatatacctagagaaaaacattaaaaaaattagatgtgtgaatattcaattttatgagagataaataaataatcaaaaaattgtaagtaatttatttgaattattcttaacaatatcatttactcatatttctcaaataaataattcattttattttttctagaaaaattagaacatatacttttatagtataaatttgaaaattttagaataattataagtgtttttaaaaataaattattctctattattttatctcaaaaccaattcaagatccaaacattaagatatagatcatcacactctttattaattgatttaatataataactttaaaaaataatttcaatgtggaatatctttgtaacccatacaaaatcttcattacaaattattttttagggttaatattattttagattccgtgttttgtaaaaattattaattagaatatttattttgttaaatgaaaaaatagactatgtattttttaaaatagaataaatatgatcctgaatttaatttttgactatttttttaatataaccaacaaaatttacaaatagagaaacatgaataat

SEQ ID NO: 244277 - DNA, 787 bp, Cannabis indica
tatcccaagctcttgctgtcgtttgtgggggaagtgcagagtcggtctctcatgctcttctccactgtgccagagttaaaaaccatttaggcatcactctaagtttaagcagttttttgtcgtactaccgtaggcttgatattagggaattttatcttcatagtcttaccttaactcccagagctgaccttcccctgttttttggtgtaatttggcaaatatggaatatcaggaatgcccgtctctttcaaaaacccaatgtaattgataatgttcaagattttgtctcaagttttcttcaggattaccaggatgctcaaattcaatcctctatttccaacatggctcataaccattcctcagctgacttggatcaccttttgcttccatcgacccctgctctatttgttgatgctgccttgagtactaacgcaccagccacaggtattgggatggttttcatgcagggcctgtctcatattcaaaaatctgcaaggattttcaaaccaggggcctcttctccaatttttgctgaagctcaagctcttcatgaagggctccaattgtgtataacttccaatttgaccccaagatttattttttctgattgtcttaaccttgtctctaaggtgaatggtaattggcacgactactctccaatgtctactcttatccaacagatcagaaccttcctctccagattccctgaagctcctttgctgcatatttcccgtcagcgcaacggcaatgcccactcccttgcgaagttagctctcaggttgcgaga

SEQ ID NO: 244278 - DNA, 2554 bp, Cannabis indica
cctaaattaagtaatttcataaaaaaatattttaatttgaatatttatacttaaggttggaaaataattaatttattttcagaactacctaagttaataattttcattaatgtagaataaaatttatactttggatataaaataaattttataattattttattcctaagttagtaattcaataaatatattaaaataaattgtcgaaataaatagttgaataaaaaatactattttcttcaaattaatgacttttttttataagacattcgatctttattgttgatcttccaaggttgttgtttttaatggaagctcgagacgcttgacgtcccctaatggaaggtcacccattagataatttgacatcgtaagatcttgaagataagtatttttgtagatttattttctagtagactcatccctaaggatgactacatagaaaaaggttttatgagtatgaaacaatagtagaagttgataaaataggaatgaccttgactctcacctaaacgagacaatattggatttttattttgatcgaataaaagttcgctaaagtagtgtccattttagaatatctcactactctgtttaactagtgatattttttactctcgcctacataggacacgatatatcatttagtttaacaccttagaaatttgagatatgcttatttttagtatttttctatatctgccatatttgattatgtgtttacgatttttttgaatatatgtgattataatttatattgaacataacattgatttctgttattgattatgtagtatcaattttgaatctttattattggtctaacttaataatttttttaattgggacacatctttaatagttgatcatccattagacaaattaatagtgttagatctcgtaagataggtattttttaaatctaaaatctagttgactcatccccaatagatgaaaacttagagtagggtttacaataccaaaataatgaagaagtttataaaataagaataactttgactctcgcctaaacagagctttgttagattcttattttaattaaaattattctttataattcctatatagctttttctttaggaaactgctagtaatcatacatcattggacaagaataattataatcatttgcttatgatattgctctattttcttctaagaaaatgagtaacgcgaatgatatattctagatattcaactcatgaaatgatgactatcctcaattttcaagaattgaatctccttcttaaagttctactaaacatcgattgaacataaacttgggttatagttctaaaatcgttatcaagcattttgcaagctgaacttagagttgtaatattattataatggtggtccaagttagaatatatactcaattaaaatttagaaattatttccaaattttaatagaattccattttagtttctagattacataaacattgaatttaacttttacaagttttgattccattttaatggatcaaagtaagtgttgatgtatgaacatgagtttgatattctgagaccgagtatccactaatactatagtaactttttgttgtaactagacttagaaatcatatacgtcaaagtatagtaatgactattgttatcgaaggaactttatcttggtcatagtggttttaacaagattattctctacaaagagatatttgtgccaaataaccacttggatggtgtatacagatgtcattttgactagggacatacaaaccaggggtggttatgtgtaattcgtaagattcttaaacgaatactacaaatatttaacttatgccagaaatttgaaatgtttgaaaatttcatgaacttctagcaaaaacagttaagaaagtcattaaagatcttacaaactgataggggtggagaaatatttgatatgcagttcaaagattatataaatgaacatcaaattgtaattaaacttagctccttagcatatcaaaatcgcaaaattgatggaaacgattaggtttatgattagttactagtcgctacaaaaggccttttagtgatatgccttagagacagcaaatgatattttaaaatgtcatcccatctaagactaggtcctaagacaatcttggattgatataatggtcaagtacttagtgtagaccattatcaaatctagggatgccctgatcatgtccttaagaaaagctataactgctaactgaggtttgtatttttgttggttattctaaagtggctagggatggactatactatggtcatcaagactagaaactgtttgttttaacaaatactacttttctagacgtttactatataaatgtaatcttaaaaccaaagtagcaaagaagtggagatactattttgattcaaatccaaaagtgttccattatcttataccatataagatattcccacaacctctgttgtattgatgtaaccgaagatgtctataccactgaagttcctagacaaataatcatggtaccttattgtagtggagggtttctaggacccacctgtatgactt

SEQ ID NO: 244279 - DNA, 1059 bp, Cannabis indica
actctagtcccatatcaaaatggaatgcacgttgtaggaaacaagtgggttcatagggtcaaattgaatgctgatggcactctggctaagtgtaaatcacgtctagttgctaaaggatatcatcaaacacctggtatcgattactctgaaacgtttagccccgttgtaaaaccagccaccattcgcataattctcaccattgcagtgtcatatcaatggaaagtgactcagttagatgtgtcaaatgcttttcttaatggcacattaacagagacagtgttcatggttcaaccccctgggttcgaagataagcacaagcctactcatgtgtgtaagctaaataaagccatttacggcttaaaacaggcacctagagcctggaacgagaaactgaaaaccacacttctcagcaagggcttcaaagcctccagatcagattcctccatgtttatctttggctcaggacctcatctcatcatccttttagtatatgtggacgatatcctcatcacaggtcccaacttgtctagcatcaagtgcctcatacaagaattacacaaagaattctccctcaaagacctgggatccctccactattttttaggaattgaagtacttcgcaattccactggcatgtacttatctcagtcgaaatatattacagatcttctcactaaactcaacatggaaggggctaaaccggctgctaatccaaccagttctacacatgttctcacacttgacagtggtgaaccgtttgaagatcacactctgtttcgaagcacagtcggtgcactgcagtatttgaccctcactcgacctgacatcaccttcattgtgaataaacttagtcagttcattcatgcaccaactactgtgcactgggaagcatgcaaaaggttgtttcgatatctcaagggtactgttcatgaaggaattcatatcaaaccagccttgcacttgtctctccatgcctattcggatgctgattgggcaagttctccagatgataggcgctcaactggtggctatgcagtctttttaggaggcaacttaatt

SEQ ID NO: 244280 - DNA, 1454 bp, Cannabis indica
tattttctaaaaatatagccttttaggtgtaataataataataattttgcaaattgttaattatctaattttctgattatttatgcacgagtctcagtagcacgagcatgacacgatataaaaaaaaaataaaaattacataaaatattagaatttgggataagatgaatgaaattttatctcaaaattaattggtaataagatgagtagctcatccatcttatatatcacaatttatttccacacattagcaatgtgggactaactcttaatacactctcctcacgtttgggcgacctttaagagaccgcgggaccgaacgtgatatttgaaagaatcccacaaggccaaatatcgagaaatttgtgggtgtacgtatcgggaaatttgtgggtgtacgtatcgggaaatttataaattttgaaacaggtcaaagaccccaacattggaaattggtacacattggtcaaaaagtcccaaatagaggttaaaggggagacaacaaaagtatttgtttggaccgacaacactttggctcacaacggatcacaagtggctctgataccatgttagaatttgggataagatgaatgaggttccatctcaaaattaattggcaataggaggagtagtctattcatcttatatatcacaatttatttccacacattagcaatgtgagactaactcttaatacaaaatatgaaaaaaaaaaaaagatttaagaaaagaaacttttcattaatcacaagcaaaatacaaaatcaagcaacacaaacaaccacaaaaaggcttacaaaaaaccagcaccaaccatcaattccttgttatcttatacaaattgtgtaaaaaatattaattcttagagttcaacttcctcttagagacactatacaatctataaaaaagcattcttttaatttgagtaacaatatacataacaaaccctttccaactcccttgaccaatgaaatcatttggcccagaccacatcgaccaccaccacgaaccaacattcctctcacttttcttgctctctttcaccttcgcctgagacccgaacccataaactccaagccagttcacatctctctctgttatcgttcccagtcgcctaaatcacatcagtcaccttcgccgctaaccccacccttgttccatcgaggcaaggtcatcatcctctcctttgagctagctctggtggattaatggctccatcgggatgttggtgaagtcagcccactaacatgagagatccgaatgaatatcttactaggaacaacaaaagggtactaccatcatttattttctgtataatttttacctttgtttatgtctatgtaaaaaattttctgaaattgcatgtgtaaaaaggaaactagttgttggacgaccaatacctaacaaaaaattagtttctcatgagcccactcacactaatctaaatgtgattt

SEQ ID NO: 244281 - DNA, 1456 bp, Cannabis indica
tactacatatcgtttatcgcttataaaatagactcattgtcgttggctaaaagcgaagtcaataatgggcaacaattacctttattgcaagaagcttagaaataagagcgtaacaacatggaggagatgagaaaacaccatttcaatttctcaataagagcgtacctagtttcagtgttgaccatttccttgctgatgtagtaaactcggtgttgtatctagtcttcttcctgaaatagggttgttgtaataacctcatgattaaaatatagattagtagggcaattagcaatcattatctttattttttaactatatacaaatatttattgtgtggggcccatttttagaagtgagaattagattaaaatttctcaattcttgagattttattaaacacttaagtgtattgtttatactatgtgtgaaatttataatttttatgatttttgctcaatgacgatggaaaatacaacggatagtcattagagtcacatggaagagattagaaccatttatctagtgagacaatcacatgtgtgatatttggaatattggggtgggcgaggttatgatggaagaccattatacccctaagctattttattagttaagcttgagatagggttagtttagtcattttattttcttagtgagtgggttgtgtcactacttttgctacaactggttattagtaattaagtaaaaagataagattcacttatctttatcctttgatttatcacaaagcaattagaagcaaaaccctactcttgctcattctgtctctaattttagccaagaagaccagcaagaaacccatctcattttcatcaatttttaggggtaatttggctgaattcaagaagtttaatccaaggtatagccctaatctagttctgtcaaagttttgttaagtttgtttgtaggtttcctttgattttaagtgtgcaagttggggattagggtctgcttggattagctgggtttagggttaaactaagttgattaagactaatttcatctagttttactggtttctgaagtggttgagcaagcttgagttttcactcaaacttggctcaataatggtgctttgagtttctgtgaataattgatgctgtttttgcttgaaatctattctaggatgatattgcagatattctgaaaagtttggttgagtttgggaatattttgagtgagatatgagatttttagggtactttctagagaacaagttctgctagttccgtagaaccggctaaccgtttctccagccaggacactaggaaccagttttccatttgggaaatccagtttaccagtttgggcagtttctagagccttagttttaatgtttccttaatagttagggtattgccatgctatttattgatatgaaaacttctagttttgagtttaagtctccaaaaaggattttagcaagttgtttacc

SEQ ID NO: 244282 - DNA, 1318 bp, Cannabis indica
cgcgtgcgatatttctctctccatagtaaaattattttaatgttattatgagagtcaaacattgacttaaaaagtttaattatgagacaataggtgatttggtaaggtgatgtggcatccacttaggtaacatgtaaagaattttatgacctcttataaagagattaggtactcaaagtcaatagaagatggaacgttcgagtaaagcgtgtgagaacatctgaccagcttccagcatctaagcacctcgcatgagccgaccagagggtgcgagttaaatatttttagaggagatatctcacatatcttcatgcttggaagatgtgataatatctctaattttatgggatggatatgcagtgtcaaagaagaaaagacaacttgcctagtttcctattttgctcattgtaattataggttatacatagttttctcatttacttcttattagttttgggaaactaattgatgtaattaatcccaataaatagtggaatcatctcactaagggacacaaatttcattcagatggaccatgcgagagaaatctagattcaagagaaaaataatcaaagatcattgtaagagcttttgaaagagatcaaggtcttcttgtttctctactcacaagtcaatacaactaaaggagagtaggcaattacaaccatcaaggggtcgaacctctataattctggtgtttttttttactttacattattcatatttgttatttcaattgttcttaaatcactttaatttgactcattgtcgttggctaaaagtgaggtcaacatttaagtactttcattgagagcaaagaaaaaagtctttattttaagtcttttcaagacacaagatggctgtaacaacatggaggggaaattagactgatactacggatccaatagctacagatccaaacgtgcaaacacctacaaaccctagagatctagtcaagttggaccctgatccgactaatactcggccaccaacaagcccataaatagtagggcaaagagtgactacccatctggctaggttcactccaggaatgcaagaaactggaaccactagtactcggaccaagcaaatcgccccaagtattagaatcccatctgctacaaattctctatggccaatcagtgatgacaccgaactacaaaacttgcaagctacactggggaaaatacaaggccacaataaaacttttaattacgaccagcaggatactagagcagttataaatatttcttttgtagaacaaagatgccagtttcaagagtggagggattgagagatggaaatcatgagagcccaa

SEQ ID NO: 244283 - DNA, 1072 bp, Cannabis indica
gatctaagatcctggtataataaattccaacagaaactgggctgaattgctgaagcattgctgcaacaaatctagcattcgggacagtaatatggaaaaagttactaaacaaatttcattcatccacatcaacacttacgtatcaaccacttaaagtcacgccaactagttgttgtagaggggggaaacaaaacctagtagatcaagattggaaaggaattgacttctatttttagggtattacattgtaccctatttacctagaaaaacaactaagtacagccaccatcatcattaagaaggaggaatgaagaaattaaatgcataagaaaaaagtaccaagaaggaagtaactaatggcccgtttggcacaatttttggaaaatctaaaagctgctttttgaaaaagccgtgataaaaatgtgtttggtaagcagtcaaaaaataactttttgaagaatttttgggaaagctacagctaaaagctaaaggtgctctaacccaacttttagaaaaaaactgttttgattaaaagagtataataaatttttttgtactaaaatcatattgacttattgattatatatgaaaaaaaataaaatatttaaaataaattaattctaataaaataaataattattaaatctctaattttttcttaaaaaaaattatattttattttagtattaacaaacaaaatcaacttagaatttttcttagatacttgagtttataattttttttacatttaataaaacataatataaaaatactataaattattttatcaaatgcatataaatttatatttaaaaaaataaaaatatatagaaaataaaatattatataaaataagtttttacatatttgtgattataataaactagattataatattatcattatcattataatatattttaataactcacagtactttgaaatttataatttaccaaacactcagctcagttattttctacagttctgttgcagttgttttttctcacagcacaactgtagttgctttttcccatgccaaactggccctaaagaggaaaccacccgaaaa

SEQ ID NO: 244284 - DNA, 1223 bp, Cannabis indica
aactctttggtcgtataatacatgtgagcgaatccttattagttaagagaacagtgaaacagagtaattatattctcattaaattgatctgaagattgagtacaatatttatagagcaaagctcttgatacaaggaaaagaggaggaccatatttttgttataacataaaaatagaatgtaactaacacaagggcacttgtccaactaattctaacttcctaactaacatgcttagagtctaatagctcccctcaaggtggagtgtagaggtctttaacacccatcttgatgataatgtctttgaaaggagctgagaataaagccttggtgaagatatcaactaggctgttgttagatgaaacgtgcaacattttgagtatcccttgttgaactttttcccttacaatgtagcaatcaatatctacatgtttagtctgctcatacaaaattggattttcgaagatgtgtattgcagcatcattatcacagtagagagttgctggtgtgatgtgagcaatgtgaaaatattttaggatgttaggatccatgttatttcgcaagtagcatgtgccattactcgatatttagattctgttgatgaatgagagatagtggcctatttcttggatttccaagagacaagtgagttgctaatgaacacacaatagcctgaaattgatcgcctaatgtcgatgtagctaccccaatttgcatcagagaaaacttaaatgttgagacttgtttttgcataagcagaaacttgagaatctgatttccttgaaaaaaaataagccttgaccaggagtggtttttagataatgaagtatcctttgagcagcaagtaagtgaagttttctaggagaggctaaatattagcttagcctgttgactgcagaggagagatcatgccttgttatagttagatataggagtttcccaatgatgctacaatatgtagttggattggataatagatgtccatcagtggagcttaatttaaggttaggctccattggtgttgaatctggttttgcaccaaggtaaccaatttcgtttagtaattggagagtgaatggcctttgggaaatatatatgccttgaggagatctacttacttcaattccaagaaaaaatccgagagggccaaggccttttaacttgaatttgttgttcaaaatatttttaaaatcgagggttgttgtagcattgttgctagcaatta

SEQ ID NO: 244285 - DNA, 911 bp, Cannabis indica
acttaagttttttttaaaaaaataactttttaactttttaaaacttattgattaagtttggggtaattaaataaaataaagaagaaatctctgtaatcacaaaattatttactaaatatctaggtgagatatgtgtgaaattaagaggccatctttaaaggtgtagtcagttttcagagatgtgaggtgtacaaataatgattaatcaattccacttatatacattttgattaaattatctatgtatctatctaccttatctatttctcataaatatgcgaaagctctatttgtagaaaaaaaaaaaacaaatatgacaattattggattccatatatatgtgttcccttttcacttgcaccaaaacccaaaaaagaaatatcttcacacaatttactacaaatatgtgttaatttgtgatgttagttaaatattacttttaaatattaattagatggccattgtatatatctgtatatataacagtaaaatcttgaagtcgatacaatagggttccaattaatatttaacagtaatatctaactaaaattttaaatttacaaagaaaaataaacttaaggggattttgccataaaaaaaaaatgataaagagattaagtgtaaaaaaattaaaacataaagggtgttttttccacaacaataaaaaaaaaagaattaagtgtataaaattaaaatataaagaagtttcgctgcaaaattgctcttattttttatgcatctacactgccccgactcataaaacttaataggatgaggcgaaaagataatgagacagggcaaggctgaccgatttgttactggtcgagaacatttacatccctacaatgtaacataaaagttgaaggtaaaataaataaatgaatttttaataagattttgtaaagatgaaa

SEQ ID NO: 244286 - DNA, 1216 bp, Cannabis indica
tattctttctctcaaaatatcttctttgcttctctttgtagagaatttccgtaattctctcgaattctggatgaccatcaatatcgtataaatactacataaaaaaagacatattaatgaactttgtattcattaaagtaaaatctacatcacgaaatatgttaatttttttgccttcattttttgtaaaacttggtccttaaaatattgaggtatatctttaaaattcaagtagtgtcctgacatcaacattgtaactttaacacctagctgacaagaaaaaaaaaaaaacttgaatctctttgcaaagtacaaaccactttgcttgtcacctcatgatgatgaagtggtagttattttcccgcatcctgcctttgctagcttttcaacatcaatgttactagtagggccacatccttttggcaattgaggtgtccaataattaaaacaaaaaaaatttagtatttgtatagcatggattgaataaaagtcgaacatgattgaaaattttatattaacctaactcgccggacgagagtaccctattagggtctggcgagttcataccaccaccgtctccaccgtgatattatgctacatcagctgacatttcttttaaaaataaatttgttgtctttattaataataatattattatctagaaattaataaacaaaaaattaactataaattaataatcatattaattaaacattaaaaaaaattaattgtctttagtacaaaaaataaatgaataaaaactacttaaaattagtaatcactatgatcattttcatcattgattaaattattattaatattgtctttacaaaggttatcaagtaattcatcgtcgtcagattcttcagcggcttcttcatcgcctaagttgtgatcctcttggttaacatgcaaactttgtgtagcatgcaccaatgtcaattccaaattgattatgttgcataaacaactctccaagatccacggtaaaaaaaaaaattgacgagcttgtgtcatgtaccacatcaatgtcggcaatattatcttcatccacaatgttccaaatttgataatggtttacattctcaacaattttctaatttttctctctttgtagatcatcaagatagaatacttgtttttcttgattagcaagtatgttagagtcatctttatactattagccactaatgttaatactactgatattattctc

SEQ ID NO: 244287 - DNA, 2022 bp, Cannabis indica
gaagaaaaatggttgagaatggtggtttccgttttctcagccggtatttttgtaattaccaactttttagtttccacttttgtttatttccttttttatggccataaatgtaaatttcatctatttttggtctataatagaaaaaatctcatcaaaattccccatatttaaagccaaaccccgcgaaagacatgagcagtgcataactctagcattacccgcccaaaatgtcagactcagtggctcaccaaatctccctccttcgctctctcattctcagcagaaggtcacgccttctgcctcttcaaacttcgagcattctctttctttcacttctcgattttgtgctgaagctctctcaacttttgcacgcaggctcgacggcgccgcgctgcgaatcatcgaatcagtcatggtttccaaagacgtcagatcatcatcagtggcgatccgatcgagcttgcgcgatttcattaggtttgaatccgtttctattatgcgtgagaacgcggaaaaacctgtggagaagaagcttctggatctcgattttcttgtccgagctttcgctcttttaggtgatgtcgaggcaggttttctacttatctcaaaaatttcttatctaatgatccatatgaaataacattactgattttataatgttatttacattatccgattcgtgatattttacattttcttttttcacagaattgtttggctttgaggtacgaggccttgcttttgagggatttcaagtccacaagttgccagtggcttgaggtttcacatatggaatggttaaactttgccgagcaatcactggattacggttttaattccattgcaagaaaggtgaggttatgtcagtgtgtgcatatgaataattgaattcaacgatcagttagttcttattttttttctaattgctaaccgattagttcttaattcttaatattaaaatcctgctaataagaaaatagacttgagatgctgcgttttggattaggatgaattgtttgattgttttttagatcgaaaagttgtagtcaatgggggccatgataactgacaattctctatttcaacttgaggatgtgatataatctgcttcatttcatctggttgtaatatgtgttcgttttctactagttctatttctttattttgcttcagtttagtgatttcttttttctttctttcaggatttagtgatttaatgatttatattatgtgccttgataatcaaaaaaaaattaggtggttctagaagcatttcttatagttctagtaaggttacctgtaaaccgaatcatgggttaaagaagtttacataacgaatagtataaataagtgtcaaaagctttttagattgttataagttacgacacaattctcttcccttgctatggtttattgataatgtactacaatacttgtggctgcgttggataactattgactattcaccattttctaatggggaagattatatgttaatattagtgaaataaatacatactctattacacttcctttagtgtaactacataattctgtatatttgtttttttataatggcactgcatctttattctccttgaatttttcttttgtaggcatgtgaaaatgcacttttgtgcttccaaaaggcttctaaaacaaatttggagactactgagttctttgaaggtgtgaaaattattgaaaagataaagagactcaaggattgcgccatgacttcagctgtttcacgttctggtatgacctattggagtcttcattgctattcatacggcaagatctgtttgattcaaaattcaatttaaaatataagatgcagattaggtgactgtgatgctacactcttcgattgtgggtctatgcttaggttaacttactccattaatattaatatggtgaaatctacctgtgtccatcaataccatatataatataaatgacaagcatagcaaaattatcagtattcattttagacaagtataggaaaattatgtcagtatt

SEQ ID NO: 244288 - DNA, 655 bp, Cannabis indica
atatatattttctgtccggtcccacaccgaaaacttttatggcaactaataaaaagaaatgaaaaatcacttgtacccttttgatcctgtatcttgacccacactttctaaaagaccaaaaagaaaatcagagaaaatgatagctttaaaaagttttaatcattgaattcatcacagtgactagtgagtagagtaggcttttattagactaattaattacctgcatttgatctcctatgttgacaataaaagtgttgggaatgggagtaacagggacccattttccatttctgagcacttgaagtccagggacttggtcttgaagaagaacagtaatgagattaggatcggtgtgaccaggtaatccataagtgagctctggctctggacatggtggatagtaattcaacgccatgtgttgaccatgcttccctaaagaatttataatagtttcacttttcagtcctaaactttctgatatggcccccaataatttcagaactagtcctctcacactcgtgcaatacttggccacgtcttctctgataaaaaaaaaagaaaagaaaaaaaaaaccaatcatcatcatcatcatcaaatgtatataatagatcaaaataaagtagtaactaactaatacctgaaggaaggtgggtt

SEQ ID NO: 244289 - DNA, 1403 bp, Cannabis indica
acacaataccctctttgtttaagatgttaagtattgagcttatttttacatggctatgttatttttccaatgaatttccctccacgtttagcttagtaagagtatatttcaaagtatgaacttttagtaagtcagactaaggcccaagaagatgaacaaattcagctaaaattggatgggatcatgggaaataaacaaatgactggattggatcctaaaaatcaaaaaatccaatgtgttccaaatctacaattaacatctttcttaacaccatcgatttcatatttcataaaaggaaactcattgtactcaagagtaccttgaagctgaagaaaaagtgaagacgtgagttttacaagtatatgattctgtcataaagttccataatattacacttaactaaaatcgtcaatatattcaaaataatttattgtttcctaagtggacttaaaaaaaattacctggtattcagctcgttgtgccagaagttggagaaccttgccaatttcacgcaatacaagaagagtcagccgtgcatccaattgcacagcttcaatctcttcctgaatacgtgatatgattcttgagatttgctctttggaaggaacacttccacggctggtcacaggaaatatagaattcacgagatctgaaaggcggctcaagcagagagtcaagaaggcagtctgaaatatatcaacagctgcaatcattttatctttcccctccaaactaatagctggtaaaaacccctttgacatctgtatcacgtgaaattctttcaagaaggttctctatcattaaaagagtttcggataccccatggtgaaaatttctttgacgaaacttgatgcagtgaaagcagacttcatttggttagcaaatgccttcacaatggcttcccagactcgatctgttaacatagtatcaccttcctaagcaagtaaaagttgatgtaagctaaagagaaagagaaatcaaaaatactgattcccaaattgaaacaaattagcaatcagcaatatgagtcagtaagctattttttctacagatttacagagaaaaactaactactttgtttaattgttctgttctgtctacgcaaacgaaatcgctaacctgataactcagcccacaatgccagacaatgaaattaaacaattcacaagtgtcatttaacttctttcattttacaaatcaaacaaataggagctcacaaaacaatttatacacatatgaactaaaaatgcataccccactgacctgattaacctcatcaagcagtagcacatgcgtgaaagggtcacgcttcttcgacaaaaccctctgcaaatgccaaactgcgaccaaaaccgaatgcagctgttccatacagcccgccatcctctgccaaagagcctccc

SEQ ID NO: 244290 - DNA, 611 bp, Cannabis indica
cttttcattcttggacgggctgtgtgttgtagcacataaaatttgagtgcaacaataatacaaaagtgtcgttaattttgtcttatatgaatttcccatgctcgataactgcaattaacttgcttatttccccaacccaaaaaaataaaaaatctataacaataaacaaatacaacttgcttatatgaattattgaccgtctagtagtcttttggttggttttgtatttttcttttttactgcatcggtggtaaaacgtgcccccttcaccaactttctattctattgagattaaaaaataaaaataaaaatattataatgatttttaattattaaaaatcaaagtacatcagatcaaactaatttagaatacattaaactttagttaaaaaaaacaaaatctattccctatttatattattctattgataattaaaaactaataaagattaaacatagttgattttgctcatatatgacagtcaccttgttggtgaagggtcccactagattatggtttgccatgactaatgcttcctaaatatgtgatgtgatgtgacctaatgaagaagcctccaagattttatttttctattggaattattggattg

SEQ ID NO: 244291 - DNA, 1407 bp, Cannabis indica
actttgtttgaggaccggccctgacaccaattgtgtctaataaattgttcaatctaacacattttaatttctttcaaaaaaaaaacacatctttaatttggcctggtttatccaattcatcaacctaattgaatataattatgatcaattatcgattctaaattttgattttaagcaaaaactctatcaaaatgtctgtagaacttcatcaatattgtaaaagttccaatcctaatacactaactcatgactcgttaactaataattaaggtttcatgaacaatttaaatcacgtaaacctgtgtatttttcttattatcattttcattctctatgaacttttcttctatttttgtagttgacaaaaaattcagcaaacaaaatcatcattattgattatgataatataattgtgttgattaatttaatataataaattatattatttatgattttcttccttgtacacaaaataataaatattgaaaaagaacaataagagggcaatgagtggagtaggatgaagtatggttgtgataccatgttgagaattatggggtttcatttcaaaaccaattggcaatgagtggagtagcccatgttcttatatatggctcaattctctaccatttatttcatgtgggacattgtccacaataaacacatactatcattttattggattgagtaagtaacaacacataatatatattatattaattaaagagctataagcacataaaatatataattacccaataataataataagttaattaactaactagttaaccaaacagccttctgttgccaactagaattatcccaactgaggtacaaaccatctggtttgaccaaccaataaacagaagtatgaccaatatctctagctgggtcaaacacgttgactgcagcatacaaagatgcccaattggcttgtaagttaacaatattattattttcattaacatcaaaatgataagttggtccacccatgaaagtgtggcttggattggtgtaaagcttccatctttattgcttacctgaattgtgtaaacactttggtttgtgttgtctttaggcaaagcattcgaacttatgtaaacaacgacacccgaattctgactactcttctcattatcaattgaatttattcgaccacctaatgttgttgttgctgaaattaacattaatactaaaataaacaacatcataatatttctaggcatcaaagacattttttttttgatcttttgatgactatatgattctaataattttgattattgtgttgtaaatatcatgagtatatgagtgtgtatatatacacaacttataagatttgtttagtatgatgatcgaaaggaaatctatagaattaaatgtcttaatttcgtgataattaat

SEQ ID NO: 244292 - DNA, 830 bp, Cannabis indica
agaaaaaaaaaaatctatttagatggaggcaagagaacggcgctggtttcctttctaactgtataatgtagggtttgctaaatgaaacccatatatatcttttttctttattgacttattaattatatttattaaaggtaataaggttatttgaaaaaataaacaataagacaataaagtacgggtacattcatttaacaaaatagtataggtacatataaaagaatggtacctataaaagtaattaaatatacattattttgctgaaaagttctctttcatggatatgatatagtgacgcgctaggcgtgttgggacatatttatctagtcgcgcctagaatgttactataagtcaatatttttttattaaaaaaataaaataaattgtaagaattagtttttagtgacacttcatatttttagtgacccaaattatagaacactaacaatgaattttagagtctttttgtgcatgtcactaaaactcatttctagtcttttagtgacccgcacttttacgtgtgtcactaaagagtgtcactaaaacaatgttaactgctttcaaaaaataaattatattaactgttaattaagcaatgaccgtagatatatctctcctcctccatccataaatgcttcaattactttaattaataaagaaaaagcttgaatattttacaagaaacttcatggatatcatttgttggacgaaaataatattagaaaattttctctctcatgtaatatactagtaatgtttcaccaatacactaacaaatttattttggagggtctctctggtttttgttaataataagtttttttttt

SEQ ID NO: 244293 - DNA, 1658 bp, Cannabis indica
attatacatgacttgaccaatataacattcttaacatggcgtttaccatgaaataattattcataattattcatatcacaacaataatcattagtagattagtcagaatcatgagtatatatgaactcctatttgtgtttattattaagttatttgattcactcgttaaaatttatcagaaaagatgattcttacaacttttgttttgggagcttaataacatgagtggctgggaacatttgtacaataatagaattcaagctttccgaaaggatcgaatattagttccattataatgttaattttgggagtactaataattggatccaagtctataattggattataatttaactgttcacattaaattaatggtacataaggaatcaagagataattagaaaggtaaaacagtaattttgaccaactttaattataaattaataattagatgacaaactacttatattgattatattaatggactacaagtaaaaattgtataaatataattctatattgtcaaagagtgcaattcaatatttatagttgagtaataatagaattaataaactaaattattctattgacgagttcaataataattaagtgtttattggaggtttcaaatataggtcaatgatctcaaattacctataaacaacactgtataagggaaggtttaatttgatgaataaagttaagatagaattaatttttataagaaataattcttaagggcaaaatattaattttgagaaaactattattttgaataatcttaataattatgtattgtataattaaagtggtatttaagtatttagttttatttgttaaaattatattaattagttaaatataatatttattttaatcttaatgaaataagaaattaatgagaagtaattaatattgttggcaaaataaatataaatcttatttgtggcaaaattaaaaaatcaattttaggctttaaaatatggatgtaagccttgtctcacacgtgtagggtgacatgtaagagctcatgtgaattttgtttgattattttatttataaaaatactataagattaaatggataattgtattttaattattatattaagtatattataagataacgtatataaattaaaatataatataaaataaaagaatataattgatttatgttattcagttatatgatatttagttttgaatttgaattaaaataaatattttttattttatatgattaaaaagggttttaaatatatgtttttaaaacattatatgtatgatatataacaagagaataatacgagatattaacagaaagagaatagaacttgaaaatagcttttcaatctctctctctactactcgggtactcgctctctctccatttatctctactcgacacacatacacatactagtgtgtgtgtgtgtgttttccctaatttcaatcacagtatctcatgagttgagaatacattgtgatcaaaaaattattttcatcccattaaatctaaaagcctactcttttcacgagtgttgaggctgatctggaagacactggtgtgaaatatttgactaggactgaacattttgagcgggttggacccggatccggccaactcgcccgaacccgacccggtcaacccgcaat

SEQ ID NO: 244294 - DNA, 2246 bp, Cannabis indica
ctaaaacgattacacgattggctacccaggtggctttcaatgtacatacaatagatataaataagaatatttacaaccaaaaagaaaaatgaaatgaaggtttttcttttaggtctaggactcgggaaggcttttacatacatagctttactgtcaataaaacctgaaaaaataaagcaaaatcattcaatgagcaagttgccacgaccaattcaacctaagaaatagattaatgctacaagacattacatatagtgctcattgccaagagaagttaaatgtaatttagcaattagaatagatgggagtaaaagtaaaaacagaaataaaacaagacacaatatgccaaattactctagaggacctgatattaaggggggcaaaaaaaccatgttatgttggtgcaaggcgggctgattgtgtgttctggaatgaaattcttttttgctggtatatattttgtgttctggaaagaaattgaaggggagggtctcttccagaacgagcccgccccaccccattaacattcttaagaattaagacttacaattaagtagcaggttctacgtgaactcaatggcatatagagtgctctttagcatttctctgaaacaaatctacttcaccttgcccgatttactaacacgttattgattatcaaacccactcataaccattaaacagcaagcaagaaacaaaccaattaggcacaaaagatttctcctacaacagagtaataaattgaggattagactttcttacttcatatccagaagttcttaacaagcatctaaggctcagacttgaccagctcttgaacagagtgtatgtacttgttcatcaggtccctaacaataatacaaaagaaataaaaaaaaaaagcttaattcatcaggattggaagaagaacacacaaaacttaacccaataaacagctacatacctcctttggtttaacatttgttggctctcttccagttttttcttttgcccatcaactgtctacaaagccaaacacaacatccatgattctcatcaagatagacgtaatataactcatacaaaaataatgattaaaacctaatcgtacatatgattttagaaacaaaatcaaccctagttctgtaatccatgagttaagtcaatggtggtcatcatcatcatcataatgctacgaaataaatagataaataaaaagtaacacattttgagaaaactgaactagtacttagagacattgttgggggttgaaactgattaataaatcaagataaattccttttcataaaatgtactccaaaatcaataagcaaaagagtccgaatttggttatgaaatcaattaccatggctttagtgctaatagaaccggatatggagttcaacagctgctgacacttctcgaagtgggtattcaaatcgcttatcttccaaaacaaacacacccaatataagacagttaaaaaacgaataaataagaaagaaacaaaaatttaagaaaagaaggggaagaaacataaagataccaaagcatcagattgctgatccctagttccattgtcaaccgtctccgctaatttcgacaccaactgtatccaattcaagcactcacaagctcaaatattcattcataatacatacacaaatagaattagggtttgaagaatttacatggaagagatggaagtgggaagctagtgactggtggtgctgttgtggtggtggttgtggttgtggttgttgttgtgccggtggcggtggcggtggtgtttgttgcggttgcagttgctgttgctgctgttgaaggagaagaggttgttgttgttgttgttgttgttgttgttgataaagcggagattggtgtggttgaaattgttgctgatggtgatggccatacagattttcctgattcgaaggcgtagagacattactatggctctgtatgttggtagggatcatcgtccaactacctcctccacctcctcctcctcctcctccgtacggactatgctccatttctctaactataccaaacaaaatagcatactttgaaaattaactagtgtgattttactaataatatagattaatttacttacaatcccaaatagaggacagctgctacaatgcaacaaattaccctatatataatttttaaattgatgtgtctaatttttacaatctctttcaaaatttattatattttttttttcaattattctactaattttattttgaaatttttac

SEQ ID NO: 244295 - DNA, 1102 bp, Cannabis indica
tatttgaatactagaaactaacaataataattatatataaaaaaaaagagtaaaaagcgatttgaacggattaacccgaccaaactgaaaaaatcattgggcagtttgaacttttttctaatttttgattagacgagttacgataaatatttacaacctgatatttatattgggttaataaaaatatattataatctgaccaaactgactaacgtacacctctaattttagtgcaataatgtttgattaaattaaatataataaattattaaagtgtaagatttgtagctctaactaaattatcaaaattaatatataaaatgtagattacatatctttaattcaattttcatgaggtatctatattaatgttttgtaatggttagagacatgattttgactagaggagttcctagtgcaggtggtatgggttgtgattttatgatgtcaaatattttgtaattagatttcaaacccgcattgtgaatatttcttaaaactgtttatgtttaaagttttaattatcagagaattttttttaaatgcactttataatttcaatatcctttgattagtaaatatcaataaaataattgaaaaatacgtacgtaatgtgccttagatattagagcgttacaactttcaagaaaggtgcacggatgcacttcctttgtgtgacatccagattgttttagttttaaactttatttatatgatagtgacgacatagttagttacgacatcctatacagtgttaagaaattcaaaataatttacaaaatatagaaaattatagaaagcaaaattcaaagaatctatttcatacgaatgtaaaacaaaaatgaacttgtttttggcatgttaaaatttttataattttttaaaatttacaaaatgtcttaaataactatattgtatacaatcatataaaaaattaggagaatcacccatatattattttttaattttttttatttttacggtttgggttgcaagagtaatttctgtgtaggttgcgaagtaaatttgagttgcgatttaatttactgtgtacgtatttttacataaatacgaaaaatactacttttaaatgtaaaaataa

SEQ ID NO: 244296 - DNA, 1200 bp, Cannabis indica
aaaaaatatatgagaaaaagtgtgtaagtacaaaatgtgattaattaaagaaagatagtatgaagtagtttgagtgtgagtagtaagaaaatataaaagagagaaaatgatatataacgagtgtttgtaatttttttctttcaaaaaataataaaacaaaatttagtaaaacagtgaaaaagtgttagaacaaaaaaaagtggtataaagtattacacttattatctttaaatttatatttctatatatttatataaagagagaaggatactaaaaaaaatatttcatataagctgaaataaattaaaatcaatgcaaatgaaagaaaaataacgtatgaatggcctaaatcacattataaatatatatttttttaaaaaatataatattttgtgtaaaaactcataattaatatttgagacccatcaatgtctaaattaagagtatcacactaataataataataataataataataataataattaatgcttatccgtgataatggggtagtcgcggtgttatagagtgataatggagggtggaatgagaatcttattcgagccatttttaacatttcaaaggtctcatctattttttttttatcttgaccgaatgatcttttaaacttcaaaggacaagcttatttgggggcgttaccgtaaacaactagcaaataatatcaaagatatgagtgacagtttttattatctcttgactagagaaagtaaccgcactttgtccggtctttaaacttatatatatatgacgattcatattattatagaaactgctaattaaaatgatatttatatttatccaataaataattattataaattgatgaatatgtagcagtgcataaaactatcaataaattattcatcaaatttatgattaattatgtagtgcaatgtaatttgttaaaaaaaatagtgtaatataatattcataatataaatttattttctattttcatgataatatatgtatcaatttcacatttaatattttattatattagtgattattaataattagaagaaagatacatacttaaataataattaattttatatttaaatttatataattaataattattttctatagttactttttataatttatatagttaaaattatttttattattagatatatactacgttgatgtgatcaaatctatatatatatatat

SEQ ID NO: 244297 - DNA, 828 bp, Cannabis indica
acattggaagtctcacatttgagatattgatcttactcttaggcaacattgctcccaaattacgtccttacacgttggtaggaaggagaagtggagtgatggagaggagaggagggagagaggtgagaggagatgataagttcatttgtttggcaagagagactgaaagagagaaaagagatgtggaaggattgaaaatctattcaaacctccacttgacaatccctccattaatagaatgattagaattctctctttaaatattgtaaattacaaaaatacctttaataaatattattaaaaaataattataaggatataatagtaattttataaattaataactatctatccttctatcacttcatccttcctaccaaacaaataaaaagagtattattctccccccctccattatactctacatcgtttattaattctctattcgtcctactctccttctgtggtatagtttctccaaatgaatagatctacataagtctgtcccagtaatggaaagttagtcatctcccaaaagtatgttcccacatagctaacttatcaattcgaaaggagcctcgtggaatgatagtttccatcactctcaatcaagatcaaagaccaaagagaagaaaactcgaaagtgctatttatgtggaaggtcttgacacttgaaaagatattgcaagaagtacaaggagcaacaagacttcaacaaatctcccaatggagaaaggaaggacaactgacatcatcaccacgggaaggattctactgcaatcgcgacggatagtgatgactgctctatggatggagaatttttctcca

SEQ ID NO: 244298 - DNA, 992 bp, Cannabis indica
atttttatttttagtgtaaatgaattattttagtcaaagaattttttttttttttgacggagaagcttcgaacaaagaagctacaaaactggaagtaaagcattccagcatgattcttcatctagccctagtgcccttcgagccaggttatgcgcatcaccattgaactgcctcctggtatgccgaaggataacattagggaaaaaagataaagaattcctgatatctgtaactatatccgaaagagctgagagatcattcttgccaccaagaaccttgtccaccagcaacttggaatcggtttcgactaaagccagggggatcttaatatgctgacaccagtttaatcccgcttttaacgctaaagcttcagccaacgtggactgcaaggctccagctgcaggaatagccaggttggctactacacaacctttccaatctttaacaactgcaccaattcccagcttgcttctctccgtagatagagctgcgtctgtattaagccggtaggaattaacgggaaccgttacgtcgatgtcattccgttgcagaatgcgagctgatttgtacatgttaacattagacaaagcttcctgataatctgaaatgaaagtgtgagtccaagctacaatatcagtaggcgccatatccgaattagcaaaaagctttttattcctggaattccaaatagcccacataatagataataataaactcaaactgtctttattcagctgatcaaaaccattaagcataaattctttaacatccacatatctgttagagagataaaaggttctaaatggggaagctttccaaattttagcagctctggaacaatctagcaatgcatgagtaacagtttccactgggtttttacagaaagaacaatgaggttggggaatggttttcctacgaaacaagttaagggctacaggcaaaatgtggtggtagactctccaagagaagttcttgaccttaggggggagatt

SEQ ID NO: 244299 - DNA, 798 bp, Cannabis indica
tgctcgtaccttccgagctcgtattaattttgtatcgtgtcaaaaaacccaatccatatttacaacacttagctctcacccacacacaaaacacatatttatataggttggtatttaaatttggaattgtgttgtgttgtgggacaagtacatgtggagaggtttcttggtgtagtgacttataacgacaaaatggttctcaattagttcacattgtaattaagtaccattttgtctattaacaactcaactcaactcaaattaatactcaattaatatataataaacttcttatattatatttttgtccatcacataataaagttgattaatttttctcatttgtggggtacatatatttatggtactttttttttttctatccgccatgtccgcaatctatctctttggaccatggaaaaatattatattaccttaattaattttgtcctaataatcatatttacatttgaccaagttggatacactacattattatttattataaagtattaattatatattctatggtgatgagatatgtttcgggttgaagattgatgagcatgtagataagatggatcatttaattcacaatatttactaacttaggagacaaatatattttttaataaaagatcatgtttgtgaaaaatataaattttatagaaataaaaataacaaaacataaggataaaattaaaataatataaatttttgagtacaaaaattgaaatgtataagagcataaataaaatatattaattttgtggggtataaaatataatatttaaaaaa

SEQ ID NO: 244300 - DNA, 1409 bp, Cannabis indica
gtacactgtgtacacgtggacattccaacctggcacttaacagtcaaaaatggatggaaagggctaactgctaacggactagtggtttaggtagttttaccaccaaaattttagaattgggggttagttgcaaaaacctacctactttagggggttttgccgcaaataaccctaaatgtaatacctaactcctaaagattcaatcttcactttgttatacaaaaaaaaaaaaaactttcaaaaatggtataaattacaaattaacctcaattcttgtatttgaatcaataaaatgaagatggattttgtgtcaaaattgtaaatatataaataaaaaaatcgcaaggatgttcttgatcggatttgtagttttaaaaatggtaatttagatttattaaaaaaagaaaaagtaatcaaagattcaaatcttataaaaatttccttgaattaagatctcataagaatttccctttcatagtttccttctttgaaaaaaaaaggaaatttctctagtgtaatattcttacttactagaatgttagtggaagaatagaaaaggcacacaactaataataataataaaaataaaaactagtcaaacaaaggcacacaataaactcactcaaaaaaaaaaaaaaacgaattaaatcaaaaaaaaaaaaaaatactataaaaaagaagcacatagtaaaatatgggaaactactaaagtgcaccttaaaaaaatgtatcatatacccttaattttttagtacttggtgtcccaaaactcaaatttggtcaataaattttacttttagttatatgtaattaaataaataattaaatttaaaattcttatgattgaagagagtaatagttatgattttttgtccttgaattatgaactttgtaaatttttacatgttaaacttttttttgttgcgaaaattcttcctaaattatgtaaattattgtaaatgtctccttctaattacattttacttctttcaaaaaaaaaaagttacattttgcttatttttttttaaaatagtttgcttatgtgactataagtataaatacagtcaaatgacctatttaataattttaatctacttaaaatttaatttatttacattaaaatatgtttaaaagaggaatagtacttctctacatgttgaaaaatattttaaaaagatgcttcgaaatagagaaggagtttacataacttgttggaaggtgtataatctaagtgcccctattctttttggattctttttaggattatttcataaatacataaaaataataaaaaaaactacaaaaatttagttgtacaaaattttaaatatatttttacgatttttatgattttatttatagtaaaataatgatctatattttttataggaatttttttcatttttaca

SEQ ID NO: 244301 - DNA, 995 bp, Cannabis indica
tttttttgttgttttttgtgcatttgtgaaattaacccttaaaagtatgcataattttttagtaggttttaaaaatacaacatatttttttaaaataaaaagcccaataattttttttcttttaaggcccaaccaatctcaaggctgacctattaatggacatactttttttttttttttgaaattacactctatatatcttttatattgtctttttttataaagtatcatttttatattttttttaaatcctttaccaattttacctctgtcacttcaatatactcttcatttaactattttatgtgtcaacatattttgagtacaatacatatagcatctttcaattaaatataaattaaaggtaaattcaattaagttataaatatttttcaatgtacttttttttgaatgaatgttaatggacatacgttaatttcatttatttcccaaactttgcttttgtattattattcttgtgaaaaaaaaaaaaaaagaatttcaccaccacctggacgaagatgatgtagctaaagaactcctcgtgttcactacctgggaaaagattaaatgatagcatataataacttttaatatcaaaacaagccaaaaacagaccacaagattagttgcagttcaaatcaaagtaaccgattgagcaaacccattaccaatgatgctctctcatcaaaaacttcagtcatgatatacctctctcatcttccacaggagagagttgagttacaaatatggccttgattgcacttgcacttgtcaatcgtctagtagtcactagattttgggactgtattagtcaatgaaagaaagaaaggaaaatgaaatgggaaagccttgaaagtttttctttccatctctagataatcacaaaataataattgaaaaaaaaaaattgaatgtacttcagaatcaaatccttctatatccctttacactaacaatcagccaaaagggttcttcacatgtctttgttttgt

SEQ ID NO: 244302 - DNA, 3109 bp, Cannabis indica
atatctcccacaaagaactttcgtgccttcatttgcttgtttaagtatcgagctaccttctgttgatgggccaccaatttcaggtttcctgtagtttgtttttcttcaatttcgttaagtgattctacaaagagtgcatggttaacttcttgttcatatgtcaatcttttgtgggacgaaggctctaattctacaggcatcacaacttcgtagccatataccatggaaaagggagttgtccgatcactgtttttcggttgtgcagtaagaccatagtacttctgggagttctttcagctagtttcctttagcatcttcaagtcatttctttaaagtgtctttaagtgtcttgttgactgcttttacttgaccattcgcttgggaatgtgctactacggaggaacattttatgattccatggtttgcacagaaatcagtgaaggattgactatcaaattgtttgccattgtttgagactatcttgtacggtaatccaaactggaatattatatttttcaccacaaactcttgcactttcttggatgtgattgttgccaatagctcagcttttgtccatttagtgaaatagtctattgcaactaccgcgtactgtaccccacctttgcctttaggcaattgttaggtcaattccccaaatggaaaaaggccaaggactctgcatttgagttacttcattcggcggtgcacgaggtatcgttgaaagtatttggcatttgtcacatttcttcatgtaggcatttcaatcttcaatcatggtcagtcagaaatatccttgccttagaattttctttgacagactttgaccagctgcgtggttgcaacaaaatccatcgtgtactttagaaaaaaaccgcgcagcttcttcttgtgtaacaagctgagtaacgccacggagaatctccttctatacatgactccagatgatgtactgggcaacctttctcctcattttcaaagctttgtttctgttacttgggagttcccccgtgttgaggtaggctactattggcgttattcagttcggagatgtgtcgatcatctaaatttcttccaagtaggtgctactgggtttttcaagaaactggattgtgattagattagccttatcagttacattgctgctcgcaagtctagctatggcatcaacagttgtattttcttctcttggaattcgcttgaggatatagctcctgaattgtgcaagcaggtcatgtatttttttttctttgaggatatagccctagatacatgatttaccaccaactgtgagtcactacagatctcaatgtgttcttcatgtagatcccgagaaagttttaggccagcaatgagggcttcatatatctttttcattgttggatgctttaaacccaaacttgactgccccgtgtaaagcttgccccccaggtgtgacaagggcaattcctgcagtggacagttgatctgtagccgacccatctacatgtcacttccaggtgggtttatctttgttgttgctcggctgaagttcttttattggctccggattgttttctgaaatgctttcctctttgcccatacactcaactacgaaatctgctaaagcttgtcctttaattgttgttcggggttggaaaatgatttcatactggccctactacactgcccatttgagtaactgtccagacgcgtcaagtttttataatacttgtcgtaatggttggtcagtgtatacccatacaggatgagttgaaagtaaggccttacttccttgttcctaagattaggcaataagtcagcttttctatccgtggatatcgtccttcagcttcaacaagtcttttgctgatgtattagactggatgctggatattgttttcttctctgatcagcttcaactaggtataaccctaactcctctctgtctagaggttttgatagtacgagaggttttgcaagttgactttttagctcttgaaaggcattctcgcattcctttatccattcaaatttcttgtttcctcgcaggatgttgaagaaaggaacacacttgtttgtcgactttgaaacaaatgtactagtgcggcaatccaactagttaaactttggacttctttggtttttgtaggcaatttcatatccaagagggcttgaatttttcctggattgacctcaatacctcgtgcattaacaataaagccaagaaacttacccgagctgactgggaaggaccactttaagggattgagtttcatgttgtattttttgaggactttgaagcattcgtccaactaacctatatgcccccagccttcctagatttgacgagcatgtaataaatgtatacttccatattttgtctaatctggtctttgaacattttgtttaccaatatttggtttgtggctccaacattctttaaaccaaatggcatgaccttataacagtattgacccatatatgttcgaaaacttgtatgttctttgtaaggtgaaagcattttgattttattataccccaataggcatccatgaagcttaatattccgtgcctaactattgcatccacgagctgatctattcttggaagtggaaaacagtctatggggcacgccttgttgaggtcggtgaagtcaatacatactcaccattttttgttgggcttgggtaccagtacagggttacccacccaagctgggtagaaagcctcggtgataaagttgttgttgcgcagcttttctacatgttcttttaatgcttgggcctgttctttatctaacaatcttcttttttgttgaacgggccagaagtttggatcgatgtttagggcatgtgaaattatagaaggatcgatacttaccatgtcctcatgtgaccaggcaaaaatgtctaggctttctcttagaaatttaatcaaagttaattttacttcaagcagcaaaccttttccaatttcgagtttcctggtcgggacatttgtctcaatttctatctattctaattcttccatcggccaaacatttgtatttagttcctgaagttggggatccacatcattgtccccgccttgggcagttccttatttggcaatgcttttccccttttctgaa

SEQ ID NO: 244303 - DNA, 1545 bp, Cannabis indica
atcttggttcgaggtaggaaggctgcagcgtgctgcaggtctagcatctcacctcggagcttgtctggattggtgtcaaccaagacaagctcgtcagctaggtcttgggtgaggatggtttgggctatggccatgccaacattgccagctccaataattgagattttgatgttgtttttggtggtagaaaggagtgtagcgttctgaatgggcttaaagaaggcctctgataaattgaggcctcctagcccacccaaagaagtggtggaatcactcttcttctccatttttagtattagtgtatatatttgtttgtttatgtgttggatatgtaataatatttataagtgtagttgagtctagtttgttcaaaagggaatggggagagagtggttaggattaatattagttgtgtgggatttttcaaagatcaatgtttgattattttgtacatgtaataatgtcgtactaactaactaatgtatcttatgagtgtatgactaatgtgaggtttgttaattcaatgtggaattactttttctttcttagtggacaatcaagtttcaattcccaggtcgtgaaggctgaaattttctattatttctagatatatattttatattgtttattctatattattgtgtatgactaaatattcaaaatatcgttaatcaattataaaatgtcaccatactaattaagtatatatcgatggtacttacaataagaaaaacgggaaaagatcacactagtagtacttagtacctttttttattgccatatgtctcattaaggtgatgtttggttcattgtaatggtaatgaataggtctattacattgtttgcttttcccttttaacttttgtaatccatacaatgtactgcttattacattgagtattgtaatgaagattacataccaaaaccaatgtaatccctattacaattacactccattacaaataaaaaaaataattttttgatgaaaatataataaaaaaaagtcaaagtctatattacatttttttaaaatattttataactttataataaaaagcaatagggttattttagtcaatacacattttattccattacattctcataccaaaccaaacacattacaatgttcattttaactacaaatcaaacattatatataatcaattcctataaccatttttattctattactattaccattaccattacattacatcaaaccaaacaccacttaattaatataatttttttaataaatattactaatcaatatcagagtgtcacttttaaaaagtactagacatcattagtgtccaataataatactccttgtaataatactcataaaagagttaaagatatcatgtcttgcacacttttttaataatattcatgtaatataattaattaaatttgtatgtaaaactcaaataatataccaaagtggtgatactagaaatcaaagtggttgcagcatttttctatgtgaaagagtaaagaataacttttgatttctaccgactctcattcgaagcttttcca

SEQ ID NO: 244304 - DNA, 630 bp, Cannabis indica
ataggattccatgctacgttctattttttgtttttgggttctatatgttttgtgctatcaaagttagcttagtgaattataaattttttcgggaaaaatgaattcgtgttcaataatttcttctcaatttgacgcaggtcgatttgctaactatctcagtcccatctaggagggagcaatggcagatattactagtccatttcggtttcatttgaaattttcatactagctccttgaggtaagtcctttcagaatcagaacccatttcttttggaagaacaacaacactaaatgtatgttttaggttaaatatcaattcattggatgatattttatttggcgatttcgatccaactctctggggtggatttgttttttctttttctattctcttgatctattgtcctgcagtagtaatatgatgtgaaatgatcatatgtattccattgaaaaaaaaaagaaaaaaaaataagaatgaggctatgttgggttatattattttttattaaataaaacattattaacactctaaatactttttcaattatatgttttaaccaaaataagtttgtcttgccagtgcaattccactctaatactttttctaattatatatgtcaaagttgaaat

SEQ ID NO: 244305 - DNA, 1236 bp, Cannabis indica
agacattcaatccaagtctatgttgagtcattctaagtcttgtaatcattgttgtactcaggttgatagttcaaccttttcttgtactaaacagaataataaagggccatctattgtctattctgatgtctttaatcctactgttttgctttcacaaactgataatgacataaataattagcataataaacttggccatccagcttctcacactctcagtaagattttaaataaagccaatataccttgttaccttaagaatctaaaattttacaaagcatgtcagttaggaaaaagtcatagactaccatatccattgtctcaatccagagctaatcaacctcttacaccggtgcacactgatttatggggtccttcccatatttcatctaaagaaagttacaaatactatattgtgtttgtagatgagtatagtacattttcttagatttttcctttcactatgaagtctcaagcttttgaaacttttatcaagtctcaagcttttgaaacttttatcaagtttaaaagtcttgtagaaaaacagtttaacttaccaattaaagctgttcaagctgatgggagaggagagtataggccttttgaaaaaaaattagctgacatagtgttcaaacaaccttgtcctcatactcatgaaaaaaatggtggagttgagagaaaacatagacatataactgaaattggtttgacacctttagctcaagcatttcttgatctctcttcttggtggcttgcattttagtgtgccactcaattaatcgaatgcctacacccgtgcttgataatcttagtccatttgagtgtttatttaatgaaactcctaactatcatattctcaaaccatttggttgtacttgttatccacatttaaggccctatcatcaccataaacttgagtacaggtttgaagagtgcttatttcttggatattctccaaagcacaaagagtatttgtgtgaaaatgctactggaagaatcttcattgccaggaatgttatctttgatgagttatcatttcctgcttctaaggttggtacttcttcatcataggtaaattctgaaaccacagcttgtcctactttgtagttctttactagtttttcatattacttcacctgagtttactgttgagccatctagtagggatgagcataaaatccaaaaaattggaaaaactgttcaaaccgacctaccgaacaccgttggaactgaaat

SEQ ID NO: 244306 - DNA, 5211 bp, Cannabis indica
ggtaaaatatttccaacaaaaagataataaaacgaaggcaataaatagcaggagtcccaggctctttgaacgggtgaactgggtctaaaggggtcggaagatcatcattctagacggaaggagcctcaacactctggtcggtaggagaagtggaagtgttctcctcaggattcccgtaggctgcctgagcagtgtagtagtcgagaaacatgtctttggaagcgccaagatattcgaagtttgccttgcgattggccttccaaaagtcataaaaaatctcgagacaacctgtctctaaggcattcaccttttccccgagcctcaccacctcagacttctggcttttaacctcaacatcaacttcctcctccgtagtcttcttctcatcctccaacctgcggacaagagtctaaagaccctctctatcgtcttgaagactagcaacgtcccgacacaaagaagcaatatctacctcaaggtgttcggttgacgacatctcttgcagttcccttgtcagcttggcaaccctggtctcagcagctagaagtgtcttgttgacttctccaagtttcgtccgcatagtctcaagttgagtccgcgcatctgtagcttcctttttggctaagtctgcatccctttgcagtgtgttagaagtggcaagattcttgacagcaactgacttagcttgggaataagcgtaggccatctttaaaccagtctgtgcgaaaaaaggcattaaaatctgaactagtcaagaaggaataaaagagaaatgttagaaagaacttacccgcgaaagctccttcaagactcctcccaagaccagctccaaagacaagtcattaactgccctagccaactgttcgttcacctctaggaccgacagactcacatagtggttgagcatgtctctgcctcttttggtctccgtgtacaatacctatggtggggcaggagccttaacttgttcagattcgctcctgaccagcttggagccaattttagcctactcaggtccatccgagctccctccccaggaacctttggacttggtaactttcaaggtaggagtgtccacggtaggttgttcctcaaagagatcaatgacatcttcaactggtgccttctctttggatggagtcttaccgcccttagacttcttggccggaggggataagcccgagcttcccccactctcttcttcaaagcctcgatcatcttctgaggcatttatgtaatgaaaaaacaatacggtcacaagaaggcataaaatatatgaaggcatgaaaatcaagaaaagtaagtgcaagatgaagtactctgcacactggcaggagcatctgcccgaacaagtagcacaaatggggcatcatcatcagtcttcctgctcctccaggacaacttttccctttccctctacccgggttgatggccgaggaggtaaactaggctccctgatcagatagtatgttctatgggcctctgctaagtcgggagagttttcttcttcttgtgcggcctcttctgctctgaatattattgagcctcgttctcctgctgagaatattcctgagcatactgcttggctccagcatcaccattcaacttagcctcacgcttaagttgaatgagctccttctcttgctcagctccctcagctcggccggacatggacttcttcttccacccactcataggctggggtataaagtctgccggataaagcttgtacatcacaaagttgtcctccgaggtcaacaaagtgatattccgagcagcatctggcagctaaagaatcttttgagccctgtccctatgtgccaatgtgaagggtggatgacaatacactgggatctgttgaaaccgagtataggtggtattaatgccttccacgaagtagtactcgtcaacaaaacccctgatcttgctaaccttcgtgtccacggtgtctgtcagccacttgtagtctggctgagagaagtagaagtaccccaatctgctctgcttaggggtagactttaagtcaaaaagccagttaaccccgtgtggggacggcacgccccatccttgaatggcgtagaggacgaatagggcagataagtacttaatgcccttgggagtgaactggctcggacaaaggcaaaaataacacgcaaccctcttgaagtacgagtgcaaaggcagcatcgccccttgcttagtgtgggcaccaaccaggcgcaaaaccctttctttgggttagtttcccggtggttcgaagaagggacgtaaaactcaagttcgcccaggtacccagctttatccaagaccctcatacgtccctcgcttattttggatggggcacacccatctagcccctaaagaactttgcctcctgtgcgggactgccttggtaaactcctcgatgacatagtcttccccctcgacacagatgtcaccctccgcagatactggctcctctcattataccctccaaaatttgggggttcgaccactccttcctcttgagcttcggaagggctatcaggatgaaaatcgtcctgctcttcctggacctcaatgtcccccttgtgatcctcctcctccatagagggcagatcctgctcggcacttagcaacgtggcaagctgggccacatgagggtcagaggcactaactttccgcatcgtctactttgtgcgagccatcatccttctcttggacagatactgatgtgtgtgctgtgcaacagtaacaatagggatagatagctattggaataccaaggttaccagaacttggacgctcaacggaaagagtatcagtcacacctggttggacaatatatgtccagttggatagaaaataacgtctccaacccttcttcaactcctaaataaagcgactgtacccttctcctacgatcttctcggagtaagagtggtgttgcacttcaggttctggagtaggagagcgatcactactcacttcccaatcctcgatgctcgagttagaaagtctgtcactcgaagagaacggattgtggcaataacgaggttgatcctcgtatagattttgaagcaaatcctggtcaattcggtgttcgcctccccaaaactcaccagggttcatctacaaaagaaaacgcacgagatgagtgtttggcaaggatatcgaacaaaaaacaggcaaatatgtcgactaggaccacccaacagcttagaaagatcaaaaacgtacaaaaattaagtcataacccaggagttttaaatttgtgggttaagtaaaaaaattttatgaagcttcgaatgagcaaggtgaaaatcaaacattgcaagattaaagttagaatgtcgtaaataacaaagccgtacgaattattatagagaaaactataaagtttcaagcttagattttctgtgtatcttctacaacaggtcaagaacaattgtattttctacaatggaaacccagatattaaagatacaaagtaaaagagaagaatattgaaaagttactcactgtgtgaagcctaaatgtaatccagacgaatctgctcaggcagctctgctagaaatcccatgacaacttgaaatgaaattccttgtttgctctgagtttggtttgtggagaaaaatggtgaaagtaatttatgagaaatttcagcactattcataggcttattggtgaaaaggggtaatcatttcaaaatccccagacgtttcgatttccccccaaaagtaaatattgggaaataaaaaacaatcaagtgcctcaagagaataaccataaaagtgtgcaaaggaaaccgtgtctcgaggcattaattaagttagagcattaattagccaaaaaccgaagagacacttggtcagattcacacacgaacagatgcagctcggatgaagtctccacgcagcttcggaagtcccgtacagacttagggggcaaatgttatcccaatttttgcactcttacatggcatcacatgctagtgacatgtggaagtgattccccacatctgcctgaaggagatgttccgagccgagcaccacatatacctgtacgaacgaggtcctcttagtcgagcagtggacaatccgaaaaacataccaacacttagcaatttcaacatttgcatcatgaagcaaaggaacaatccctataaatctgggatcgtatcacaaagatatggctagctgtccaaatcccacaatctgtgtattctatatagatgtaatatgtattcttactaattatagacattgtaagaaaaagggaaaccttccctcaagcatgtaaccctataaatagtgatccattctcactggtaaaggggttgaaagaattacttaagagaaatctaagagggcatactcagatatttcattgtaagagctttgagagagggaacattgtgttctttgttcttaagtcaatacaaatcaaggggagtaggctattacataactgctcggggctgaacctctttaaaaactcagtgttctttatttatttatttatcttttcatacgatatctaaattatatcacttattgcttacaattaagactcgttgtcgttggctaaaagcaaggtcaacacctagtttttccacccatgagtttgatatatgatcctttgccatgacacaaacctcatgatggaaagcgcaaccttttatggaatggtaggctttatgtttcctggagggaaagctagacctgtgtcctcacttgagaaattatcccatgctgaggtctatttcgataggtgagagtcgcattgaattttgcagtagcaaactttggctttcacgggcaaaggctaaaggtgcacaaaaattcgaacaatgactttgcttaaaaaggccaaagggtgaaacatcactaggcgtgtgacagacttcaagcagtccttctcttctaggaaggaggcttgaagatgttccatacccccagtgatctttctcgaatgaaaaactatgtgcatgcaaaagtcatgttgaatttttatgaagcaaactttggcttctacgagggaaggctaaagtcgtataaaagttgaagcaatggcttcactttaaaagaccaaagggtgaaacatcactgggtgtgtgaccgacttcaagaagtccttctctttaaggaaggagggttgatgacgtgtcgtacccccaatgatctttcatgaacaaaaaacaatgtgcatgcgagagtcatgttgaatttt

SEQ ID NO: 244307 - DNA, 767 bp, Cannabis indica
aattctactaactctatatacatatatttattactacaaaaataaaattttatcctgatttttatgagtattttttcccaattttcgctaattggataaaagcctcttacaaaaattaggataaaatggtagcttttaatcccacttattatataagaaacccaggattaaatccacccttttaccctgattttcttgtaaaaattgagattaaaagctttctcctatttttttcatttgtatttttaacttttaattccatttttcatataaacaaagggataaaatattagttttaatcccctttcttcataaaaattagaattaaaagtcctacgtattttctttttcaaaatctgattttgtaatattatttattttaatatatatatatgtattttaattatatttaatggtttaatattaataaataaatacttcacataaagttaaaaaaacaacattaattaattttcttatgatcaatcattacataatttaacaatttatataatttacataagtttctaaacattacaacaaaatactacaaataaatataaataagaggaatttatcaattataaatacaagatgcctatataatttctcacattacatagatatagatgacttacaatagaattgtgccagcaatggccgcaaggtcccattaccaagtactagatcacgacatttgtggaatcaccaacaacattacataaggcccaaacaacattaccgtgtcagtcattactactacaata

SEQ ID NO: 244308 - DNA, 811 bp, Cannabis indica
aaaaaaaaatagtgtttcatagattacaaaaattagaccatatggtcattacatagaatatttttttggaattgccgacacctcgatcaaactggaatgttggttggcatacgcccaattaaccacgttatgggctacaaaattacaacaccgagggatcttaacaaaattacaacccaccaacagtttagaaaaagaaatagctatcaatatcctatcttagtgaacttcctctaagagcgttgttggtgatttccgaatcactctcagtaaacacaaaattgtagcccaaagctactgaagtctctagagccaataaacaagcagcaacttcactaataagggggtttgaaaaaggaacattgttgacagctatccacacaaacgaggccatatggccacgagccacaacagtcatacacatggtctccgtctcatttctcacatcacaattgatcttaatccagtccttctgaggggggaccatccaatctcagtggtaaaaacaggcatagggaggatagataaggcataatttacataacaatgcttaatagagtcaatataatgttgtatgctatttaaattgttgttatgtaccttatcattgtgagctatgcaaatcgtgtcagcaacaatagacgcatacaagaaaatctcattaacattagctcccttcctgttaaggttccacaaaaatttcactcagtcctagattcttgctccagattcattgatcggaatgagtccccacggtgataatcgccaaaagtgataagacaaattacaatgcagaaagagatgatccatg

SEQ ID NO: 244309 - DNA, 804 bp, Cannabis indica
ttattgctagactatagaatgctttttatgaacttctctctgtcaattttttttgtttatgagattgggagagtcgaacttaaagccttctaagaaaagtgtgtaactaataaaaccaatttaagcggctgcagttggaattttatttataaaaaaacaataaaacttgtgtttctattatcactttattttataaagatatgactaaaaaaattagaattgaaaaacaaacgacataaaatttagaaatcattgaaattttcagaatcaacaatatcagttatattatatatcatatgctaagataaactacaccatcgaagaaaactatcaacacaaaaataaaattctgaaacgacaacatgacaacaagcacaaatgacaagaagctttttatgggtatgaatgaactatcaagataataaaacaaaacaaaaaacacccacaaaatacatattttgcctggtcgtttttctgtaaacacatctaacactattccatatttaaggacaatattattattattattattattattatatttaatcagaagcaagacaagatttgagatttccattctcttgactcaagaaaaaaaaaaacaagtagtatcacaacaacaacaacgcgtcccctccaagatttttcaaacatttaatagtattgaaatgattcttcaaatgtaatctgacagtattgcaataatataatatatttcagttttagagaaccaacctccacagtatcaaaactaacatttcaagaatatgttctctttgcaatatgtccgagagagagagagag

SEQ ID NO: 244310 - DNA, 1738 bp, Cannabis indica
aaagtaaactctaccacattttctcatatttatggaaaaccccaaaaaataatgtagtagtacaatcaagttgtcaaaactaagtaagaaaatgagattattttcacaaatacacaaaataacaaaaaaattgcaaaactacggtttcacagaatttaaatatttttacgatttttttattttatttacggaaaatacggtccttttatgttgtactcttgataatttgttgttggttttttgttatatgtatgttatttttttgttgttgttttgatattatttagatgttattttcatgttacttttgtgtaattttcttattattttcgtgttgtttttataaaaaaccataaaactgtaaaaaaaattctttaaacgtaaaaatattattttttttttttacaaaatatggtaccttatgtaattatctctaagaaaattgtaatacaaaaacatattgaggaattgatattattttgcatattacaattaattatcttatttgtttttatcttgtttgttaagttgttctaatattattttttaggtgtcttatttggttttaagatattttttttattttattaaaatacagtatttttgtaatttaaaaattttaatacaatatttttgaaaatttaatacaataaaaatatttttaaaaaactaatagaaaaatgtaaaaataacaaaaaaaaaattgagtatttttgtaagataccgaaaaatggtatggagatatcttaataagggtatccaataaccgaagcccaatgctttttgggccagccatgctagacagttgattgagtaatccatataatatccttctgctcgagctagttggcgcgcgaatttattaagataagaaattgtaattttgagtttccatttatatgaaaatgaaaaaaaaaaaattaggggatatacatgtctaactaacctttaattaatgagcaactttcaataaattccagttaaaaaagaaaacaaaaaatcgagaaattccaaaccttacatttaatgcggggtagtgggtatgaaaacagactgtaaagtgtgttgtgcagagtgaaaaattaagagtacaccatacacttgtcttctgtgggatccacacacagatctccttcataagcaaagattgattcagattggctggtgtgactgtgaccactctttggcattctttttgaatagtcagaaccgtaatctccaaaatacaatacgctacataatagtataatcacagtaaaaaaaaatattcttatgagaaagttataattaaatagaaatacaccactcaaaataattaaaatagaaatacgttaattcaaaaaaaaataaataaatataataacaataataataataatcaatttttaatattctatcataataaaataaattttaaataaatataatatttctgcatacacaataatttaaaataaaattataattctatacaaataaatttataaactatacacgtatttttattaactagatagatgttatgtgtcaagtcacgtatgttaattttattttaatttttagtttttagaatttttttaatatcataattttaaaattaataatattcaatgtagttataattattgaaatttaaaagcatattaatagtgatttaaataaaaacaaaaattactattatactttgtaatagtaattgaaaaaaaattattattcgtcctaaatttatcttcggaat

SEQ ID NO: 244311 - DNA, 1372 bp, Cannabis indica
atttttattatacttaaaattaatattatgtggaccactaaaaatgtgtcacgtgtagacttatgtacatgtaggtcgtccaccgtggcaattaactgagacttttagatggaaggggtaattagctaacaaaaaagggatttgagtagttttgtcaccaaaaaattaatttaggtggttaattgctaaaaaatataaagtataagtggttttgttcatgagtgtgagaaaaagggtgttgaaacaatataccttgatccctattttttttttcaaaaggcctatattcacccccaccattagcttggaccccttcaataggcaagttaaattgcttttcaactaagctcttcaattggatgaaagtttcaaatgactgtgatttaagagtatgaggcaaaatccaagagaacctactataatcatccacaaaacaaaatataatatttgtaactatccttggaaacaatgtgtgatggccccccataaatcagtgtaaatatgctcaagagactgactcacacaattttgagacacaagaaaaggaaacctatgacttttacccttgacaggcattacacaactgcaaaattttaagagagttaaagatatatgctttggtcaatattttggtgagaatagtaggtgtagggtggccaagtttgaagtgcaagagattaatatcaatagaaagagtagaaaaaaaaaaagcaacattagatggaatgctagaataagaagaaattaagtctttattgatcgcagtggaattacatagagactaagtacacgattggtttcaagaattagaattacaatcctcagaaactaaagaaacattagaagtgtgtttacaccaaaagtagccttggtgacgtgtacatgaatgtttgacacgtggtaagaaagatgacatctcgtagttgagtagtccagagtcatagtaagtcgacctgagaggggtccctagccctacacccaggttgagttcgagaactcttggatggaagttcgaactttaataacttgaatctaactcactatttatcagtcaactgtaccatgaagacatgtagcaatcaaatacaggcaccgatagctgaaattacatgaacctgcacctcgagagtcaacttgggcacctaaggtttcacccagcgcctaggttgacaacctcaattagggtttcagtttccaggaccatcttagagcaaatggatcaaacattgcattgggacatgaactagacataccacgaacatatttaaggcatcagaattagattcggagcaagttcatttttgagcactcggtgctcaggcacctagcgcccatgttgaaaatttatcaatctaggcaccttccaagtatc

SEQ ID NO: 244312 - DNA, 1980 bp, Cannabis indica
aacaatacatattgataaacataaaacaaataaacttggatctgtctgtcttttttaataaaatatataaattttctgggaaaattgaaaaggaaactttccgagcttccaaacagagacacaccactagccatagctggaagagtcatcacggtggtcccacacgcatttacagctaaaaatggcgtgacaatagggcatcaaacacatgcaaattctttttctccttttcctatttatcctttaatatttcgcttaattgactttaattttcaaccaaatcaaacaaaaaaatatataacgcgcattccatttattataatattcaaataaaataaaaaaaaaataatttaaatatcttttgaaaatattattataataataaatattataccaaattaattaacgaaaacataccccacaaaatataactaccactttattttttttaactcgttacacacacacccacatgatttttattattattttaaccacatctcaaatattccggctctatttgactatctctctttctctctcttcctatatataattgttttctcatacgtaaatttcctcaaacttaaaaaccaaaccactttttgtattctctcttatctatttcttagtttttctgtcaaaacattttactggaagaagaggagaaagaagaagaagaaagattattattaattatcattatggggaactatgtttcgtgcagtttggcgacgcctttgatgaaaaattccaaagcagtgagagtggttttcccaggcggagaagtgcgacagctccgggatcagatcgtcaaggcggcggagctcatgttggaatgtcccaatttcttcttagccaattcaaagtctcttcacatcggcagacgattctccgccctagccgcagacgaggaactggaattcggtaatgtctacgtcatgttcccgatgagaagagtcaactccatcgtcaccgccgccgacttggctgtgtttttcatggctgccaactccgccgaccaaaaggatagtcgggacggaaaagtgagtaattttacctgagtccggcgccggcgccggcaatggaaaagtaggtaattttgttgagcagagcggcggcgatgaagatcaggagaaggggcaaacgacgtcgtcattgagttttgacggacttgaagcgttcgatcaaattgtgccggaatttaagtacagattagctgcatgcagatccaggaaacctatgttggagaccataaaagaagagcaattcgtttaagataaaattatttcgtctctattaataggtaggaattaaatttaatttcatcatttgttacttcttttctttaccttcatattatatatatatatatatatatcaattggtttatcctttttaattagaaaacatatattatataaatagaattagtcgacaattctgtatcatgtaaattagtcagattttgttatctgtgacttgattggttttaattatcagtaattaagccagaatttgtatatctgggatttatttttgaaaaaatgagcaaatatttctcattgaaaagtatatatatactttattgatcatcaaagtgattaatgtataaatggaatgagttttaagttttattcttggatggttgatttgtattttattaggaatctagcttgttacaatgtgtcaaagtttgaatacaacttcttatttaattggtccaattataattaaagagaagaaagtaaacctaccgccaaaggaaaagtatacaaaaagaaaacgatatttgataggaaactaattaaagaaacgggaggtctctttacgtggatccatttgtaataatattcccaagtaaaacacgcggcatgaaattcattctaaacacatacagacacatgcatctttatcagtcaagaaacatcaactgtgggacttcatcatattttgcatatttattatattatattatat

SEQ ID NO: 244313 - DNA, 1286 bp, Cannabis indica
aatttatttttaaatatttttttttttttaatatataataaatatgattttagtacgaataaacttattatagtcttttaatcaaaacaattttttccaaaagttaggttggatcaactttagcttttagcttcttaaaaacttattcaaaaaactacttgttgactgcttaccaaacacatttttatcacaacttttaacttttttaaaaactataccaaacgaaccctacatcatataagggaatctccattacattaaaaaacctaatgaggattatattacaaaaatgctaaaaaaataaaactaaaatgactaaaatgactctaataccttttttttttttatatatatatataagttacaaaaaataaagaataattttgttaatttaacacttactccaatattcatttgtttaggagatgtatgaaggagtctcctaattttttttattatatgttttagaaaacagcaagcttttaaattagatgattttagttggaaaaaaatgaaaatatagaaataagaaaataaaatcaaatttaaaatgcattaaaaataattactattaaaatgaaaatagaaatagaatcaaatttaaaatgcattaaaaaaaattattaaatttgttctcattattaatgtaaaaatcattctattattttaatactttaagatgcaactaaacaaaagaatgaaaattgtttctttttcattccattcaatttcattacctccaaccaaacgctatctcgatcttctaagaaaaacttaaaacctttttgtagagagaaactagaatcatcacttaaccaccaaaacaatgttgttcagggagaagtagcagcaggcacatttacaaacagttaattcaatctgagaaaaactcttggttttggtagacaaattaaatttaaaatagcctaaaaactatatatatttatatattttctacaattataaacagatgagtgaatactcaaaagggcataggaaagtggcaatccccaagccccttgtagtacttctggggtgactatttaatgaccatagctctctctgaactgtacaagcctagggaaaccccttcctgctttaccagaaacttcactctgctgaagaactggtttctgcagtttcatcctcactgaagcttgatggcatctctaaggcagatctacaatggaagtgatgtacttagaaagcataaattgcaatttaaccccaaaatgtattaaattttgaaacttaatgttatcaacataggatgcacaacctattcc

SEQ ID NO: 244314 - DNA, 1757 bp, Cannabis indica
tccgcttctgggtaggtcctggggtccaggtcccgtgtccaggtccggttcttgggtccggggtcccaggaccgattccggctcccgagtctcgatccgttcctgagtccgagtccggctcctgggtccgggttcctagtctgggttcgggtcccaaccggtcaggtttcacgtctaggtctgtgtccgggttcggtcccaggtccaggtccaaagtctcgagttcgagtctgagtctcgagttcgggtctaggtctgagtctcgggttcaggtccgattccgggtcggaaattggggttgacctgtaaaatattataatacaagttaatacggaccatttgctatgtattaaataatataacttacaattgtattaaaaaaatttgttcctaataattaatataatacattaatctatccaaacatagtattatttattatttaatacaatacaatccttatacaacctacaatagagctctaaattttattatatatttcacctagcgaagcattcatcacaaattagctacaaaattatatattaagtgaaatgatttatataatatatatattctgaaatcttaatttgaacagcgcaaactaactaattcatttaagtatccacatctggaggtatataatagctaaatgtataaaatatagctaaaaaaaaagcttttccatcatgtactttaaaatacatatattttatcccaaatgtgctttagatttttaactcatactatttatgagctaaattatattttactatttgtttctctctctcatcattttataataaatagtataaatattattaatgatatgataatatttaaaatgaataaaaaaataaaatataattttgataatataaaacagaaaagctaatgtatagaattttagtaatgtaaaatagagataaaataactcatcgcttgatgtgatgagtgcttaccaagactatttattgatggtaaataatttaaaaaaaaaaaaaaaatctaattccattatgtactttaaagtacatatattttatctcaaatcactcttggtgctcatactatttatgagctaaattatattttattatttgtttctctctctcatcattttataataaatacatatataaatattattaatggtaagataatatttaaaatgaataaaaaataaatagtgaaaattaaaaaaagattttagtttacacatcagtcgggtattattgtagtagttgtatttttgaacaacaattgatatgcattgtatatgtgtaattaataactggaaactaatttttaggtggagtgtagtcaaaggaggagagatcgtcagaaaacctggtttgacgtatcccaacggtttgcacatcaagatctcagagaagcacaacaagtgatgataaaccgtgcgtcatcatagtatccacaccaactggaaaaatttgctctttattttttcaaactatgtgaattttaaagtcatcatcattaatttgtcaagtgtatgtaatatatatatgtttgtctgagagcataaataagttcattaattacatatatatgtgaatttgaatcagcagctttaataagtaaaagttgtgtatattatgtttttgtgtttcaaagaacatgcatggataaagttcagtagttcaccctaaaaaataaaatgcataaataccattctcagatttacaaatttcattaatatgtaacctaaagtaacaatttcataaatatccgta

SEQ ID NO: 244315 - DNA, 915 bp, Cannabis indica
attatacttcttcttcctcatttgatgactatggtaattttcttaagtgggacactatctcaccacatttttcttgtttattttgtacaagtgctgatattttgttttatgcctcatagatatggatatggattttgaagatgtattgtgtagccctactggttctgccaagaaatccaaataacctttcacctcttccagtactgctttgaggtcaacacatgaaccattgaaaaagtatcaaaaagactactaataagaaacgtgcctcgacccaactcacaatctttccaaaaaagtcctagatgattcttttgccccggccacagtgagctctggtgaacaagctttagggtctgtctatcaggtcaagttcttgggatctcaacccgagatgacattgttggagccttcttggccccttcctattttagctagcacagagggctcgtagatatgctcgctgcatgctaccaatagttttcctcactataaggccttcgagcaaggagacttgatacaattgataaaggtgactttaagtcttgtgacaaggagttatgatctcatgcactcgattagttttttttttgtaactcatatcactttttctgtgtctttctctgacgtttcttctcccaggcatcttttctatcctttgtggctcaacaaagggctcttcaaaacattaatatgcttaatgtcgagctttgcaaatctagggaacatctcaaagttttggctaagtaatgaaccgactcacagtcgaagatttcgaaagtcaagaaggatggtgaagagcaatagaaaacccttaaagtagacctcgaggttgcctagaaaaagatcaaagaacttgaaggcgcaaaccagaaggcccaggttgaagttgacaaaaaacttgaagatgccaaa

SEQ ID NO: 244316 - DNA, 1022 bp, Cannabis indica
ttttttttaaaaaaataaattaggggccacaacaccctttggccccttgtctccatcattgggcgacgattgccaacctattaatactttattagaaaagcatacctaaagatgtcacacaatgcatggatgtgcatatttccataattatttacttaaaaatttataataatttcagtgttacaggctgaaactttagtcctgttggttggttttaattgggctaatgtgtgtggtcttccaattcatgcagtttattcagattcgttagctttggtgacggccattaacaacgggaagatgtatttcaacgagctaggagtattgtttgaagatgttatagctttattgtctaaattttcgggagcagttttgtctcatgtggctcgctctgagaatttagttgcccatgacttgggaaagcatgctctgcggttagacgatgagttatcctgattcgaggaggttcacagagaaaaactttacaaatattccggttttaaatagtgcttgaaacccccaaattaagttcccattcttacttttatttcaagtttatgaaattttcaaaaactcttttttatcttcaaaaatcttgaagcattccattagtgatatattgataatcaggcaaaattacaatacttttggataaatggccacattttcattcaaaatgtaagtaagtttaattactttgaccttaaaaattatttgtactttgtgttggtctaccaattattaggtttttttacacaaaatgacaaatttgataaattatttacatttttaatgtcaggtgccatgttttacttttatacaatttaactttttcatttatacctttttaagttttgttaattacaattatacggaatctctttttcctctaactttaacttcatccctatcttcaattgtagaaagctcatctccaagtcccttgctatcaacctcctcttcatccctcaatggccgcacaaagtccatctccctccccatattgttcatctccattctca

SEQ ID NO: 244317 - DNA, 632 bp, Cannabis indica
tcttagggaagaaagaattgtactggagacaacgtagtagggcagtttggatgaagtgtatggatcataatactaagtactttcaccataaggctttgcagagaaaaaagaaaaatcatattgagtaccttattgatgagcagggaagagaacatcgtggcgaggaggggattctaaggttgttcagaggtattatagttctcatttcactactatacaaccaactttggaaaagattgaggaggtggtccaggttctccgttcgcgggtctcagatgttatgaatgtgatgttgttagagccttttaaggaggaggatgtggttcgggcagtgaaaagtatgaatccaattaaagctctggggaagaatgggttgtctgctttgttttaccaaaaatactgggagatcactcctggagatatgtttgtagagtttgtcttaaggtgcttaataatgatgttctgctgcaacatcttaatgaaactttgattgctcttattccaaagactgcgaagcctcttaagattgaaaaattttttccaataagtttgtgtaatgttgtttataaaattgtttccaagtgtttggcgaagagattaaagttaaggtttcacgatactatctcggggac

SEQ ID NO: 244318 - DNA, 1810 bp, Cannabis indica
tagtggcttgcgtgggtggtgttatgactcttactctttacaaaggccctcacttgaatccattgctccaccatcaccccatagagtatcatcatccgcaacacgaacacaaacctcattcctcttctaacaaaagatggttaattggttgttcgctctttctacttggaacctttgcatggtcttttttccttgttcttcaggtagtagtaattacagtttgtcacagaaaatacaatgtttctttcttttgtttatacatatatactaacttgtgttctctaaatttcgacctttgttcccttatcatcgtttcactctcacttttttcattgataaaataaatgatggatgaaattttgtgaactaagtactaagagtctgagtgaaaacacatgtaaaagcctctgtaataaggagattttgtttcaattaaaaatacgtcaaggtaaccttttatatgatgtgttactttttttttaatttataataggctcaaatcttgaaaagctatccagatgggctaaggttgacaagcctactgtgccttttaagtactggtcagtgttttgtatttgctattgctttggagaggaatcctagtgagtggaagcttggttggaacattgaattactcacaataatttactctgtaagtcaacaagtgactcttcattatttctttcatttggaatttcagtctgtttactgaagtggaaacagaaaaaggtaaactttattgttttatgtatatattaaggtgcccaatgcataattgatatgacacgttgtgatattaaattatatcggatatgccaatttttgtggtgctttagcatttcccatattataagtgtttatataagaaaagaagtaagtgcccattgaagaaagcaaagtttgtgtgcagttttacaactttcccctctttttcttttgtttttgctttacatattaaaaatacagacagatttgggaatttgtgtcctagcaaaattttcctagtcatctatgtttcattgatactaaattactttagagtactttctgtaccaccgataatattgttatgatgaaaagactgaaatatcctatgtacataatatggtatattccagactctttactatcttctctcatttggatacctgtctatttgtagtgttatacacatatgataatatgtttccattcgcaattcttttattgaatattatctgtgactgggtaaagttttctactacagctagtatttctttggaggaaatttttcagtttacattttaaacagagttggtttaaggttgttctctttccagggaattttgataacttctctttcatataacatccaagcatgggtggttcagattaaaggaccagtattcatagccatgtcacaaccattgactctaatcattacaatgattggttcagtgcttttattaggggaggccattaacctcggcaggtgaataattattaacatttctataaattcagctccttcgacatttgatgcaaactcaagtttagcactacttcacacaacttctaacaaatcttgttacttttttaatatgtgtagtgttttaggtgggattttgttggttgtaagcctttatgctgttctgtggggaaaaagtaaggaccaaactcttcaaaaccagagcaattctgataataaagctgaagcagatattctagcgctggaagaggctgaggtgaaaaagaatcattatgaggacgagatacgagtctaatctaatatttttagaagatatatatatatatctattctatataactg

SEQ ID NO: 244319 - DNA, 1626 bp, Cannabis indica
gtataaaaccgtattatttaaagcgaggccaaatccgtaaataagttcaaaattagatttcttagggaaaacttcttatatatatgtgcccaactataatttttaatccaacaagtaatatgctaaaatttgaagtaattataattaacttaattaaaaatagtaatttaaacacaaaaaacgaagcaattattcattattttaaaaaaaaaatatcatagatatgatcgatggcaattagctagctgtgtgcaattggcaattgagatggtagtcactaaatcaaactaactattattcatattattatgataagaacggcatattcatcccacacactaataaatttggtcccaccttttagcagaaggcctaaaatctttttccaatctcccattatttttttcaacttttgggaccccatgcatgtggagcaacacaaaatcaatgcatgcgacttaccccacttattaagattctctaaaattcttccttacgaatttgtagctataaattggtattcatttctctcctcattttaccatctcctaattagtaataacaatagtccaattaagatatataagctatggaaaccacattatcttgcacaaattttgtcacactcctcatttttctttgtgctactttctacaagctagactcaaccttggccgcggccgcggccagggctggagtcaatccagtgtctaaaatcgctacagagttcatcagaacatcttgtagccaaacaacctacccaagactttgctttagctctctgtcaatccatgccctaaaaatccaaacaagccctcaacttctagccggaacagccttaaacgtgacactgtcctcggccaaggccacgaccgccatgatgtcaaggctctcattgagccacggactgaagcccagagaggtttcggctatgaaggattgcgttgaggagctgagtgagactgtagacgagctgaggaggtccattggcgagatgagtaagctaaaaggccataatgctgattttaagctcatgataaacgacattcaaacttgggtcagcgcagctttaaccgatgagaacacttgttctgatgggttccaagggaaaactttgaatgggaatttaaagactgtcgttagaggcagaattgtcaatgttgcacaattgactagcaatgctttggctttgatcaacagatatgctttgattcgtggataggctagaattaaaaaatatataatttaaataattagtatattattaaggtttggttaagtttggatcaacttaattatgagttgtttaattgtgtggcgagatttagtagtgtggtcattaacattaagaattgtttttttcattgctatatatttcaacgtgagattatgaatgcaattcattgatatatatgtattggcgtgattattataacatgctagcccgtatgattggtatatatgtcggtaatcgcattatatttgtaaataggtttttgccccgaatttgtattaaattatgttctctgaacttttaagatcgttaaaaatgccccatgaactattgaaattgttggatttaaggacttttgtcaaatttcattcaattttactatttcaaagatt

SEQ ID NO: 244320 - DNA, 2817 bp, Cannabis indica
aatgttgtttttcaagacaacactttcctgccttgcactcatctgcatcatctcaggtacaacattcttcatctttaattttccactgccactttcacatttccagttggtaattcttgtactaatatctcttctgggtttgttgatgcatctcaattcccttcaccatccgagccattcgatcactgaacctttaccaaatctcccacaacaaacacctggtatacacccattcccacacccgacacctgttctccactcaatccttaatattatcccatctccaagtgtccaaattcacccaccagtacccacaacaacatcatctgccacaacacaaccaattccaccatctgtacctgacatttcctatccctcccatacacctgaaacaacatctataccagctgccccaataccaccaactgctgctattaccactgaggtgaccaacatatcaagcacaacaaaaattccagctgctcgaacacactctatgcaaactagatctcaaagtggcatccataaacccaaggcatatctctctactaagcatcgtcttaaggaatctttattaccaagtgaaccaaagagtgtcaagcaagctctcaaggatcctaagtggttgcaatcaatgcaacgggaaaatactgctcttatcaaggcaaaaacatggactctagtgccttatgaaccatacatgaccataattgacaagctaaattctgatggatctctcaacacctataagtctagacttgttgccaaaggctacttacagacaccgggaattgattaccaagagacctttagtccagtggtgaaaccaacaacagtaagggttgttctctcgattgcagtaacttcaaattgggtggtccaacagctggatgtaagcaatgcattcctaaatggcgatcttcaagaaattttttacatgagacaacctcaaggttttgaagacccatctaaacctaatcatgtttatcttcttcacaaggccatttatggtctcaagcaagccccacgtgcttggaatgagaagttaaaacatacattgttggaatgggggttcactgcttcacggtccgatacttccttgtttacttttggatctgccaaaacttcattatattattggtatatgtggatgacatcttagtaactggtcctaactccactctcatctccaaacttatagcagatctaaacaaatcctttgccttaaaggatttaggacctcttcactactttcttgggatagaagttcatagaaattcagagggaatgtacttatcacagagtaaatatatagctaatcttcttgttaaagttcaacttgatggcgccaagagttgtcccaatccaactactgccaaccaaaagttatctttaaaggatggtgaaccttttgctgacattactctatataggagtacccttggtgctcttcagtacctctcccttactcggcccgacattgcattcattgtcaacaaactcagtcaatttttacatgcccccaccgttactcattgggaagcatgcaagaaacttctccgatatctaaatggtacactatactatggtctgttcctcaaaccagctgcatcaatggatctgtatgcctattccgatgcggattgggccagctgcgtagacgatcgaagatcaaccggtggctatgttgtttttctgggcggaaatctcatctcatggtcagccaaaaagcagcaagtcgtggccagatccagctctgaaagtgaattccgggccttagcaaacacagctgcagagatcaaatggatagccaatctcttgactgaattacatgttccattgtctcagcaaccgattatttgggtggacaaccagagtgcagcaaccattgctgctaatcctgtcttccacgcgcgatcaaagcatatagaaattgatttgcactttgtaagagatcagattttggctcaaactttatctgttcggtacgttcctgcagtggatcaggtggctgatcttcttactaaacctttgtccaaaaatcgatttctatatcttcaaggcaaacttcaaatggctactaccccttttcgtttgaggggggatgataatgacaagtgaattagttatttccgttagagttttgtgttaacagttgtaactgtcttttatctgttttctcaattctgtttgtaactaattcttgtacaatgactcatataaataaagtcttaagctcacagagataagtgaagcttttcctttcttcattcctttttctctctgttctctctgattgttttcatggtcataccttttggttcttacctaaattgaagattgctgagcttctacaagaacaatagttgatgatgttggggtgctctatatactaattaagatagctgatgaagccttcattttgatggaggaaatggttactaataatagttcatctattatggaaagtgaaacatcattacactagaggtgccaaacattacctagaagtggccacttgcgattagttagcgatatttcataaaaattattacatcaaattatacgtgacctgatattaatagtaatataacacgttggaatatgcattactatagaaacctaattttgtcattttttaatataacataataatcgaccgtagatgcaaatagtattttatatgaaaagacacataaggttttgtgcatcttttcataactgatattgatagtgtaaaatttgatatttacttatttgcgtctgttatgtaacgctacaacccaaaaaaaattcaaatctagcccaaaaaacccc

SEQ ID NO: 244321 - DNA, 579 bp, Cannabis indica
taaatagtactaggatgagtgatctcttacgaagttcttgtgttgctacttaaaaatatgccaaccaaatgaatagtaccagaatgagtgatctcttacgaaattttcgtgttttcacttaaaaatatgcaagccaaataatcttaacagggattatttgtatttaatctttaaagagattattaagtgttgatgaagagagtattaaaagtatgaaattttatgatcacaatgtttctcacactattatttgtttaatttttttcctctaatgttagatgtatttatagagagaggttagtaacaatagaattagaatattgatcttaaaatactaaattcgttaatgatatgacataatatcggtaaagatatctatattcgaatttggattgaagttatttgttataaatgataataaaataaaaataaaaataaaaagtaaattaaaattatttaatttgattaaatcttaaaactcaaaacgttatatgatatcaaataatatatataaaaaaattgatataactttttgagttaaaagatttaatagaattaaataattttaatttttttttt

SEQ ID NO: 244322 - DNA, 3039 bp, Cannabis indica
ggctcactggtggtagttagaggcagactcaagaatggtctatactacatggttggacactgcaactactgggacagcatcacctgcaatcaataatgacaaaatgacagcatacatttatggaatttgaggcttgggtcatgtcaatgagataggcctcactaagcttgaccagcaagggttgtttcaaggtggattgagtggcaaacttggttttgtgaagagtgtgtttatgctaaaagttgcagggtcaagtttgcgacaggacaacacactaccaaagagaaattggcctacattcactctaatcttggggcccatctggaatcaagacacttgggtgtgcaagctatttcattagcatcatagatgacttctctaggaaggtgtgggtatttctcttgaagagcaaggatgaagccttcaatacctttgtcacttgaaaaaggttattgaaaatcaaaccagatgcaaaattagaaaactaaggactgacaatggttgggaatattgctcaaagcaatttgatgaattttgtaaggaacatgggatagctagacatctaattgttaggaatacacctcagcaaaatggtcttgctaaaaggatgaataaaactcttatttaaagagtaaggtgtatgttgaagggtgttggtttggatagatctttttggggagaagctgtaaagacagcatgctacttagtgaacaggtgtccatctatcccattcaagtttgaaactccacaagaattttggactggtcatgtacctaagatagatcacctaagggtatttggctactctgcctatgctcactacaggcaggataaactccaacagggccctaaaatgcatgttcctgggctaccctgatggagtaaagggttacaagctatggtgcttggaactagcacaagaaatgcatcattagcaaggatgttgtgttcaatgagggagaaatggatatgaaaagaaatgacatggtttctgcatcaaaaaatagtagcaataaagaccaaattgaggtggacacaacctcacctagacctacagagactaatgaagtcactgctgaaaatagcattgttagtgactctcaaaccagtctcagaacataccaacttgctcgagatagagagaagagcaactaaagctcctgataagtatggctatgctaaattcactgcctatgctcttagtgttgctgaagacatagatagtgctgagtcatttagttacacaaatgccattactggaaagaatagtgcagcatggctgtaggccatgaggaagagaaattgtcattgaaaaagaacaaaatctggacagtagttaacaaacctgaaaactagagagttattaagtgcaaatggttattcaaacaaaaggaaggtctaccagggagtgaggatctaagatttaaagcaagactagttgccaagggattcactcaacaagaaggcattgattacaatgatatattctccccagttgtcaaacaaacaaccattaaagttatcatatccatggctgcaagatttgatcttgaggtggatcaaatggatgtcagaactgcattccttcatggcaacttggcggagaaaatctacatggagatacctgaaggctatgatgagaaactaggtgaggtatgccttctaaacaaatctctttgcagattaaaacaggcttctagataatggaaccttagatttgatgtgtttatgatgaaaattagtttcaccaagagcaattatgatacatgtgtctactttcaaaatggcatttatgtacttttgtatgttgatgacatcctaatagttggaaaggagagaaagcagattgacaatcttaagtcacaacttagtattgaatttgaaatgaaagacttggggccagccatgaaaattctaggcattgaaatagagagaaacagacctcacattattagcctatcttaagaaaattatctcaagaaggtacttgataaacttggcatgaaagattccaaaccagtaaccactcatctagcccagcattttaaattgtctgagaatcagtcaccaaagacagatgctaagaggaaacatatggaaaacacaccctatgcaaatggggttggcagcctcatgtatgctatggtgtgtaccaaacctgatctggcacacagcctgagtgttgtaagcaggttcattagtgatcctggtgaagaacactggaaaggattaaaatggatccttagatacattaaaggttcaatcaagactggtgtggtgtttgggaatgacagcaattatgatgacaatgtcacttgttttgtcaaattatgctgggaatttagacacaagaagatctttagctggttttgtattcactgtttctaggggctgttttagttggaaagccaacttacaaaaggttgtttccttgtcctccactaaagcagagtacatggctgcaacggaagttgtcaaagaagctatttggctaaagggtttgacatcagaaattgggatcaaatctaaaaatctgttcatagattgtgacaaccaaagtgcaatccatcttatgaagaactccatgtatcatggaaggtccaaacatattgacattaaactacacttcattagagacattgtttccaacaaattagtcaaagtaaagaagatcaatactcatgagaacccagctgatattttcaccaaatgtgttactggtaaaaagtttaggctatgcctaaagctattaaacattgaagattgttgatccttcattcatgaagtaaaccttattgatggaacaattttgcctatattctttttctcagagccttaacttgcacaagtttataaaccaggtagaatttgtggggtttatatactggtgcaagtgtctgtttttggacagtttttatagttgaattagttagttaattctgttaaggttattgggttcttgtactctctatttcagtctatatataaataccattatgtgattcattataggtgagatttgtgtgtgagctgagagtg

SEQ ID NO: 244323 - DNA, 1153 bp, Cannabis indica
ccacgttttccatattttgaatcccatttccatcaccaacagatattccctctgtccttttgcaaacttctcccgtacccagtaccgtaggcacaatggtgggcgtagcctcctgcacgattttttgtttgtgtccacctgtcattgtactatctcccaccttgtccttatctacaccgttctcctcccccggacctggcgaaaccaccgcagactcgccagaatttctcgctttttccagccctttatcatgtcgcttctaagtatttcttcctctgtttcttggcaactcccattcaggcacctcctccctctcaataatcagctgtgaagtccctttccccttcatattgaaacagttacttctccctgtttcactcttaatccaagtcccatacattggaacagccggaccaaacttagaatagaccatagtaggctgatccgaacaaactttttcccaatgcgcaagctttccgcagctaaagcataaatgaggtaacttctcgtatttgaattgtacctaagaattcggcttgccatctgccttgagaaagaagccagaagggaaaggatgagaaagccaaatctcaatattactcctcagataacctcttcgaacaagttcttccttacttttctcttccttcttaattaagttgccaacttttttagcaaggatgggaatgttcttattcgataaaaatcgcattacacccaaaacggtgccacttcaaactcaccactgtgaacctccccctcatccggccttggcttaatgttgaggaggacaccattaatgatccaaggccttctttccattacaaaatggtaatcatcttcctcatcaaaaaagaacccaagaacaccatcctcacactttttcattctccaaaagcccagcctgcgccacactcctccaagaatcttcttcacaacagaggctggcatgtttttacagcccactaccttacctacacacgccttgctagccaccacatcttctagtgtaatatcctcaaaaagttccaacatttccatctcaagattgctatctcgtttcataatctcttcgttctccaagtctacagaaaccacctgaatctctttgccctttttcccccatcacaaaagaacacaacaaaagaaacaa

SEQ ID NO: 244324 - DNA, 593 bp, Cannabis indica
ctaatcttgagtgttgttgaaccataggtttggtacaagaggaatccttcttagactaagttcaccgtcagtttgaaaaccacaagtgggtgcaaactactagaggcctatctaggaggttactcagaatagaagacctagaaccccttagtgaatcaaacctagagacagagatcatggccaacaacgccagtcaccgaggcaccagggaccctatctatgatggggacaatgaacactacctctaaccatcagttgaactctacagccccggcatgtcagcaactaactaacgaggtagttagccgtcaactagctaaggttgcctggatgttagcacaattgacctcgtacgtactcgtcaaaaataccctagcttcaccttttggtcaaggaacaaaccctccatctaccaccccgactcagggggcacagatccacaaccacaaagcaaaccaagagtagcagatgctagacctatagacctagtacccacatcgctatgtgcccacaattcctgatcactacaaggaagagattcgaagagagcctcctactgtaatgacctcgtaagtaattttgattagtaaagg

SEQ ID NO: 244325 - DNA, 1563 bp, Cannabis indica
gctctatggatatttgtccactctacactctttcttttacaactaagaattttatgtcaatatgctttgacttggatgagctcctattgttattggaatacaacactgctgaattattatcaaaaaatatcttgacgggtcgtttctacatcctacaaaatacacagcctagtaacaaagtttctccctatgtagcttgatgtagaccttccactatcttggcatccgaacaaaattagaatcagaactaccctactacctctaaattatctgacttcttgtatgtgagcatgtaatcttgtgtttctctgaagatatctcataatcctcttggctactatccaatagtctataccagtgttgcttaaatgtttgcctaacaccccaataatgtcgagatatctggatgcatacatacctgaagatacattagactcccaacaactgatgcatagggaatcttttgcatttcctgaattttaaggctacttttagggcattgactaagactaaatttatctcctttagcaacagggatatcacctggtctacaatcttgcatgccaaaccttttaggtactttatcgatatagcctctcttgtaataatctaagaataccttgagaataatctctatgtatctgaattcctaaaataagagaggcaaaatcgttaggttttatttcttgttctgtttttaattgttgctgtatgttgacgtggaaacttgtatgagaaatggttaggagtggaatttatccaacaataataaagaagacagagaattttacgtgatttaatagttcaactttacctagtccacgagttagtgttatttctgagtgtaattgtgagtgaatttttttgatagactttctatgtataaaatttgtcgttcatcttcccttgagtgtacttaaccttattttagtgggaaggtacacataatggaattataacccacattttatgtatatttaaatgtacgtgtggggaaggaaaatacaaataactcgtctatattcaaaatacaaataaataaataagctttgacttactttgagcatgtcgtatacaagcatagtacaattgcaatattctcagagtagtgtatctcaagcaaactgagattgtgctatctttcaaatgaaaggttgtatacatatgtgatattatgctctctttgaggtgatgaacataatttttctattagatcatcctaatcagttcttctccttattttcctagctagttggttaaatcataattgatcacagtactgccaatgattcttgaaatatttgttaagaataacatcgttgtgcttcaccttgtcttattataaataactgattcatagggaccttatagctacgattattataaataaatgattccatagagactctatggcttcgattatttcataataaccgacttcataggcccttatggagtcggttatttcataccttctttagcatcatttggaacaattcttctttgagctcatgttgtactgttttcttctgatgccatttctgaacaatccctaaaagtgtc

SEQ ID NO: 244326 - DNA, 2143 bp, Cannabis indica
tatttaagacatcctgcaaatttgtaagaaatttggaaaaatttaacacgctgaaaattacgttcaaacagtgtattgtacgcgtgactattttattttatacgcgtgtaaaatagactgtttgaacattgttttctatattgtaaattattcaaaatttctcaaaattttataggttatcttaaatagttataacgtacatgaatatgaaaaaaaaattagactaaaaaaattttctcgaggccgaaacaagttaaaggtatatcagtatatcccttttaagggagtgcatgatagaatccccctaagttatatattaacaataaagcaaattaattgcagcaatataagaggacatagttttgttcatcagatgcaacttggttgcaaacaacgacttatacattaccttttttttagctaatgttatttttttcattaaaaaaatttcatgtcaagtttgtcaaaagtaaagcattcaagtaaattacatacttgttcaaaaaaaaaaaaataataaattacatacttgtttaaaagctcatcatcactatttatatactcaatttccagtttcaattgttattagattaattagtttttgctttctgactcatctctaattttccaccataccaataaaaagagtgctaactacaattttttttaacttctgcgcccggaaaaacacatattagactattttttttcatgatggtatgtattataattacaacataatcctttaaaatttttaaaaattatgaatagtttattatcgaaaattaggtttaattttttttgaataaatgtagaaaattagaatatcatgaactctgttgtcgatactgtatattatttagaatttttcaaaaatttatggcggtgatattgtatctatagcaaataccgctatatgaaataaaaaattatttcaacatgtatttttaaatacgaaagttagagaaaaaaattgtaattagcattcattctttattcataataacaaaaaaattattaaaatattagtaattttactaaaataggtattgcttacttggtccctcctaaattattctagtttaatatattactaggatctatctactaaacaaataatgtttttttttactatttttgtgcttttaataaagaaagaagaaaccccactaagctaaaataataattttattattatggctagatttatataaatcttggcattggcattggtgttgttagttgtttttttttaaatatatatagttgaactaaagtccagactaatatgaataaaagtacactaaatatacctacaactgggacaaatgttttattttaaaagaaaataaagatcactacaactacaagtggataatttgtattaaaaaaatttgaggaaaagtcataagaagaatctagcataatcttataaaagatgtcaaaatgattgaagctaatgtttactatgtaattaaaaatttggatggagttcgatgaatctaaggccgtgacttatgaccataatcatttgtagttttttatatgcaaagaccaaagactaagactaagactaattgggattataataaatatcccatgctttaatctatatgattaattattattagaacaaaaggttaaaagagccttatgctctacccatgttgtcaatcagatcgaagacattgctcacccatttataggcccattgcatctcataacttttattgaaagtaccacttttaaggttgaaaataagtagcgttatcggggtttgaacacctgaaagcaacttaggcagggctctaggttaggcatcccatccgttacaccgcaacttggtgccatggggttccttatgttttgtttaataaacgattggatagtaaatattttcaaactcacttcacaacccttctttcgaaaaattctagagtttgttcgtgtgttgtcgacgtttttgtgcacgttgattgctccaactaaaaggaccttgcctttgtgtttgtacggtgtccaacgatgggggagtgtggttcgcgactcctcatacaaaagttccttaaatcatgtttcaatttccccttgataggcaatttattatagtgcgtggactctatattcctaacaaaggtgtggg

SEQ ID NO: 244327 - DNA, 1140 bp, Cannabis indica
gctcagtgaattacaggctcctaaatcacatcaatcacaacacttataagcgacacgataaatcacttcccggggacttaaactagaaactaaaagtttctctattgatgaataacatggcaataccctaaatatgacaaaaatgggaaaaactagggttcccaaaactgccccaaccggtagaccggttccccaaccggaatttcagttttgggaaaaattcctcgaagcgaaccggaattccggttccttcaggcccctctgaaccggaattccggttcagtgcaggaattactaaaaatttcataactcaaccaaaacaaccccaattcaatcaaaactttccagaactattctataaaacctagagaacatattcaaggcaacaaaacaaccacccaaacatagaatcaaaatttgccattgatgagtcaagcttgagttcaaaaactcaaagcttgctcatccaactaactagctaacaaaacctgctcaaatcaccataaaccaacataatatagatactgaaaacataaaccaacaacaacaacaagtacagcaagcaaaacaacaattcatgcaaaactttcttttccttataactcaagaaattaacaaaaagttactagaagcttactatgaacttgatatcactaaatccttgagaaaatagcttgaaatccacagaaaatcacccagccctagctgctctaagggagggccgaaagagggagagacttcagagtgaaaaagtgatttttttctaacgctctaatttttcataaaatcagtaaatgaatgattttccttaattaattacattacttcagccaaactaagctttaaaaattagatttaaaactaaatattaaaccctcactaaagacaaaactcaataggcaaaaagaccataatgcccttgcatatactaaagagtcatacaaatcacttagggtatttcggaaaaactctaaattcccggctaatcttgacattcccaatgtctaacaataccgtcgcgttatactaaattatgaagatgtgattctacagagccatacaccgcgttccaatgttgttgggcactgaacatgcaaaaatatgaaatttctatatatgacatataaaatgcattctgaa

SEQ ID NO: 244328 - DNA, 745 bp, Cannabis indica
tgtaattagaacccctaattacagaggcacctataggaatataagatacatataaagaattttacatttcgtacgtagtatatatagtacatattagttcgtatttttgcacgggaatatcaccatgcacaaatactaattattttgtctatgtcctatatgctatatatcaattaattattttaagatttgactcaaacattacaaaatcaataataagcggccagtccaagacagtgtacaagtacatcttttctctatgcggctgggctcatacgaataaagatttttggttaaaaaaagagtatatactagtgtattaaaccaatttaaatatgacacatcaatttatttgaaagtattttaaagaaaaacaaatatttacatggttaataatatttaaaaaaaaataagttagttaagttggcacatttagattagtttaatacattatgaaacactaattttttactaaataatcttaactagcgctgaatggcatgcttttataatttatacgtaaacaagtatattatcactacctttcaaaaaaaaaaaaaaagtaatattatcactatttttgttcaagatatttatttattttttaagagaggtttggacattacgtttttatcaagaaactcattacgtttttatcaatagttattattgctaaaaagaaataataatgaagttaattagtttgctaactagagatttccacattattattattattggaaaa

SEQ ID NO: 244329 - DNA, 681 bp, Cannabis indica
aaaaaaaaaaaaaaaaaaggcaatagggatgccaatattagctgataattagagttaggtgaaaaacaaatgatgtgagggaggaagaatgtgccaacttaggaaatagaccctctaactaacctatgttaaaactaccaaaaaggtttcagttttcattttcaatttaatttcttattagcggtttaatagtatttaatccaaattaacctcattacataaacccaaaatttgatttttcgcttccaaattatgacatatatattattgtatttttgaaattttcccgtcgttaaaaataattcataaactattcacaaaattttaaaataatcattctgtcaagtttattgcaagtgacaaacaaaatggacaaaattgtttaagttattgtcatatcagtactatgcgtataattaattttattaaaaataatttaaaaggtttaatttcgttttacttaatttttttaattattaattgatttttttctcaataaatcatgatattttattaatgacaattaagtaaaataataacatacaatccaatcagagatctctcctgttagaaacacgatcaggattagaattagaaaaacgagtcaaataatcaaccgcttaatttccagatcgtttgacaaaaaaactaaaataaaatcaaatgaaaaatattgtagca

SEQ ID NO: 244330 - DNA, 1383 bp, Cannabis indica
actggtgttctactgtttttactagtgttctactgttgttttgagttgttctgttttgtgttttactcgtgttttataaaaacacagtatttttgaaaagatttccgtgtggcagtatttttgtaaaagttaacccaaattctagtatttttgtaagtttcccttttaatattaggttttatatattttaatttaataatataggattggacactttaagatagcaaataggaatgtttaaataaaattgttaagctggcttagaccatctccaatgcaaaatctaagtattatactaaatttggcacaaataataaacaaatgttatatataagataatatttatagttgtattccaatacacaataacagtttaaggagcaaaatattcatgaataatttgtttcctactgacgggacaagccgatggagataggaaaggatctccccttgcaatgagcaaggcgagtgcgatgaacaaaagaagtgtgggctcttggttcacggactgattcagaagtctcgggtgccgttgaaacaatggctactgacggaggggtaggctaggatctttcgtcacgaggaacagtcgagagatcaattcaacaaagagaggctttcagataagagaaagtccacggggctctaaaagctagctctgatgtatgccttccggtctcctttcgggcaacccctactaaatggtaggcaatgaatcagagtgctgtgtgcgatgctttggggcaagatcgcaagttccaacttagcaatctccgctttgaaaagccgtaccagagacactctttttagaggggaagaacgtcttttttaggcactcgcgccgaacaagcaagtcagtataccactctttgactgtgacgcttgcctaaaatcactcgagaagtatagtccgtcagtgaactagtagggacataacggcgcatttgagagtggcatgcctgcatgttgtgatgcacctgaggcgttcgcaagcactcatctttttggaaggacattctttcttgccagaaggagacgtccttgtagtgtttcgagcgggggcccctggcaacgatcacatgaaccctagaaaactacctggttacttaactagatcgatatccaagtgagaacgaaagaagaaagaagttactatagctggcacgataaataatttcttctgtcgatagacaataaagaaggacaagcggatcgtccggttcagagatttacccgttctttactctaccaaaagccctcttcgaaaagctaggggctgggataaccagagttcttgcgggcaggcttccttagaggagaggctttcttacccgtcaaacttactttgttgctaaacctaaacctacacctaagaatcctaca

SEQ ID NO: 244331 - DNA, 1030 bp, Cannabis indica
gtgtggagaatgcaaatgcagaacattattattgcaaatggacttgaaggctacatcgacggaaccatggcatgtccggctcaattctccaatcccacctcgaaccaagtcgacccaaccttcacaacatggcacaggtataatcgattactcatgagctggctgtacgcctctctctctccgactccatgctcagccaaatagtggctttcactactgcaacagagatttgggtctcccttgaacgcacttactcagccgcctcatttgcacggagctccgactatcgcacggccttgcaaaatctgaagaaagatggtttgaatgcttcagcatatcttcaaaaattaaaatctctgtgcaacaccctcgtctctgttggggaactgatttcttctcaagagcatttaacttatctcttgaatggtctcggaccggagtacaacgcctttgtcactccgatcttagctcggtctgtcaaacccaccattgaagaggtccatgctcttcttctcagttatgaagcacgcctggaaagacaaaatgctgctgcctctttgagctctcttcaagccaactttgcaaatctctcatttcccaaacagagacccaaatcgacctctcaacaaactgcctctcaacctcgcttcccgtcccatacacagccaaatcgcccaccttctataccctcttttcatcaacctcgcagcccctatcagtcttctcctcgatcccccatgccatggcttccatctggtccaaaccaattttaggatgataggattatagtacatttaattaaaaaaaattcaaaattttgtaaaattataattattcaagtgcagaaaccaagcaggtacaacacaaaatgacttccctacactacttggaattctccttaaattttttaattataatagtgtgagctacataaattaaatattgcaaaacaaatttacaattcaaaatatatatttacctgaaaactaatcctgatgacgtggacatcaatgtttgacacatgaaaaag

SEQ ID NO: 244332 - DNA, 1596 bp, Cannabis indica
ctatcaaatcttcttggaatgaaatttatgtgttctcagattcgcaagtagttatccgaagtctgtctttgaacaattgccttcttgatattggagttttttaaatgtacgtgattatctgtttaaaatttagttaaaaagtttaatgttagtaagtttttttttagtcgtagtatgaattattttgctgatgctcttgctcaaagagttagaatttctagcctaaatgtcagtttgttctaagggaagagaatttctcctgtgattctcatattttgttcttagttttagtaaacttcggtttctttcaaaaaaaaaaaacttttttttgacttagaagacaaattaaatagtttcttgataatagactttttagtggccgtctttgaaaattctctacaaataaataaataatggaagtttcttgcttatgtttttttctatattagatttgagaagcatccttgtatttttgttttgtttttttttttctgaaaacttgtgtagaattatgttcaattttttcgccttctcatccgagtttgtctgaatgcagtttctatatgttttccccacttcactttaataatgttgcaaaaatgaagtttcttttaaaagaaagaaaataaaaaaccatgtgtggaaagttgaatacgattgattgcattcatcaatactaacattttattttcacgttgagtcatctcatgatctgtgagttgataagagaccatataattaatgtatctataaatgattaaaacctaacaggtaaaatggtcttaaaaagatctctcaaccaaacataaaggtatataaatattctatcttttgaatggggccgggtgtgtactgttagctagagataaatttatattgaaagagaactattaagggataagtcaattgatttgaatttgaaccaattttcctgacgtaatctataatataaattactattacatttgagaattattaatattgtcacacatatccaacttgctcatattaatatagtgaagttggaaaatcatgcaaaatctagtttgattacgtttacttccctctcttccttctttgaatccaaatttaacgggatacgaatacaataataacaggtaaacattaaaaattatgaacacttggacttcattatttatttgtaataaaaaattcacattaagaatcaagagattctttatttgaaaggtgaaaatacgggttaaggagttttggccttacatatatactcaagaatttaaaatcttactttcgcaacaatgcttccccacgggtatttttctttttcttcttcttttaaaggaacgattatctttttaaaagcgtatactgttaatgttatgctatttctataattatatttgttagtcttttttacttgaaaaaatttacccacttattaaagaatattgtttcacatgaattaaatataaatatattaaattatgtataaaaatatgaattattctattcatcactaattaattttgagataacaccactatatttattgatatgatatcatagagataagattcttttgttgatatcccttaaaaaacactttgaagagaa

SEQ ID NO: 244333 - DNA, 1569 bp, Cannabis indica
aacataatcctatgatttagggtcatttgctataattttttggaatgaggacaatactaacatagtcctatgatttgaggtcatttgctataattttcctattcaaaattgggctcagcacagctgaaattgacgccttgaagaagaaaggctctctaggtttcatcgctcagcttagcgcccccaaggataatcgccggtggttcatgctcagctcgtctgacaggaatttcgagaatcttggtctcctcctgtgaatggcgatccaaggtatttactgtaaactttgtttcagcatgtgtgaaattattttagtatttattgtctagtagagtcgggtgtatttcggtcggtttggttgggatatagtgtatttttactaacccaatataaatgtcgagtcgcaaatattaatttgtaacccgtccaatgaaaaaataaaaaaagtgtaactcccccaatgattttcgtcagtttggtcgggttaatcggtttgacccgatttttattttttctttttttcattattgtaatttttaatagaataaaaaaatatactcatatgtaaattttactttaatattcaaatacaatcaaaattatcaactataaattctaaattttaaatcaaatactataaaatacaaactttaaatgtaaaataatttaactattaacctaatttatatattatattatagataattttagtaaaaaatacgtaaatcgatttatttgggttagaataatattcaacccgcctaatatattcatttgactgtttgaattttttgtaaaattatttattcagtttgatttggacggtttatttggggattgagcggtttgtaaatttttttgaacagccctactgtccacagctttctcacccactcttatatttccgttgactgtgctgattctctactctgccgcggctcatttcctcagactccgatcatctactccggttgaaaatagttttcggccaatcatctctctagcagagcatgtgaagactatcacacatggtaacattctttcttattttaatatcatagcacgtggaattgatcaattaaaccagatgctgagattgatgccttcatgatcaatttggtttgttgttactgttttaatcatacatggaatgaagttttatattattctgtgtaaaatctcactaagttgtcaaatgtccatgtgactctctgcttatatgtgtgtccttttgcgtggtttgatttggaatgattgtaaacaatatttaacaatgatatattcttgtgttcatgatttatttcaaaaatttctacggctatagctaagttttaattttatgttatcaactactactgagaatttcaatattccttgattgaatgatacatagtataattattgcaaatataagagaatatcaatcatttaatcgaagacttaatatgtatgcacacacactttatgaaactaaatcttttagatcactgaatggctcttacgcttgtgcatgtcacagttatcaacctcgcattaatattatttctctaaatgtctctagtttagttt

SEQ ID NO: 244334 - DNA, 1079 bp, Cannabis indica
tttagcagttaaatccttctatcatttcactcatatttaagttttcaagctcaaattattttgacggtaaatctctctaaactactgaactggtaacaaatttaaagtgtcatttgattaactgtcactataaactacttatgtatatactcttgtatacatgacacgtttatattagcacacataatattattatataaaaattatttttaaaattaaataaaattataaaaataaaaatgttacaaattttaaactaataatatgaagtgtatcattataaatgtgatgcatgtacaaaaaatatacatataaataattaatattaacagttaattataaaaagtaaataatattttaaatttactagcagttcagtaatttaaaaaattttaccgttaaagaaataagtattattgattggattttgaccacaaaatattctaaataataatatgtaagggtacccaatatgtaatattggtaaaatgataaattttttactattattttgaaaaatatcacttttagtagtattttgaaaaataacacttttcacttaccaaataaagatcaaggcaatcaatttggagatctcgaagggtgttgtttagtgctgctctaaccttatcaggggacaagtctgagcacctataatttaacatatttaaacatatatattatcttattatttcataattagtgatcattaatttggataataatatttcatattgattaattaatgttataattaccatatcttggacgtgacaaacatagcccttctttcaacccctgcttccatggctgattgcaaagcacgcccaacctgttcccaataaattaaattaaattaattatcatattaaaaaaataaataataacattatcttaataatgtttatctttattaattaaatatataaatgagatatttgtggataaaaaaaatatctagaataaaaggattatgcctcttcttgaactccatattgtgcagctgtatctatgtgtctgtaaccaccctgcacccattaatcataatataattaattagagttcgtttggaacgccgt

SEQ ID NO: 244335 - DNA, 2852 bp, Cannabis indica
tgtgttcagaagtttgatcatcattgtccatgggttggccagtgcattggattggtaacttattctttaactcttctattttaaactgttatgttatcaaaggtgttatccttgattgactttgccatgaaactaactgcattttttcaccataatcttgtcatttcagcgcaattatccttacttcataatgttcatatcaacatcaaccattatgtgcatatatgtatttgtgttttcctggatcagcattcttcgagagcgatccaacatttgggttgtcatgtctcgtgatatcttatcggttatcctcatagtgtattgttttatcgtcgtctggtttgttggtggacttacatttttccatttctatcttatttgcactaatcaggtaaaccttctccttcccttattggtcatgttttgttgcattggctcattagttggagaagttcattagcaagtttacttattttctaagaactcaacttgactgattaagcttgaagatacattttagtgtgatattagattctgattgtttacttgtagttcaagccattcgaagttctgataacttcttttgttaaatattttgcaaataaagttatcttgttataatgctaatcgtattattagtaggagatgtccctattgatgttttgcctattttgttgggcgatttccattaatgaagttgctataatatgatagagtaaactagtccaaaaatttcaacagttgttaccataggatcattcatcatcttagcctttactcattcacaagatcattttgctttatctatctctaatgacattatttatttcataataacatgatactcatagaaccatgtttttgataatgtagcttgaaaatttcggtttcaaatgtactgattctgttactattcttttgcagacaacatatgagaatttcaggtatcgatatgataagaagaagaaccctttcaacaaggggatatttggtaaccttaaagaagtcatgtgcactaggatcccaccttcaatgattaatttccgagcatgggcgacagaagaggatgatgcactttcagaatccgttaccacaacaagcgagagagagtttactgaatcgttgaaagacatagaaacgggaaataaatttaacaaggatgatggtaaagaacttccatttattttgcagaatttggattacagtgctctacatgataacattaagaagaagaagttgaattctggttctatacctataataggtcaagaactacatccacggtggagttctgctgttggaagtagtactagctataattacaggacaaaagaaacctccattagctaacatattgctgattttcaagggaaaaaaaaggtaagcttttttcttgttttctttgtttctcttttgtactttagatttatagatatttctatacttgtgagtgaacccttttctataatagctcaaatagtcaggcatatggtttattccttcgaagtctgaagttcgagtcattttttttgagtacctacataacaattgttgtagtgttttggtctacgagtttagtaaaatgaaaagagagagcttatagaccttcataaattacaactctaatagactcttacaaagtaaaaatacttgtgagtaaactcttttctctcttggataacttaaatagtcagacatatggtttgttcctacaaagtctgagatttgagtcctttctaagtacatacataacaattgccttagtgtctagtccctgagtttagtaaaacataaagaaagagcttatagacctttataaatcacaacccttatagacttctccaaagtaaagatacttgtaagtgaacatttttctcgcttggatagctcagatagtcaggcatatggtttgttcctacaaagtttgaatttcgagtcctttctgagtacctacgtaacaattgctttagtgtcttggtcaccgaattcagtaaactcacaaatcacaacacctaataatatacttctccaaagtaaagatctccaacccgcttcatggctaaaaaaactccctaagagaccttaagactgtataacaaaattagaacttttatgattctttaacaagaaggcttggttaaaatagagatatctctgaaatttattatttccttggcttttggaaaacacaatttgtcccaaaaaatccaatgaatgtaaactagggatgataaaataaccttaaaccaaatctatttgcatggtggcatgcatgaaaaaatgcttataaaaaagcagtgtcacgtcactgtgtgtaataaataagagaattgctaaagagtactattgtgcgtagcactctctttgatgttataccgctattggtgtaagtggcgaatcccatataactttcctgaaaagatgtcatgtgagtcaggaagactactttgcaaagaattatcaaaacgaaagttattacttgcaaaacaatacttgaatatgaattgttgatcgttagtgatatattttcaattgtttcaaattattgataaatggttttaacagaggcttagttcttcaaagaggacatgtaatgccatgttagacagattgaaaaacaacagctttgatggcttgatgaactgaaactaaagaggaattaatgcattcaagatgaaactcatgtaattatatgtatttatatatgtatatgtatgtatatattatatgtagtgcattaaaaaaataatagttgaaaaatgataaacaagcactatgtgttctactcttctattattgtcttcaaattttttaatcttattttctactttaatattgaatattgagaatgc

SEQ ID NO: 244336 - DNA, 1041 bp, Cannabis indica
atcaaatttttccatatattcatgtttgttcatatttttaggcttaatttgagtagtttaataaaatattaagaaaaaatatataccactataaaacatttctttttcatgatattttagatgtaaattatgtgccaacgcaaaatttaatattgatgttattatgagagagcaaatggtaagcattgaggaagccttttgatgaccttcctatgtctcacggtgggatcgattggtagagagaggccgatgcaaagttgctaagcagcaactctctagggtatttcttgatcaatcccgtaatacaacatgactcgagatgctttcataataattgctccatatttcaaacatgtatgacactagctatatagaaatggcatatgtttactttttccaattccaaccaaacaaattaactaagggccggcaggcaacactaaaaaatttcacctagttagcctagatacttggacaatattgtgtgtgtagtgttgatagacagctaatttacaaatacatttataaatatgctttgtatattctagtaacaaaggcatagaaagaagtagcctatactatatatagacacacatatacatatactcatatataggtatagatatatgctgaagacttcttcatgatcaaacgaattaaaactctatatgagcttaacttcatttgcctaaaccatcaaactgcacaccttacctatatattagacactcaatattaattccttaaatatatatggagagactccccacaattcaaactaaaattcaaagcagcaactataggaatggcaaacaggtggttgggtacataagacccgacccgacccggtaacactttggccaatcctgttagaatttgagataaggtgaatgtagttccatctcacaaaatcaattggtaatgggaggagtaattcattcatcttacacattaacaatgtgatactctctaacacatcccgctccgcccctctccctattagcaaactggatcaggtcaaactcgatcaagcaaatgtga

SEQ ID NO: 244337 - DNA, 1368 bp, Cannabis indica
aagtagaaatattaattttaaaacattaaaaaataaatcttcttttaaaaaagtaaagaaaaatgttactgttgactttaaatttggccaaccgacattgaaatcgtatttatgacatatatcactacgtgtatacaataagaacaagtaaataaagagacacgacattttatagtggtttggtccccttagctagcgggtaatgacctactcccttttggttgtattgatacctaagataataccactcagatcacaagtgttgtggattctaaagcggctctcttacgattacaatagtgagaatcaataggcaaatcttaagtaagagagatgagagagatctagtctcttctacaatgcatgggttgtgtagaatagaaagagagagatctaggatttaagacttagagattagggtgcttgagacctagggaaattagatttaatttgatgctctttatattgcaagagaataataggttaatatccctaaaaaagaggaaatataactatttgttacataataaaataataaataattaatatgttaattaattcccaataataggtaaataactgatagttatcccctatttttgtgggtcggtaaagctccattcgtagcttgtagtgctttccaggatgcaagttgcgcaacaagtgcctaccagggtcaaggttgcacaccaagtgcatgccagggtcaaggctgcatgccaagtgcttgccggtatcaaggctgcacactaagtgcctgccaggatgtaagctggtcagcccttgccttgctggagattgaccgacctatgctagccatagggccgactagggggtgtgtccagacccctttaggtactcagttcgttgtctcttcattctgcttaagtattcagactactcattaactgatatgttgtgtacgatgacttagctttcttgcggataagttatactccacgtggtattaatcttgcccacgtggagatgccacgtcatgtgggtaaaaattaggataacattttcttaatacagattttcgttaacgattatgagcctattttcgtaatagatttgacacagaaattatgagagatctaagaaagaataatagaaacaaaaataacactaggtttttacgtggttttgcagttaactctgcacagtccacaagtcaatcttattcagatttttctgatacagaactagggtccttcacactcagtgtattacttttttttctataagatttttcgtctccctttttttggataatctgcccatatttatattaatataggttggcagttaattacatttaagttcaaatcctataacaatattccccgaaattatggactttaatta

SEQ ID NO: 244338 - DNA, 6159 bp, Cannabis indica
tcacatttttcaaaattattcaaagataatttatggactaaacctaactactcatactcttaattattcatttgttaacgttacaaagtctagcatgccaagtattaagagaacacaacaagtaaacagaaacattcattttattaacttcaacattcaatctaaatattcctttagtagcataccctttccccataaaaatccaattcttagttaaagtaaacaaattttctcctataatttatgtaaaccccaccttgttgagaagatagtctaagactagattctttctcatctctagagtatgcatgacttctttgagaatcatgattttctagacataaacgttaatttcacatcaccaataccagcaacaataatagtgtgagagtcacctaacaacactttcttatccttggtcacaattgtgtatgttttgaacatagcacgatcaaagcaaacatggcgagaagcaccagtatccacccaccaccctactgatccaccaattaggttgatctttgaaatcataactgtataaggcaacacttcatttaggttagcttatggaacaaaactagacctatttagacacttgtgtgccatagtacggggtcattcttattagggggatgttgttgtttgttgtcatcactcgtgatcataagggcatgtgttatcttcaaatttaatccatccaggtgtttctctttcttactgaaatcagttggcacaatttctgaagccaatcttgccaattgattaaactgagttgtgtattcagtaacactcatattttcttgcgggtaggctgagtaaattcctttcttttcgcacatctgactacttcattatagtacttcatgttgaacaactcttggaacttttcccaaagtcatagtggtaacatcacaagtcagggacaccatgtcccatcaaactagagcatcttcttgaaactagaatgtgtcacatgccactctaccattgtcagtgacacccataaaattcaaaattctagtaataacagtcagctactgctcgactttcattacatcggcacctcccagaaagactggaggtgcctgcttgcggaacctttcataaagttgttccattcggttcactgcaacaactggtcctgcctgcatagcacgggtaggagctacttgcatttttggagcagggctgttgtctcaagcgtctgatttcatcatcttgctcattaattctagcttgcatttttgcattcctggacagcttgggcaggctgcggcgtgttaacatcgccctggccgcgtgccctgcctctagggcctctgccccagccataaacatttgggggaatctgaattccctaactgccactagacccgaccgagttaccctgactcttggtgtttcgcctggcgtctatagtactagaatagcctgcgtaaccgagagctagtctggccagatcgcgatcaagaataactgaccaattattgcttattttggaaatttaaaacatgcacctattcagttatcaggctactaacatgcttcctatcaggcttttcttaaatcattttattaaaatatactactaaagtaataaaggcttactgaaccgtgagatgagctgatcgctgatgatgattgtacatgtcgtgacgatttttgaaagacaacctcgcgactttgataccaaattgtaacaccctaatagtttaggcatgttaacgtgatttttaactaactgtcaagctcgttactaattaacgaaatcgtgattaattaaaactttacttaattagttataaacactaaattaacatacttatataaaactgagatcccgtttacaaaagtatttacaaaagtttcactatgcatatataaaagtttgtcccctagcgactatacaaaataagctctgatgtcccaaagaccgtacgctccaggcctaattgccgcgatatgtacaatctccatctgctcactctcacggctgctccatcaggcgcccatacccccaattataaccctatccccgtgtccaacacagtgttgagtctagaacattcgtacgacagtactatcgaccataatatcagcctatactcggtatgctagtcgtactctagttgtactaatgtgttactgtcaagtagtacagtactatcgaccatgatatcagcctatactcgatacgctagtcgtactctagtcgtaccaatatgatattatcgagtagtacttaagccaatatacatttatcgatatccaatatattactaaacatactaatatcgctattataatgtaatataataagcttaactaatatgcgcgctaaacatgtaaatacatatgcatattattatactaatcttaccttatttttgaattcaggtgcgtcggccaatctgagtggagtagctgctcgacgaattactggcccctaaatcacattattcgtaaaactggcgagtgacatgctaactaactttttggggacttaaaattgaaactaaaagtttccctatcgttaaataacttgtcaataccctaaatattgcaaaaatgggaaaaactagggttctcaaaactgccccaaccgatagaccggttcctcaacgagaattcttgttatgtagggtttcctggggtccaatcggtcgaccggtccctacaagtccccctgaaccagtcgaccgattcagtgcaggaaaagttcaaaattacactactcactcaatttaacttattattcaagcaacaaaacaactaaacaagctcagaatcaaaatccaccattaaagaccaaaatttcagttctaaaactcaaactttgtctaacaaccaaattaagcaaccaactagcttcaaatcagcttaaaaagtataattccaacttcagaacaccaatgaaaacaaaacacaacaacataaaccttaaccccaaaatcatgcataagccttgcttgaaacctaagaaactacaaagaaaaagctactaggatattaccttggattaattcacaaagaaataacctaaacttccaaaattaggctgaaaaatcacaagccctagttggcttctatggagctcgagagagagaaagagagttgagagaaagagaagttattctctttaattttttctatttttgaataaaaaataaatctattttatttttttaatttatcttgactcatagtcagatttaataacttaaattaatccactaaagacaaaattccaattgggcaaaaagaccatttgcccttcacttaaccaaaaagtcactaaaccagtcaagggtattttggtcaattctaaaatctcgactactcccaacattcccaatgtctaactatattgtcccgctataacaaaaatacaaaaatgtgattcgaatagccaaacgtcgcgttctgatgttgccgaacacaaagtatgtagcaatataaaatttcatatctgacatatataatgcattctgaattcaaaataaatctccataaaatgataattcgtaactaatatgcaagtttcataattaaaccatatttattcactaatttccaaattatagttaagtagtctttacagctcgagtgatgttgaattgtaagaagcttacaaggcatctttgggctgaagcaatcaacacttcttgctatattaccaatagggtgttcttacgtccaagtactcacaagacaccatatgaaatctggataggtaagaaaccaaatgtaagtcatttttatgtatttggttttgtttgttatatcttgagagatcatgattacactgcaaaatttgattcaaaaagtgatgaagatgttttttaaggtattcctttgatggtagggcttatcatatgtataatatgagaacccaaacaataatggaatctgctaatgtcgttgttgatgatctaaaaagatttttccgagttttaaaccggagaacaaattgaagagttgctagaatagctttctgctgaggaaaatgaaatcgatagagccacagaagctgtagctgagactacattgcgggactctgtagctatagatgttgttctactagaatcttcatcaataaaataattagagcatccttcaaatgtgatcactgatccaatccagagggaaccatcctaaagatttaaaaagaaccatctgtttgatctcatccttggaaacttggacgaaagcatggtaacaagaagaaaaattgctaatacaattcaattcttttgctttgtttcttctttagagctaaaacctttgaaagaagccttaatggatgaagatttactcatagcaatgcaagataaactacatcacttcatttggaacaaggtgtggacaatgattccaagaccgccattgtgaatatcattggaacaaagtgtaaaaatagtgatgagtttggcactatcattcaaaataaggcaagattggttgcccaatgatacactcaagttgagggtattgattttgatgaaattttttatctggtagcaagactagaatccatcaagttacttctttccatagattgtattctttgctttaaattacatcaaaatgatgttaactttaccttcttgaatgattttttgaaagaagaagtgtatgtttaacaactcaaagggtttgaggatcctcattttcctaatcatgtttataggttagacaagactttgtatggatatgaacaagcacctcgtgcttagtatgagcatctaactgaattttcgcttctcatgactatagaggaaatgttgataaaacacttttcatcaaaacattaatactgatgttattgttgctcaaatatatgttgatgatattgtgtttggttctacttctaactctaaagtgtaggtttttgtttcttaaatgcaacaagaatttgagatgagcatggtaggtgaactcacctattttttgggtctccaagtgaaacaatccataagggtacctttgtctctcaaagtaaatatgcaaagaacttggtgaaaaggtttgggcttgaaaatgccaaacataccaatactcatatgagcacaactttgaaattatccaaagatgaacaaggagtaaaggttgaccccactttgcatcgaagtattgttggtagtttgctttatcttactactagtcgtcttgatattttctatagtgttggtgtttgtgcatgttattaggaaaatcccatagaatgtcatatttatgctgtgaaaataatcattcgctatgtaaatagtattgttgattttgggatttagttttctaaggaccctaattctaatctagtttgtttaagtgatgcttattgggcaggtaatgctgatgataggaaaagaactagttgcggttgtttctatcttcgaaacaatcttgtttcatgtcatagtaagaagcaaaactcaatctctctatctactatagaggctgagtacattgcaataggtagttgttgtacccaactgttatgttagaatcaaatgatggaagattatgggtttaatttgaaagctttaactattttctatgataatacttgtcctataatatttcaaaaaatcatgttccatattcttgcacttagcatattgacaaatgagatctctttattacagagctaaataaaattcttgtcttagaatatattgaaactagcaaacaaatagtagatatttttattaaagctctctactcggttcattttatctctctaaggaaatccttaaggatttggactatttaattttttgtgtttcatggtccttgaatttttgctttgactcaatgattataatgctttgtctttgtttttgttctaggagaaaatctcaaacttaagagaatattagtcattatttttattgctaatgcttttagtgtcatgatttcatatatgaatagttcaagaaaagttttacactcttcctaggaatatttgagttcttcaaatagtgttatgtaagctaccattttcgaaatgtaaaaaaggtgtaaaaactgtgtgttcaagctacattggaaaaattgagctacctatctcattgtgtgaaatctgtctttgagtaagttggcactatgtaattagaagttatgtacaggatacatcaccactgaaaagggctaccattg

SEQ ID NO: 244339 - DNA, 2045 bp, Cannabis indica
acaaaagacttttgccctcttttgttttctcttgacaattagtaccatgtgcccggcaaatgcccaaatacttcccattcccaatgtgaatttgtgttggcagaaagggctgccaaagcctcatcagtaaatgtgtttttcccagtgtcaaatagacaacgtcgactgaaagtgctaaatcatttaccagaaaaatataagaaacgctagggaaaaaacaatatatacaatattatagtaattacatttgctgacacgttattgtgccagcaaaagtgacagagttttgcgccaacaaagtttgacttatgatggcgcattaacacaccaactataatcatatttttgctggcacaataattacattaataataagttcaatgtttaacaagacataaaagcatcaacaaaaaccttcaggccaaaaaatggacaaccttttctgggattattagaaattagtatctcgggcgtcgaaaaaaggttactaagaaatatattttattaatttaaatttgatttaattttaaattataatcaataattcaaacaaataaaaatagtgaatataaaaatttaattttaaatactatataaatttaaatgatgttaattttaaattaaaagttatattaaaataaatataagtgtcacccaaccttgtcgctacgccatcgtcgtatttactttttttttttcttttgaagagagggatgcccttaaagagaaagaaaagagactaaactacaagggtcatcaccaatccaaatcgctacttcatctagccccaaagcccaattagctaaatgatgagatagagtgttagcagaacggctaatgttagtgatatgggggtcggggagaagagataaagctgtcttaatttcacgaatggtgtcaccaaagagtgaaagatcttctttggagcttgtcaaggcgtcagtaactgtcttgcaatccgtttccacctgatggataggaaaacactcttcaatgcaccaaagaagggatgtgaggagagcttttgcttcgagcgttgccacatcgcctcctcctaagtgagaagaatcgatagcagctacaacttgaccttcgctattacggatgactcctccaaaacctgcttttgcactattcttcgggattgcagcatcagtgttcagcttgaggtggccctgaggcgggggaacccagatggatgctggggggggacctggtcaccggagactgaagctgacgaacttgggaggaagacttgtactctgccagaaaactattggccagattgaaaattgcatgactttgatcctgcatttggttcttgatagctttgttcctgttatgccaaataagccaagtaacacagaggaaagaatctacctcctctttggttaagttagtatatatcatatatcatggaaagaagcagtaaaattaggtaaagagtaaatatagcgatagaagactatacctttccagacacttcgaacgctctaacagaagaacagggcatgagaaaccgtttcttcctgatgaccacaacgttcacaaagggggttaaggagatttttcctaaaggcaagattctttctggttgggagtgtatctgtggaggcgcgataggcaaaatgttgtaccttaggcggaatgtggagatgccacaagattttccatcagggggagggagaggatgatgaggggatatctgggggtgaggtagatgaaaagcttagatgatatactgatttgactgagtaagttccaaattttgtgagtttccaaattaggttatcatccatggggtgaataggaagggggatagaaagaatatcttgtacaatgtggggtgaataactgttatgaagactagggagatcccaagtcatattggtagagataaaagaagctactttatcagggaccggtcctataggggtgaccctattatgcccatgaatccaattgtcaagagtagtagaggtgttttgcccattgcctattcttgaaataaggcccttgtgtagcaactcttttccccaaaaaaa

SEQ ID NO: 244340 - DNA, 2170 bp, Cannabis indica
ttcaacaacaacatccatgtcctggacatgtaatgctttaactttccacagtttgaataataaaggcaatataagcagaataacaataaaaactattcagaaaatacaagtacaactagacaaccttaaggtcaattctaataaattattatttttgagacaattaccagtcatatatttcataggggaattatcaaagcttaagagtggtagagcaatggggagaatcgccactgcttaagaatatatatgaagagaaaaagaaccaacaaaacatgtcaaagattaaaaaaagaaaatttcattattgaatttttcattttttgaaaactaaatgtacatttgtatatttattatatttgtcttataaatttgtgatattttatcaagtgttattggttttttttttggcagaatgaattggatcggggatgtaatttcattatgtggatagaagcaagtgtacgaagaagtagaaatgatttgagcggcttgtttagaaggttggagaaaattgaggccaatgttaaacaattagagcttcagattcaaggaagagatgaagaaattgctagaataattaagctattgaaaaatgtcaaatttgctatatgtgtttgtgttgaaatattatctgttctattgtatatgttattaagtgtttaataaatatatctgcacaatttaacagttaaagtaacagtataaattagtaacaaagagtactgttctctagtcaattttttgtttggttgcttagaaagtttgattttatttttggaattttgggggaaaaagttcaattgggtttttatcagatttgtgaatagagttgttgtttttcagatgatggggtagtgtgattggagttcagtttgaatagttgtgtttttaagtaagtaaaaatgttttgtttttatttgtgtggataaatttttgggtcttttattagatttggcttttgtagaacaaagcaaatttaagcaccaagttagattatcttggagtgaagctttttggtgacccaaataacttattttttattataagagatcacagtaactcatgttttgttcctgaaattgataactcatagcaggatcctttgttattattgttctaactcctttattgttgagcaacttagatggtataatagaactatgataatgaaaattcaaggttcaataagagatcgcatcataattccttcaacattgtagtaaagctaagaattttgcatattaggaaaagggaaagcgactacttatagctcaaaaaaaatagtgttgcatgaattggcaatccatatgtagattcatatataaactgttgttgttgctacatatgtgaatttatacaaattcataaaaaaagatccaaattcatcaaaagagattcatatattaactcttactgttcgaacatatgtgaatttatacaaattcatcaaaagatatcaaaatatgcataagccctgctcatattcaaaatgatgcataaatattgagcatccactaggctttaactactatatcttagtgttaaatgtttgctagttatatgaatttgtacaaattcatcaaaagagattcaaaataatgcataatcctgtgtacaaaatgatgcataattcttgaggacccactttgctctatatgttcattcttaagtaccccattcatagctattctactctgcaaaaacattaaatataattaaaagcatcttaaattttgtacatatttataattggattaatttttaatatatggtacctatatctgttcatttctatcttgtacaattctctgttgggttgaagagctaactgaagcttgagatagaggattgttgtttctcccataagtaccaggatcctttggttgagttgtctttggctacacataatcataaaaacaaaagtcctttaactatcaagctgcctacacattagcttgaaacatgtaacatagaattgtgtgccctgacattgttgaggctagcaaaggcatgattgaatttcaagggtttcctgttatctctaagacaactctggttgccaattaaatatcaagaattgagaatcaaagtttatataagttgcttatcttgatcttagataaataagataagaggaccaacaagagaaattatttctaggatgttt

SEQ ID NO: 244341 - DNA, 1430 bp, Cannabis indica
attagcaaaagtaattaactaattaataataaaacattacataattaattacaaaaagaaaaacatacgtattacaatggcgggcagcaaaggagggattttgaaagagaataattataataagaataacacacaacaatcgtaaagccaaccataataatagcttcatcttcgatatcctatatatttcctgtcaatcttatatatataaatatcaaaccttgtttacttacattacacatatatataagaacttaagaagtaaagaaatcaagtcaattcatgaatctcgctcagtcaaccatattaattatattttgaaataaattaatattaatattataaattattttttatgattttggtagctgatttattaattttcaagttcacacgtacacacgtataaatatcctaattattaattggtagaagtgatttttagctgaacaatagtgagtgcatgcatgggagatagaccacttctttagtcaaattattaattattaatgtgattttatattgtatatatgaattaggtctgcctttatagtatacttagacaaatgatctttggccactcaggtaaacctatttttccccaaagaactatttatatacatatatataattatatgaaaaccgtttaaaatgtgcatgattcatatattggcaaaagcaaatagtgggagtggaactgatcataaatgaagtatataataaagtcattaatggtacgtactagcaaattatttaatttgtataagaaaaaagacaactatatgtggagatcacgcgtcggatataaaagatagatctatattatatatactactgaaaaaaaaaggtttgggcgactctttaaaatagtcgtcggatatagaagataaggtatctgcggtgcgagtggtgcggttttcgactatttttttcaaatcaacctgcacatgcggtttttttaattttccaaactgcacccgcactgcaaaaataagtgcaaaaaccgcactgcaaaaaatggtacggtgcggtacgttttctgcggttatcaagagttagttggtagttaggagagtttgttttagttagttatgctgtccttgttttcagctaactgttttctcttttctgcaactactttcagttgcctttcttgtatttgagcttgagctatataaagctcactcagttgtattttcggattcaatcaatacaaactaattcattgcttttccttttctctagttctttgttctactgctatgttttgtaatatggtatcagagccaccgatctagtgtggccccttttcttcttccttctttcgtttccggtttgttcatggctcgtggtggagctcatggtggaactcgcactcaaagcacaaataattaagaagatggagtcgataactccaacatattctctgt

SEQ ID NO: 244342 - DNA, 1772 bp, Cannabis indica
aagacgcgtgttgtacactgcactcatgtgttattcggtacaaagtttcatttatttattttgctttgtttggtagaatggttggtaacaaattcctagtaaataaataaataaagcctttcttattcaattttttcaaaaactttatataattataacaagcataagaaaagttcattttttattaatgctattaattaattgaggattattatttattattggacactaatggtaatctaatataatattagtaatatttttttaaaattatatgaaacctgatatatttaattacattaataataatataataccaataaaaatagtaaacactaataatcatctaattaattaaattcaagttttgagtaaaggagaacgttttagtatcttttgcttttccataaaggcacttaaatactttatgaaagacaatgatttaagatattgaaagaatgtccaaatattcatatttattccataaagttattattattagtattctgtaaattaatactatggataattataaccaaaaattaaaaaagagtgggtccttttctgatgaacttcttttctttgtttaaatttaaagaaacaaaaagaatataaataaaggcttattcttcttttcttaggtaggaaaaaagagttaccattcttcaagattcaacatattcatttttatattgatccaaaaaaaaaaaaacatattcatttttatatcatttaataatttgagtcaattctactaaataatttatgattgtttaaatgaaaatataattacaatggttagagcatttttaataaaatgccgaaagttatgtattgttatattttagtagatttaagaaatattactattctaatgatgttctaaaatatagactaaattaggcagatgctaaaaattgtatcaaattattaattgaataatctattttgttaaatgataaaatgagtattatatttttcaaaatagtaataataaaatcttgagctcaattttcgacaattttttcaatataactaacttgaagacaatttttaatacgaacatatacagaaaatgtaaccagttttgtcataatatatttaaatcagattattattaagttttattctgacaaaaaaatcagttcagagttttatttgtaccattttagaaaatacaggattcattttgttgtttaacaaacagagagtttaattgataacttttacaaaatacaagatctaaaatggcatttaccctataattaatttttttttttattttacatcttgtgtattgtagtacaattataaatagcaagctaaatataacacaaatttattaaatttaacataaattttaaatcttctatatattttctataacatgctatattaaattgttacctacccatatacttaaaataaattaatattttaattaacatattcaacaaaatctaattagtagttatagttgaatttaatttaaaagcaaaattaatcttaattaatattttataagaaaaataaaatatattaaaaaaatatatcaaattacaagttatttattaattttttatttaacttttaaattaattacaacacttcactaataatttactaattaaaattaatataacttttaggaaaattctataatgcactccattaaaagggatacactgatacatatctctctgttttagtattcgaaataattttttagtcaaattttttctcatggtcatgtaaattatagttatttaaga

SEQ ID NO: 244343 - DNA, 853 bp, Cannabis indica
ttcttttgttataagctgtaactgagttaggttaattttttttttatggttgctgtactattctatatttgttgtattttgtttattgttatttttcatatactagtttccattctttctaaaaagatttaatactatgaaataatgaactgaatcttgattttgcgtactcaattttgttgaacttccattatcacgtatagttgcccaaaaaagctggtattcagcatagacaagaatgcaggatgtaatacatgctcattaccataatactttgctgacaggacaaatttgaattttgtgcgacagctttttgtgatcagttgcattttgcatcaaatctttttgtgttttttaatcattatgcttaattcaattttacaaatgtagctaccatcttgctgagaagataattccttctattcatggacatacaatgggatttaaactggagcagttcatatttgatgcatttccatatgcgccttctactgcccctttttgaggtcattttttccccatctctatgccccagcattacctttcatattttcattgttgtacttttcatcaactaagggagattatttttttcttaaaaattgcttgttctaaaacaggtattacgcgaagaagagtttgcacctgttaaaaatatcaatgggtcaacttttgacactccggaaagtgctaaacttcttgttctccgccttcattctcgttgggtagttgctgctggtggattcttaacacattcagtgcctttatatgcaactggtgatgctcttttaattatttcagtttttattgttagtgaaatgatacaaagtttacatgcataactcaaattgga

SEQ ID NO: 244344 - DNA, 1881 bp, Cannabis indica
ggatttaacccgcatatatcaagatatatgcgagtatccccacgatccttctgcgaaaacatagagatcgattctctatgttgtgagctggtcgtgatgacccaacgcctcgataaaccgatatagactcgcatgtcctggttctatcagctcgttatatgatgtccgtaaaagcgactttataaggaaagaagacatccagaactcaactagtctcgaatgcatcttaagcctgcgagtttatgcaagaatatgaacaaccaactcgcactagagaagtcacatacgttgctgtatttagtgaattaaactggaaaaagttcttcatttattatgtttacgttttttagcttaattattgtaaatcaatgtataaactgattgataatgaatgcaatccttgtgtaaatgataggacacttgctttataaataaaggtgtgatccgccgtgaaataaaaagagacagaatatttgcaacagtagacttagcagaccgagatctgactgaaccgctatattcctcttatgttcaccatttttcaagtcttttgtgaagtatttttgttcatgatttgaatactcaccattctgggtcgagtactcgcacttattatatatttattattattattattatctatttttggtgttgtaaaaattccttcaacaacatttggcgtcgtctgtgggaacgataatacttaagtgatttagaaggaaaatcacaatggttggaaatcaaacaaatggaggtcttaacagcaaatcaatcaaaattggaatgataaatgtcccacgacaaggaaataggatacctccagtggatactatcaacggtggtgtaggatggatgaacgtaacacctctcaacttattttccgaaactgttgctcctcacgttggtgaaacatccacaccagtagctacgacaggttatttttggcctattacgcctgtagtagtgtccgagggcatcattcaactaaccaatgatcagtacacagtaatataggatcaaatacgtgctttacaggccaagatttatggacggaataggacctgacgtcctcctcgagtgcccaatactcactcaaataatgcccaggtaacaaactctagacgtcgaaataaccgtactcgcagtgaacgaaggacggatcaggaagggcttgatttaaatcacccaatgtcaaggggtcaatctgcaagggacttcaaccgtgaagtgcaaacggaagaagatctagagcgacgtaatcctcgcagacgcacatcgcaaaacgaagaaaatgacattgagtctgactcctcatctttgcaaagtcgtactcctagaaggtacactaggtcaggttcggtggtaacaccgcgaggagggcggtatcaagttgataaaggtgatctttgtgatcaccttaacgccatttttagggtgcgttttaaggagccccaaaacgatgaagagcctcgtgatcctcagttgggtgatcagggcataaataattgcactgacctgcctaacacaccaggtgcaactataggagttaatattccagcaaatattgctgtagtaataatggcaccagtgacgactcaaggcaacactaccctagcaggaggtatcgatcagtgtatgcttttccaagctttgaagatgatcgagcagcagagaaagcccatatacaagctgcattggacttctcatttcactacggaagtgccacaagctcgattacctaaaagatttcgtttatcaaagtctctgaagtataaaggtgccactaatcctatagattatttagaaaaatttaatactattatggaagtggaccaggtaccccagcttgcgaagtgttgcattcttgcggcaaccctagag

SEQ ID NO: 244345 - DNA, 1327 bp, Cannabis indica
aattgaaatttgaaataaaataccaaaataatattataatagattaatgatattatatttatatagctggcataacttttgtttagttattaaataaattactttatataaataaatattaatataaggtaagttcaaattagtttataattataaaatgtatagtaagaattaaaattttgaaattatttattaaaatataattaccatatatataatttgtatataaaaatgagaatatgtttctcatgaaaatgtataatttttcataaataaattcattttacactaatataataaaatttttaggaagaattattccatacattatctttttccaaatttatgttttaggttgatatagtgattattccggtagttgttacggtggtttatatgagagttgttatgtgaatttaggttgctctgttggttgttatatgaattgctatatggattgttatgtgaatttccgtaaaaatactaaaataaaataaaataaaattactttgaaacgtaaaaatgaaaaaaaaataaataaataaataaaatttataatgtatatattgttgtaaattttccaaattattatctttaagaatttaattgaccattttaaaaattttattattttcgtgcaagtttgttgtaacttctaataaaattaagtattttttttttttttttttgcaaaaaatggagacttttttctatataagtatttataccgtaggtccttgtgttatataaattttgacaaattcttcaatttttttaacaaattgatccttacttttagtttctttgcaatactaagtctccactattaaatacttatatagaaaaaagtctccattttttgagaagactccactattaaataatggtagttgtgttgatttttattatatattttttcattctttattttatttactttgtcattttaattttttttaataatttttttaaaaaaaaaataacagatataaaaataaaacaaaataaaaaaaaaattgacataaactaaaaaaatatacacataaaaaagtattttttttttacaaacttgactaagtaaatacatttctgtaatatttgatttttctttttgaaattgagggagtagaaattcaaatttagacattctttgtgagagttgtgaaactattatgaccactctctttagttaagatttgtctttaacttatacgcactttagtacatgtaatttgttttaagaaaattctgtattcaatccaatctaattgaatcgaactgatctaatacaatctaattcaaaaaaaatagatatctaattataatt

SEQ ID NO: 244346 - DNA, 1391 bp, Cannabis indica
ataataaatccaaactttcagcataatattttctcctttctctatcgtgtgtcaaagagtatccaaaacaccaccccaaaccaagaaaaaaataggccaattaaattcctggccatcacccaaaatgtggttccaaataacaaccaaaacaccacccgaaatcaagaaaaaaacttgccagacaaaactgttataataacctcaaaccaagtctaaaactccatccattacaccaccccaaaccagaaaaaacaaaggccagccagatctcaacaaatcaccccaaaacagataccaaacaacatccaaaaccatgaaaggagagggttgttccaaaacaccacaaaccagatcccaaacactttctaaaacacctcaaaatagtcacatagtagcccaaacaccaccttgcaccagatccaaaagtgtatctcgaacaccactccagaccaggaaaagagtaagagaaacaccatctaaaacaccaccccaaaccaggaggaaaaaaaccaatcagtagaagatccaaattttgtgaaagaggaatatgctccaaaaacccaagatccagaattagttgaagaaggaacaactgaccctagccaatggtgggggacagccaatgatttatgcagtcaagcttaccaagatgatgatggtggtggtgggtatgaagagggtgatgatttggtcagcttggttagtgatgaaaaagatggacccgtgcttaaaaagaaacacattgaatttagtccacacttcagcctaaagatatcaagtttaaattatgaatggaattccctactgttgggcacttgagagaagcattaaagggcatttcatcagcattgataggcagtacaaatatattaacaatgataggttgagaattagagttgtatgcaaaggagaaggttgtaaatggttaatgtatgcttgaaggatgagagatgattgcactacaatgcgaatcaacaaatttgaggaagaacacagctatggaatttaatgggagaacaggctggtagatgttgattggattgcagaagagttcttggagaagttcagagcaaatctagccatgtcatttggtgattttaagaaagaaaatcctaagggtaagtactctaaactctcttcctggactttttgtcgagctaagaacaaagctatggccaagatacatgggactgttaaagattaatatgatattctgcatgattattgtacacaattagtaaaacttaatcctagtagcacaactttcatcagaacaatttagtgaatgatataaggtttttcaaaagagtttatatatgccttgcagcatgtaaatctggtttcaagttctgcatgcctatcattaggctagatgggtgctttttgaaaga

SEQ ID NO: 244347 - DNA, 1293 bp, Cannabis indica
caaaggacaatctcttatttttaaataagaaagggaagaaggcagcccctcttcgggcaagcaccgcagccttggacagtttttaatatacaatttctgaagggaggtaagttgttgaaaggccttgttgtttagagtttcaagcttactacaatcccaaatgttgactttagttagagtggtcggaaggcctgcctcgtatggaaaactaacagcttcccacccactgatatgtaaggattccaaagaggagagtctatgcagatcccattgcttatggttctcaaacagccttttggaattgtgtaactcaatcttctttagtttggagtgtagtgatccccaccctagaagcgattccaacaccagacaatcctctatatgtatctccacaagagagggagctgtgcctgtgcctgtgtgctgagtagttcttgggaccaaacccaccattccttcacacttccagatatgcagtttttctaaggatggtagataacaacccggtaacccaacatcaagctttggacaattactaagttctagccatttgagaagagggaatagtatttgaccttgttgcatagcttcttcactactgaatgaccaatctttccactccatcatatctgcaatcgttagtgactctagacaactgaataaaggaagagcggccttgtaattgtcatcacctattgagatcacactatcacatcctctaatattaagttgtttgagaaatggtagctgcccaagtgggggtaaaacacaacaattcttacaattgataaagctgactgatactaacttagcaaatgcagaatctccaatccactctgagaatgatgaacctctataacctacaattctaagatgctccaaatttgtatgtggtctaagcgcatcaagtatatccttttctttctctttttccttttgtgaattagcagctacatagccgtcattatcatcatcatcccacttcaaagtcagttccgaaagatacttcttatccttcagattagcctccgaagcttctattccatccttgatattttccagcccagaaatgcagcgtaagttctcaagctctcctacttttttcattttaaatcctccactgctatttctatcactactcaaaaccacattggataagaaagacaagtgtttcatagtactaagttgttggggaaactctgaatcttttagtggtacaccatcaatatctagatatcgcaagttgattaaccttcccatcttctttggtaattcacgaatcttccaacactc

SEQ ID NO: 244348 - DNA, 2182 bp, Cannabis indica
gctgacaaacataatcttcctttccctttacttcatatcccttaggctgcttcattagtatattctcctccaaatcaccatgtagaaaagctgtcttcacatctagctgttccaattccagatcattgattgcaacaatactcaacaacaatcttattgatgtatgtttcaccacaggagagaagatctcattgtagtctatcccttctctttgtgaaaaaccctttgcaaccaatctagccttgaatctagccttttctactccaggaatctcatccttgtgcctatatacccacttgcagcctataaccctttgacctttaggtcttctaatcaaataccaggtcttgttcttggttagtgaagtcatttcaccatccatagcattattccactcaatcttatcatcagattgcattgcttcctcataggtagctggttcttcattccccattgcatcaatactaagagcataattaatcacatcagcaaaaccaaacctgtcagggggtctagtagctcttctttttctatctcttgtcaattgataatcttgagtgtcttcatctgcatctggttcaccctcagactcaactatttcatccttttcttctacttctttctctggttctgtagttctgtccacaacatgctctcttctgttggactccacctcaaactgtataggactattagaattcttctctggtatgtcattcctttggatatttgcaagatctttgtacatggtcttctcatcaaagatcacatctctactcacaaagttctgttggtgattgccttcttcaatgctccatactttgtaccccttaacaccttctggataacccagaaaaatgcattttcttgcccttggatctaactttccttccttgacatgggcatacacaaggcaaccaaatatccttaggtgatcataccttgcaggcttgcctttccacacctcaataggtgttttgaattcgattgcagatgaaggacatctgttaatcaaatagcaggctgtaacagctgcttctgcccagaatgactttggcaaaccagcatgaataagcatgcatctaactctttcaagtatagttctgttcattctctcagcaagtccattttgctgagggtttctaggtactgttagatgcttgccaattccaacttgcttgcaatattctttaaactcatctgcacaaaactcaagcccattatctgtcctcaacttctttaccttctttccagtttgagtttccaacatagttctcagctctttgaatttacttagtgactcatttttatttttcaatatgaaaatccaaacaaaccttgaaaaatcatcaatgaaaatcaagaaatacctggcccctcctctggattttgttcttgatggcccccacaaatctgagtgtagatagtcaacaattcctttggttgtgtgtctcccagtgccaaacttgacttttgtagctttcccaagaatgcattgttcacacagctccataggttgtatctggtccttgccaaatactccaagtttactcagaattttcaagccaccatagcttatatgacccagtctcctgtgccatattagagttggttcctcactcctttgagtcactgtatttgcctaatttttgaatgtatttccatgtaagacatagataccattcatcacagtagccttcatgactaccatagatccctttgtcaccttcaatgagccactttcaacctttactaagtaaccatcatgatcaagcatggccatcgagatcagatttctttttatttctgggacatgtctcacatgttcaagaactgtaactccaccaccagtcatttgaagcttcacagatccaattccaacaattggagatgagtggttatcacctaatttcacagaaccactgttgatagtcttgtaattaatgaattgcttcttctcaggacagatatggaaagagcatccataatctatgatccaaccagtatctgtcttgtctttagagattaccaacacacttgcactatcataaccatcactgtcatctccatcagaaaccacgtctgcacttccattcttcttagagttgtaatctttcagaattgggcaatctttcttcaagtgacttgtcttgttacacagaaaacatcttctcttgaactt

SEQ ID NO: 244349 - DNA, 2882 bp, Cannabis indica
gttcgaggaagaattgatcaaagagagaaccagtacaaccaaaatcaaaagaaagggaaacagaaaggaaagtataaaaggaaatattacatttgtcacaagactactcattttaagagagattgtcctaaactcaagaacctgaatatgaatcaaagaaataaccatcaccagaaacatggaagtgctaatgtagttggtgtttgggatgacagtgatggatacgaaagcgcaggggtaatggttgtcacaaatgaagattctggaggggattggatcattgattctggctaatcatttcatgtttgtccagacagaagtcagttatttaactacagaaaaatcgatgggggaacagtgagattgggtgataacagatcatgtgctatagtaggaattggatcagtaaaagttcagtcttcaagtggaatcaaaaatgagttgttacaagttagacatgtaccagaaataaagaagaacctcatttcaaggtggaaaatggtgttcttaatgttcaaagtggtgaaaagatcattatgacatgtgctataatgaatggtgtctacattttaaaaggtaactcttcctcaaatctgatttctgttgcttctagagaaatgcaaaattcctttactctttggcataaaagacttggtcatgtaagtaaaaagggattagaagttctaagcaatagaggtttacctggaaagaatgtaatcaaggacttagatttttgtgaacaatgtgtttatggtaaatctactaagattaagtttggaactggtttacataaaacaaaatctaccctagactacattcactcagatttgtggggaccctcaaaaataatttctagaggaggagctagatattttttgacttttattgatgatcattctaggtatgtttgggatcatatactcaaaaataagaatgatgctttcaatactttcaaagaatggagaactttacttgaaacatggaagaaagattaagaaacttataattgacaatggtttagagttttgtgcagatggttttactaatttttgcagaaagaatggaatagcaaggcataaaactgtccctagaaaccctcaacagaatggtcttgctgagagaatgaacatgactattctggagagagttagatgcttgctaattcaattagggttaccaaaagatttctgggcagaagcaatcatgacagcttgccacttgatcaacaggttcccatcatctgcaataaatttcaaaacaccaattcaggtgtgggcaggacatactacagactacaacaggttgaaaacctttggatgcatagcatatgctcacatcagacttgacaaattggaacagagggctagaaaatgtgttttcttgggctatccagagggtgttaagggatataagatgtggagcattgaaccaggtaatcatcaaagatactttgtcagtagggatgttgtgtttgatgaaagttctgtctacaaggatacactgaaatctgcaacaaagtctgggaatgaggagtgttcagagagatccaggtttgaggtggaacttggttcaagttctaaacaacaagatcattagtctgagatagaagatgatgatgaatcgagtacacaattagatgaacatgttgaagaaattgaaaccgatgctgacacagagttgcagcattaccagttggctagggatagagccaaaagaatgtcaaaggctcctactagatttggttatgcatgcattgttcatttttccttaaatgttgcagaaatgggtgacaatgaaccaaagtcttataaggaggccatgaattgtacaaatagtaagaaatagggaactagtatggataatgagatggactcattagtgaagaacagaacctggattttagtaagaagaccaaaagacagaagaattatcagctgcaagtgggtttacaggcacaaagacatgattccagggtgtgattcagccaggtttaaggctagactggtagcaagaagatttacacaaagagagggtatagattatactgagatattctcaccattggtaaagcacacctcaattcaaatgttattagctttgacagctttggatgacttagaattggagaaaatggatgtaaaaacaacctttttgcatggggaattagatgaggaaatccacatgaagcagcctgaaggttatgaagaaaaggggaaggaagactatgtctgcttactcaagaaatcactatatggtcttaagcagtctcctagacaatggtacaagagatttgatgaatatatcaccaaatctggatttaagaaaagtgtctatgactgctgtgtttatgtcaagagtgcaggtgttaaatctgtggtgtatcttttgctatacgtggatgatatgttaatagcaagtagtgcagtgaagagattaagaaggtaaaaaggttggtaaactctgagtttgagatgaaagatcttggcccagccaagaaaattcttgggattgaaatactaagagatagaaataataaaagtctaattctatctcaaagtgactatatctcaaaagtgttgcatcgatttgggttctctgatgctaaacctgtcagtgcacccttggcacaacacttcaaactttcacaaactcagtcacctaccacagatgaggagcagaaacagatggaatcaattccatacactaatctagtgggaagtctaatgtacattatggtatgtactaggcctgacctttgtcacagcttaagtgtgatcagtaggttcatgggaaatccaggtcttgagcactggaatgcagttaaatgggttatgagatatctcaggggaacatcaagcatgggactcaagtacaaatcagag

SEQ ID NO: 244350 - DNA, 915 bp, Cannabis indica
gaaagacatttttgctccctgaatttgcagtgtgtcgaggctgctgttgctgtctgaaatttctataggccatgttagcttcagttagagcattgatgtctgaatcttggacagccatgtgagcactcaagtcaatttcagtgtctttcttcttgattctagactcagacgaaaggagtaatgcttcaatctcggcaaccgagtaaccttcaattctcgagtttgaggagatgacaaaagtatcgtacttactaggcagacctttgaatatagtagcaatgtgatctcgtgcactgagtttctcacctaccaaagcaagaagatcaaccatttgcttgactttaagaagatactcgttcaatgacatcctccctttcttaatctgttgcaacttggttttgaattcaagaatcttggaagaaacttgaagagcaaaatgtttctccagagtatcccaaatttgttgagccgtattgcatccaaccattctggttagaagactttcagtcatagaggagaggagccaagaaacaagaagttgatcttgaacctcctagtcattgtaaaccggactcgtatttccaagggcacgatcttcatcattgagatactgagctgaaggatgattgaagatgaatcttttcaacatgttacctttgattgcagcaaggacttgctgttcccacaacaagaaattgtgatcattaaggcgtattgagaggctgtgaatgaactagacaggtgtgggattctcgtttgttgctctgtttcttggtagattagcagctctattattctgtgtagtttgagctccgattgtagccatgtttttcgtcaatggagaaaagtcccactctgacaccatattaagtctattcgacattgtatagaagacaagaacagagagaaggaaag

SEQ ID NO: 244351 - DNA, 713 bp, Cannabis indica
ccaaagtaaaaaactttctttggggcgaactacttccgattgtttactaacgtgttttcagcttgtgacaaagcatgtgaaacttttttcaaaatgacttatttataattctcaagcttacatgcccgtttgcacactcatgttggatcgcgttgggttcaggtattgaatcgacatcattgtcaacatttgaaagttggttggataagctatttactactctttatgaagagcaagttttttgtgctgccatgttatgttggatattatgaaaggcccaaaatgtcactgtttggaagaagaaaaaattcctcaaaaaatgaggttctcacatcgacttttgtaattcttgatcatttgcgtaaggttcaagataacacatgtttattatttatgttttttgaatataaaggaaatggtgctaagctttgggctaaactagaaattaactacattaagattagtggtcgatgccgccttatttgcacaggaaagctataattttgggaatgtagctcgtgatagttctggcaatcttataaaagctaaaaaggtatttatgatgctgaggttattgaagctataggtattaaagaggctcttggtttggtaaaaagcaagcaatggcaaaatgtagagattgagactgataacatgatatcagcttaagacattcataataaacaactgatgacttctattttcaatttgaa

SEQ ID NO: 244352 - DNA, 685 bp, Cannabis indica
aaacctcggtcaacaattataaatagtctaattagaacaattttttatcctaggaaaataatatgtacatgtttatattagtcattatatcaaatgtacaaaatattgtactaaatacactaaaagataatttaatgcaccgaaaatatattctaaacagtttatttcacgtatgcttttttattttatacacgtgtgaaatagaccatttgaatttttctatattatgaatattattctaaattattcaaaactttgcaagctttattaaataattacaatgtacactaacatataaaaaatttagactaaaaataatgactttagtcaacgacgaggagtcaaatgaaacgataattgcaagcgtttaaatatgaaaaataatcagaattatcaacgacacacaaggattatagctagagattctaccccaaaatcgataatgaactactctcttttttgttgtatctttaagaaatagcaagatcatatgaacctggtcaagtgagtttcttactatttttttaaaaataatttatagtaagtaataagaattttattgctcactaaaacaccaaatacaactacaaccaagtacaactaactagtcatacttaagctatccaacaaatactatcgtttatactagttttctctttataaaaataagaaaacctcaaataaa

SEQ ID NO: 244353 - DNA, 1623 bp, Cannabis indica
tggttgaaatgaatagggatcatgctggtggaaatgaaaagctaaggcaattagtccctgggattaaggtgtatggcggttctaaggacaatgtgaagggctgcactgatattgtagacaatggtgataagatttcacttggagctgatattagtatattggcgcttcacactccttggtattgtttttagcatatatattgtgattttgtctcttagtatgaatatagattttcattgttgtagttatgatgggaaatagattgtagaaattccaattattatttttttcccataacaagttcctaagttaaactgttctccacaaaacattagagttgaaggtttgtgagatttttcagcttgcatgtttacttgtgatacttctttggactgaaatttttaatttgcacattaatttttctactgtttggtattatatgtagaattttcttcggaattcctgcattctgtactcttaactaaattctcttccttatctaatttcttcagccacaccaatggtcatattagttattatgtaactggcaaagagggagaggatccagctgtttttactggagatactcttgtaagtaaattggaatattgtattttattccttttactcctctagtttccgaaatcaaattgtcatgggatagtggcagcaaatcaaataacattgtcactacctttgtcttgtcaaaaatatatgtatgactttgcattacagttcctcactaatatgggtgcagaggaattgaaaataattacaagcaccggatgggatgcttgtatttagattggcattgggaggtaaatatgaaataaaaagaataaacagcttcgggatgggtacttctcatatattgggtttataagatccacttactgaaaattgattctgcaacaaactagtatgaaactataaacaattgcttaaagcttggacgatcaaacccttattccctatactcaaaactttttcggctactgattattctgattccagaataattttttctctcttgatgggttattatgaatgacgtaggcatgcaaggatttgtaaatcagtgttttttttagtcaaattatgttgcgtgacatattattcttctacatgcagtttgtagctggctgcgggaaattttttgaagggtacagcagagcagatgcatcagtccctatgtgtgacattagcttcattgcctaagccaactcgagtttactgtggtcatgaggtagctaatgtgatctttcttattctaaacttgtacctgtggacaacaagttgggtatatgttagaatgtggaagtgtggttagaaagtaggatagggtgaagtgtatgataagatgtatgaaatttcgttttaatatcagtaggcaatgagtggattatttagatttggatcagttacctgttacagaattgtttttttgttttttcactctagtattatggtagaatgtggaagtgtgggtagaaagtaggatgggatgaagtgatggtgagatcgatggagaattatctcaaaaactaattggtgatggagtggtatcccatttatcttatatatggttttttgacatctgatatatatttatggtatttttcc

SEQ ID NO: 244354 - DNA, 613 bp, Cannabis indica
aaaaaagtgcctctaaaagcttggtttgtagtagtgtgtctttaaatagtatatagctatattattcatgaagctcatataattgatatggaatgggtaggacaccagttttctggggagagaggtcatggtacatctaagtggatagaaattcgtattgatagagtgtttactacacactcctggctacaacttttttctttggctaaactttacaatttggagggctctcctttggatcacagccctttattttgggagccaacaaaagctatttttccactaggtcaaaggcagttcatattcaaaaatgtctagcttacaaaacctttatgttttcaactgataaaagactgctgagaggaagattcaatgctggatatttaatttaaaatccatgtgtacggtgagatattgggaagttggggaaaagaaattacaggaaactttgggagttgcattaagaaatgcaagacaaaagtgaagtgcttaaggaataagagagataacacttcagtggcaagatttcaggaggtgaagaagttattgttttcaatttttgatcaacgagaaatcttttggaggcagcgtttgaagcaactttggcttaatg

SEQ ID NO: 244355 - DNA, 1274 bp, Cannabis indica
aaaaaaaaaaacaatgaaaaacgatgttaaaagtaaaaaacgacaatgatgtggataaaacgacattaataataaactgacaagaatttgaaaaacaacattaataaaagaagaacgacgaaatttttgaaagcgaacgacataaatatttaagacgcacgacgtaaattttgaaaatgacatcattacgtagaaaacgatactaattgatagaaacgacaagaatttggaaaacgacattaatacgtgaaaacgacaataatttgaaaaacgacaaaaaaactggaaaaactacgaaagtttgcaaaaaggaacaccaatacatatcattaaaccagatttttaaaccaattattggtagatattaaaaaaaataatcaaacaatatatctagaccaacctaacattttgagatcttattcttactgtttttttatcttgtttattatacaaaataatttttgcctaatctgtattagatgagcttcgtaaatatattattaataggtattaccgtaaatttctatctttttgtagtgatatagttttgataaggtttataatattttaaactatgtgttttgtaaaaattaatgattgaactttctgttttgttaaatgataaattaaactctatactttttaaaatagtactaaataatactatgattgattttatgtcaaaataaaacttaataatatcttgatctggaggtgttgtgataaaactagttacgtttacgatatcttttcgtgttaggaattatttttaaattaattatattaaaaaaatagttaaaagttgaggttcataatcttatatatttattctattttaaaaaatacatggtttattttgatttgatctctgttttttctaagagattttatttgtgtattgatttaggctctctatttgatgtatttttagtttactgtccaattttctaaggcgtcccttattcatgcaaatcattcggctaatatggctatgcataaattaactgtgcatgcacttagagtgaatggtgatctaatttagatggaggatcttcgatctcttttttatgatgtactcaatgctattttttttctcaatgaagtttattaactcttttaataattatgataaacattttcatattcgaaatctctcataatttttattattcatttttcttttcgatcctactaaacaaatatattctttatcgctattttgtacacttatgtgtagttctttaatattgaattaacttgttttttttaaaaaa

SEQ ID NO: 244356 - DNA, 999 bp, Cannabis indica
tggatctaaaacaacttcctccagttcttcaattaactttaactggtttttctcgtcttggattctaaggtgtagatcctcttctttcttctcgccttcttctgttatgaccgccattaattgatggtttgatcttctattttgaagctctacatgatagcattcgcaagccagcagttgatcacctcgcactacacctactcctactggtgtttggaattttaaagataggtgtttgattgaactgactgcccctagtccaatcaatgcaaggcaacccatcaatatgttataaactgatggtagatcaagaactaagaaatcttgcattaatgttgtggataatggtggctcgcctatagttaattggagtccaatgatgccttggctggagacactatctctggtaaatccgcataagctcaccatgcaaggttttaactttgcattttgtagtcccattttctttagcgtatccctgtaaaggatgtttaccgagcttctattatccaccaacactctttttatcttcttattggcgagttgctttgtaatgacaagaggatcgacgtgtgggtaccttacgtgctttttatcttcctctgagaatacaattggaggttcttctgtcttggctttctttagtggttatggagtaaacaccgatttctcattcttgattttattgacatatctcttctggacattactacactctccagcgagatgcgaccctcccaagataaccaatatatcctcaccctcaatagggagaggttgcattctttggttatctgggttgttgggctgaacatgtcagttttattcattcccttgacgatttaaatattgtccgaaatacccaagagagatcaggctctctatctcgtcctttagttgccgacactcttcagttatatgccctatgtctttatgaaattcacaaaaccttgttaggtctcgtttgtgtcttgcatgtctcattggctcaggcttgag

SEQ ID NO: 244357 - DNA, 1536 bp, Cannabis indica
acagcaccagcagcccccaaaaggtggcctatcatggatttggtagagttcactctcagctgcaaaagaatggtgtcgaaacagtcaccaaaaccgaaatctggtggtcttaaactagaagaaagtatgtacatttacgattcaaacatacatttggattctttccaaaacatctgtttatagctctgatttcttccatatcactggttggtgatgatatagcatgtgcatttatgtagtttacatcttctggggctaccccagattgagctaaagcgttctccatgcaaagagatatttctctccctgattctacaaaagaagagtaatgtattgttagatgcctcatacgaataaaagccagttactcagagaccagattagacaatgccaagaagagtctaagttgttggttagttaccatcataacaaagagcgtcacaagtgaggcttccccctaaaaactctgcgtaaatagttgctcctctcctcttaagtaataaaaagaaataagagaaaaaaaaaataagagaagttttaagcttaaaaaacttgaccaatggctactgtgcatagatataagattaggatcaggactaccttagcatgttccaattcttccaataacaaaactccagcaccttctcccatcacaaatccatctctagtctacaaaaattagcagttttaagaacaagattaaacaactaagaaaaccagaagactaaggagtaaaagttttgaaaggaagactagaatggaataatacagtatcccatggtcgcgaagctttagttggttcatcattttgacgcgagagtaatttgcatgctataaaacctccaatagctgcagagattaaaatctcaaacttagtttgatatgatcataaattcaaaactttatctcaaaattcaaatacacaagaatgaaagcactggctgtattacatatgggaacaatcgctgattctgatccaccacaaagcatcatgtcctacaaaatttgccaaaactagattagagactccacatgggttcatacaatgctgaaaatgaaaatgtcaaaacattctgctaaggcacaaaacagcatagaatctcaatccaactgagagtaataaggtgagaacttactgcatcaccactggtaatatgatgtgctgcattcagtatacaagaattgctagttgcacaagctgctgatattgagtagtttggtcctgtccagccctgaaattagtggcaaccttaataacaatgtgtacaagttttgtgttttgtatgccatgagacttaaactaagttgatttttttttaccaagtctatagctagtatagcagggcccatgttggttcctgtaaaaggaacagtaaagggatttatctttctgtaagaagatcttaatgcttcatttgcttcagtaaaaacctaacaaaacaaagaaaaacaataacaaaaacaacaacaacaaaagtaagttaatagttctgaaagataaatgtaatttggaaaatgttatattgaatttgcatt

SEQ ID NO: 244358 - DNA, 2215 bp, Cannabis indica
tagacgagataatgctaactttaaagacccgaaacataggctaaatgtaacctaacagacctgtaggaaccagaattctagttggtctccaggaaacctcgtagaaccggaattctggttgggaaccggtctaccggttggggcaattttgggaaccctagttttttccatttttgcgatgtttagggtatttccatgctattcatcgatagggaaattttttgtttcaagtttaagtccccaaaaagtgatttagcgtgtcacttaactatgttatgactgatgtgatttaggagcctgtaattcgccgagcagttgttccactcaggttggccgacacatctgaattcagaatcaaggtaagattagtataatattatgcatatgtatatacatgtttagtgtacatagagatgcacccgagatgccaatagatataggctaggctatcagatagtatgaattaactgctaccacatcagtgcgattagagtactgagtataggttggctagcggttaatcatactttgtcaatattgatcctgattcagttacggttatgattagggtgtatgggcgcctgattataacctgggatattagtatgtttttatgttatgcttttcttactgagtctctcgactcatagtgctattgctatgtgtaggtaagggcaaagctaaagttgaggagacgtgagagcgagcagatgaagattgtacatgttggggtggctaggcctggagcgtacgatccttgggacatcagggccttttgttgtttagtcgttgggcgacaaatattttgtaaagaaagagtaaacttttataactgtattttgtaaatgggttcccagaattttataaatgtaatatattaattttcaaataattaagcaaaatttttattaatcacgatttccaataatctcgttgattagcaacgagctgcacaatatgttaaaaatcacactaacacgcctataatagttagggtgttacataacccctgatttcacatttataaaatattcacatggcatttaaattttagataatcacatagagattgaaatgagctttccaacgatatatagaactcctaaatcagagtttggatcacaaagttatgaattttcaaagtgcacacatgaatctgcccagaaactcgagagcgggccgcgacatgcaaaagccatgtcgcgacacctgggaccaactcccaggtccagaaaggaggtgtgctgcggcatgctaaataccatgccacggcatctgggttcaaaacccagaatccaacaaccatttccacgaatttcagctccaaaacacaatcaaatcaccccaaaaaccaaccaaaacctaaagccaagcaatagattttctaacaatcatacagggagtttaaaatacattttcatgcattaaaattcaacaataaatcccatatctcagatttcacaaataatccaaaatcatgctttaacccaacaaaactcaagctcaagaacttgagcttcaactcaacctaactcaaataatttctagcagcatatcaccaattaatacataaattttgacctagaaaatacacaacaatctcatccaagaacacaacaatatattccacaactaaatcaagaaattatattaaaactttatcaaaatcaacacttactcctctagcatggaaatcaagagtaaacaatccaaaacatgctttttccatattaaactcaataagaattttcaattaaactcagtaaagaaactacctcaattccaagcttaaagacccacaatctcaaagcttcaattcaagccaatttctcaagcaactccttcaaaaatcaaaattgaaaaagaaaagggtttgagagagagaggggtcgagcaagagagaaacacaaccagaatttccttttcttttatccaaaaattcaatcttttatcatatataatttaaaggtcaaaagaccaaattgcccctagggccaaataaagcctaagcataaaccaagggcaaaaatgtcctttcacacccatttaaactcaaataaatttttcagattgtacatcaataaatacaatgccaataattcaattccaattgcattttgggcccaaacctagttcagcccgaaataccagttgtgattataccgcgccaacctgtcagaacacacctgaaaaagacaacacatgcatactatat

SEQ ID NO: 244359 - DNA, 3074 bp, Cannabis indica
tttcatgctagcattaaatcaagaaggatccaaaatagaatactttctattatggattctcagggaaaccgaattgaagatccagatagcataacacaagaatttctaagctactttcagcaactccttggcactaaaatgatcaacaggaagcaagtcatttctaatgtgcttagagatggaccacgggtaacaagtaagcacagagagatcttattacaatcagtatctgatgaagagatcaagcaagccatttttgatattccaggagctaaagcacccgggccagatggatattctagctacttctttcaggacaactggaatttagttggaggggatgtttgcaaggctgtcaagtcttttctccacactggaaagctcttaaaataaatcaattgcacaaccctcacacttataccaaaagttagatgtcctaacacaccaggagactttagactgattgcaagctgcaatgtgatctataaagctgcaacaaagatcatgcgctcgagactaaaacacatacttcctgatattgtgtctcagaatcaaggggatttcgtaaaagggagattcatagcgcacaacatcatgatctgccaagatcttgttaggcattatgaaaggaaatcgaagaagcctaattgcatgatcaaacttgacttgcaaaaagcttatgataccatagaatgggactttcttgaagaggttctcaagggttttctcttccctgaagaatttatcactcttgtgatgaactgtgttagaacaccaaagttctctctcttttttcaacggatctcttcatggattctttgattctaagagaggattacgtcaaggagacccattatcaccccttctgtttgtcattggtatggagtatctgacaagaattctaaagaaagttggcaacaaggagggatttgcttatcatgaaagatgtgaggagctcagaattaatcatttgagctttgctgatgacgtactacttttctgcagaggagactacagaagcattgtccttatgctacaaggattgaaacttttctcatctacttcaggactacaaccaaacagagccaagtctgcaattttctgcagtaatatggaagaatatgaggttacccgagtgctagaagtgtctagtttttcaaggcaaaacactcccttcaggtaccttggtgtccccatttgtgctaacaaaatatcaaagcaagaatgtgtggttttgatagaaaaaatgacagctagaattcgaagttggagcacccgaaacttgtcatttgctggtagaattgtactcattaattttgttttgtcagctatatatgcatattggtgtcaaatttttaagttgcccaaacaggtgatacatgaagtagaatctatatgtagggccttcctttggaagggccaacacatgatccaaggagttggttcaatagcctgtgatagaacctgccaagcaaagtctgaaggtggatcgggtttgaaaaaaatagctgaatggaatatagctgccatgttcaagtatgtgtgggctttggcaaataaagaagacaacctacgggtaaaatggatacatagtgtgtatctcaaaggcgaagattggtggggataccaagcttcaagtcatgggagttggtattggaagcaagtagtggcagcaaaggacaagctcaaagaactcactgcagtacagcaattcacacagagcaagttcaaaatctctacaggttatagcttgctatgtccaactcaaagcaaggtatattggtgtgatgaagtatggggaaggttcaacattccaaagcacagttatgtcctatggctagctgtgtagaagagacttaaaacaagggatcggctccaaaaatttcaggtccttgctgatgctgaatgcccgatttgtatgcagcaggaagaaacaattgaacatctatttttcaggtgtccattagctcaatattgtgtggagaaaatcaaggaatggctgtcatggagaacacaagcaaatgacctccacaagcttctcaaatggatacacaaaagcaaaatcagcaagatcaaaaaaaaaatactggcagcagctattgcacatctagtctactccatctggtttgcaaggaatgatattttgtggaagaaacatgtagaaaacaaagatgtaattgtacaaagaattaagaatagtgttaaacatagaactagtttggcctaaaaagagtggtaaaaaagatagagaatggtttcataagttgtaaaaatgtagaattgttttttgttgaggtctttatatgtaaaggcgctctttcattgtacttgtcttgaaattgtttgtggagcaataataatcttactgatttatacaaaaaaaaaaaaaaaaatacattttatgcatgaaaattatctcaaatttggaacatctttcaagaaatgggttagtttaggttatatagagttaaaatgtgtccaacccataaccaacccataattatatggcttgtcacttttcagcccaataagccatgacctactcttaacataactctttattacaaaaaatgggttggattgatcgggttgaatagtttgccccatattttgtgcacccctacgaattactcatagaattttccatttattaaataaaaataaacaaaaaaataaccctaattttcattccttctctttattactcatcattcattagagtaaaatactagaatcttgtttatttatttaaaattgaactaataaattctgttaaataatataaatttttttaggaaatttacatggtatactaacttttaccatttttttacaaaaatactgccaggcggtattttttacttttttactgtatttttttataagtttcatactgcagtatactgtgttaagttttcactggtgttctactggtgttttactagtgttctactgttgttttgagttgttctgctttgtgttttactggtattttataaaaacacagtatttttgaaaatatttccgtgtgacagtatttttataaaaattaacccaaattccaatatttttgt

SEQ ID NO: 244360 - DNA, 3716 bp, Cannabis indica
ttgagcttcaaatctccacatctatcatgaaacttgaaatcctatttgagccccactttcttcattattctggataagtattccattcccaagacaaacaacaatggggaaattgggtcaccttgcctcaaacctctttttgattcaaagtaaccatgaagagacccattaaacatcaatgagaatttcggggttcggacacataccataattagcttgacaaagctaactggaaaattgaaagccataagcatctcttcaatgaaatcccattccactgtatcataagctttttgcaaatccaacttgatcatgcaattcgccttggaggttttccttccatagtgccttattaagtcttgacagaccataatgttatgcccaatgaaccttccctgtacaaaaccactctgattctgtaaaatcaaatctagtagcactagttttagccttgaacagatcatcttggacgctgctttgtataatacattgcagcaagctattggtctataatcaccaacaacattggggcactttatttttggcacaagggttaaactgtattgttcacctctctaagaatttgtccagagtgcaaaaaagaggtaatggcttcataaacatcttcccctactaaatcccaattgtcttgaaagaaagagctactaaatccgtcaggaccaggagctttgtttccaggaatattaaatattgccttcttgacttcctcttttgtgtacttcataacgagcatgtccgcttgatgattagacagagaaggcccttgctctataattctcttcataactgatctcctcttaggcatcttactccccaaaatctgattgtagtactcaagaaacaaagttaaaattatatgaggattatcaactcttaccccactaatatccatgatagagaaaatctggttttgacttcttctagcacgaatactattgtggtaaaaagctgaattcgagtccccctctttgagccataaaatctttgctttttgttggagaaaagaagtataagcattttggaccgaggcaaaatctaatctggcagcagcttcacggttctataaatctatattcatcgggttctggtgtagttccttttgacattcctccaattcctctttggccttggcatgtgcagcaggtagctcggcaaaatattgcttgtttaacagtttaaacagcagcttcagccccttcaatttagtgacaatctgaaacattttcgtgcccttgtccctttccaaccatctatctcgaaccaacttgttatactcaggatgggaagcccacatcttgaagtaccggaagggtttcttaccaccaagcaaaggaaccgaaatcgttagaacagctggagcgtgatctagtagcccctcattaaggaaaacgacttcaacattcgggtgtgagtcaagccaacttggatttgcaaggactctatctattttagagtagatcctctcatctccaagttgcttattacaccaagtaaagaaattaccaacaaacttcacatcctcaaggttgcattcttcaacacaatcacgaaactccgaggagttcttatgcttcactttgctgcctattctttcttctttagtaagtatgtcattaaaatctccaagaatcacccaagcttcttttcttgctatgtctcttaagtccccccataaactccttctcccaatctcatcattaaaaccatagacaaatgtcacaaagcactttgttttcttgtctatagttgcaacaaagagatgaatgagttgactagtacactttatgatgttgacatcaaaactatttggattccaacttactattatccgaccacccttgtgccaagcaatattggaggtgaagcaccaccccgaaaacatccttatatataaggctcccaaatttcgagccttaactcttgtctcgagaagaccaacaagaccaaccttttgagaactaatcaattgcttgactaggttttgtttttgttggctattgatccctcggacattccaactcaaaattttatccattgttaagagagggccctccccccctcctatgttatcatcttctagaatttgccctgcttttcctacatcattatctcccttttcctcaccaatttcatctccattattctcccccaaagcaagaaacttgttactagttgtagtagcagtatgttctttctcaggtttagatttccatccctttggaaccttttggaagccctcggcatcaactttgttactatcatcctgttcttttatcacaccctgctgctgcccagtatatttcttgacccactgctgctgttttttgggttctttccttctacaatcagccgtcaagtgccccaaaccttcacaatgcgcacataccacaggtttccattcatacgaaatggtgactgaagtattacaaccattctcatcctcaaattctatcatctcgggcaaatcttgcttaatggcaacctcgatcaagactcttggaaaactcagtttttctctatttttagtggcctcatcaaccataaccggcttcccaatttgtccaataatcttgaacaaagatctctctccccaatacttcagttctaggtcatctagatgaacccaaataggtaccatcctaatgtcttcttttttcacattgatagagggctcccattctttcatgacaactggtcttcggttgaaaaagatataacctcccctgagcacatcatctctagattcaactgaataaaaccgaatgatatagatgccatatgacagtaaaccaactctctcaatcttatcaatccacattctcctcacaaaaccctcaaacacagctaacgggggatttgctcctagaacataacagactatagatggtttccagaaatccacctcctcttgaatatcatcattggtaatcttcaccttattacaccctgaatttgaaaataaattcctaacgacagaaccagatctcagtataggaggattcgtagccataccttgcgaaagctttgcagaacactgctcagaggcttccatgaagtgggcgaaatccttcctgatgtcttcctgctgcataatcgatcgaagagaggacttcggtgataacgcctctggttccagcaatcctggtggaattccattagatccatcaatcgaatcttcatcttcagcatccgatagctcaatatgggcaataccaagaaccgcatccattgatttagtcttcttgacatccgaaacagaattcggacccttcttcttcaccagcttcgtcgaattccctttcccacgccctcttcctcttgtcttcgccatagctcctgcaccagctgccaggagtcgagagagagagagaaaaaaaaaaggattgtgcctaaattggattattactaagttttattttaataaaagttcagttcagagtaattttaaaaaatacaggatctaatttatcatttaataaaatacagaattcaaccaataaattttataatatacataattcaaaatgatattaactctatttattaggactataatgaacaatgtaatatatatatatatttatatatgggtgcacttttaatgggtattacccatgaatgggtaaaattagaaaattttgagcttttatgcttaatttttcgatctaattaaaaaaaatctctcttttttatat

SEQ ID NO: 244361 - DNA, 2296 bp, Cannabis indica
ggcataaaacccaacaatatgtaactaccattgtatgtgtaattgtttcttaatattttatgtgattgattgacatatataactaccattgtatgtgtaattgtatcttaatatctagtaaatatgcttattacgcagatatggcagatgatgtgctgacacatgattgctcagtagatgagaacttaggttattgtttgcaacctcccaaccatcgagatcctacacggatgaagcgtgtacgtcaaagaatggataaaggtgaaaaaatagaccttgaagttaatgacaaagttgaatactttggagagatgtatggagagatgatatcgtggcttggagttagatgtcgacaaacaatcagtatcaattataaagacaggagatatgtggatcaatcgttgaatgacagaatttggatggacgtgtaagtaagttaatatacaaaatatacttattatggtgttttgtaaactattaactaattatttgctttctacatatagcgtggtttcaatgtttgtgcagattggaaaagaagggacgagttatgaaagattttaagacaaaaatgacatgcgacgtcataatgtctttggccaaagagaatatgttgaaggagctcgctattccccccaaaaaccatccttaaattgatcaacaaaattgggtaaaatttgttgcgagtcgtctaacacctgagcatatggtacatatatgtatattcactatatttatataattagcttagatatatgagccttactagtatataacttacacattcttattgtaggctttgagaaaggcacaatctgaacgagtttgccagaatacatcaaggcaccactcagttggtagaggcatggtgactctccgagaggatgtggtaatgaattacatatttttagatattctaatacgctgcaccattttcctaactgaacttcacaatcaatagctaaaacttgaattgaactgttaatttcttgtaaagcaactaaacaataagtttcaagataaaccccctaccatatttctcttctcttgatcgaactaataaaatatcacaagtgactttaattaattattattgagagatttgaatataaagtacacaagtataaatacagcttctcaacaagatatgacatttaaaaacaagtcactaatctgaaatgttactgctccacaccatgcccaagtgctagataatatttcatttgctagctagtattgattggttgttatatatatattcattaaatatgatacaatcttctaatgttttgttgtttgaaaacacactatggcacataatatgatatagtcttgtaatgttttgttgtttgaagactttattttaagtagaatcttaaaatgaagaggagctatatgacatacactatgtgttttcttcaagatattcccttattaattacatgtttgttgcagaaaaaagaaatcaaaattcaagatccagcccgccatcatgtttggttaaaatcccgcaagaaaaataatgtcctagttacggacttggatagggagattgccgcaagaatagtaagtgatatctaacacaattcaataacatgaatatatgacttgttattataaagtattaactattatcaatcataatgcataggctgaactcgaggaaaaagtaaactcaggtgaagttttggccagtggtcggaatgacatattgactcaagcattagggacacctgagcaccctggccgggtcagagctgctgggtatgccactttcttgatttaatgttagattattttttatttattttacttaattttttattaaatgagtgttccaactgttatttgtaggttcactgcaaaggccagtaagatatttggtcgaaagaaaagggctaaatgtagtgaatcatcctcccaaaaacaagaaattcttcaactcaaaaaagaaattgaagaattgaagaaaaaactgtatgctgcacaagaacaagatgatggtaatgacaactcctcagaagaaaatgatgatcacttagatgatcatcaggagtttggagggtacgaagatgataatcagacacctcctgtcatgtacaacttctcatccactaataacaacgaagtacttttgtgttcagacaacatccataatatagtggccaaaggtgtgcttctggaatctgttagtccagtaacaattcataccgtgcagtataaagaagggattgcacgagttttaattacagaacaacttcaagaggaggctgaaattgctcatcctatcgaaaat

SEQ ID NO: 244362 - DNA, 1165 bp, Cannabis indica
ctttacgtttttttttatttgatttttgttttggtcttcaccactttaaagtttttgtttttattttggctatattttggttcagttttattgtctgaaaaaattaggaaagactttctcatttttagatgtgatacatattttttttcgagcaataaataaatgaaactgattgcatgacacatgtacaaagaaataattgaacgataagaaattaaaagtgtttgatcatataatgatgaggcaaacagagaaatgctaaagggtaccagtggtgcgtagcatcctcttatgtatcatcgttattggtccaactaggtcccatataatttaatataatagtttttaaggagtatcagtcaatcgcaacacaacatatcgagaaggtactaaacaccactggtacctaataacaatgctcgaagaaaacactacatgattatctcaaaaacacacaaaacattggcaaaactatgtcaagacttagtttaaaccgaccaataagtaagatcaagaaaaggatcgctcgggatagtcttcctaatgagagttgattcgtcatctcagatattacatactctcatgaactcacgtaggttcaaaacattttactgtctactcgagacgaattattctaataataataccatacttatacgtattttacatcaaagtattacaatattttatatgaacttacatataattggtataatcccaattatctaattaagattataataagatattcagtttaattacacgtgataagatcttaatgactatagttcgcccattaaactaatatttcaccataagtaatattcttgggatgtgtggtagtatgaaaaaagggttgttctccataaaactccattgtttttcacatttgatttgtgtatgttgtttgtagttcttgaagcaaagtttatgatcaaagagaccaagatagccattagtgaatcaatggcaagattaggaggtatgctcttcattattctaatactcaaactctctctattttgcactctttttcaaaagatataggtggttctaggaatgtggtggtatttattggaaaattatttttaaatttgatagctttaaagtttataaagagcttaacatttttttttgttaattttttttatttttaggggaacaa

SEQ ID NO: 244363 - DNA, 2837 bp, Cannabis indica
aaaaatttctaggtgctccacccatagtgattttggctgcatcattagaggaagttgcaaacctggatattagttctaaaatatactcgtttatcgaccatgccaatgccattgttgagaggctatatcaacttgaagatccattggttaagaaagttttcctataaccttcttttgacgttagcgtgtgctctccccgaccacacctttattcgagttcagagtcgtcacctaattcatcattaggtaaatttcctcaaataaatttttagaaatgtgttgtaagtcgacatacgaggtttgcatgtgatttatctgctatctggaaactatagctttaggcttgtggctgggattttattgttgatagaaataggttgttcagaataatttcttgaataatttttggagtcaatagaattgaatctttttgttatttttctctgaaaaaccttatttttctattgaaatgctggcaaaattttattcccttgtctggaacccttatggttttggacaatgcataagctttgattgtttccttttattcttgtgctcccgattctactacttggaacaaatgctccctgatgattttttttttggatagtgaatcaggtggggacctcttccaagcagttatgggggaggattcccccttgcccttactatcttagttggtctgggtaaataactgcttggtaccttctttttcagcttccataatgtccgaacgagctcagcgtaaagtgacaaaagttgttgaaggagttgaggaggtggagcaagatcttgcttctaagttggtattgaattcatctccatggtaaattgatcagtacacaaacaaattctgaacctatgacaatctccggaagtatgaaacggagaggcctcgaaagtgttccaggactattctggaactagactatctgtcagaaggaaaaacctagccaatgtgctgaaggaggctttggtgtttagagatggggcgacgtagagatgggtgcccatcttccgttaagaatatgctactttgtagagttctgtgcagtggccggaatagctccataccaatttattcctcaagtatactgtttgcttgctgggtggtacattttgtgcttctagaagaagatggagactccaactccagaagagatcctatatttttataagatcaaggcacatattataaggaaccataaagagaaagttggtctccataggatggaaaggcattccaatgatttattgtgtcccactagttctgtgcagtatgtgtatgacatccgcgactactgcttctacacctctagcttcccactgaaaagagtcctgactctcaccctcgactttagtattgcaagtaagtgtcactggtggtctagcccttctttttttttctttttggttttcaaattaactccagaactagaaacaaggcaagacttctacgattcattgtcagaggaagagttgcaagttggagcacttgtgactactaaaaatctccaggaggctggcctggtagctcctcatcagagcattgatagtctgacaatgaaggattcagtcagggatcttttccatggagaccctagtgatgtgaaggaagccattgtcattatcattgcagaagaggccttaaaggtcattaagtttgatgagaaatggttggaagattgacaccgtcaatattgcgagaacctaagcaaagtataagagctttctattcgttttaaggatgctattcggaatgagggtactcctagagcgagtactttcaaaagcggtaagatgccattctgtgtagttagggctccatctttggcaaacttatattgctttgaccaaagtggatttgacccttactttctgcgctgagatcaccgtagatatcccatcaataactatctggatagggtagatgacatcattaggagtccaaatcacttgattctaccaatgcatgaggtctggatagataatcttataaaaatgttgtatctcgggttcttccaatacggaagcctcttaggaagggaagatataactcaatttgctagtgggaaccctagttatgctaagataaatggtttggatcttacttgcatgttgtctttacccatattattataatgctttcaatattttctgtttgaactcattattttgtttttttccttttacagatcaattgctcacactccaaatgggtttagtgaacaagttcatttgcaccatccacaaaagatcggatgaagccagagaagccagatgtggtcatgacaagggaaaagttgtgcaacctttgatgttggagtgaaggaactaacacttccaaaatgactcttggaagctgttcaaaaggctctagatgctggaactaagaaattgacgcttccaacagaactcttgaaagcagttcaagaggctgcaacttcaagtactgttgcatgtcttcctaccgcctctatggcattgaatcccacttctcatggaaaagagtgaaattcccttggccataattcttacctaacacaatcctattaagattgttgatggtagtgaagatgaggatggtgacggagaagatgaaaaagaagacggagaaggatatgtctttgcctcgaggaagagagctagctccgagttgggtggagatagcaaaagatcgaaggatgaagctaaagataagctctgacaactagttgtttctctgaggcaaagttcagacgtccatggacaaagaggtgctgatgttcacaaaagtgaaaaatctactaggtggaacactcgttccaacaaatccatagtcaacactcaaccttcgt

SEQ ID NO: 244364 - DNA, 1750 bp, Cannabis indica
atctcaatctgactgataaagaatcggtactgactttatatatatatatatatctctaattacccagataggatcataaaacccttctgttcttgataatccaactaagaagtctatggttacttctttccattttcactcaaatatctttaaaggttgaaaacattcctactgatttctaatgctctgcctggcttgctgacaagtcgggcatttgacacatacttcacaatgtcactcttcatacctagcagagggtttaaacatcgtaatatatcttagttgctcccgagtgtaaaaagtatggtgtcatatgaaactcatttagaaccttctattcaatatccttatctgactggacacaaacactatttttatatcataaaattccttccgaaaaaatcaaaaagtcctttgccgatccggttccaagtctttccttgtactcttgtagttcggagtcactcttttgggccattttttaattccttctaataaatcaaactacaatgtgatattaacaagttctccaatcacgaactcaatccctgctttggttatatcttcagcaaactttggtgaaatcttttctttttatgaacttgtcctagacctcttcgacttaaagcatccactaacaatttgcttcccagaatggtagataatcacactgttatagtctttgaccagttccaaccatcgtcactgccttatgtttaaatccttccaaatgaagaagtacttgaggctcttgtgatccgtatagactttccatttttcaccatacaagtaatggcgcccaaattttagtgcaaaacaactgctgtcgaatcaatatcatgactgaaataccactctcatactccttcaatggtctagtgcacatgcaataaatctcctaaattgtatcagaacacaatctaatccttgtttagaagtgtcatatcaaatcacaaatttttcctcactgattggcaatgttaacattggtgcaataggtaacttctatttcaattctttcgacttaattccactaagagcatagacatccctcaacaaatattctgtagcatcctattaattcattaataaccctggcggcttctctagaaaggcatctagaaacctttggaccacaagattatgtcccggccccactgatgttccctttgtaatattcgccacactagctaaaaggttgatacatccatcccataataaacctttttcgttaaacgtcgtgattaatggattttgggtcccttgaaccttgcccaagaacacgaatgggtcctcaccttctggttcaagagttaccaccttaccttcacaatcgatgtttgcataatactttacaagtcaatccaatccccaacattaccttaaaatcctctaaatttagctcaactaaaacaactaaccatcccctttcccccataactcgggaagggatttaaaccacctgctagaaaataaccaattttacagtaaatagtaaggtaccagaaccacttgataacacgtcattaaatttacactaactttcaatcatccttctcttctggttgctataactatgggcagtctcttctcaaacgacctactaccccatactgaaagcaggctctcgtgtagcattcactttcctggcgtctcttgcatctcaatcctctggatgggtttacaaatattcatcctaaccatgttgaaaactttaattaccttaaattctctcactaggacccataac

SEQ ID NO: 244365 - DNA, 1289 bp, Cannabis indica
cactgtttatttaatcaggcatctcaagcttggatggaatggcttataaagaagaggaaagcttttgatcagcgtggagacatggcaatagcagcttgggctgaacagcaacagcgggagttgaatcttcgagctcgtcgtctctctcgctctaaggttttgttattgaacattttctaaagaacatttcttgctgtatatgtcagtttccagctgtgtttgtcaaatgtatctatgatctatcaacatgtttctactagacatcatcatttcgtatttgggtcatttttggttcaggttgatccagaagaagagaagagaattttggctagagagaagaaggcatcagcagagtattaccacagtacacttaagaggcacacacttgttttaaagaaaagagacttgatgcgaaggaaagctgaggaagagaaaagaaaggttattagccagcttttagctttggagggccttgagcttgacacagatgatgaatagtattatacaaccatacacaatgtggaattgtcatataaatgtagttttcactgcacacttcaccaacaaaaggaatgggggagattgtaattatttttataatgaattcaaggaaaaaagcattctatttatctttctagttgtgccaatgacactgagctcacttgtcattgcaaagcacacaccatttcgaataccataatgtgaaacacagcaactttttgcatttgctaggcccacgatttctggtaagataaaataatatatccatattcaagttatttgagctttgagaaattacctcattaaaaactcttctacaacatccagtgacaaaaccataggggagggaaaataatggttggcgtgattatcttcccctcatatatgaactattactgtaactggtgttctcctacgaaaagctggagctgctaaagatcaaaaagaggaaggccttgtgtggtatctaaaatgattttaggaaagtggaatttactgatatcttattaagacttttcaatctaatgcatgtacgctttttttcaaaaaaaatattaagacttttgaccatggtgagtctggcaaagtgaattttgactttcttgagtaatggaaaatttatcagagcacctttggttcactctaatcaactggaataggataaagttaccattacaatttttggtttgtgtttttaccctttctaatgaccatcttttatctattctgatcatcaatattgaactacataaacttaaataagaaatattattctattatatataaaa

SEQ ID NO: 244366 - DNA, 1092 bp, Cannabis indica
tatatctctctctatatatatgttatgaaaattatctatatctatatctttttacggcaagggtgatgcgaaaaagacgataacacatggcacgagattacaggagactaaactcatgaagaatatgcaaagtcacttgacacaaataaccccaacagatgaatgataaacaattatatgaaatacttacggagaagtacggggtcattgtacacactgtaagaggacaaaagagtcaccctatagatgggttagaccgagtgacccttaaggtggtcctggccaactgatcctataagtgttagcccgggttgactcactcttcacactctgttcttgtatgaccttgatactatacaatttcttcacattgacatggtggtactttatttattaaaggttccaaagttcgttttgcatactcaacgtcctttctttgtcatcactcaaacaccatacaactgcaagtattaagactgaataatagtatgtaaggtgtaaaaatatactatgtactcccaagcttgaacatccacagaagaagcaaaggggtacatcttgagaatacaaaactattgtgggggaaccttcctctagggtcagtaggccagaccatctagctagggtcgattgaccaactccaaaggtcgcctagggggagacaccatagaccccgtctcgctcgatacgtaacaagcatcatcaaatcatgcacaaagctcaaagttggttgctgttagaacttattttacaaggatcttaaatcgctaacatgtgtgttgataatcaaaataataatttaacatcctaaaataaaaatctaatagaataatcaaataacacataatattttacgatcacttgcatgagtggcaacaaaatatatgtctccttctgttcagtactctaactcttgttcctttcagtcgcagagtaataactagtacttgttgcctttggtttttcccaaaatacgtggacacgaataagggtgacacatgaatctgaaagaactatcattcacgaaaatcaattaagtcttggacaaaaaaggaacaccacatggaatgtgcctcccagaggagagcataa

SEQ ID NO: 244367 - DNA, 1254 bp, Cannabis indica
cttttattttattgaggtaagttaaagtatacttgttttttcatcagttaactaaaaatagttttattttaaattcaattgaaatatgcccacttttataactttattaccgattatactttcacagctacacaaattagagttgaatggagagtcagagtatccttaaatgataaaggcacaattggtagagttgttgaaaaaaaaaggataaaaatgaaaaatatagaaagagagggtaaaaattaaacacaacaacttaaaagaggtataccatctaattttctcttatatttatgtatcaatattgttatacgcgtatttggtcaaattcagcagcaaaagtccactagtgggttcttaaagcagataaagtgggtcaaacccatttagagctcatttatttcggaagtcagtccagtaccgtgataccagaagagtaagacaacgtattcttagaagatcagtctggtttctctttttatttctgtagacagataagaaaatagttgcttctcaagtcttgacaaaatatcctatcaagctaaatggagaaacttcctaaaacagaaagcaagcattaattcactattaattgtccataattatagtacacgattttgactaatccaatcgtatttgatctacctagtcaaaacatatcttctcttttgtgggttgaacttcatgaggcaacccaagcttataattcattgtaaactcaaaaaatgaaaactaaatatataattctcaaaacactatcctatgaattaggggttaagttctttggcaatacttgtaaatttgagaacttattgttattgtattctcaaaaggctattttagctaaagagttacataataactgccagattatcctataaatcctcttttttttagctaaagttggtccatcactcttgaggtatatatgcctagttacctcttttctttggtgggcctattgctcgtgtggcctagataacaacggccagatttgcctataaatcctgataattctcataatgggcccataaaagcccaacctttaagaagctgatccagatgatcaggacgctttatatctatatttttattttggggttttttcgtaaatacgggaatgtagtatagtttacatttttatagcataaataaataatacaatagagttataagttgttttagagaaacttacaaaaataccagaattttggttaatttttacaaaaatactatcacacggaaatcttt

SEQ ID NO: 244368 - DNA, 578 bp, Cannabis indica
aaatctaaaacaataatataataattaatgagttaaattccgataaagctaacacacaaaaatcttaagagtaaatagagatttcaaacctctagtatctagacacgtatgccatcccaaaaccacatccgcttcaaatattactccccggtttacacttcttcttccttcacccgccacttctctttctgctaattgaggctctgccttccttccttatctttcttcttcttcagtcctcactgattttccttccgatgctttcaaaggtacgatttttcctttcgactttgtgattttctgtaatgggtcagttcttgtttccgattaaatgttgagttttgtctttcaacttgttccgattattgaataaagaattcaactctttagctgccaagcaaccttagttgttgttctcccttcgatttctttatttcgagtttatctcatgtatagggatttgtttttatctgctttgctgacctgaatctactaatatttgtagttcttcagttagattaaaactagttgaaatggacttgatttctttctgctgtttgcctttttttttttttgtt

SEQ ID NO: 244369 - DNA, 904 bp, Cannabis indica
ccataatgtggctaagtggacgtttacccacaaattatttggtaatattccgccatccaccatcccttcaaatatgttatataatgacctcgaggtctaactcattgtttaattaaatacacttttcatcaaaaaaaaaaaattgtgacattttataattatttttatattatttattaaaatttatatgttattactatatagaaatcatacatatttatttgattaaaacttgacattcatactaaagagggaaaaatgattttttgctcctaaatagctactgaaggtaatctttttccttcggccaggcccgttggctttttttaagcttaagtgcggcttgattggggttgtgttttgtttttgtcattcgatttttgcaattgtaattagtcttgtttctgtgacataattttgagtgttttagtcttgcctctatgatatgattttgagtattttagtcttgtctgtgtgacataattttgagtattttagtattgactatgttatatgattttattttgttttgttttgtttcgttgttggtttttctttgttcttctaatgtactcatcaatacatcgttgttagtagttgagaaataataaaattttttgtgctcgagctacgagattgaacctactgcaatagttcttacagctatgtcttctaaacgataaatggaacaaaatataagtgttcttaaatttaactgtgatgctaccattttcttcatttaattatattttaattttatatcaaataatctaagaattaagccacttatcatttagttctgatgagagaaatattgcataatttattcaaaatatatataaaaatatatagaaccccatacctattaaaaatataccaattatgtaacactatcttgtgtttt

SEQ ID NO: 244370 - DNA, 1228 bp, Cannabis indica
tataacagttcattgtctttcctaagcgcatgcagagaataaaacctacatcttagtttctcttcctgctggtagaacacctgttgggtgcaaatgggtatatagaataaaaaaaaaatccaaatggctccacttgacgatacaaagcaaggcttgtagccaaaggttaccatcaactaccaggatttaatttccttgaaacattcagtccagtggtaaaaccacaaaccattcaaatattcttaactattgctctctccaaagaatagtttgttcaccaattggatgtcaataatgcattcctcaatggtgagttacatgaaaaagtctacatgactcaattaccaggatttgaagatccatcacaaccacaagctgtttgtaagctaaacaaagccatttgtggcttaaaacaggccccaaaggcttggtttgacaaactagcttctctcctcacttcctttggttttcactccttaaaggtagatcaatctctgttttacaagcacaatgctggtcacactacactaattttggtatatgtagatgatatcttaataatatggagctcttcatctcacatctcagctctaatcatagatttaaacaagatttttgctctaaaaaacctagggaaaatcaagtatttcttaggcattgaagtgcttcatacaacaaatggaattcatctatcacagtccatgtacataaaggacttactttctcgagcaaaaatgcaattcgccaaaccaaattccattcctatgacctcgaatttaagattgtctacctatggtagtgatcttctagaaaattcttagttctatagatcaattgttggtggcctacgatatgttactgtaattagacttgaaattgcctactgtgtcaacaaagtttgccaattcatgcacaaccccttttaatctcatgggactgttgtcaaaagaatcctcaaatatctatctagtacacttgatcatggactgcatctaactaagccaactcaattagacttggtgggactctatgatgcagattggggtcctgatccagatgacaggtggtcaacaagtgctttttgtatacattttgggtctaatcttgtaacatggcaatccaaaaagtaacaggcaataccaagatcttcaataaaggctgaatttagaagcttggcaagcataacagttgagatcacttggatgaagtttctcctttttgaactaca

SEQ ID NO: 244371 - DNA, 1775 bp, Cannabis indica
tcaaaacttatctttattttcccatttttgtaaatagccctttaaaaaagagcctgaaaaaacttagccaacaaaactaaaattaatgtaaaattaagaaaccacactttgtggagaaaataatgtcacatacatataagcaaaaggacacgtagttacaaatacgtactcttttatcttttatagaaagttgagaaaactaagttagacctaattcattgtcctaaaaaatatacgaaaaaggagattcatttggttttagctttccaaacatgcatgtatattatgtatgggcacaaagtagtgaatgcattatcattagaaaagaataataataaaaataaaggttcattaggtttgtctcttatactcttgaatgacactttatgtgtggatactatataatccactccactcaaattgggtaaattgattatatcgacggagttgctttacttaagataacgaaatataattagaactagcaatatattttatattttaataggagcaattatatattgtagaacaactataactaatctgtagaattaaaataattaaatttaatcaacaaataattaacagtgataagattaataagttacaaataataattgatggttaaaataggaatgaatactgtattaaaacagaaacaattaaagtagtaaaacaataaaatgatatatactagttcaaattctatagatttatgatctatggctctactccagttttggaacaccaccaagtcttctttattgattgagcaagaacaggatacaatacagtcgagatcgattctttgttggatccactcaaagctcactcttacccaaaaatcttcttcatctacagaaagattcttcatacaaaactcaaacacaatctctctcttttctttgtacctctcaatctttctctctcaaaattacctcttgaaactcgtatgaactcattctcttaaaaaagataagtgtggtggtacttatagatttgggatatagattccaaagtcgttggctgcaaatgccaaattgttaagttagtttacgacttaacaaactcattgtaacaatatctccacgtcagtttaagttaaagtacttccggatgagatgcacgcttcttggaagaaagaccaaagcacgctgaagggacttcccaagtaggacagtcaacagttggagtcaactatcaggactttcttctaggaaggaacaactaaccatctgaaactctttctcggaggaatactagctttcttgaagactccttccggagtggacaggatagactttcgagaacaccttttcggaggatatctaaccttccacgagacttcttccgaatagacaagttagacttttggaaacgcccttctaaatttcatctaactagaacaacttttggagatcttttcatttagaagaactatactacaaattcaacctagtttcttcaaattaaaatatgatgatgatgaagaaagaagtgatcatggttggtgttcccgatatctcaatatactaacttttgagattaatcaagtccaagcaatgcttgaacttgtttactgttaagaccttagttccaacatcagcaggattatcttctgttctgatcttttctaattcaaccaattcttcttctgtcttctctctaatccaatagagtcttatatctatatgtttgctcttttcatgataaatcgagttcttgtaaagatggatggatgacgaacgatctgagtacacaatcactcctcctct

SEQ ID NO: 244372 - DNA, 1458 bp, Cannabis indica
aggaatgtggcagacttcttccgcctctgtccaacccaattcactcccaagggcattaagtatctgtctgccctgttcattctctacgcctcccaaaagtgggatatgccctctccccatgaggttagttggttttttgacttgaagtctaccccgaagcaaggtaggtcggggtacttctacttctctcagccagactacaagtggttgacgggcactgaggataaggccgttagcaaaattgggcattttgttgacgagtaatttatggtggaaggaatgggcaccacctacactcggttccagcagatccctgtatatcaccgccctcccttcacacttgccctccaggatagagctcagaagcttcctctgctaccgggtgctgcccggattatcactttgttgacctccaaggacaactttgtggagtacgggctttactggaaggatttcattccccggcctatgaaggaaaagaagagaaaatccagtgctcgaagagctgagggagctcatcaggaggatgagcttatttaacttaagcgtgaagctaagttgaagggaggtccaagggccaaacagtatgctgatgagcctttgaaacctgaagatgaggctgaggaagagcagatgacttcactcaaaaggaggaagaaacttctggcccaacccaggcttgttgaacatacaatttaactcagggagcccaacttacctgcttagccaccctctcccgtactaggttaaggaatggttgtcctaacagtgataagatacttgtcaggtgatgatgaactttcgagtcttgctttggacaaatgcttctcataaagcgcaggatactccgtcttgtttttaaacttcttgactatcgtgctttttatacttctgattgcctttttttaaccatgttgcttttatcccgtgcatacatgtctcagaagatgctcgatggtttgaagaagagagttgggggaacctcaagctcatctcctccggccaagaaatctaagggctgtgaagtggccccatccaaggaaaagcaaccggctgaggaggttattgatatttctgaggagctaactatcgtggacccttctgctccgaaagctgctaagtccaagcattctcgagaaggacgctcggacaggcctgaacagtcgaaggccagatccgagctggccaagagcggatctgagcagatgcgggctcctacctctcctttgccattgcattcagaagccaagagaggcaatgagatgctcactcactacatgaaccggttggttcctaagctgagtgagtagctggctagcgctaatgacgaatcttccctggagctgctgatgggaggactcctgagggaatttacaaaggtgagtttttcttgacagtttcctttaatccttctttacttggctcagactctaatgttttttctctgtgtaggctggt

SEQ ID NO: 244373 - DNA, 1529 bp, Cannabis indica
tccatgaaacagcctttgtcaaggccaaatgggtatggaatttcgaaatctccgcataactggttggtgcaaccacttatgtgggttggtatggagctgttgttgctgcaaaatgctacatttatcatcaacatcgcacatagtataaatttattaattaactccataatcaagacaagatgagctaatttttgtttctctatctataatatgtatactattttttttgttaaattacacgatggatgattatatgcatatatatatatatatagtctgtctagacaatgtgtcttcttcttcctccaaccaaagtaatacactcgttgactcctaatgtttctatactattaacatttataattttaggaaattctactatacaccatcttaaaatggatatattgatgcactcttatctgttttagcacccgaaataattttttagtcaaattttttctcatggtcatatacattatagttatttaagatatcctgcaaaattttaaaaaatttgaaaaaatttaacacgctaaaaactacgttcaaacagtgtattgcacgcgtgactctcttatttatacgcatgtaaaatagactgtttgaacattactttctatattataaattattcggaatttctcaaaattttgtaggttatcttaaatagctataacgtacatgaatgaatgattaattttttttttgaatgccgaaacaagtcaagggtgtatcagtacatcccttttaagggagtgcattgtaaaattaccctataatttttacacttacttaaatactttacaaaaattgtagtaaactttattaacactaaatattgtgttaaatttagataaaatataggcaacatgatgcattaggctagttattttttttaattaactttcagaaattttatttacaccctaaaatttttcgaagacatctcattttaataattttaattttataaaaaaatttatatctttaattatactaagattttttaactgttttcttccaatttatattcttaaaaaatataactatcaaataaaaataaattatattttaaatattatgacaacaaattaaaataaaaaattatatgaatttttttagaataaaataaaataaataaatacatgaaaaaattatgaaaatgaaatcaaaataagtattgaaattaacataaaataatgcaagtaatttttttttaaaaataaatattaaaagtaatttttaaaaattatttacgtttatatttttttaataatgagtgtacttatcattttatgtggtgcaaataaaactctctttaacttttttgaccctattattattatctatttattattaacactaaatataaaaaatatatattattttgttaaatttttcataaatattaaataatatatacagtataattataaatatactgtatatattatttatgttggaaatttattttaccaggatcttaaatctactcacaagtatgtggtttaaacaccctaaatatgaac

SEQ ID NO: 244374 - DNA, 832 bp, Cannabis indica
ttttgcgccctagaagaggaattccattgaatttgaggtgtcgcgctcaggcaaagcccaaagctgtggtttctgatggcttgggtagtccgacaactgagcaatccacaatcaagcctggtgctggagttgtacatttttatcgggtgccactgatccaggatagcgctacatctgagcttctcaagtcttttcaaactaaagtctcaactcaaattgttggtttaaaaacagaacagtgtttcaacattgggcttcagtcagaactttcaatcgataagttatccgttcttaattggcttcttcaggagacttatgagcctgagaatttgggggttgagagttttcttgagaagaaaaggcaggaagggttgagtatggttattattgaggttggtcctcggttatcatttacaacagcatggtcttcaaatgctgtatcaatttgtcaagcttgtggtttaacagaggtgaatcgattggaacgctcgaggagatacttggtgtatagcaaaggtccgttgcaggagcctcagatcaatgaggtagctgcaatggttcatgataggatgactgagtgtgtttattctcaaaagcttacatcttttgagacgattgtggttccagaggaggtccgctatgtacctgtcatggagaatggtcgaaaagcattggaggaaattaatcaacaaatgggtttagcgtttgatgagcaagatctccaatattacactaggctttttagagaggaaatcaagcgtaatccaacgacagttgaactatttgatattgcacaatctaacagtgagcatagcaggcattggtttttcac

SEQ ID NO: 244375 - DNA, 789 bp, Cannabis indica
tttttattctccacacttttctttctcctacattttccttaactttttctttcctcactaaaatccaacttccaaacatagggttagtgggttagtatttttgttgaaagatatttttctcttgttgcctttcattgtattctttttttctacctttgcttcttctccatttgtactttcctttgtttaatgcatgcgctatactgggtttatttttttcatcatgagctggaaactgttaagagtttcctaataagcattttatcttggtttccgtgtaatctaaaaccaggaatggacagaaacaagtgagggtgtctccttgttggagactttgtacaaggctctagatgaggttagtataatatacagaaagtacattatgatagtcgtactgggacgaaagttcatgccatttttgatacaggttgtgaaattggcggaatgtgaaatttattgctatagtccagactctgatggagatccttttcttgagagaggggctatgtaagtttctatctcatggtgacatactacaagctgttatatgaccacaccggtgaacgattcttcttttttttgtactcctttcagatggtcattcaatttcttcttctataatagaaaacttaagcgggttgtgagcttccgattctgctgtttaaggtagggataaacattccttcaaactccttagaattttgaggttatacagttattacatttgggatattcttttgaggcttatctcctcatcactctatgttgtagtaacatggtgtctgatga

SEQ ID NO: 244376 - DNA, 1620 bp, Cannabis indica
ctcactaaaataagaactatgtagaaccaaaaatggagattgaatatccttacaatacggtattggcataaataaaacattaatgttagagtttcacgcatagttctcctcttctcaaaaatttccatctcacttagaagacctgggcaaagcgaaacaaatactaggggaacttttgagagcttacatcaacagatttatgaatgaacaaaagtgaaaggattaactgaggaagggatgctagccacaatcttaggaggtattgaacctctaagggaattgtggaaggacataaaaagacttactacaaggtcaatggtagaattcttggaccgaaaaaatagatttataaagctcgaagaaacggtttggtgtgtggacacagttggacagaagaaaaatcaacaacacaccactgcagccactacatatatccaacaagactagatttcacaaaatcacaacagatcgagccaatgtggtaaaaggtcaaataatggcaatcgataggtaatggaaagaaaaagaaattcaatggaaactttgaacaacatcttcaagagaatgcctcaaagttcactgcttttaccattctaacagaggacatagaaacaatttttaaaactactcagcccatagtgccatacaaaaaacctcctcccatgaaaaaagacatgagcaaaagggataccaccaagttctaccgctttcatgcagactacagtcacgacactaacgaatagaataatttaaagtgggaaatagaattactcatcaagaaaaacaacccacacttacaaaaatatgttaagaccgaccaagaacaaatagccacccaaccaaataacacacgaagtcagatgatgcctccaccagtggactaacatcttcaagttatcattggaggcccctaccttgctggagacttagataaagctagagaaaaatatgcttggggccctacaatatgaacaatttgatgcagttttggccgtagaagaaagaaaacctaagcagccgcgcactagagaaccaatcatatcttttagtgaagaagattttgacgatgttatttatatgcacaatgaccctttggtcgttgatgttcagattgcaaacaaaatggtggttcaaaccatggtagataatggagcttcctcaaacgtcttgttcaaaacaacatatgtaaaaatggggctccatctcaaagatttggttccttgcactcagctagtatatggattctctggccaaagcgtttctccactcacacaaatttgtctaccacttacagtgggacaagctttaataagcacaacggtgatggcttaattcttagtgatcgacatgccctctgcatataatgtcatgttaggttgactagccttatatgacttgaaggtcgtcactgcagtatttcacctatgtgtaaaatttccaacaagaaatggagtgggccatctgaaaggaaaccaaaaaactatatgtgaatgctataacctcactctatctaaggctaaaatggaataaaactctggtcagtgttcagagaagaataaaagcatttcccaataggaatctgcccaaggtggggacaaagatatggatccctgccttggg

SEQ ID NO: 244377 - DNA, 3697 bp, Cannabis indica
tttaaaaaaaaaataaaaatctaataatttagactaattagggattgtcacgtgaaaatttacttaacacttatcagccaaatacccacagaatttcgagaattataacttaattattattagcgttaaaaattaaatttaagtatttatttgtaactaagaattaaatttatgtatttatactgtaaattactcttatttatttatatatatatttatattatatactagtgagcgagccgcatgtctactaataaatttgaattactttttttttatcaagttataattcatgaattaactatatatttttatttatttttagaacatatgtaataattaaagtttgtatttttagaactaagctaccttcgtccttggtcttcaaagctatagacctagctttgagtttcactatccagccaagttaacgagcttgacaaacccttacaactgggaatttttcaccaaggtgtttctaaacgtcttacaatagttttgcactgccaagactatcaaccttttttcttgagttgttgtaatgataacctcactctaatcaggttgtttacaatatcggtgccaatctcacctcaatcacaatataaaaatgtgtttgaaattacaagcaaactcactctaaaagtatgataaaacaatagaaaacctagagtgattagcaagcacactttaaagaattaaacactaattttggctcaaagtgtgcgaaaagtatttgttgtattttagacttgggagctgattaaacccacttgaataggttaggtatataaaataaatgcttgaccaacttgaatttttgagtaaaaattaagtttatatatagtgtttaaacaaaaactaactgtttatagccgttagcgcgtttttcaaaaagattcctagaaaaaacggtctgccattttccaaacggcctggtgtttttgtaaaaattggtctgtcgtttagtaaacggtagaccgaaaatagagaagtagggaaaaatcttatttttttagctctaaaatgcacataactctttactcgattatccaattttaaaaattctaattttattattttagctaaataatatgtgatttaagaagtcaatttaaaaattttatatatcattggtgaaataagttatcacacaagttagtgggctaaaatttgtacttaaaaactttttaagtatggacttgaaaattactgtacaagactagaaaatataaataaaccttcatgaagtcttatcttgagttccttgagtcttagaatctactttgggtcactttcgagaattttggtaaaattaccattttgcccttggagttaattttaccttagttttctaactattttatctttaattgtgctacaaaatcaacaaatcattagtgacaaataataatcaaatattttttaatcatcaaaacgacgagacctaagagtttgagttaacaatctctccctttttgatgatattaaatatttaattatttttaaaaggaaaggaaatagaattgaataaatagagtagctctcccttaatgtgtgcaagggttaatttcttttttttttagttttaccttgcataagtttgtaactttccctcaattttatacttatattcaaaaaccattagaagtccaaaaatttagtttgttgccaaaaataaaaataaaaatcactataaaattctctcccttttgattcatcaaaaagggtggcaaaggaattcacaaaataaatagcaaaaagaaataaaataaaaaaatgaaaacataccatccatttgaaacatagatccataaaccataaatgttcaaacacataccactcaagcataaaaaaatacaaatagcataacacactagcacctagaaagttaacaggcactaagccatggaaacatactaaaaataagaaaacataaatatgagaaaagatgctaaaagaatgcaagagatctaatttggtggaggtccaaagtggtccatatatacttttcattgtgtcatctcattttgaacattagcaaacccatgtaccatgtcacttcgcatggtgttaatgtcattgtagaggttggtgaattgagagttcatgttatctctcaaattttgaaattgagtaccaactgaagtgtgaagacgaaaaaaatgcctcttcgatgttgaagtgaggaacttgaggtattggaggtgcttgaggttgcacttcttcttcttcgtcttcctcttcctcttcttcttcactagcactcggaagtacttgggcttctccatgagcttggaggtcttggttggagtaaatccatctttcttcctcctcatcatactcataagacatacccttaaatgtgatttcacctaaaatattagaatccttaaattctaggacctcgatttcatcatcagtgggaatgcccagaagagaattaaattaggtagctaagaagggcaccatagggtaaggcttttctttgtcaaggcttatagatctcattgatggttctaatgatgagatagcctaagttaatggtcttgctttggacaatgatgttgagaagaaggatttggccctttctaagagctaagttgaaaatgaaagagtgaatgagttttccttgaagagtaaggttatggcattttggcttatcaaggacaccttctcctacacaaattttattagaaaatagggtatgattatcgtaggcatcattcttaagtctaggcctagggtcaagtaagagtccttcattttagacatctaggagtttattcaaggaatcaatggttaaggtgaatctaactcctttgagtgttccccttatgctatatggattgcaagaaatttcattacaagcacaaaaaaccctcactagcctagggtagatataggtttgaatgcctatcaaagtttcccaatccatatctctaaaaagattgctaaaattaacataatgaagggcatctaaatcacacttcttaccaatgagtatgtctcttttgagaggtcttcatgaaatttttgtgcaaatcttccattagagaagagtttacgcctaggcttgctcctttgctcttcttgttgtaaggaagatattgtcctcttcctttatctagatgatgaagccattgaggaagaaagagggattaagaataatatggactttgaaaagaaaaagaagagaattaggttttgagagtgagaaaggtttaaagagagaatatgggctgttatttagggttatcatatcaaatgggggtttgtgagaggttaggatcagttttatagggaaattttttagttttaaatgaccaaaaaccccccacagccacgacatcctatagaaaacggtaggctgttttctcaagtattgggaatggtccgccgttttctcagtacaatggctgatggaagaaaattatcataactcgggttttaaaaaatccttttgtccccaaaccttttctaactccttagatataacaaaccaaaaattctcaaacaagaaaaattagaaaaatgttgaaaattgatgatttacggtaagcttttcaaaattgccaagaaaactagaaccttaccaaaaaagagttttatgcaacaaattgaataattctttttccagtagtttaagtatataaaatgtgaggtttacacttttacagaatcgaaaaatgttgaa

SEQ ID NO: 244378 - DNA, 3028 bp, Cannabis indica
aatggtcaagaataaaatacccatgcatgggtaatacccattaagagcatacccatatatatataaatatatatatatatatatatttgtttaattaaagtatacaagtctaattaaagtagttttaattattttttttcttttcaatttaaatattattaaggtatttattatgtatagctgtataacttttaaaaatttagaaaaaaattaagaaaagttattttatatactattttttattttttttttaatttaccgtttttgttgcttcggttgttccgttagttactctggtactttctatgtgagttgttatgtaaatgttaattacgctttaagttactctgttggttgttatgtaagtttctatattaattttcgtaaaaatgtaaaaaaatattttaaaatataaaataaaaaaaactccaaaaaaaaatgtaaaaaaaatattttaaaatataaaaaataaaaaaaaactccaaaaaaaattcgacataaatagttttaatattactttttcttttattgttttatatgattatgaaaaaaattataaatatgtagtgtagtaaactgtgtttaaattctaatttacctattgcaaaacaaagacaaattttgttgtatagtgaggaaaacaggtcttttataatattaatagttttattctttatataattaaagttagtaattaaatgcatttttataatacatgcaatttgaattaactctattaattaaactctttttgcatatatgcttattgagaagtgttatgtcaattttttattacaattttaaaactgacctctatacccaaaaatatgtatgtcagaatatttattttttaaaaaaatttcatgccggtattcttatagttacaacattattcttgtaaatttttttttaaaaaaattcaaataatttatggtgttaaaaataaatttaaaaattttttaaacacgtgtatagtaaattagaatattaagaattcagtattgtaaattatttaaaaaaattttaaaatttataaaataatatcgtaactataacaaatattattataaaaaaaatattctaacatataattttagacacaaaaattaagattgtaattacaagtcctcatccactacatcaaataaatatatttctttcctacaaaataattgatatcgaccaaattacaaggtcgttttcattgatagcttttgctttttaaaaagtagctagtggtgtcgctattaatatttacaatactatcatcacttttttaatatatatatatatatatatatatatttatatatagacatgcttttggcaactagcaataaatatatatttatatagtagtggggcagctgaaattactatgtagaaattgactaatcttaactaaaatatgtgtatatatagtagtaaagattagtagagaactaacatttcatcaagtaaattacatctttcttcaacacatatagtttttataatcaaaatcatggagaaagagtttagtatgctttatgcagctgcacaagaagggaatgtgaccactttaaggcaacttcttaaacaagataaattgattctcgatcggctcattgttatcaacaacaatggtttttctgagactcctcttcatgtggcagctatgctcggccatgcagattttgtcaaagaaatcattacttacaaacctgagcttgcaaaggaggttgacgcatggcactccacgccactgcacttagcagtggcaaaaggtcaccttgagaccgtcaaagtctacttatgttggttgacgatctcaaaaatttgtgctctgcttgggatggagagggaagaaatgcaccttgcagttatgagagggcgacttgatgtgttgagagagctactcaaagtggctcccgaggcagctcgaatcaatttgaaggatcgaaatgagaacattttgcatgtttgtgtgaggcataatcagttggaagctctaaagcttttggtgaatgttatggatggtgattaccaatttgtaaatgccaaaaatgattatggtatgacaattttgcatttagcagtgacttataaacaaattgaggtaagtataaagactattttttttttggaatcttgaatgcttaaaaggaacaatatttataagtatattttttatgtccacgaaattttaatatataattatatatttttttagtttagtcatttttcatacaaattttttgatattatatatctttgtatgttttacaatttagtacctatattttgatatttatgccctcactcttataatattttatttgaatttcatattatatatctttgtatgaaatttttgtctgtgtttagctcatttagctcacagacccaaaaaaatatttttattccttcgaaaaatacacataactattatttttttcattttgaaaaaccacatttttcttaaataatggcccaaaaaaattatttttccttaggcctactcaagttcagggttagtcctgctataattagttgtgttaaaagtttggaagatacaaaattatacattcaactatatgcatgatttgtttcactaatcaaagtttactaatactaacatttttttgttgtcttttattaaccagacagtaaaatttttggtaacaaatactagagttgaagtgaatgccaccaacacaaacaaattcacagcatttgacatcttagcagagagtcaacgaagtgaaaaggactttgatatttcagagtctcttcgatcagtaggagcttcacaaaccataaatcaatctttacttacaaagaaacatattcatgatcatggtactaaaaatgaccaaagtaatagtaacaaccaaaaagaaaatcaacaagataaaacaacaaaaatgtctgaaagctggctaagtagaaagcgagaatcgctaatgattgttgcatcccttattgccacaatggctttccaagctggaacgaatcctccaggcggtctctggcaagacaatagtcc

SEQ ID NO: 244379 - DNA, 1475 bp, Cannabis indica
tgcattattggttgtgtaggaaactatatatacattttttaaggaaatatatacagatatagaaagatctattgcatgtgaagtgattaaacaccatcatgcacatgtttttcctatctctattttatctttctaaattaatatgtattttttaacacttgctgtgattattatattttaattaagtttaatgggtcttgagcttaaatatatcatgcaatcattccatccctagttgctattgcactctataattttataagtctatatatgcacaagttgcaaatatttattaattaagtttattattaattaattgtgattagagtacttttattcttttgtttcctaaaactatttcgacattagtctttcttaattccataacattctttccctattccttctaatatttgaagacaagaatctcaaactctgaccatcaattaagaataaaatcaattttaaaatattatataataatacacatatatatattccaagtatatatttaccgatgttttttttgtaaaataacctaaattaatttatgctataattaaataaccaagccgtcctctaggaaatgtagatgtattatttcccatgaatattcaatcttcatgataatctatatgcaaaagtaagttttttaaatgaaaaaatgcaaattttatttgtaggaatttttaccaatttaacctacacacaatagaaataaatcaagttttatccaaggtcaaaattgacttttcaccctgagtcaaaacaaagttgactccctgttcaatgagtcatacgatagatgactctcccaaaacgcaatatcgttttgatcatgtccaataaccctcataaccctctagacctaggtcatttacactcacacagaccaatcgaaaccttagcagagcttcgagtttcatccaagaaactcgaagactgctatcaacccaaaaaaaactagcttaatcccttcctagaataccaaacagaaccctagatctatacacacagatataagcaattagtaattaaaagcaagaaataggagagattgcactaaattttatagaggttccccaaaatattctgatgggtactttctctttcgagctcgcctcaaaaatggctcgattccactataagatcttcaagatcaatgagttacaagattagattccaaaccacatgattttatttattttttattttttttaagaaaaatagttttattcaattaaaacattattaacttaaaaatgtgtgtcagtaatataaagattagatgtgcacattgggtgaattttaccgagcttcagatgcatagaattagaaacctgaactcacacgtttgtgtgactggatttttgggtttcaatgcgggtgggtcagattcgagttaaactgggtccaggttggttttgaccgggttcaaattgggctgccctttaattttttgaaaaatattattt

SEQ ID NO: 244380 - DNA, 1210 bp, Cannabis indica
cgaagctagaacgaggaatactcatccataaaccaaaaagcttcctaaggttttacaccacttctttcttaattaacctgctagtacacatatcaaaatttaagtcttcaataagtttgagtaacttcataattgataaataataagtggtgcagctgtatttggttagtacaattaagttataatttaggaccaggctttgccatagattaattcatgaacaaaattgagagttttttgagagttagaaatgataattacctaaacaaattgataaatgagttaaacttgtggagataccaaccggcgctactgactattcacccttataatgaatacctgtcaagacaaacaataaagcatccacagatgatttgattagagaaaaatataagcatactgtgacagtaagattttatggaaaagtactccatgtccattgaggctaaaatcaaatgaagttttcatgttccaaatcgaaataccttgaatgcagaaggccttatcaactgaaaaatcaatgcatcaccatccaccaaattatgagcaactgcaaaccctttccacccaccactcagtcctgttttcctggccaaatacactgttttatgttcttcaccatcttcatctattaatgtcatcacttcatctctcttaggaaggttttttctgcaaaaatgaacaggaagtccctgtttgatattcaaaaattacatcaaatacacaaacacaaaaactacttctagtcaagacataatatctaactcaacttatcaataataatattatggcatgcattaccagccagaatccaccagtgacatgagattggagcattgttttaataaagatgggatattcagattccaactcagaaagtagtttctctgctctttctaaggcatttgttctagcttcatccgaagcatatacccggttagacaaatctctatgcttagaaatcctatcatacaaaacaacaaaattagttcaaaagggcatcaccaaacaaaacaaccacactgtttaaaaaaacacacaaatgaatctgtgtcaatataccttctgggtatcaccacacgttcaatcacaacctggataatcatcaaaagggtatttaatttttctatgaataatcagaaaaattaaaagggcatttttctatttgggtgattaaataactcacctcattgtagacagggataggctt

SEQ ID NO: 244381 - DNA, 1545 bp, Cannabis indica
ggtggttggcgaggattttttcgtgggtttgaggctgctatggtggatgttcttcgtgctgaagaagatggtgaaatgaggaagacgaagcaagggttttgatatataaccttatggcatccgttatttggtattaaccgacaccataagtgccacgtgttgactaaaggcggcacctatggcgtcggttaataccaaataaccgacgccatagggttaaccaaaaaccctcaattttcccccaaccccaactgaccatatagatatatataaattttatacctatgatttttatcaaaaaaccgtttctaaatatcaatgcggatatttttacaccttttaacttctttttttataaaataggttgaaaaaaaagaaactaaaagcccagtagtgtggtatttataaatttatttctgcttaataccattttgagctaatatactaaaaacagtaaaaagtatattttgcttgaaaaaaaaaagtaatgttgttctagttaaaataatttttttttatgtgtactattgtaataaacttgcaatcagttgaataaaatttcatgtgtgatgaattgttgagaataatttgagaaatgatatatttgcacagtaaacaaattaatatccaccaaaagagtaaaaaattttgacaccataatccatatgcattaaagttgatacacaatcccaaaacgcactaaacacgtatgggtcccaggtgttagacaatttgcaaacttcaatttaatataatatatccatatttatatacacatacaagatagaaactagagatatatatgatatatagtacagagggagagagagagagagagaagatgagtacgtataaggtgggatgatggaggtgcaatagagaaaagtccaaaaggaataattaattaaaagcgggcttgctttgaagatagtaaccagtgaatgaagctttggagtgtagcaacatcagctctgtagtgattttgagtgaactccaacagatctgaccatgtgaagtcagggtatttccttggcccttctctgcaaaccagatcttttgggggtctcaccactttgtcctctcttgggcttacgaaaaacactaatgacctccgaattttatacctatttaccactgctcggtggaggcagctcttgtatctcccgttcgacaatgcctacaaataaatcattatattcaattccaacgttggatgaataattcttgtttcatataattaaatatatctaaataaatacatatgttgtcaaaaataaataaataataattaaatgcacatacagtctacagaacagtttcatgccactacagtgttgttacctataataatgcaagtatttttagaacttggagtacaacatttctttttttatttttccttttgccacagagaagcaattattggatacattactactttaatgacatatggatgagtacactggtagaattatttcatagccattacattatatcacaaaatctcgctcgaatctcatcctagtgatttggccttattgaccc

SEQ ID NO: 244382 - DNA, 1062 bp, Cannabis indica
atagaaaatatttaattttttttcacactaacttatttttttagtgggagctatagtctccacactcttattagtgtgtccgtcactagtaggtagtaaatataaattggtgcattttttgtacactctttgaatattaaaataatagttaaaaattggtaaaatggttgttcaatttagtttttacacactttgtaccaagctttcatacttctttttgcttttctgtgtttagcagttataaacatgaacttccatagagaatagaaagctaactacagtatgtatatagtagaatgagggtgagaatagacgcgagtgagtggggggagaacaaaagagagcagagggacaatgagagagagagagaatctgaaaataaaaaactaatgagatagaaatcttatttggggggtttttatgaaaagttgggagagattttgtattgagtatcccttatggctggttttgagctgtaggggatacttaataaaaaatccgacctaatttttaagggactatattaaatcgttgagaatactcaattatagttgacgaaaatagtcatatatttttaattgtgacggattttaaaaaattacaaattttaaaccgttagaaattgtactttttgtagtagtgtattttttataatataaatcaactgagattaaatttttaggaaagatttgaggtatacctcttacaagaatgtttcgatagacccttcttatctatttcggcattccagactatttttagtctaatttttttcataatcatgtacggtgtagttattttaaactatatgtaaatttttaaaaaaatttgaataatttacagtgccaaaatatagttcaaagagctatttaccactcgtataagaaaacgtagtcacgcgtttaataaagtatttgaatattatttttgacattataaattattcaaaattttataaaaattatcaagtgtccctaaataattacaacttacacagtcataaaaaaatagattaaaaaactctcctaaatgtcgaacatatgtgtcaactagaatacttct

SEQ ID NO: 244383 - DNA, 816 bp, Cannabis indica
aattttatcttcaataaaaagcaccctcctgatcagatctggattgagtgggctgtagagtttattgagcagcaactgggagtgcatcagcagctgaaaactactgctctctctaaaccagatgcttggtttcctcctcccctcgatgtcttcttaatcaatacagatgcaactttaaaaccaggtgagtggggctgtggttcaagtgctgtcattcgaaattatgcaggggaattgatggtggctgaagtagtgtatatacatggttgcttatcagttcagatggcagaggcaactgctattaatttgggcatccaattggctttgcgcaggtccatccaaaaggctcgagttggctcggattgccaatccatcatcaaagctctcaactcaaacttaaatgtgccgactgattggggacaaatggtgatggatataaaccaattgaagattcattttcagaatttgtcttttacttattatcctaggaaatgtaataaagtagctaatagtttagctaagtggagtcttgagactcaacagtctattgtaatggctgatttgttacctccttgtgctgctgctttttttaatagcagatgtacctagtgttgcttagtaataaaagttttatttcaaaaaaaaaatatatatgaattataattttcacatatactaaataaaaaaaaaaaaaaaaagtgatagtagctaccataatgttgtccttatattcttttatgttagattgcgttactagatttctggtagggaatcgatgagcttatctctatcagtctatctatctatgtcactcca

SEQ ID NO: 244384 - DNA, 1704 bp, Cannabis indica
aattcgttccttggtcctacataatgcgagccacacgaatgcgattagacttggccatatccgcatcatctcgttgagtttagttcaggtgaggttaaaactcgaggagtctcttattgacatcgagctttccttggggaaattgagttcatgtgtccttcaatcaggattctggtctcgagtttctaggtgagaaaaatctcactataacacaatggaattaggtctgtgcaaagagagcatctttagttgagatgccaagcattcgaactaagcaaagctcttccaaatgaacttgttcaaaacgtttaggcctttgttcatattttggatccatttaaccaacaacaataaacaattgaacattaaaacttttaatagcaaggattttaatcacagataaccaaacgctttgtcaatgcatcaaatatcaacatggccaaaagctaggtacaagagcaatactatagtctatagcattaccttttctcacttcaaaacaaaaattattgaaattaccttaaggcaacactctgcaaccgacgtggatgagtgtggtgactgggatgggagaatgaaggtggcggcagcgacgattgtcaattcacctcgctgccactccgcaggcatttgtagctgcaggcctgcagcatagaaatggagatatgtagggttgagcaatcccaaacgaggaaaaagcgaatgactttttagccattttgggaaagtacaaactttaatgttttttttttcggaaagacaaatttttatattttatgaagtgtttgagagtagactaattgaccacaataaaaaagtagttaagtaaagattcttgtttttaacagtgggcacgtcgattttaggtgttcggatccatgatcgaataatttttcgtcaatgacagctcgtgttcggaagtaggttcactatcatgagggaagggtaagacaacgtgttcctaaaagatttgtctggtttcactttttattcttgcacacaaataagaaatatttgattgccagatcttgagagattatcgcatcaagctaaaagagaaaatttcctaaaacagatattaaggaattaatttacaattaattgtccacaattgtaggacacgattttgactaaatccaactgtatccaatctgcttagttagcatatcttttctttcatcgattggacttcacgaagcagcccaagtgtgtaattcattgtaaactccccaacagaagaaaagggaaactaagtataattctaaaaatgatataaatacccaatgaatcctatggaaagggttgaactctcttacaatacatattaaggcatacttgaaaacttacattcattgaattcccaaacgcttttctagctaaagagttacataataacactgagtaatggactaaggctagttcgcctcaaccacgtaaaaactttttgtgtctttcttactttttctctataatttgtttctttcctcagttctgattatttataattagttttccaaaaatttcattaaactttttagtgctttcattgagagctaaaggaagcagtgataccatcaaaagataggggtggcaattcgtgttcgcgggtcgtgttcgtgtcctgtcgagatccatgtataataggtacacactcgacccgaacacgacccgtttaataatcgtgtcagaaaaatgaacccgaac

SEQ ID NO: 244385 - DNA, 2531 bp, Cannabis indica
ataagtttgggatgattatatatgtactatatttggtgttgatgatgaagtgattctatagctaagctaggcaatttgaattggaattgttttaactacaaatagtgacaattaagaacatccctaagggcaattctttattttttttagctaaaatattaaaatatagagttattcttcataatgttactccaatttttccaaaatttcttcagacctaatcacctaagtcgaaaatcgattaaaaacgaatcagacccagtttcgttttctgatcgaggagtgctttcttcgctttcagttcttttcttttggatcccttgcacgtactttcatcggcgagactggaatttggatttttatgttgtttaattttgcagattttcacacaaattttatgttttgggttttggatcccttttatttgactatgatttttgttttttgtccttacagaacaatttcttatacactgaataaccttgttttggaatcgtgattatatcgaagaagacggaaactccccactcgcagacgatcgaaccctaagcgtgtctatataatcaaactctttaagtccacatggccgacgatgattacaacgaagtcgatatggggttatttctctctttctttcttcaaatatataacatcatctgatctgagaacaaactaattcaacgaatcgaatcttttagagctattttaacttgatttatttagacctagtttcactacaaaccctaaacacaggctttgaatttaatgatcgaaactttatatttggttggggtgcggattagaaagtttgaatctcacaactacaagttcagtctttgatagtagttatgtaaatcttgaactatgctatgatgttttgcatttatcatgtgtgtgttgtgttcattcagaaaaaagttcactaatttcagtcacatatgcaataattttgtgccaaaaggtctttagcttagaccagaatgaatattggtacttgagcatttgacaaaagtagtgatttaatgttaaacaaactctctctctctctctctgtattcaattattttcattacagttacagaattttatgattttgatttatgcagttacgaggatgagcccccagaacctgaaattgaagtaagaacttagtttttcttatatggttgtcttgtttttttttttcaaactagaagccattgtttgtattaatatggaggagtgtacaggaaggtgcagaggatgatgtagagaatgctactgatgaccttcctggggacgccattgaaactgaggaaaaagaagaaacagaagctgtcgaacgtcctcgtagaacttcgaaattcatgacgaagtatgaacgcgcaagaatcttgggcacgcgtgccttgcagatcaggtatgaattttatcttaaaacctaagtgttgctgttttttaagggtaattagttgatagtttaccgtgtttgttattttgttttgtgatcttcagcatgaatgcaccagtgatggttgagttggaaggtgaaacagatccacttgaggtaggactctgcaccatgtttgttgttttttctgaatatttaattattgacgggtaaattgcggtataagtatccaacccaatgtttatttttagaggcataagtactcaatgtttgtaaaattataattttcttctagtttcatcggtacatactcctttttgtatttattaaaagaacatttggaagtaactgatactatatgtttctgtctaaatccaatgacctagaatttgagccttatatgtgctctgtttaagacaataacagagtttgtactaacgaaattagaaaaaaaattatagtattacaaatatggggtacttatgccgctaaaaataaatattgattttatgccactaataaacttgaaattttgggtacttataacgctatttatccatttttgacctatataatctgcagttgcagtcatatgcattaaaaattaaaattctatcttttagattgctatgaaggagcttcggcagcggaagattcccttcaccattcgccgttacctgcctgatgggaggtgaggcctgcgacctacttttagtagacattgttggagtttcgactgcgtgcatgtctagtgcttttcgactgttcgggtttcaaaaataaactaacttgtttgttttatgactgcagttatgaggactggggtgttgatgaactgattgtggaggactcatggaagaggcaggttggtggtgattgaagctactcacttggtcatggagatctgtatcattaggaattttctgaaagtttttatatggatttgaacattttggtgcttagaatttatcttttgtacttgtcaaatctgataatgaatatgctaatgactagggaaaaattatatttaaacatacaaaaaaaaaaaataaaaaaaattgagccctccatcttctacacctaccgacaaaatctatacaagaataccataacaattagaaaacatccatattaatttcag

SEQ ID NO: 244386 - DNA, 1299 bp, Cannabis indica
cagtaattgtaattttgttagagtgttaaatctttataaacaaataagtgatataatgtaaatgaatattggcggtaaaatcactcgaattttacgttttgtcatacttaaccacataaactcaatttataacagcaaaacctactgaacccccattctattttgctctttacacttccgttcaaaaacctcagttaagtgtcactatggactaccatatgtacacgtagtaaatttttagtagtacacgtaataataattattaaaatattataaaaataattaaaaaattattaaaaataaaacaataataaaaaaatattttattttattttacttttttcttttctttttctctctttcttactccaaaaattattcaaatcttctctctctccttcaccttcactctcggtggtttatcctccaaactcgactccggtcttccattaccggccagcaacacgcgctacacgaagagaacgaccaccctttgaaacgtccacccgtgaaagccctacttgactctagtcaccaacgaggagaacaacttagtaaaagctgcggaccgtaaaaccttgaatggatttttcggtgagattctagtaccgttttggatagtgaacgacactgttaaactcgtgaggtctaagagaacaaagcccatcaatagattgggcttgaagatcatcgaaattaggcgttgacattcgccaaaatccatagagtttcgagatgtttgactctgatccggtggcttctggatcacctttcagctaatagtctccaaatatgtgttcttcttggcatgggcttctcgatcccatggtgcaataccccttttgtcactatcgaacttgttcaaccatctgcatggtggttcaacggtgatgctccatttagagttttatttttattttgaattttataggtgttgatttgaatgttgaaatataatagtggttcagatttctacgattaaagctttgcttgttgcaaggtaatccaagctgagatccattaattttagattaggtttgcttttacagttcgataacacacgctcatatatataaatatatttttacagtttgtttgtctaatctatacatcaaaacaaaataacatatatcttcatttatttttgaaatgacccaattcgttgcttatcataatcaatcacattcaccaataatttaatgaatttaacttgtgtttttccggtgagggtgtggtggtcgtgtaatggttgagtgaaaatatttttttaatttaattttttatttaaaataatatttt

SEQ ID NO: 244387 - DNA, 2398 bp, Cannabis indica
ttagatataaattgtcactaattataatatatatcttattatttttatcattatgttatgttaaataattctaatttttatattattataattaattaaaaattaaaatttattagttaccaaccacattggatttcctcacaacataacaaattgaccatatatatctcaattgtttgcccgctcctttggtctctctcgtttttggtttgtagtgatcataatggcatgttatgttggttgattagcttttgtagcattttcaattacattaatattgacaaaaaaatatacttaatatttagattttagtgataatttacagctcaagttattgaaatgtatatgtaaatatattcacatgaaaatcaaaagtataataacgacatatatatacaaatacgtacggtgtatatgacaaaaaataatatatgaagagtgagagagaaagattagcaagatttacatacaataatttgctagctaatattgtccaaaacctaatttaattaatgactaataatgagtaaattaaaatcatcactattcaagtcattgtcatcatgtgtgtatgtattttataattaataacgtttccttgtaatataattggccaattgacattaaaatatttagaattgtatttttcaatggtttacatatatacacagttattatattaacaataaagtccaatattaatacattttttataaatgcatttcatgtacatgcagacctaaaaacttttgtcagcaatagcaaaaattttactaaaaatatgtaatacactctttagtattttggcagatcttattttgatatttttttagtctaatttttgttttttcatcatcgtgtatgttatagttataaaaattcttaaatattatatttgaatctttgacttttcaatttttttttttttacatttttaaaaaaaatctaaaataaatatatatgtgaaagatataattaatattaattagaaacgttaacatttaacagataaaaaatgattaaatttacaactgtagcaaatttatataaatatataattaatactgtattatatagtctatgtctagtataaatatatccctaccatataatatagtttgtataatataatcattgtatttattatatatatatagtgaaacttgtatacttttttaatattttcttataaatattttattgtgaccaaaaataaaatttaaaccattttcttactcaagtgaaagaagcataacatctatattcgacattttaaactattcacaaattttgaaaaatttttgtaaagttcattgtaataaactttgtcctaaaaactaatggagactgaaatactttaaattatgtcaattccaaaatataatgtactataaatatatattttttaagatgaagatctatattaattaataattatagtacacattcaatccgtttaattaaattttgagtaatattttatatactgtaaatagagttaaataattaattgcacacatgtaaaaaagcaagcctgcaatgtttcaaccatattattggcatgataaattattttaaattttatttcaaatacaatgttcactataactacaatacacataaaaattatatatataaaaaattaaagtataatttctctaagtgctaaaaaatagagatgtgtatctcaatttatatatactacaaaattagtgtccttactatagaattttcaaatcaggacttctttttataagtaaactataatattgttactttggtttactatgtagtaaaattattagtcaaaaaaattataaattatcgtatttaaacaataagttttttataaataatattaatttgttgtaactaaattaaaattagtaataaatattgtatctaaatattaatttttaataacaaatgattttttgttgcgactcaaacgttacaatagagaggttagtgtattgtgaagacggcttcggcccctcccaaaatttttatttataaataaatttggtttattttttgtttactaataacttttagggttcctagaatgagtcaataaaacaaaatatagtatttttacatgcatgcatgaaaaatgataagagtgaaaatgactaacagagtaaatacaaaaataaaataaaatggagatggatcgatgattatcatgaggggtagtgtaggacagaagatcttggtccaaattaaaatatcaaagttgtcctgtacactatttaatttactatatcttaattaaatatttgtctacgtaagtgtaactccaaaataaattaatttaataattaacaatgtgtaagcaaggattttggtccaaatcaaactcaataatgaattggcttagtcttgatctataaattag

SEQ ID NO: 244388 - DNA, 2442 bp, Cannabis indica
tttactttctatttttcagtcggttctaccaaagacctaattgtttgtttctttttattattttgacctttgtgttagtacatacttcatcaattttctcttccaatcatattaatgattattcctactacaattaatctttaaaagcagagactgtgccttaacattctgcaaagaaaatattgaagatagctctagtttcacttgtataagaagttgtttgctagctatagctatctccatccagtcatctctttcgcagctggtataattaattaacaactatctatgataattttcatgatcatcatctttcttgtttttgttcccactctactaaagataaataaaatttttattacaacatcatcattattatgtataatattattattagtttgatggtaattaaatttagtatacatgcaaaatctaactagtacttattgtgtacgtgcgtgtgggcggaggtgaatgcataaatatccaatatatatagtatatagaattatcatttttattttattttattttattttttcaataaaaaatcattgatgtgattgataacttgtagattacatgccctacatgaaaagccgaacagttctattaattatacatcttattatttattgaaatatagtatctaagattgtcctatttttggctttccttttatcaatttcttatggtgctatggcccttatattgagtcttttgagagaatattagaaagacccacaagggagtgtgtaaagggatgtttaatgattggttaggcacgtaaagttgtaaacccaaattggtacgattttggattaattagctagcaaggcttattctcttcaccaaatccttttgtctcaaccttattaattaccttcaacaccatttcagctgccaaataagtctcgagagaaagggctctctagctaactagtacttgtactgtgtacgtgcgttggtttgcaggtgcattaataattattaatttataattaatcatgagtggaagagttggtgatgaattccaaacgaaggaaatagaagcatgtgaccattcaggaaggctaccatatattcacaaggtgggaaaacctcccaagcaaaacctgctcaaggaaatcaccaatgttgttaaggagacattcttttcagatgaccctttgcgttctttcaaagacaaaccaaagtcaaaacagttgatgctctgtgtccaagcagttttccctatctttgattggggtagggactatagtcttgccaaatttaaaggagatctcatttctggcctcacccttgccagccttgttattcctcaggtactacacttacaaacacatgacttttatatctatatattctacatacaagcttcttctaatagttattttttgttatatactaggatattggatatgcaaagcttgctaatctgcctcctcaaaatggattatgtgagttttgtaattttgtcactggctagttagaagagctagctttgattgaatttctttttccatatatatactagttacgtacgtgtgtacaattaattgtcaatctcaacatataaatatatatatgcagatagtagctttgttccacctcttgtctatgctttcatgggaagctcaagagacatagccatagggccagtggctgtagtgtctcttttgcttggagatcttcttcaggctgagattgatcctaaagatgccattccctatagacgtctcgcttttacagctacatttttcgccggactcactcaattggcacttggttttttcaggttaattatagttttcaaatatattcataattagtagcaaatactttttcttcttttcttgattttactggctgccttggatcctgctgccatttcagattgggcttcttgattgagtttctatctcatgctgccattgttgggttcatgggaggagctgctattacaatttcacttcagcagctcaaaggtttgcttggtatacaaaagaaattcacaaagaagactgacattgtctctgttatgcgctcagtcttcaactcagcccaccatggggtaccaatgaaaatataactaattttaatttattattttgtcctactgctactattttagctttagatatgaattataacaatgttttcaatcaatttatatttccttctacagtggaactggcaaactatagtaatagcggtcactttcttggcttttctcctggccgccaaacacatagtaagaacaatccaattccacatgtctcttcaaatttttgttgcgtatactttaaatattaaatactcattctttttaattaatttttttctaccttgtttggattggacgaacaggggaaaagaaacaagaagtatttttgggtgccggcagttgctcctatgatctctgttgttgtgtccactttt

SEQ ID NO: 244389 - DNA, 1432 bp, Cannabis indica
ttttgttataattttgtaggagttctacaagttttgttatggtttcacagattttttttattatttttttttatattttttcatatagtcgaaacatgtttaataggttttataggtttgaacttgtttcactaggtttacaagttcagaacaggtttcacaggttcgatactggtttcacaggttcaaaattggtttcataggttttaaggattatgtcatggggctgctccattttatgatgttatcgtatattttttattttaagttttttttttttattatttttattattattattattattattatttgagattattatgtgcacattatgtgcatatttatgagctatcaaaattatgctggaactatgttgttcttagtttaattatagtttttcttttgataaagatcgttttaattattgttaaatgaagcactacaaataaaatacaataatatatatgatgtatcattatagaataaaatcccttttttaaattaaaataaaataaataattgaacaaaacctatatattgagccacacctttatatacagcatagatgatgattatataatactccttaaaaaaatgatactatactactaattaatatggtcaaggatttgatctttatttaattaatcatagctcatcatcaaaagagttgtactatataatatagtatatatgaaaaatattaaaatgaattagtgatgcttaattaatttttttgggtgtgatatatattggtataattaagtatatattgggtttcatataatttaatataataatttttagaaaatatcgctaaccaatcacaaaaaatacgtctaaaaagtactatgcaccactggtaccaaataattaacaatgttcatgtagtatatatattatcgatatgtttttagtacttcccttaaagaggtgttcatgtggactctcgatctgttttaacatttaagagattttttagtttattttttttcatgattgcgtatgttatgactatttaacactatttgtaaatttttaaaaatttttgagtaatttataatatcaaaaataatatttaaatatttagttacaagcgctacttttttatatgtattaaataattgtttaaaccttattttgacatgataattatttgaaattttctaaaaaattataagtaatttcaaataagtacaaagtaaaagattataaaaaaatgggtaaataccattttggaccctctgttttacaaaagttaccaattggaccctgtgttttgttaaatgacaaaatggaccctgtattttctaaataatagtacaaaataggaccctgaattgattttttgtcaaaataagttaatataatccgatctaaaaagtgctatagactaaaactgttttacattttttttgtatctgttcgt

SEQ ID NO: 244390 - DNA, 688 bp, Cannabis indica
tacagtttcacggaattttaaaaataatatacaacccaaaaaaaaaaattacacaaataccacttatacacaccttcaacctaggattcatgcttcctatacaactatcgcgcaaccacgcagcaacctaacgcaacccaggatccatacttcctggacaatcatcgtgtaacaatcgcgcaaccacctaacaactttcgtctgactgaaatattcatctgatgcaatttttagccaaccacccagcaaccaccctgtaattatcgtctgattgtgtaagtgatagtataagaggtattttggtaattaaaagtacataaaaatataaatgttgtctatgaagatatttttagaataatgtgtcaatttatatttttcatgtaataatttttaaatatatgtatatatatatttacagggcagcgcagtttttaggcggggtactattttgattttcctatattatagtatagtgttttcagtatttaagaaattataatcatttttttttatatataaggatatgtagaatgtagttatatttaggggtgttcttctaatttaatatgtactattttgctcatagtacttccaattcgcattggattttatttttgggttaatttcacaaatgcacaaaaacaacaaaaaaaaacaaaaatacggtttcacggaattttaaacattt

SEQ ID NO: 244391 - DNA, 1268 bp, Cannabis indica
ggttagatggttttttgcaagtaaattgatagttgagggggttttgccgcaaattactcttttttaattgaataattaaatttgaatttgaacttaaaactcgtataattgatcacagtttgattgtatttatcaaatttgagtagaggataagattttattctattcttaagtaaatatttttatatataagaatatacttatttgataccttgtattttttaaaaaatatcgaacaataaatttggtatttttgtttttaatatgtttagttatagtattttaaaattatacatatttaatactttatggttaaatttgatcaataaaattatattaatctaaccatagttaaataattaactttgaatataaaacatataaataaaaattgatcgaatttgagttgagatataacaaataaaacagagtgcaattttttattaatattattattatttcttttccataagtcacataaaaatatgggatatgaccacttaagttattgggtacttagtttttttggttgaattttaatgagaatgttatagtaaaaagaattgtatggagtagaggatgattcttctagtttattcatttattttgaaaaaaacaatgaatcaatgatgggattgagagtgtaaaaaaagatagatagagacagcatgagagttatgtataaaaaatttatgtgattgattgagattggtgtgaagagtgagtgagtgagtggggctactttgtctcttttactttggtgatttttccttttagtcaaaatttgagatacccaaatatgaattcttatgatttgtgtagggacagggaaaaatcacacagagaggactgtagccattgctgttggaggggttgcagctttgggttttttaattgtttgtttattgtttgtaagatctgtcatgaagaaacgtggtggcaagcaccgaggctaggctaagaggttcatttcttcatatatatttactataatattatatacttctttaaagtttagatttttatttgtatatgtacatatatggatatatatggttatatcatcatagagaatagtatataataatataagataaaatataaagaaaagaatgttatcatgcatagtattgagtgcactagactagaaagtagatatgttatataatgtatatgcagggccggtcctgaaaatatatgggtccaaaatgaattaaattttcgggccctaaaaaatatataaaaaaaaattaaaagaagagtgttat

SEQ ID NO: 244392 - DNA, 689 bp, Cannabis indica
cctaataatagttagaataaagttgttattgtgatcatgacagagaatatatactcaaaattagtaaggaacgcgataaaaaaagaatatgtataattttttttgacaaacgaaacattaatctcggtaacatttaaaatgtagttttgcactcttttaaagcgcttctataattttttggagcttctatgattaattagtcgttaataattgatttttctaaaacccggctgattaacgaatccacaaaaatagtctactcaagtggttgaactcaaactctagaatacacggcaaaaacattttgactagcttggtcgttccttcctcttgggacattaacatgcttgacttggaaaaaaagaaaaatagggaaattaagaatagctcaaagagttggtagataagtaatatactgcacacacaaatttcacatattattaaaataattcaatcaatctatctttacttcaattttatttacgatatatagcttccactttataaaagtaatttgacatgtaagtgtgtaatttattacttactcgttattaatcatatttgttaagcaaagattgaagattcataatatgaccaaccattacttttttttctttggccgttttgcttcacaaccaacatttataacatagaaagctttactactttattggtttgtaggtgtgcaa

SEQ ID NO: 244393 - DNA, 995 bp, Cannabis indica
ccaaactacttgtggctaaacacccactttgtaacattatgcgcaacaaaattagaaactctactaatactagaaaaaatacaactaacaaacaagggagagatcctattatataaagagaagaattgttctcaagtgcccaactagactcattcccattaagagtattgataaccacccttgagtttgcaactggtattaatagctacttccaaagccaagcagcagggtaactgcttcccattaaaaagcatcagaaaactctaaccatgccatctgtacccacacaccatcttgccaagatggttcctaacttgtcatcactgtagtacacatgctatcaaatcctaatttaacatcacaatctagtttgagccaatctcgaggagcaggttgccaaacatctaacaaactcagagcatgagtagggaaaagagaagcaaaatgatctgcataagagatacgaatagagtgaatacactatttccaattgtctagcttatgattttgtaccttgtcattgcggacccgccacatagtgttgacaataatcgaagcctaaagaaaaacttcatttgcattaatgttggacttttttaagtcccatagaagttgaatccagtcccacatttgaatgccagtaccaactataggaaagatactccacgaagaggaccaccacaaatgatcataaacctcactacaaccaccaaaaatagataaatcaccacaaataaacccaaaaccagctcaagaacaaattctatcaagcttaaaccctaacgaaaacttaaaaactcataccaaaacaaggctttgcttccaaaaatttaatagaaaggtgagctagggttttatcttgaattggctaaaaacttccttctaaattcttgttgaaaatcccgctgaaaatggttgaatttggtctggtttttcttgggttaaggttaggtttaaattgagggtaggttagatttaggttgtataatgtttat

SEQ ID NO: 244394 - DNA, 464 bp, Cannabis indica
aaataaatttaaaattagaggtaaatttgattaattgatgaataaaagaggcatttttcaacttatcgtgtgtaaaaactccaaaaatagccccaatgtctctattctgtctatgggttcaatattagttgggccataattcagcccatcagtgcctgataatgggctaaaatctagcccaatatttgattgggctccaacatttggggtccaaaagtagaaaaaggaagatgaaaatgaaactcccgcctactctttcacaactgtgcagaactcccgctatatttcatcactctgcgaaactccggctactcttccatggcgccttgattgattgagctgtttgtttcagtggaaagtgaagaactgaagctaagctaagtggcctgagcacgaaatttcaactccatgaactctcgcgacctcactcttctttcttcggctaccattttcggtgccttagc

SEQ ID NO: 244395 - DNA, 782 bp, Cannabis indica
accatttgttttggtcatttgaaaactctggtgtgtattctgtcaaatcagcgtaaaatttctgcagaaacaaaaaaataactcgtttgatgatgagattgctgccttctagtgcaagctgtggaaactgaaactcccttcaaaaatctgcaatctgctgtggtgggcgtgcactcaatgtctgcctacaatgatacagctcagaacaaagttggttgatgttaatgtgctttgtcccatctgtatggaagaagaggagagtgttttgcattgtttggtaacctaccgtgttatcaaacagtgttggaatcgagttggaataggcacggctgtcactcctgggattggttttctttactgttgtcgtcgcgtgtttcagtatgctaccacgaatcagtatgtacaatggcaactatttgttgggctatttggggtgcccaaaatgacgtggtttggaatggaaaaacggttcatcctgagaacattgttgggtttgctaaaaagtatcttgatcaatggaaaaatgctcatcagtcggatcccgatacgtctttctctgcttaccaagcaggagatggaagtgagcattggtgtcctccacatggtgatagtatcaagattaatgtagacgctgtgttgttcgaaaagggtcgttcctatggcttgggttgtgttgctagggacacaaacagtgtgctaattgagggacgtacatctctattttttggagtgatggaaccggcattagcgggggtcctgggaattaaggaggcacttagttg

SEQ ID NO: 244396 - DNA, 2264 bp, Cannabis indica
aaaaaaaaaaaaaaacaaagacctagatcattgatttcaaactatgaatcttagtttaccaattatccaaatttattctataatttgtagtttcaagaatcctaatgtaatctattaaactctctcaagtgatgatacaattaccttaattaactaacacaatatatctatttaatattaatcaatcaagcaataatcaagctatatgattctctttaaatgaaacccataaaattaatggaatctctcaatctcacaattttcctatgtcatgtaattctaagtctgattttagattacctctctcaagtgtaaaacataaaatctctttattaattaatggtgatcacacattaacaagataataattaatacaaaatttcataaacaaatagcaaggataaatatgagaataatttaaaaactttaattcataatctaaaacaatttcatcaacattttagaatgagcgtttagttcataatgataaacataatcacaacaataatcatgttcataatcaaacaactaaacataagaagaagaagaagaagaagaagaagaagaagaagactaatgataattgatgatgatttctcagaatctcttatctattgctcttcaatgtattttctaatctcaaagtttctttctgtatctctctagccgtccaaagtccaaagtacatctacatcatttttttttatataggcttataaatagaaaggatgccatttagaattaaaatttgaatttgaaaactgcgttaggcaacatgtctcctggaccttatcttttggatcccctatctttttgatctgtcacgtgcaaagatcactctatttcgtaattccgtaattgtggcgacacgtcacctaagttaaagtgacatgtcaactgaacttagttaattgggggttcgcatatctttttttatctgcacgtgccaaaattttgcattttttttgtaagttgggcgacatgtcgtctgcaacatgactacttcgaccttgctcagtaaaacatgcataacttttgcatccaaactccaaataagatgatttgacatgtttttcaaagttaaaaaaaactctttaattttttgattagacaagctctttgagaaaatgatgagaacatggttaaaaattagcttaaaaatttcagtccatcataaaattatctttaaaatacaaaactgcccaaccaacaaaaaaaaaaaaaaaacacatcaaatctaaactaaattttaagaaataagaaacaattaatctgattaataacgaggaatgagtgtagaaatgtaccctcatcaaaatcaataagacttttatagttttattaaaataatattgactcgtggactagagatcattattcattgaactacataaaaactatggttttattctttgtcgataatatatttcttaagatttattatattttatcaatttttaaaaatctcagtaaatagtttggtattaggagtaaatgtgggagaagaattgagagagagttggttattaaaattactatagtattcatattagtatatatatattttttttaaaggataagtttagtatttgatgtatttattttattttttcttaaatcttagctattgagattttaaaatttggaggaagaaagtctccctccacctctcctcccacttcctttctccctcctaccaaagaaagaattctacatctccttcaactctcttcctccacccctttccatcacaagtttattgaattttcatcctttgtaccctcgatccatcttactctcctttcatcctaccaaacatgaggaattaaaaattgtgtatttgaagggagagggtttccctccatctctcctctcccttcctatctcctttccaaacaagagaattcattaatcactctattcttctcctcctcctctccgaagtgtaaattaaaagctacttattcttttccttactttctatttattttatataaaaaaatatatagatattttctaaaagacatatagatatttgtttacattttttctttcatttttcaattattgaactttcaagaaaaacagataaaataatattaattttttaataaaatgaaaaaaaaaattaataaatttacgttctctatcaatattcaataagtacattataattaaaaaaaattaaaataaacaattaaaaaagtaataataataagataaaaataagtataaacatattatttttgaaattaaaaaaaaaa

SEQ ID NO: 244397 - DNA, 1565 bp, Cannabis indica
acaaaagaaatcaataaattgagtttttcttgagttaattgcggcaaaatattcaatatttttacctcgataataattaactcctgaaatttaaattttggcagtaaaaactctcaacgagttctattaatagtttaccattttcatctacttttaagtgttaagtgttcgatgtgaatggaaagtaatgccttgtaagaaactttcttagtcttccattgttatctttgcaacgacgttctccacgtgtcaaacaaaattccaatgtagcattctatttctagaaaaatggcgtaagggcggggtctattattgttgctaaaagaattatgagtcagatgtatgacgtgacatataagagaaaagagactgatgatagaaagtttctaaagtgagcgtactttaaaaaattttgattaaaaaaagggtaaataaaacgaattgtaattggctaaatgtattatgtgaagtaatagggaaactacttgtgttaacccattggacatgtcctaatctgcacaacaatagactttatcctaggataaaattgcacaactttactttcacctcatagtgagacttatttatcccatgttaacaaataatagttaatacacttatttatcactttcaagtgcattaacttaaccaagaaagtttatgcggagtatgattgtaatctgaaatctgaatcatgatgtttgaagttttgaatatgtgtgtgatgggttattctttgaccatatgcacattgcatataattgttaattcattggtggtacctaacttgttatcgatcaagggaaacgaagatatgcttgctttgtgttttttttcttataattaagaatagctaaagcaattaagccagtttttctttcatggggtacaagtacgtacaacttatcagtatctattatataaatatatatatatatataaatatattccaattttctaatatcaccatttgtgactcaatatggaaaataaaaatctggaagagtggcggagattgctctttttttttaaagaattgtctcgtttgtatgaagcatgttacgaaggtacgttaattttttttttcttcttctttcttttattattaaatatattttctgaaaacaaaggttaattaattataagttgttcatctttatatacctataatcagggtcagctctgagttgaaataagttataatcaaaaaaaaattttgagcccctaaaataagtgggccttaagcacaggcctagctcgcctatacttagggccgaccctgcccataatcatttctatttttagtgaatgtagtacttttatgacacacctaacaatatgtaataaaacataacacatgatgacaaagttaattttttttaacaaattacatttaatttaaatgagactcactattttagaaaatagtgctacattattaattgtgcaatattttgttgcatatataattgctcaatatatagataggttgtgttgtgttgtgttggtaatgttggaaagcttgatcaaccatgaatgagcatgcatttcttatgtttgactct

SEQ ID NO: 244398 - DNA, 2893 bp, Cannabis indica
tgactcttcttgttcaatatcatgttatggatacaagaactgcttgtatagcacttttttttttctcaaagagaagttaaaattatatgcaaaagaaaattcattaaagttctgagctatactgagtctctagtgtttatatgcctatgagcatatataaaaaaagatccttccttttacatctcaactaataaaataagagaacagcagtttttacaatttgaaattaagggtattattgcattaaagtgtaaggagataattcctctaaaacattttgttagcatcagtaatgaagttcttttattgaatcacacagatacaagctttgcaatcaagtgtggaggaccacagatgttaggaaatgatggcgtagtgtatgaagctgaagagatagttcttggccctgcaaagtttcaagttagtggcagagagaattggggagttagtaaggttggtttatatggtgataaaacaggtaaactagatattgaaggaacccaggaacaagtcacatcaaccactgagaagccagagttcttccatactgcacgaatgtccccaggatcactaagatactatggtctcggtcttgtgaatgggctttataccgtgacgttgcattttgcagaaattggttttcctaatcaaagcacaaacttgtgggctagtctagcaaagcgtgtgttcgatatttatattcaggttagtttccagaagaagaagaagaagaaataagattttccatatttgtgatcagctcaaataatctaaaagttcttcattttcttcttagggacgccgcttagagaaggactttgacatatctaagaaggcaggtggagttttgaaagcaatccaaatgaagtacaaagtcaatgtgacagagaactatatcgaaattcacttgttctgggctggtaaagggacctgttgcatacctaaagaaggttactatggtccattgatagcagctgtccatgctgaggcaggtaatgtgtacccttaatctcaggtggttcaacctacttcaaatctcctatttgatacctgaaaatgttgtgcatattgatcagatttcaaagtatctaaaggagaaaacaagaagaagacagggataatcgtcggtattgtagtccctattatggttgtcggtctagcattgctactattagtattttacaagaggagaaaatatgatgaagatgatgatgaaggtataagtatattggtaggatcagatagcaaaagtcaagtatattttatgtgcatatcagtatttacatgtcatattcttgcaccgatttgcagaacttcttggtataggccccaaaccagatacttttagctatgcagaactaagagctgccacaggagacttcagttctgcaaacaagcttggagagggaggatttggtcacgtttataaggtattatattttcttctagttttcaaacgataaattttaatatttaggtgtgattgaagtgatttttaattattatggattatatttagttcagtttaacattttatcaataacattgacatgtctttgtagggtacactttcagatgggagggaagtagctgttaaacaactttcagtagcttctaaccatggaaaaggtcaatttatggctgaaattgccacgatatcagttgtacaacatcgaaatctggtgaaattgtatggatgttgcattcaaggaaatagacacatcctggtttatgagtatcttcataacagaagtctcgatcaagcactatttggtatgtagctattcagttatcttatactttacaattcaattctgcaagaacatattgtgtattgcagtcttcgttgaacaattgtttctcgacagatatttatttctgagtcagtaactaataattctttatgatatagttattcttataatcatttcataccattggaaaaaagaaatcactaaattgctaaccattgcaggaaagaataatttgcacttggactggcctacacgattcagtatatgcttggggacagcaaggggacttgcttatcttcatgaagaatccagtccaaggattgtacatcgagatgtcaaagctagtaatattttacttgacgatgcactttgtccaaagatatcagattttggattggcaaagctctatgatgataacaaaacacacatgagtacgcgagttgcagggacaatgtaagctcttaaaccaactctggtggaaatatatacttttgactattagttatggaactaattagattatatcaaatgttaaaactcgtaatctggaaagaaattgccctgaagattagaattgatgtagatgacaacatcactaagacatgttttatggtgttgtagaggatatttggctccggaatatgcaatgcgtggccacctgactgaaaaggcagatatttttggtttcggtgtcgttgctttggagattgttagcggcaaacccaacttttataatgaaggcaacgaaagtatttatctccttgaacgggtatgaaaattaaattgccatgcattttgttcttgttactctgtccaaaatgagctacaagtaatattaagagttaatcacagatgcaaaatttaatctgtccaatctgtttataggtatggaatttgcatgaaaataaccaaagtttggagttggtggatccatcactagtcgagtttgatgcaaaagaagctattagaataataagagttgctcttttgtgcactcaaggatcaccattaatccgcccatcaatgtctcgtgtcatcggaatgcttacaggagatagtgaaattgaaaatgctagatcgaagccaagttatcttactgatatggattataaagatacaactactatgagtactatggg

SEQ ID NO: 244399 - DNA, 955 bp, Cannabis indica
taaatatatatatataagaatgttgttattgatacaaaagtatattagtagataaaatgtagggccatagcattaaaaaaagatgatttatggattaaatagattcatagagtttacttacaagatacagattggtgggactactcagcaacattaatttcagctagaacatttttacatcaggggtctaccgatctttgtccgcaagatggaagagttagatagaataattaagtatggaatagatttaatagccctaaacatgctgtgattgttagctgtctgttcaaaatagactaaaaactcgagacagattactcaaactcaatatatattagaattcgacttgttttttgtgtggtttgaatgagaaaaattttaaccgtctcttttttaattgtcatgtgagtatgaaatgcataagggcaactatggattggatggattgacacaccaatgccagctctattgtctctttatatatacatgtggatagctcagactaagatgagccaatttaggagaggttttttattcagctctcttagcttctcctatatatcatttgtggagagttaggaatgaaattttgtggtcgcaaaagttgacaaagttaggcataaacataattgtaaaaagagtgataaaaagtgtaaaagtagaattttgccaatttaccctttagtagggaagatgtattgtggtttgagatctgtcaattaaggtgaaatgatttatagtattttgaggcccatttaaatcaggtgatgttaggaggtaaggttgattttttcctcattccaaaaaagaaaaagtatatcacaaataattagttacaaattaataagtcgagaagaaaaaatgaatcaactatagcatttggacatatttattaaagaaatttatataaaatattatttttagtaaattttttacacttattattattattatt

SEQ ID NO: 244400 - DNA, 1078 bp, Cannabis indica
tgtaagatttgaattcatcagaagactatagggaaagaataaaaatatttagggaggagaaaaaaaaaacagattagcgttttttattcaaaacaagagaagctatactaagttaaatccatttgtgctagccaaccgttcgagacactgagtgaatctaacaaccacaacaatcagagtaacaaactcctaattgggtctttggtattagaatactgagatttttttttggtaaggagttgtactgggattgagattaagtaaatttcaaactttaaatacttataagacacttgttaaggagttgtacttataagacattttggtaaggagtttggtaaggagttgacacttgttgtgtaatttttggagatttgaaagaaaatcttaaaacacactagtgttagaaaatcaaatatgggtctgccttttacgagaatgtcccacacgaggagcaaccgggcatgctccctatgcgccagccaactccacgcgccaacaagatccttgcaccccagcaactccccgcaccagctactcccaacgtgcgcacagctccccgctccttgctccctccttcgtcgtacgcaagcgggagctccccgctcccctctctcatgttctaactctctatctccttattctctcaccccatcaccctcttccactcactcccccatgctccacacctagacaaggagactcgcatggaccaaacacacagttaaattttttaagtgttatattcacatcatgagtgcaaactataaagagggggatgaaaagggaacataaaacaaaagataaaattgcatgcacgcctctaaggaagaagtagttgtacgagtagtggagatttatttgtctcactcggagtcctaactgacacttgaccaccacctccccactacccatctgatgcactagtcttcatggtacaaaataaattttgtcctaaaaacttttgagatcacttgtattttggagccactagagttccttataaatactcttctctttcaatggagaggaggtttgaaaattaaataattacttgtaagagagctctaatattcaa

SEQ ID NO: 244401 - DNA, 899 bp, Cannabis indica
tttggtggtattctgaatattcagcaacaagttgccttgataagacctttcactaaagctgatgtcaaagaagcattctttgatattcattcgaacaaaagccatggtcctgatggctatggagctggcttttataaagggctttggaatgaaattggtgagaaaatttttatggttgttcttaattttttccaagatggtataatatgcctagagatctaaatgaaacagttatctctcttattcccaagattgataacccttgtacacccgcggattatagccctatagcttgttgtaacacacattacaaatgcatttctaaaatgtcgtgtgctcgacttgctgaggtgctgccatttctggtccaaaacaaccaaggtgcatttattaataattaattactggctcacaacatattgatctttcaggatttgttaaagggttatacaaggaaaaatatttcagcgagaactattatgaagattgactcagtaaggtttgtgacgcggtggattggcaatttgtttatgagctccttaggggtcttcgcttcccgtctcacttcatcgattggattttaatttggtctgtttgaatgggatctcctactctcttatgctcaatggtcatcttcatgagtttttcaaagaggacaaaggtctccgttaaggggatcctatatctctcctctcttatttgttttgatcatggaatacttgacccgtttgttgatccaagcttctcattccaaaggctttggcttccattcgttatgcaagaatatgaagcttatcaacttatgcttcgtggatcacctagtgattttttgcaaaggtaatactaaatctattcaaattctccaataatcattagttttgtaactctacaggccttgc

SEQ ID NO: 244402 - DNA, 896 bp, Cannabis indica
aaggcctaagaaaagaaaatcacacaccaataattacataatacgccagcttctaataggtcctactacactcctactacaccttttttttcatcatttataatttatttttcttttttcttataaaaaattaaattacaagttcaaattgtccttaatgagaacatcccaccaccacagtttcatactttgatgggactaatcatatattccttacatgtatgattgccatctcaaattcttaaacaaacatttccaaatcacacacattacattattattattattattattattattattattattattgttattattagaggattcctaattacaatctcttagttaagctacacgttaattatattcgttatcattctgtaaatttttgaaaaattctaaatagtttacagtactgaaaatagagttcataatattctagtttaccacatgtattcaaaaaacttcaaatttattttcgacactataaattattacaaatttttcaaaaatttaatgaacaccattataaaaaaagttaagaaaatatttcgacttgtatttttaggatcgaaaactaataaaaaattgtaataagaggttaataaacgctcctctactgtttactttaaataagttctccttcctttactgacaatatttttcatgttctttataccaatcatagtaaagaacaaataactacctaattatattacactctttattattgggtctttttaacaaatatataagtatcaagcaaatgatgtttttacaatacttcaaccaataaaaaacaaatcatgggtatgtatcaaaccaaaaaatctcaaaacaaatcagtctctgtattattattgggtattttttaacaaatttaagtatcaagc

SEQ ID NO: 244403 - DNA, 571 bp, Cannabis indica
aaaaaagtcaagatatatgcttatattattaaaactcaaacaaaataacatgagaaatcaaattttattgtcatttaaaaacaaaagaccaaaataaactaagaaaagaaaagttcttgatgccttattaattgaaatcacactaatttggattactttctgagaatttttataaagaaaagcatatccaagaacagatcactttaagtcaaaaagaatgtcattcaatacctcatcattattatgatttaatcaatataggctattgacatggaagatacaaaataaaagtaaatataacaagtttgtttaaataataataatagtaaagcaaacacaaaaatccattaaaaaaaatcatgctttgaaacgagccaccaaagaaacacataaaccaaaatttatgtaccagaccaagcttcaaaatgaacaataatatctctatctctcaataccaatgtctgtatatataatatgtttcatttacaagactttagaacattattcagtttaaaaaattaacccaccaaccaaaatccacaaattgagtttcagatgaacattaacagaa

SEQ ID NO: 244404 - DNA, 4375 bp, Cannabis indica
attttcttataaaaatacatgtaatttttttgttccactatttctaatatttttcacaaaatcgctatctttctctatatttcaaaaataacaaattatgtttctaatttcaaaatattatattttagattatatcacttaataagtacaatatatatatgtatgaaaagattataaaatttgggcaacaccgcgcaaagcgcaacttagttccttagttcttaaatagagcagatggctttatcaaattcaaagaagccatcacctaagcaaaggatccaaagggtggcaagaagttaccagacactgaagcacctggtactgaggtgcaaggcaatggaaaaaaggaggttcgaacagaggaaagagagccaacaatggtggcaagaaaggcaactctctcggaggaaagaagcctaaaactgggggcaagcccttgcgagattatgagccttgcttcaccacctactccattctcttatttccaagagaggggatatatacaaccacttagtcaacagtgtcgtatcgtaaacctcttcctttctaagagtcagggaagaaggacatgaacaaattctgtcgttaccagaacaattacggttgtgatactaatgagtgtaatcagttgcaggataagatataatttctcataagacagaaacatgctactctttagcggtatgtacgacctgatgcttcagctaagggcaatgctccactttagcctgtgccaattgcaggcaggttggagattatgattggaggtcctcacttagctagaaattcaaggaaggccttagaaaggtatgcaagagcacttcgacatgaaccaagagctaaagtcttggaggtagcagaatgccctccaaagtctcagtgctacgaatgtgaaccgaccacctttggagaatcaaaatcttatcacgtcagctactctcacaacgatccactagttattgaggttcaaatagctactatgatggtggctagggtaatgattgacgacgaagcatcatcaaacatcatgttcaagcaagccctactcaggataagtttaactttagaagacctggaaccatgcgaacaactaatgtatggtttcaacagagctagcattcctctatgtggcaagatcaagctgccacttactgtcgacattgccccaaagtagaccaccatgatggccacgttaataatggtgggcgtgaagtctccgtacaacgtgatgctcaaaaggcccaccctttatgaccttcgagccatttctttagtgtaccatttatccgttaagttcccaacgatggctggtatcagttgtctccttggaaaccaaaacttcccacgagtgctacaacacatcattgtcactcgccaattagacctcctctattgctatggcctcagaggggacaaacaagacctcatctgctgttataacactagaagggatgagcaaggggttattttagcaccaaaatatccttaccaaggggttattttagcaccaaaaggcttgttttcttgatctcaaaattaggatcaaggaaatgaaattgattctcaagttcttgtcggatgtctttgaagaaagtacaacccttggaatctctttaaaaacggaagctcttgctactgcaaattccctggtggttaggcagtcgagttagccttaataggattcactttctgttgaagtaggtcatactggaagaatagtgagccgctttaattaaatagaggtttaagtcctataaatataaaattcaagcttatacagggcctatataggaagagtttaatgatcagattcttttgtcggcacaacctctttgataagataaagctttagaggaacaagattgaggttaggaaaatggggtataattcctcaacgaaagcttgcgaatttgaatgcacaaacgaaagaggatgcaagcaaggcacatcaaagtatataacctatcggtatagaacaacagatatgagttttttgtgattatatatgatatttttttttcgcatatcaactgttaacttctgttgcttatcgttgttaataaactgaataaatatgatagaaagaccgatttacctgtgttaaggataatgcactagaatcaatagaatttgaatccaatgtgaatgagggtactataatgtactaatcgcttaaccttaaataacatgtatctctaaaatagatatatcttttatcttatcttctctagcttaaaggagaaaaaggcagcttgattgtcgggggatcaacgtaaaggaaaaattaaggtagattattcgattctatttcctcattttgtaaggattggctttaagtgataggggatgtgattggaattcgtcttttctttgtttgtatcaccgagacacccgaagggctagccatatgtatctcaggagacccggcccattcaaatcaaaatatttcaaaataaatcacataaaaatttgactcatttatatgatgacccaacacatatttataaatacaattgtgaccctaaataaatttccaacaaagagtactcctcatcctcttcgattgagctgacaattccagtaccatccatgatgtatttgaacaacaatcccaatatataattgaagaaacttaacaaatggtctaatatgtgattccatctactttaccataatattctccacatctctatgtgatctcacaataatcttaattaatttgctttccacattaattttttttttgacttttaactttaataattttgaaaacagatctaatgcatcactttttattaagaagtagtgatacatgtaatttgaataaccatgcatgcatgtttgtgtgcccacttgcaagatattggtccctccatgacagaaaagaatatcatataacctaaactgttatggaagtttgtcgaagattctgatagagacttttaattttaattaaattgatcatgcataatatctaatcagtaatcaccactactgtgggaacgacaattaaactacaaactctgcttaattataattaatcccacttgcctatattagtggtaatcccattccaaatccaacccccttcaataataatccttttcatcaataattcccccttaaagccagagaagattaacaaataatattgtatcaaaaaggcatttggatgacctttaggcaattaactctattaccttgctacttttaaatataaaagtattatattatttttatcttataatcataatctattctatataaaatgtagttatatataacaaaatttttagtttataaaaaattattaggtaaatttttttaaataaaaaaataacaaattattagatgttgcacgtaaagggtcagtagttagttaaacctaaatataattaattcacattaataataaatttgttcatattgtttatttttttattgaaaattattttcaaattttgatatttagaattaattaaattttaaatattattttaaattaaatttgaatattttgatagtttaacctgaacattttcattaattccaaagataaactaaggacgaataataattttttttttttaattactattacaaagtataatagtaatttttgtttttatttaaatcactattatgctttcaaatttcaatgaatattattaattttaaaattatgatattaaaaaaattaagaactaaaataaaattaacatacgtaacttagcacgtaacatctatctagtaagtatatatgtacctaactatcaattacttatactataaatatatatacagtggtggatccaaaaataaacttaaggagccgtaatttttatttttctaaaataatatggtatagaaaaaattatcaaaaatgtttagttggaatttaaaccctaatgtcttgaactagctagcttgttaaagtaagcttggtcatcaaagtaaaactacgcttttgataagatattatttgtcagtttacactatatataatatataattaacaaaaaaataatttttttctataatatagttataaaatttatataccaaagaattaattaacttgctagagccttaagctaaatatattgataatgttttattttgatctttaattatgttattatacatgtttttattataaaaaatattatttttattcacaacaacatttataattaaatgtgaaaaagttgtgattaattataaataataattcttatagggactaaaatgcttatatggctaaaggtattaatcacaaaaattacaatttgttgtgactagatgtgttttaagttacaattcttgttgtgactaaaaataaattagtgacaatttatatttaaatactatgttt

SEQ ID NO: 244405 - DNA, 2435 bp, Cannabis indica
gtattgattgctggttggcttgaagaacataaacagaagagaaaatggtttggtgagaaaggaaataatgtataataacaataataatagtaatgaagagaaggatttcatggatgtgatgctcaatattttggatggagctaatgttgatggtgttgatgctgataccattaataaagctacttgtctggtaagaaagaactaaaatctctttctatttttatccataaataccatgctaatttatttgtcatgtaaatttttcctcatcataatttatcatgctagactagattaaaccctttatgatggttaaagcctcaaactaaacagggtgtagttcaaaattcttcaaaataattaaaaatgtgaaaactattgtttgttttgttcaatcaaatctttgaagagatcatatcttgcagtagtaaaactacttaatgtttttttataatccaaaaccaaaaccaagaattattgacttttttagtcagtgatgactctattaacctatgtaaatagaattatttattaaaaaatattttcacatcgtcataaaataatgtaaactttgatagtctcaatccaatgatgacatcattgataacaaaaccaagcttacaaacaaaactagacctatttatttatcatgctagatcaaacttataatctttttattaaaaaaaactctttaatcttttcgtaagtgtgaaattaaattgggtgtttttagggtgcatttttttaaagtgtacattaatacatcccgtttatatatttttgatacataaatagttgtaatctaatgtatattgcaaagttttagaaagttcaaagtaatttataatttaaaaagtaaagttgaaataatttatttcacacatataatataaaaaaatatgagtacaataattttttaaagtttacatattatcttgaataactacgttaccaactgttataaaatataaattaaaattaaaattatttagatgttgaaaatgtaaaatggtacactacactcttttcaaaacaacgtcaccatacgtatattcttctcttaaccaaatcttggcaaagatcacccaaagaatattaaaattattttaatctcaggcgggaattaatttattttttaagttattgactccattaactagtatgaaatatagtttagtgaatattttcttaaaaaaatatagattcacataattccaaatccaaaatacaatatataatgcctgaatccatgacatcagtcaccaacaaaacacaaaactagatagaataatatatgaactagacctaatacattggataagatcatacacatatactaaatgatatgggacacaaaaaattacaatctaccttcttatataaaaacgaaactttaatcaatcacaattttttaaattaaaaatataaaagggcaatggtatccattttaaaatcttttttataatttctctctcctctcttaccacataatatagggtaccccaaaatataatataacccattattttttgggcaactatatagacaacacccattgagttcacaaacttttttaattaaaaatataaaaggacaatggtgtccattttgaaatctttttataacttctctttctcttttaccacataatataatataacccactattttttgggtaattatatgggcaacacatattagggttgacctaagagcatctctaatagaagacaatagttatagttatcaaaatacacacatttattttttttttattttctctcacatccacataagatttatcttgatctcttaaaaaaaatattctaataattgacaactctaaaagttaccaaccatatcccacatcacattgaattaataactttttaggtaaaaataactttttttctaataaaaaaaatgccatgtggtcattctatattgagcaaacacttgacataaaattactcttgaaaattaaatcacattacatatgtaatagagattctccattggagttgacctaacaatcaaatagttaagatataaaaaatgcttaaaagcactgtctaccaccctcctaagtgtcatattgttattagtgtaattaagtattgggtctcatataacttgaagaaatagcttttaggaaatatcgataaccaatcaaaaaacgacacttattgaaagtgctaggcactattagtgtccaataacaatgctcttaagtcttaactatctttaacaaggagatacattgagaatcacaataatttatggagttcaaaataagagatctttttttacaatatatataaatataatcataaatggctccatatgaaattttgaggccaacatagaactaatttcatttttttttctttcgtagaaccttatgttagctggaagtgacacaaccatgatagcac

SEQ ID NO: 244406 - DNA, 839 bp, Cannabis indica
agcaagtcatttagctccccaaacaccccataaaatctagccaatttatcaatatcatctcctgggtgagtattgcaaaagctctcgaaccaggatccaaattcagtatctccaatcctgaaagaaaaacccaaaccccgatccaaacatgccgtagtgaaaggacaagcaaccataatatgaaagatagtctcaccttctccattacaaagaggacaattactactcacattaacacgtttggtttgaagcgaaactagagtgggaaggcaattagagagagccctccaaagaaaattcttaacttttgggggaagttttaagtaccaaaacttcttccaaaagccagagttatcttgtgaatttcatctcccatgaagcacttgcaacgcacgataggcactcttaacaaagtaacttccatacgctttaaacacctaataccatgtgtccatattcggagttaaaggcaaaggtattttacgaatgagatccacatctcttggctcaaacaaatcctccaataactcttcatcccaactcaagttacaaacttgtaaaagattaaaaacagtacaatgatgaagagcctcatgagaagaagatacatacggattatcctttgatggaagccacgactgattaagaactggaatagaaatgcccgaccctatcctccatctagctcccattttaacaacttcttgagcttcaaaaacacttctccaagcatagctcggatttgaacccaactcggcatcaaaaaacgtcccttgaggataatatctagcttgaaaaacacgagtgacaagagatgttggattagttagcaaacgcca

SEQ ID NO: 244407 - DNA, 2095 bp, Cannabis indica
tcaaggctctcacaatgaaatcttagagtgttttctcttagatttctctttaaagcaattctttcgatcccttttacagtgaagctatttataggacttaatgcatgagggaaggtttcccttttacttacaatatctataattggtaagaacatttattacatatttagaatacatgaaatgggtgattaaggcagcatgtcgtatccctctgatataatcccatgattgtagggattgtctttgtgcttgggcttcacgatacatatgagtgctttcatatgcctctaacatattaatatccattaatcatcccattacaattattgataaatattggacactcagttaatgattccgtttatggtattaagcctataattatattagtccacaaacaaatgattctaacatgaaattcaaatcccactcactcacagttgttaccagtcgtgtaagagagttttaaagatcaaaagagcgttggagtgaaatgtgaaaacatcccccattgattgctttcagtaacacaacgtttctctcaaaaagagctccaggcgacaaacccttacaaaatgttaaaacataacgaaaattttcacatgcactatttgggcgacatatcgcctggattatattttcaactctaatttagagctttgaatctgttctctaatctaacgttcacatgtgaaaatgaataattatttgaccatttctaatggctagaaacttccttcacattttttcataatctccaaatgtaattaaccttttaattactgaaaaatcgagtttctgtaaatgtcaataattattacagaaatatactgtatataaaactgtatacgtctgcagaagcagaatgtaattctgttactgcagaaaccaattttgcagcgacaaaacagaacagacagaatataaaaataattgcagaaaattaaatcacttgacacaagagatttgtacgtggtatcagtgttctttcgaacactcctagtccacggggccacgcccagagaatgaaatcaattaataaagtatcaacaattacaaagacaattgacttaaacaagtttagactccctctaaattattgtcgcaatcctttgtaatgcactttatgaatctgacttctgaaacaccttcaaacagcgaactcccttcgtctttgaagtgtgcgtgcttacttcctcccgaagtaaggcttgaacaagtcttctcccgaagacctctctcttgttcaatcaagttgttctaacaaaccctaagacagagtaagaacagatatgaaaacactagaacctagatgaacaactaggttctcacaaaaagaactctctcttcacaaataagaaaaatacaaaaaaaaaactagaagagttgattcgaatggctgctctctaggttctatttatagaacatagaaaccctagagacagccacaaagtcgaatctacagatgtacaaaattttcctaaataaaaccctgatttgcagcatcaggaacagattttatcgtagcaaatcagaccgaaaaaggaaacttaccaaaaacgagtctgatcatgtattgggtcttgatacctgtcataaacagtgtgtttgatctgatcttattaagacacaatcaaacttaattaaggtaaaataataatagtcaaagtttcttttaaaaactaacttttcataagaaaaattttctcttacaagaagtttccatacaagtaaaagtccagctgaaaaagaatatttcctaagaaagaaaaagaggaaatcaaaaccgaataataaaggacgataaaaatcagattgatagcacaaagaaatctaaccataaataaaaaatattttagcatctaaattatcaaaaaagaactttacaattacatatgaaagtttggttcatatattacaatcttaattcaaaatgtaattcttctaatgttatattttatgtgttttattatactatatacatataatataaactctaatatggaaagaggtttcaatggttacatttttattgtaaccatcatggttacattttttttagccattagatcactattaaatagttgtgattaat

SEQ ID NO: 244408 - DNA, 1248 bp, Cannabis indica
atttcaaaggtaacaaaatgaagtgtgacgccagtgtacgaattccaattcaacagactaccgtgttgcatttcacatccaattattcatcattatcttttgatgtttcaacaaaaatttctttcattgactttttttaacaccttaaaatttttcaaaaagggattgttcgttccaatgtacagcagagatagcctaatgcatatactaaattttcaaacattacactataatacgaaacctcatcattcacggcgcctaacataagactagaaatctatatattcatcattaccgtaattatttatattccttctccacatcgacatacatttacaaatatatatatatatatataccaatttaacccatcaattaagaactccaaattttaaactataaaaaaacacaataattctcaaaatgatgatcaagctagtgctaagtagtgttacaacaagcctaatatggctactccttacagccacattagccacggctcagactcccatcctcgacaccagagggcagccactccgccgtggcgtggagtactacatcaagccagccatcaccaacaaacggcggcggcctcacgcttatcgatcgcaacaactcctgtccatggtacgctggacaagaaaatgacatgaaatctagaggaatcccagtgacattttcgcctttcttgaaggctgaaaacgtggtgatggagtcgatgagcttcgaggttgctttcgcaaaggaagccacgtccaagtgtccgaatactacgacgaactggaaggtgtctacgatggagactagtagtagcggtagccaaccccgattcatcgaaacgggtggtaacggcaccgttttgcactatttccaggtttatttaggatctgaagttgtaatgaagaatggttcgtatggattgaggtggtgtcctgctgaggtgtgcccctattgtagggttgattgtgggtttgttgaagttgtcgttgaaaatgggaacaggttattggctttgaattcaacttctgcgttccctgttgttttcgagagagctgcttaattaatcatcatcatccttattatctttgattattaatatagataataaaattggttgtgttaattgttttttttaattattcatatagtgaaaataaaaataaagctagctatatattatatatactagtatattgttacgtgcgatgcacgtatgctgtgttttatattaagtattatattatgagt

SEQ ID NO: 244409 - DNA, 1029 bp, Cannabis indica
tatttataagttagttagttgagatgtatgatatagaatttgagtctataacacttatttaaatcgctttaggtctatatatttttacgaccgattcgacaattgtgccaaacagagctaagttccaacacaaaactatttgaaagaatcttgattattggtatgatgcatatgtgttaatggagttatatttttattctttgtatttagagcttcagtttggagtgaatagtggggcatcaaattttggcattgaaagggtgcaggcagtaaatgaagccagtttttgttgtccagatgagttaggatagtatgcactcatttccattttcatctgtactgattctgttgttgcagaaagtccttagtctctgaagatggaggaacttgtcttgcaattaagagaggtaaacacacatacacaatcttatgtcagagggtgctgatctctttgtgtgcaattatatatctatgtgtactatcatgctcaaaagggtgacactcacaagtcattatttgttcatgtaggcctctcttttcaagcatcaaaccaggaatgattgatggaatgtgttttaggaagagaagagatccatgcctttattcttcttgatctatagctaataaccaaaatggtcaacataagccaaaaatgcacaattccaatagaaaataattatgatcaaaagaaaaacaagtaattccatcaaaaaagaattagatgtggctgctgggattcgagcccaggtctccacggccacaacgtggaattctcaccactaaactacagccacttctttgattgactcaagccacaactaaatattttagggtaataataatgaaggaaaaattgtgaaaaaaggtaaatatattgagttgagtaatttgtgacataaatatctaattttaactcacaattacaatacaaataaatgtctaagtttaatttttggtggtaataatacctaagttataactttgaaacttttgtaggtacctgactgttaattgttaagtaaattgcca

SEQ ID NO: 244410 - DNA, 722 bp, Cannabis indica
accatagtgcatcagggagggagcccgagagagatctgaaagtaaaagagagagagagagagagattgagagcacgaaggagagactagagagaatgcgagagagagattaagagcacattggagaaagagtgaaaccaagaagcgaatttgagatcgaataatcagtgaaagtttacgatgttggaaattattttatcaggatcttgatttactaacatgtatgttgattataattctataatctaacaccctaaataagaatatcctaataagatgaaataaacagtttagaaagcattacattcatggcaatggaatgataatgactcattccgttcatagcccttgattcttttctgtagcagagcataatcaaggtctgaacctggtcttctctcattcagtttggttaaccacaatcctccacattatgattgaatacttgacttgctatcagtgggcaatgtactctatcactaaaggcatgaaatcaatgaagaacaaaaggagatgattcgaaatcattatggaaggaggctctcaattgtttctagttgtctgacaaagaatgaaaactagataattaagttggatgagaatgagagcatcttattccttttataatatttttttctagggtttaaaatttaattatatggattaaaaaatgataaaagaaatggctgaaatccactttagtggctggccacacatgtgggc

SEQ ID NO: 244411 - DNA, 2162 bp, Cannabis indica
ttcggctaattaatgctctgaattaattaattcctcaagacacgtttccctttgcacgcctttgaatcgaagcgtctggggattttgaattgattacttcttttcacaaataagcctataaatagagttaaaaacttccagaaattactttcaccattttctccacgaaacaaactcagagcaaaaaaggaatttccttcaagtctatcgtgggatttctagcagaggtatccgagcagcttcatctggactacgtttaggcttcaaacagtgagtaagttttcaatctttttctcttttaactttgtatctttaatttatgggtttccactgtaggaaatacaagtgttcttgacttattgtggaagatacatagaaaatctaggcttcaaaccttgtaatttcctatgtaatggttcatatggcttcattatttatgatatcttgactttaatctcgcaatgttcgattctcaccttgctcattcagagcttcgtggcacttagcctttgacccaaaaatttcaaactcctaggttatgacttaatatttatgcattttttgtctttttaaccttttgagtagtcctggtcgggatatttgcctattttttgttcaatatctcggccaaacactcatcttgtatgttgtcttatgtagatgaaccctggtgagttttggggaggcgaacaccaaattgaccaggatctgcttcaatttctgtatgaggatcaacctcgtcttcgcgctagtccatcctcttcgagtgacagactttctaattcaagcttcaaggattgggaagtgagtagcaaatgttctcctactccagaacccgaagtgcaacaccattcttactctgagcaaatcgcaggagaagggtacgttcggtttatttgggaactaaagaagggttggagacgttatcttccatctagatggacatatattgtccaacctagtgttgctgatatccttcccgttggccgtccaagttctggtaactttggtatcccaatagtcgtccctcctgttactgttacgcaacatacaaaccaatttttgtccaagagaaggatgatggtccacacaaagcagacaatgtgaaaagttagtgcatctgaccctcacatggcccagcacgccatgcagccaagtgccgagcaggacctacccactatggagggggaggaggattacgagggtagcattgaggtccaggagatagaggagcaagacgatatccgtcctgatagtccttccaaagctaaggaggaaggagtggtcgggcctccactttttggagggtataatgagattgggaagctagtatccgagcagggtgacatcttggttgagggggcaaactatgtcactgaggagtttacccaggcggtcccccataggaggcaaagtgccttaggggccagatgggtgtgtcctccatccaacataattgagggccaaatgagagagttggacaaggctggatacctgggtggacttaagtgttatctcccttccctaaatcactgggcaactaacctaaagaaagggttctgtgcctggttgggtgctcatactaagcaaggggcgatgttgcctttacactcgtacttcaagagggttgcggatcatttttgcctttgtccgacccagttcactcccaagggcattaagtatttatctaccctgtttgttctctacgcctctcaaggatggggtgtgtcctcccctcacgacatcaattggatttttgatttgaagtctacccctaaccagagcaggtcggggtacttctacttctctcagccagactagaagtggctgacgggcaccgtggacacggagattagcaagattgggggctttattgacgagtattactttgtggaaggcatggataccacctatactcggtttcaacatatctctgtgtatttctatccacccttcacattggcacttagggaaagggcctagaaaattctccaactgccggctgctgctcagaatatcactttgttgacctcataggacaattttgtgaagtacaagctttattcgacaaactttataccctagcctatgaaagagagaaagaagaagtccaagtctggccgggctgagggagctgagcaagagaaggagctcattcaact

SEQ ID NO: 244412 - DNA, 1045 bp, Cannabis indica
cccatcttgtgttcccttatacttcctcccaaaaacgaccctacaaatcacgtcgtttgtgtacgacgagaaaatttcgcttaaatttacagccaacgacagctcacaactctgtcgttttattaaatcgatcattaacgacgtttcttcttccctaactgatctaaaggaaagaacccttttgggactgaggaggtggagcacgcaaatgcttctcacctgtctccaatactcgccgtacggagctgtggagatgtccctggcttggtagaggagtttgtgggccatgcttagtttgggcctgttggataaaacgacgtcgtgggttttcatgatctcgcgtgcgccgtcggctgaggagaccaccagtacgggcctggacccgaagtggagtagcatgagtgggccgtagtgttgggccattttttggagggtgcggtgtggatagaggcccaattggtggaggttgcctagaatcgggagtcttagtggtgatggtggtaagtttttgtgtgtagtgtttgataaattgaagatcaaccgtttgatcagaaaaattatgaaaatgatagtgatgatgatgggaacaagaaaggaagagagaaatgaagggtttgacatggtgtgagtgtgtatatatctgtgagaatatgtgtatactatatggatttatggttatataggagagagtatagactgatcttactaaacaaaattataatttttgcttttaaagaaaaattgaagtttatttctgtgaaatgtttgagaattaaatatagagcattgttattgggtaccagtggtgtctagcaccttcaagacgtgtcgccttgcgattggctagcgatactcattaaaagctattatattaaattatatatgactcgatacttagttagaccaatagtaatttttacacgtaaaaaagtatttaacactactggtgtcttttaacatttctcttcaatatactatttagattgtggtaaaataacattgacaaatattatatgagaaccaacggtcaaactttaaggaataa

SEQ ID NO: 244413 - DNA, 1347 bp, Cannabis indica
agaagaatctgtctccactcgcaccaaattaaaccccaacctgacagcccacaaaagacccgtacggattgcaaggagctcagccaccactacctgaaagtctccaacagcgcccactgcccaagctgcccaaatcacaccctcactgcctcggataccccccccaaaccccgcatatcccctacccggagtcaccgtcgcatcaaccgacatcacaaactcacccaacacggtgggcaccaacattccctcctagcctcacacccaccactcgttgcctgcccctgcccaaccccaaccgaaccaacacccaatcgagagccaccagtatcacaggcccccaaaacccaacatccaccactcgcgaccaccccctgaaactcctccaaagcttccttagctaactccacaatcacatctaatctagattgctttttcccaaacagaagagagttcctatcataccgcatccatcaccataacatagatgataacgcaaaattattatgatcaagcatgtcaaagagataaacaagcaactccgctaaagacccacgcctaccacgataaagaagattccaaatccgcagcttagaccaaattggagacaatgaagagcaaaaaaacaaaagcatgctccggagtctccgtatcctcaccacatctgtgacatatcgactgaataggaagattacgcttgataagctgggaattagtcgggagagcccgatgatacattctccaaaggaaaattttgactttttgtggaacctttaaattccacatcccattccaccagtgagcctgattcgcagaagggcttccattatgttcactctccatgtcaagagcaaccgcatacccactctttacagtatagcacccatttgaagtatgatgccaacaccagctatctgcacaaaccccacttctcaacgggatgccaagaatgatatctatatccatcctcaaaaaatactgccattgctgtcttactttcgatacggtaagagctaggctccactgctctttcagaatgtcgagacatatactaccattgttgttgatattaggatggaaaacttttgtcttgaaagaaacctgtcccaaccgaagcagcaacacacgagaaataagaaaatttgtgttgtataaaaccaaagatattccaacacagattcagatgataactactaacaatgcccataattcctaaaacaccgtatagtagatcatggaaaccatattagacactagaccgttcctttagttagttaattttctgttatgttgtcagtttatggtttgtaactaactgatgtaaagtgcctactgctataaataaaa

SEQ ID NO: 244414 - DNA, 1010 bp, Cannabis indica
aactattaaattacggatacacacagattttattattacaatattatttataaatttacaattactttcaaagttcgtagggattttttttttgccaaaaataattcagggacaaatgaaagcctataaatttggaggcaaaaattctacttatttattttagaataattatcatttttacatcctaaatcttcgacactatctatcctgatcctatctcctaaaacatacagtttgttagaaattttctctaaaataaaacagttacataaggttttatttcttttaccgttaaaaattaatagttttatccttaaattttgaccaatactaaattttgccccttttattaaaaaaactaaatttaaaaattacaatcttatattaattcgaaaaaattaaaaaagaagagctagataaaagtattaaattaataataataaaaaagtattaaatttactttaaaaacctaaattatttctaagaaaaatattttcaaattttattttatttataaacacatatcttaaaacatcaaaccaaaatgattaaaaatccaataaataattaaacaaactaaaattttgtgaagagaaaatcaaacttatttatatttacaaactcatttcttaaaaataaagaaaacaattagaaattcaataaaagtgtaaaattatttaaaagaaataaaaattaaactaaaaaaattatgtttacttaaacaaatttagattttcagagaataaactatactcaaatttgttcccataagatttaatagtttttaccaaaattaaatttttaatataatttttataaataaatggatttttaataaaaaaataattaatttttaaattacttaattatttttttcatttattttttaatattcttaatcattcaaagtgagattttttaagatctaaattaattttttaaaatttacaaaagaaatgttgaaactttcttatattcagttgaagaagttacgatttgattgttgtcaa

SEQ ID NO: 244415 - DNA, 701 bp, Cannabis indica
aagtctacatggggctcaccaattcctaggctcgtctctacatcataataccgggggccaaattcaattgcggcacttgagggctgctccacgtgggtccttccttcagtgtgaggcactagtgaagggtcttccctaggagccatgggctgattatttagatccaccgagatggttgtctccacctggccaactgtggtggccaaatttgtggggccaactgaaatagcagtattgaccatatctatagtgttaatggaaatcatagtcgtggttggaacatgggcattgggatccgtaatcatgggttctccaagaagacccgatgatgccaatggtgcaaccaaagttctccttgtgttaaccatggcgtttgattagaaatgatatcaactcgctctcaatgaaagcacaaaattttttacctaaaaaagtggccaaccgacagtgcggtcgtattaatctgatattttccatgtgttacactataagaactataaattaaagaagacaaggatttttatagaggttcaacccccttagttatcggataataacctactcctcttttagttgtattgatactgagagataatactattcagatcactataggttaaatctaatatagctctcttcaaggttacaaagtatgaattagtaggcagatctatagttagagtgtgatatggccttggagg

SEQ ID NO: 244416 - DNA, 2352 bp, Cannabis indica
gagaattaccaaatgtagctggaagaaactctctaaaagcttcaaattccatttgttgtagtactgtaataggcgataaggcgccatacagtggttgtcacatcgagtggtgctttggtttaccaaaacttcccaactttgatggtatggcgccatatcgcctacactacgagagttttaacccacaaattaaatgagtgtataattactaatttatttttatattgtaacaaaataaggggtcatcacacaatatataggtatataaacactgtcttataaaattggatatataattaaatattaattatgagtgtgattaaaatttatcaaaaacattctttggtaaagttgatctcttgcctgttctaagatatttaagtgacaaaacggaaaagtgaagactcaagaaacattatatataaataaaaattatataagactatcactttagctatgttgatctcattcactttcctagttgatataagactatctaatggaaaatataaaaattgtgctatattttacatataagaaaatgattttgtaatgtatttgtgctattaatttatagttttatgctcagatgaacaattgcaaaacttgatacaaaatttgatatttttattaaggctagttaagatttttgtcctctaaaatttgacgtgtacaaaatcatgcaccttaaggctgttggaaattttctcttgaactattgaaattgttaaatttaaagacttcgattcgattttagtaagaaaagtctaacatgaatgaaaattcaagagacatgatttgatacgtgtcaaaatttgagggacatgatttgatactgttagagatagcctagattaactactttctgttatttgttagttagtcttaaggggttaggtagttagtttgttattatgttttctctctctatctcttgactattgtaactaactcctggtatataagatcagattgctcccctttgagggcagagcttcattttcacttttctctctctctctctctctcactccatctcttcatctctaacatggtatcagatgcttaggttttcatggcgtccaaagacacagacacctctgcaagaagtgatacaccagaagctcccatacctgctgaagcagaagtaccaccatttttccccaataacaatcttcttcccctaaatctacgcctcgatcgatccaactacacatactggcgcactctagtgttagctgctgtccgagcctacaattttgatggttttcttctaggaacaaatcctactccacctcagctcactgcaggtaatgttcctaactcagcctatcatcaatggcttcgattagatcaattcttgatgcattggatgatgaatccattactgaaccaatgcttggctatgtcattaattgtcgacctcgtcggagatctggacggtgtttgctcaactctttgcaacaacatctagggcgcggcttctgcaaattcgtggccttctccaatcaacaaagaaaggttcctccactgtcgatgactatatcctaaagatgaaaggatatgcagatcatcttgctgcagcaggacaagcaattagtgatgaagatcttgcactttacattcttggaggcctcggttccgaatatgagtcaattgtggtcagtctcacttctcgatccgaacctctcactctgcaagaactccaattcatgcttcacagccatgaagtgcgtctgcagcaactatctgcaatagctttacagaatgttcaagctaatcttgccaatctctcactgaacaatggcaatcgtggaggccgaggatacagaggagcttatcgtggaggacgtggacaatcaacaaatcgaggaggtcgtggcaatagaccaacctgtcaattgtgtggtcgtcctggtcatacagtccaaaaatgttatcatcgctttgatataacattcacaggaacacagaccaacacaggctcaaattcgaactctccttcagagaattaccaagccaacatttctgaatctgctattacagaagagtctactggcacatggtacttagatactggtgcaacaaatcatttgacagttgatgcacaacaactcacaacaagtgcagattacaaaggcaaggccaaagtggttgtaggtaatggagcctctatccctattttacatgttggttctaatagcatttctacacatagtcccaataaatctttactgctcaaagatatacttcatgtccctagcataacccaaaatcttttgagcatttctcaatttactaaggataacaatgttgttcttcaatttgactctgtgtgttgtcttatcaagg

SEQ ID NO: 244417 - DNA, 1679 bp, Cannabis indica
taaaaatgaaaaaaagatggtaaaataattttattatagtataaaacaatacataaatagaaagacttgaaatacttacttatttgttaagactaaaagatcgttgatgtagaagtcatgagcataaaatgaatcacttctcttctccaatcaagtaccacaatttttttgaaatacatattaaatctatttatttgaccttggcgtatgatcataattttgtttgaacactattattctacattattggtagactataataaatagttgtattctactaaataataaaaaaataatcatgcaaaaagacaacattcactagcaccacgtgaatctcccatttattataataataacaaaatatattgtacttctttgatttgatgtatcaattgtaattaacgtgaatctcccaatcattattataataacaaaatatattatacttctttgatttgatatattaattgtaattaacgtgaatctttcaatcattattataataacaaaatatattatacttctttgatttgatatataattgtaattatttccgactattgttggatgccccatcaattcaatctaaaacaattaaaacttctcataaaaaaaaaataaagaaaaaaaaaattttaaacacaaaaagctaaatccataactgcatattccattctcgaaatatatttaagaaatacatattgagctagtttagtaggtcgtataagagttgaatattgtattaataataaataacattatatttcactactacaatgttggcctttagagactgtttttacctccatttataaaaggaagctaaagggtgtaaaaaatacccgctttgttcgcatttgacatttagagacagttttttgataaaaaccgtaagtgtaaaattacattatactatttagaggcagttgggaaataaattatttttttttatgacaagccctatggcgtcggttcccggcatagggtacacggtttgctgacacgtgtaccctatgccatcggttcctataaaggaaccgacgccataaggttatataagaaaactctctgtgtctcatttcctcatcttcctcactcgaaccaaacagcagcccagccaaaccagagagctcgaaaccctctcgccgaccaccgccctgccacccttttctcctccatttcttaaccatttgagctcatttttttttcttaaaatcttccattttcgatacttaataacatacacctaaaaagttttcattttttaccctctttgagtgtcatccgaacccaaatagaaaagtttgggtttagaatccggccacccttttgtcttgagaaatccttgaatctcaacttcgtttaaggtataaatattgtttctattcattgttttatttttggttttcgtaaatgattatttgagtttattttattttattagtaatattattgtgttgtatgtgtatagtgccaggattttttacggaagtggtcgtcgaattgcggttattaggtaataatttaaacctcaatataatatatagtatatatatatatatgtatttgtatattttattgaatatttgtatataatgtgtgtatatattgtgtgtatatagtgtgtgtatattttttatggaaataaattttgtgattgtattttatatattctttgt

SEQ ID NO: 244418 - DNA, 1090 bp, Cannabis indica
atgtcaaaaataaagtttaaatagtcacagcgtataaaaaaaaaggcgcacatgcatcaaaatatgtaaatcttatttttggcattgtaaactactccgaagtttctaaaaatttacaggtggtcctaataactataatatacatgatcatgaaaaaaaaaatagattaaaaagttctcgcgtgccgaaacagatagatgatctaccaaaatacctatttaattaggggattgtattgtagacttacctcttactttattggtatattaaattttaggaaatttatgtagtagaccatcctaaagggtggttcttgtagaacccctatctatttcgacattcaggaaaaaaaattagtctaattttttttcatgatcgcaaatgttgtagttatttatcacttgtaaatttttagaaaattctaaatatatagtgtcgaaaattagatttaaagagttactacgcgtataagagaaaatagtcgcatgcgtaataaaatatgtgaatcttatttttcggcattgtaaattatttgattttgttttttaaaaatttacaagtgatcctaaataactataacgtacacgatcataaaaaaatttgactaaattttttttctgtataccgaacatattaagagtctaccaaaacattcttttagggatgtactatagacttatcctaaattttagtaccatcaaatatatttgttttagtttttgtcaattttacacggttgagatagaaaatgttagtaatgatatgttaatgtaatttcaattaaaaattgaaaattcagtatttaaagtgatgaaatttctgtagtagaccccaaaatgatagttctgatagatttttttatttgtttcggtatctaaataatttttttagtctattttttttatgattgcgtacgttgtaattatttaaaactacttgtaaatttcaaaatattctgaatagtttacaatgtcgaaaaaaagatttaaatagttatgtaccatgcatataagcaaaaacaatcgcacgtacaacaaaatatgtaaatcttattttcactattgtagactatttgatttttttttttttt

SEQ ID NO: 244419 - DNA, 1102 bp, Cannabis indica
ctttttcttcatttatatgttttcattggtagagatatttaattaattcgatatgaattatcgtcgtaaaaggggttcaaaacttcaaatcaaccagaaagaaaaagaaacaaaacttagagataaatcccacaatgtttgaaaggaccgctttgaattgaaaagacaaaggatttattatgcgcatgcttataatagttaagttctttaatctcgtcttccatatatatgtactgaagtctgaagtgtataatgtatttgtttatataaatagatatagagttaatatctagaccatatgcaatgctgatcatggcattgtatagtactagtagggtagtatatatagcttatgcattacctaccacgtacggctatatatagactatagttaatagtccttttcattgagcatgattatttgaatattcaatgtatacaatacaaacacatgtattcaccaccaacctctcatcaatccatttaattcgaactaaaaaatcgactttgaagtcaagatattaaatgaatagataataatgaattaagtggtcatgttacaataattattaattatgacttagtagtctctgattgatcacgcacgcccaccaatcttttttaagtcacggatcgatgcaacaccaacaacctagctagctagctagctacctgcattaatttatgaatatttaattaagattttattattaattatgccacatttttccactgttgagtagaaacgtgaaacatcactttgagagcatggaaacattaaatttagtattacattagcattaaatttaaatttaaaaaatattttcactctaattacaacactaaaaattacattaaaaatatatatttttattatattaattttttaataaaataaaaaaataatatcatattaattaacaatgtatccctctaaataaaagagttacgcgacagaaaatttaaatttaattttcggcgtgttatatttttcaaaattttgaaggatgtacacgaccataaaaaaaaactaaacaagtctcccgaatgccgaaacaggtaggagtatatcatgtgcgccacttttaaaaaagtgcattat

SEQ ID NO: 244420 - DNA, 1273 bp, Cannabis indica
cttttacagtgttgttaatacttttagttgttaatctgtttattgttagttttgttttggttgtttatcattataaaatttttactttttacaaacaactacagtgttttggttgattttcagatctccttctattcggttcttcacctctgatcgcgatttcttttttcaatgattgttgtttttgagtttttttttgtacatcaatggaggttggctgttttttttttctttccgtttttgtatttggattttcgggattcaacttgtcttcctataagctacatttttttagattttgattttgctggttttgaaaaaaaatggttgagaatgggttgttggggttggatggctgggtcacgaagaaggatcggctgctgggttgagaatggaggtttccgttttctctgccggtatttttgtaattaccaactttttagtgttcacttttgtttatttccttatttggggtcataattgtaaatttcatctatttttggtttattatagaaaaaatctcattttcttttagtacttctaatgtaaatatttgttttggaaaaccgtcgtatatagtataagacacgatttaaaattattgtttatactctgttataggcaacggttttaaaccgtcaaaaaatctatatttgcgacgatttttaattgtcgtttattttactaattttgtgacaatcgtagagacaacaatgataaaaattgatataaatactttaaacgactgcttaaaattgttaggagaaactatttttgtagtagtatgtatttgactactaggatcacatatggaggtttcttgatccctattgaatattccctaaaatgaagtgatccaccgagttcatcagaagaaaagaagcacaacatgggcttggtgtccaaaatatttcaatcaaccttatcccacttcaccaatacatatttgctgccattatagtaatatttggccaattaacacttacatgtttggtaggaggagaagcatgagacagtggcggactcaaaaaatttttttcagtgggagcaaaaggtttaagaaaaatatataatacattcttttaaaatgatattaggtatacttgctatgtgtttcggcattttaaaggattttttattctatttttttcatagtcgtgtacactataaatatataaaattacttataagttttcaaaaaattgtgaattattttcagtagcaaaaaataagattcaaacaattttactacgcatataagaaaaatagtcat

SEQ ID NO: 244421 - DNA, 1449 bp, Cannabis indica
aaataggacttaggtatttatctgctactcggcataaaacttaggtatttatgccgcaaattactcaaattattataaccatatagaatttcattggagaaaattagacagcaccaaaaatacgagcattctagcaaagcttaaatactcacaaccaaatatgcaaaaaaattccaagagtggaaaatgttcaaacgaaaaataacgagtagtcaaatgtaaacaacagatatgtaaagaaagacaagagaattatagcggtgcaggaagagcttcatctgcttaatctacttttggaagagatttgtgattagttttatttaggtgggatcattcttttatatagaaagcaagtgatccttcaatttatacaacctatcagacaagatcttattacattataactacatttaattcagtacaaactattgacacaatttttcgttaaatgatctaagaagatcgtaaaagataagaggtttgtgataaattaattgagctaaatgaaacacattaaatagaaaaggacaccaatgatttatactagtttactcccattacgcgatggtaataggactatgtgtactttattgttagtattaaattccaacacacaatagttatgttcctaagtgtgtgtggataatagtacaaaaggagattttaaggcaaaatatatatttaagcttatgaataaaaggctccaaaaccataaacttcataataatggtagttgtaatgttcttggtaacaatagactaatgaaaacatctcagagttgagtagtcccaagtcataatagttgacttgagagagatccctagccatgtgcccagattgactccgcgaaactccaaaatgggtgtttggatcccgccaagttatatccaactcaatatctttcactattcaataccatcaagacatggagcatccaagtctaaggcttgaaagttgaaaatcagaaacaacaccacgaaaatcaaccaaggcaattagagtttcacccagcgcccatgttgacaatccaactagtgtttccgttttcaggactatcttagtgtaaatgggtcaaacttagtactaggagatgaactagatatgtgaacatatttgaggcatcaaaatcaattttggagaacttttatttttgagcactcgaagcaccaggccctaagcaacaagtgccccaagcacctagcgcccaggttgacattttgtcagcctgggctacttctaagcatcaaactaaaaatccatctcgagaattttcttctacatcatcaaaaatggggaaacaagtgctttggggaagaaacaaactaacttggaggccaaaataagggaccagtgcccaggttgacattttgtcaacctaggccaattccaaggagtttttatgaaatgtcttgaaggcatattactaaaacaataatataaaataattat

SEQ ID NO: 244422 - DNA, 1798 bp, Cannabis indica
gattgttgacacatagttattgtcgaaataattatcaactgtttatcgatagctttgcgatagggtgatgcctttatcttttgtgataggtcattatcgactgattcctttatcttttgtgataggttattatcgacagattatcaactgattgtcgactaattgctgactgattatagattgattattgactgattatcaacttattattgactaattatcgacaaattgcccatgattttagaatggaataattatgtgttctctgttgtgatggttcattattatcgattgattattgtattaagtatgtgtgatgtaatcgataggtgtctataaaatatcgacaatatgttgataatattatgttgacaaaatatcaggatgcatgaatcttaaataccttaaaatcgacatcatatcgacagatctcaacatgcaagaatcacaaaaaaaacgtttggccattacatcaataaaatatcgacaaaatattgacaatatttcgataatatgttgaaaaaatctcaagatgcatgaatcttaaataccttaaaatcaacatcatatcgacagatctcaacatgcaagaatcacaaaatactggccattacatcaataaaatatcgacaatatttcaataatatgtcgacaaaattcaagatgcaaaaatttcaaatacacactttaacatctaaaaaatgttgagaaatcgtggataaaccatcgataaattttcgataaaagaaaaacactagtttttcaacatatcaaaaacccacctgctaacaacctaattttaaaggaaaaccagaacaaaataagaagttttatataacaaatccagttcaaaaaacatattattataactaatagtagactacgcctcaaatacgggctttcaatcatcctcgtcaccagtaagattgatggtatcattgtaagtcttcctccacatatcttttgaataaaaaggtgagaaaagagtgtacacactcgtattcattttcaatgacaagacacatgcatgaaggcaagggagtttcaataacgtaaacacgctacaggtgcatgtcctttcaattaggttcacatcaccacctctttcaattaggacgtgcctgaaccttccattttcatgattttttcaaaagggttgtacatttaactgcattttcgaggtgatcagcgaaccgaaattgtagtgtgaatctgataaattcaaccaaaatagtaattggatatttcctaaactcttttgtcttattgttgaagctttcggtagcattgttggtcatgatgctgtatcgattgcccaaataataagggtgagcccacttttcaaaccctatactctccacgtatacagcaacgacatgattcatctttctaagcttctcaaactgtctatcacattcagtattcgaccatgagtaagaaatattatatatttggttgtgaaaagtatcagtcttgaacttaaagttcccgttcataacaatgtggtgatagcatgcacagtggactgcttcggggaaaataagttcaacgacatgatcaatgctttgatgcctatctgacacaaacattaagttctcaaccaccccaattgcttccctagattcttctattcaaacatgaacaagtgtataggtagctttatgtatgaaaactccggtgtacccctagcatacgtaactgtcttctccctgcacctccacgccttcacataactcatctggataccataagcgtcaaacatgtccctctgtatatctttagcgttgtacttagttcc

SEQ ID NO: 244423 - DNA, 2512 bp, Cannabis indica
aaaactctttctaaacataaattttaagataataatattcaaaagtctatatatattagaattttttcaaggtatgcatacatgtgctgaattaatttttcagagcgaaccctaaaagtttcagtaatttgaactttaaacaaaatcacctaatccaaaaggctttgacaactccaccatcaagccacttgtacattctagcaagtagactcagtgttcattagcacattttatttttcaacctacctataacatgaagcaactacaaaagtgaaaacacttcgtaaattaacacctttcaaacaagtcactactataatcaagggagagagagagagagagagagagtaaaagaaccaagaaacattgatcaaacctacgactagaagaatcatacataataggatctccaaaagagaacccttcattaatccaatactagagcactgaatactctatcacacattcttagaataacgaagacttgtaatacaacctctaaatgaggacgtactcacatataccacacgttgtcccatctcaggtataatatacatgtacacaattccctttagagttaagattagatttcatataaattatatactgcgcaacattgtactatatatcatagagtatgtaaaaatatatacacatacttgttgaaagtaaatccgcacattcattgtaaaaatcagaatagctacaaagagattaacaaggcagtaaataaagcttatgtagtcttaggccgctatttattacctagacaggtcattaagttagttataaagtttattagaactttataactaacgatttgattcactgctctcttttacaacatatataaactagcagtagcaacaaaatcaaaaacaaaaaaaaaacaaaaaaaaaaaaaaaacaaaaaatatcacaacagaccagatcagagatcagaataacaactcaagattagattcatagcagaacaatacaaaaacaaaaaaaaacaaaattttttcctagagtgaaaatggccaaagattgagtttggaggagtaaaccttggaacccttggattagggttcggatatccaactcaagggagaattgttcatgcaacaaagaagaaaaagaactactatcagtatcaatctcagagagaaaaacagagagaaaagagaggaatataacactgtaaatatttgggattaccaattcgtaccaatgtgtattggaatcatgttcttgtaatctttgatatttgaagaatcataatggaacgaggctagctcgaagaggacgtacccagtacaatatttttgaggaacctctataaaaactggtgtcttcttctcctatttctcctgcttcttacagctgtgtttatctattttatgtatgtgattttctgggtttgaatcggtttgggaagggttttttgttcatcgggttgtgttgttttctgggttgtgttcttcgtgttcttcagacaagaaccacgaagaaggtggctcggtttaggggatctggtatgaactgggctagggagatttctgggttgtgattaattcttggctggcgttcttcatgttcttcagagaagcacattgaagaaggaggactcgggtagggatgctgctctaggggttcatttagatgctgagtttgtgtttgagaagataaagaatatatatatatatatatatggtctaatgcaatttagggatccaagtttaaattaaaacgacctgtagtttaggtaaataggagctgtcgtttagggagtcaaacaggggtctttgactggggtaaaaggtttggtttgaccttgggttttcattgatacttttttgctgtatgtagggcattttaggaataaaattcctacagtggtatcagagccaaacaaggcacaatctgcagcaaagattaatcaagaaagcattaagaaagcatcaagaatcacattcataccagcaagaatttaaatacacaacaccaagattgcaaagaacaacaacaagattattctaaactcattatctatataatttctttgaaataattttatacatataccattatgagttccatgaaggttaatatagataagtttgatggttcaagtgattatcgtatttggaggaagaagattagggctctattggctcaatacaaactatttaagattcttaaagatcctgtggaatgcatggtcagctgatacaaccaaagatcagcaagaagagttgctggaaatagcaactggtttaatcattttcaacctctctaattctataatcagattggttgacaggaagatacaccgccaaaattttgaacaagttggaagagaaatttgaaaagaaatcattgatcaacaagatttacttgaaggagagaatctttggatttaaattagtccatctaaatctctagacaaaacttggatgagtcttgagattgcacattgagttagcaaaatcgagggaaaatgaggccttaagtgatgagaatcaagcca

SEQ ID NO: 244424 - DNA, 4150 bp, Cannabis indica
actgctaatcaagcagcacatggtttagctaaatttgctttaaggttggatgatgacattagttagataggagaaatttcctatcttattttctctttcttgtaaataatttttttttgaacatcttataaataatttttttgagtatagcgtaatggtattttacaatcatttaatagcttaatagtttcaaggtcctatgttcgaacccacgacctcttcctttttcccatccctccctcaccactaagctagccttagtggcttatcttgtaaataattttgatttataataagagtgaaaatttctaaaaaaaaaaaaaaaaaaaagaaaaacttttagggataacttgaggatgcttataaacaaacgaagttgaaggaaaatgagtaaaacacgtgtaagtgaaacaaatgcgtgggacccacatgcaccccccacaatcctacaaaccgtgtaactcgcgcttcgagtttaggttctgttcgtttcgtaattggtttttattttttattttgaagtttgtattgttctactaaagtatgtcaactaaactgaaactgcccaaaaaagaaaacgtctagtgctcaactaataatcttccattaattatgccacccaactaataatcttccattaattatgccacccttttcactaatcaaaacaaaacaattataataaaaaatgaaaatgaaaatacaagaaagaaatagttgaaaatctacaagtaacgtgatgggttgcaatatgattctctttcattaataagaacaaaccaatttatattagcagttacatattacagataagaattggattcttcccttttatttcaaattataattattaatcattattttattataatttattattttttttgtattaattataatttattatttgttacacattattttatttttattctatctctaatgatagtgctttatggtctcacctttaattattgcttacaaaatacgggaccgtttggaagtctcctccttatttttttagtataaagtctcatccttattatttcatgacttatttattattattattattattaaatatatatggttttttttttttgtaaacccatatatatgaaattaaaacatgagaaaactattacatgttcttcttttttcccctgccccttgtgtcgttctcttctccctcactgtgtttcattctttgctttaacattcagacttttggcttttgctgtcaaaaataaagagaaaaagaaaagctctttcttttgaagcttttgtttatcattggaatcaccaccgcatgcttatttatttatttatttattttaagaagagaataatgaagcctccagttggtgtctctgtatgtttcctctccctatgtactctttttgttttctgtatatatgtttaggtgtgtacatgcctgtacttttaagatggttgttttgaaatcttagactgttcgagctacttgggttgttttcaaaattggatttttcttttgtctacttatgtgttttgaggtgacgcaagtagtttctcttcatcattttttttttgttttgtttgaattgtaatttcttggttgttgagaaacataaacaatgcagaaatttcttgtatgcttggtttctgctcctagaaatttatctgaaggagcagctgtttatgttggttaccgttttaaaaaaagtttataactaatcatgtgcttatgtgggttttgggttatttgaataactcaatcttcagactgtgtttggttactgagaaagttaggagccaatcccactatatttgttattaattttttgcttattctttattttgtttgaaaaatatacataaatatttgctagttttgcttggatggtcatattgggtcatcatatcggtgaccaagaatgattttaggttgggaagaggagtagttatcaactcaatggctattacccgtctgataagtttttaagacttaactcaaatttctcagtaaccaaacagaggccaggtaggatgaaaacgacatagctgcttccctcagcatatttgatttcctcaatcttataaatctgtgtaacttctttaattagaccattggctgattcaaggttactgagaatctctaattacttaacctctattcatcagatggctcaaaagtgtgatttagtattgatcatctttttgtcataatgaatttttaattcaatttcttatggtactcattgtagagatatcccaggcagacaaatattgacctcctttgtctctttgttgtattggttattattttatcttgttggtgggaggagctttttgtgtagcataagttcttggtaaaggttctattttgttactttgcattagcttttctctgcaacactccaaaactctttaaatttacttgaaattagttgcagttggagtatagccaaaatgaaacaactgtaatgtttcttattactattgctagttacatcatctcttgtactggccatcttttgacttgcatattgatggataggaatggttagggtgtatattgtcacctttgaaataatcattagaatataatgtctttaaaccaactataagttgtgaccctttttgctccttattttgtcagggtactttactcacggatccaaaaagtcggtcacgcttgtgcagtcttgtccttttagcttctttgctttgcggtgcttactttattggcaatgctttcattgaaaagcaatacaaagaagtatgtataatttctttaatatcactagaatatggtgtttcttagtgacatgatttcctataaattgtgcttgtattatgctataacctgtacaagtctacatcttagattagcttttgtggacatggaaaaagaaatatccataatgtattatttattatgtgagtttggggcatcttcatgatatctaattataaaaagagcacttactggttataggtaattctgcatctcaatctgtttccagttcaaattgctaaaataaataaaaatctcagcaataattgagatcgtatctcagttatttttacaagggactgctcctcatgctcttttatattttggtcacatgggaatatgaatttgtatttgttttgagtgtttatggtttctactcagttgtgaatttagtaacttagaaattataataatcttcctggtcataactatgcaaatctcgcatgcagagattggcacagtggaaatttagttatggattgcagaataatagaccggattgtcgggtttgtctcttgtctctattggattgaatttttttttatttcatagtacttttaaatgatttcatctttttctgtttttgatgtatcttctcctctcaggatcactgttttcctttggaaactgttgcactaccgaaaggaattattgccaaaacttcaaacttgcaaatgcaacccttgtggggctctactataaacagtgtatgcataacttgctgaatttctgggcaaattgaagtgttggattgtgggacattgactttctttttgaaaagaaaaaagagaaccaacaacaaaagataaaacttgagagattaataataataataatggtgtaactaataagcaatttcctaaagatatggcaggttcaggttttattgttcatgatctgtatttatttatacctactctctaagtcaaagcattattgtttcagaaaggctcaaaatcttcattgagcttgctggccattgctgttggaattaatcagaaagaagtagtgaacaacattgttaaaaaggtgctgctcactcttttgatgccttttctgtatccagaacttattgtcatgattctgattagtatctgttctatattgcagtttccttccagtgattttgtggtgatgctttttcactatgatggtttcatggacgagtggagggacttatcatggagtgatcaagcgatacatgtgtctgcagtgaatcagacaaaatggtaatgttaattctttcaaactaaaaatttttgaaactaaggtcaatcatgggaatttaccactatactgaatgaaacttcaaacaagtctagttgttttgcgattttttttgatatagtgattttgtaggtggtttgccaa

SEQ ID NO: 244425 - DNA, 1291 bp, Cannabis indica
ttaaaagtgcctatctaacggcaattcttggtttaacgattgttttgtttcctccattaactttaacagaatattcccaattaatttatattatttttcaacaaaaatttattcaaaaaatacacattccgttaacatctaaaaataaccaattattttttaaagcaatgcacgtatagttacagttacgatcgtaacctaattccctgaaaaaattataagtttgatagcgataataaaactaattctcccaaaattgtgattccattcgtaccctttatactccattcaaacgttgagatgatattaaaaagacttctaaagaatatttccgtcgatacagttacaaatttttcaaacagagaaaaacaggccatataaataccatcagccatccacatataactgactccactaatattgtagtgacttgcatatacaattgacatatagtgtcaccgagccaatttgttttcaatggaggctatgattataattataatctagcctcacaatattccattcaaaatcctttgatagtaatcatactgtcatgttcgccatgcattcaagctgctgctaatcagtaaaagcaccaagaacacgcattgctcttctattaaactacgatggaactgcttccttaggttctgtattgtttgtggaccacctttaaagaacgggaatccagaatcctttaatgtctgccatgcattgttcaatcctatatatatgtcatacatatgtatctttgttcaatcctatatatataacgtctatttttgtataaccatttattatcatttatgtctttgtcaatcctatatatataaccctattttttgtataagtatttattatcatatatgtctttgttcaatcctatatatatcgatatttttgtaagtctctagcccaacagctttcgcttctctgtttctaggggttcgtactctttgcagccagagaatggagttcttatgagtaagttagtaggatttttggagacttattatgagtttgatgatattagagaaattgttaagtattacattaatgctaattctaatagttaaaaatagaaaaactaacaaaattactcaatttttgtgtgtccagcatgatttgatttcatttatgaagatgagatttgtttttgtagcttgaatttgggtgaaggtcaaaagatcagaggttggttatttgacttttcacaattttattgttaagtccatagaaaattaaaaactccttcaataatgaatttttttttaatttttttttccttttc

SEQ ID NO: 244426 - DNA, 2415 bp, Cannabis indica
tttttggttggattaaatgattcctacagtctggttaggtctcagattttgatgtgtgatcctcttccaagtgttaacaaagcctacgctgctgttatacagtaagaaagacaaagaaatttgaccagtggattcaacaattctattgattctgataaaggtatatcaggaagcaatggacagtttgctggagttgttcaacctttcagatctaagtacaactgtacacactgtggaatgaatggtcattcgatcgagagatgttacaagctgaatggatatccgcctggacataagtatcatggcaaatttcctaatcgtgatgctaaaagaaatgctggaaaaccagcatgtgtcaatttcttaggagcggatgaaggaaaaacagaggagccttcaatggaaagagatctcatctctagtttgtcaagtgttcaatgccagaaacttatggcaattcttgctcaaaaagccactgagaacaacactcaaaatgtttctgaagatcagcctgtagtctcttatttttctggtaagaaatcctttactcataactctcacaggagcaacacaccatgtgtgtcatgattttcctttgttcaaaaatactagtgtcagtactaatttaaaaattattttgatgcctgatgtattgcatgctgaagtttcttgcataggaacagttcatttaaatcttgagcttatccttgaaaatgtcctatatgtgcctactttcaagtgtaatttgttgtctgtcaattcattaacagccacaactaattgcactttcttgttttttgatgataattgtgtcattcaagacgcttccaagaccaaggtgattgggatgggtagaaagtttgacaacttacactacctgaattgtaatcaatgctataataaaaaccttgtttctgtttgcatctttttcatattccaagatttctaatgaaaccgtttggctaaatagattgggccatccatcttgtgtaaaaattcatcccttgaataaagctttgaaatttcatgctgattctaattctttgtttcattgttctatttatcattatgccaaacaaagaaaacttcctttcatttcaaatcacaatattgcagaaaaatgttttgatctcattcatgttgacatttggggtccttacaacacttgtaccattgaagggtataagtacttcatcactatagttgatgattgttccagatatacatggatcaagctcatcaaacaaaagtctgatgtacagtatgctatacctcagttcattactcttgttcaaaatcagtttggtaagactattaagggtgtgaggtctgataatgccaaagagttacagttcaaagacttgttcaatgaacttgggattatgcattatcactcttgtgtgcaaagacctcaacaaaactttgctgttgagagaaagcaccagcatttactcaatgttggtagggctttactttatcaatcttacattcctttggtgtattggggagattgtgtggctactgcaacctatttaatcaatagaacacctacacctaacctcaaaaataagacaccttttgctattcttcattctaaagaaccgacccatgaacatttaaaagcttttgggtgtctagctcatgcctctactttgagtcaatcaaggtcaaaattctcacctaggtcagccccttgcatatttttagggtaccctccaggtgtcaagggttataaattgcttgatttaaacaaaaatatcacatttatctctcgagatgtttacttttatgagcatatttttccctttgtctctactagaggtattccacctttacatgagaatttttttactgcttcaccacatactgtagaaacttcgaattcttctgcaccaggtactgcatcagatgagttttctcaaactgactcttctgatccttctcttgatcataatttgtctcaattttcacatgtccctacatcaggtgagttttcttaaccttattctgttgagtctactattgtttctgatcatgatgatatacctgatctgccttctattgttttttctcacaccagatcaggaagagcagtaaataaaccatcctatcttaatgagtatcattgcgatcttgcttctaacaatttatctcaatctgataaagtgtcttttgtcaccactcatcccttgtctcaggttattggctacaacaagctgtcttcagcatttcgagctgctgttctggcaattttgagccattttgaacctgagttctttcaccaagtgttatagtgagatttctctcacctagaaactcgagaccagacccctccttgaaggacacgtgtatccagacttccagtgaaggctgaaatgtccaggagaggcttctcgaagtttagacctcgcccag

SEQ ID NO: 244427 - DNA, 2682 bp, Cannabis indica
gtaaaataattccaacaaaaacctggttttatctgttggctacctgtgacgtgtttatcaatgactcggtaaagtttctgttttcttttaaaaaccctaacttgcatactaaataattactcatataacatattatagcatgttcaaaataacacttattgagcttaataaccctaacttgcttccacttgattagcaatgttactacacattgttgctttcttatcttcgtgtaaattctagggtaataaccctagactgcgtttctaataaacttagggtactaatttaccgagtctaatttaattatgtcttgagcgcataattctttattccaacatatttagcatgcataacacccaaaatctttaattactagggaaataaccttaggcatataaccgctcattttagggtaataactctaatcctggttcttaattaatcacaaccatagtataaaacatgagcgccaccacgcttaactctacatgcaaactattgtcttacctgttctcccaagtacgtggagattccaaatctctaggtgctcctgaccaagtgtcggtaatcctagtcataatttttgggattcacaaatagggttaatccctaaatccatttttagatacataataaaattggcattcaaatctgataaacatatagagctcaaaataagatttccaacgatataaagaacttccaaaatggagtcccgagtcaaaagttatggccaaaataaaatcgagaaaaacagacattcccactaccaaacctagtcgcggcgaccaataatcccgttgcagggactgggtttagaacacccaaaaatcccatttttaaggcctaaaaatgcccaaacacaactctaatttcacctaagtcatacacaagaaaaaaccatgccaaaccaaggtattatcaggcgttagtaccacagaatataagctcaaaataaccaatttatactcatcactaagcatgaaacacaaatcacaccattgcacaaaattcaccagcttgaattttaaagaattcaaaccttcaaaagatacccagaaaattcagagcataaacacagaattaaatcacatttcacaaccctaaaatcaactaaaaccatctagatgcgaagtacataatcctattaactcaattacacaacaatcaccaatatttcacctcaaaatcatcaacatgcaccattagatcacaagaacatcaagaacatcttcaagcattatcaataagcttttaatttcagaaattaatcaagaacaattcaagataactacctcaaattctccaaactcccaatcaagtaagatcacaccaaatccaaactttgtcttccacaattttaagttagaaaaatatcaaaaggagagggtgagagagggaggtcgtgtaagggttaggaaaaccagaaaagatgaaatatattttgctcaaaattgcattttgatgaaaaaaaatacattatatggtcaaatgaccaaaatgcccctaaggcataaataatgtcataaacaatttttaagggtaaaattgtcattctaatcggacataaataatacatgcatttaaaatttctcaattattcatatgatgccaaaataaaatcctagaaatgtatttcgggccccgatcccagttcggcccaaaatacccgattgtgactataccgctccaacttatcaaaaaatacatgtagaaagatagaacgaatatactatataataatatagcccaaaaacacgatataacattaaaattacggttttacccttctcgagtcaaaattacgaaatgaccctagctcaccaacgggtctaaacatgtcatttattagtataattcatatatatatatatatattaaattatataataatataattacacattaatacacatttaactagttagagtttgctaatccgataattaatcttagggtattacaattatcccatccttatagaaatttcgtcccgaaatttacctaaacaactctggatatttttgcagcatatccatctcgagttcctaggttacctcttctactttactgttcctccataacactttgatcagtgcaattgtcttgtttctcaagacttttttttcttttgtccagcacttgcactggttattcctcctatgaaagatctggctgaagttccaatgcgtcataactcagaatacattccgaaattaattatgttgctaatcaattttattaggttaaactagtttaattaaccgattacagctattcaaataaggcaaatgggccttcttaattggggttgttcatgtgagggagggttgggttcagtatgtcgtacccactactagtggccctctaactctcacacaaggcccaaaggagaggaatttaaccttaatttaaacgactgttattcattgaataggcccaatacttattgggcctaaacaaaatctatcatatgtgataattttatttggtaacctagtccattttaattataaaaattaaatgggctccctatatgcatctaagcccaaagcaaacatataggcacaggcacacactgatttggatagattttatcatgttactagatttatacatagatgaaagaagattgcaaaatttacctattacaaattatttatttgacctattaacaat

SEQ ID NO: 244428 - DNA, 1462 bp, Cannabis indica
tttaagaaatttataataatgctgtacttgttcaacacaattcctgaatgtgaatgcaataatttaaataatcatggatattatttaccactcaaatatttctaaaagaaattggaaacaactagaagatgaaatgccacgcacaatcaaagtgcatgaatttgatatgttagtttttgcactatgacgtggcagtgactagatgatacgtgtcttaaatttcctacttgggcaaaagaaagtaaacctagcagcccccaaaggttgatataaagatttgtgttgttagcatatagcaagatgtccaagtagagtaatcaaggtacatctgagcaacgtacaatcacttgattaactcgcacacactcaagagcatatgggagttggcaattttagagataagcatcgtcacttccaagacacgaagataatccctacattcgtgggattaggtaaagaataaaggcaatatgccttggtttctaattatttgtattttaattatagaattaatgtactttcttattttatttattatagattaagggaaaccattcttcatgtaataagctcctataaatagtggcataaattcattattcaaggggacgatatttagttcagaagaacactcaaaagtgaaaagagcaagctaagagataattactcaaagatcatttgtaagagctttagagaggaagaatacctcatttttgttctcaagtaaatacaacaaaaatcggagtacgttgctaccattatcacggggtcgaacatctagaaattttgtgttctttttacttattttttttgctttctattacttattttgtctaatttctttatcgtgattcattgttgttttgtagaagcgaggtcaatattttggtactttcattttgagaaaaaacacaagcttttgtcttaatgttttgactggttaacaggattgttgtaacttgtcagggaattcaaactgatacagttgactcgatggtgacaaatccaattgtataaactcttggaaacacaagagatccactaaggacaaaccccgagcaggttaatacacaaccaccaaagggaggccatggagtcttcccctttggctacgttcacaccaagcgtaaaggaaactaggaacacaagtacgacgaccgaccaagccactcatggcactgagatcccgtccacaaataacattcaaatgccagttggagatgatactgaatttctaaacttgcgagctgtgacttatgcaaggtcataccaacaaattacaccatgatcaggaggacctccaagaagctatcaccttgcctttgacgaacaaagatgtcagttcatagaagggatggattggggatggaagtcatgagggctcaacaggcagccattgacaatcattgcaagcaggctactgtgtttattaaaagggcctactaagttactggttagcaac

SEQ ID NO: 244429 - DNA, 519 bp, Cannabis indica
attagttacatgatcagagtaatcgtaagcgttctacctataagatagccccgagattatctttggtccaaataccttatacacaaataaacatcgaagagcctgggagcttgtatgtttggaagatgaacggacgatatacgacttcccaagttgcaacgttaacacaattaatgtaattaatgtaataatagacataattgaccggttatgtaatccaaagagacatctactttctatatacatgggtgatccaaaccaaataaaagaccgaaaaatattctttttaaggtagactaaaaaaactaagttctaactaaatcactattgtactttactatctcatttatattgtgttttatttgcatactcacatatattttcttgaatactagtgaatactcatgaatactcctaaaactataaaattatatttacttcgaatacttcgaatagtgttgtctagtttcctcggacaatctggacaacaacgacagtatcaacaacaacatgtagtaa

SEQ ID NO: 244430 - DNA, 1147 bp, Cannabis indica
gaagcgtaccggagtccatagaatcgatctttgattggtatgatcttccaattttgcatcaaaaccttagaaaccttattttcctgatgatggggattcaggaactctgtaaaaatatgatacgatgcaaaatggggacccatacctgttatattaccaacagacaaacctgttggcaatattttggactatttctatttggcccctcatcaatatagaaattgtctaattggtatccacatattaaaatcatgacaatcatgcccttaagtcataaactttattccaaaatagaccacataaatttgacttatttatttgatgacccaacacacattttatatatacaattgtgaccccaataaattctaacataattgtgatgtggcggtgggcaacaaatgcatgatggcttgtgttattgtggccacgaaccacaatagtaatattgtttggatcgagacacgaaaaatccactttgctcatcctcttataggagaatttgaagcctaccttatggcgttgaaggtttctgctgagaagaacttgtcttttatcatcattaagagtgactccaaagttgttgttaagactctaagaggagaaatcaatcgatgggaaaataacaaacaacacttaccactattctgttttatgaaaatcttttattgcttgtagttttcttaagattgatagatcgtgtaatactactgcccataatttagctaagtgggtattactctataatgtttctagttttgttgagtggagtttgctcccaaatcacgtcctttgtagagactgtttagtttgacgttttgatttatatataaacgcttctttaaaaaaaaaaaaagattatcttaagaatattattgttgtggccctcattttagccaaattgagtttattcaatttggttaacattgtttggtggctgaattatccctttgtatagggaagttcatcttggatggtgccttgtttcaatgaatctagtctttggtcccttctttgagtatttttttttctcaagataggtgaggtgtttcctctacaaaaataaaataaaataaatactcactactagtgttgtaagttcgtgtgcccatatttattcgtgctttttaaaaaataggtcgtgtcg

SEQ ID NO: 244431 - DNA, 2908 bp, Cannabis indica
aaaaggaggcccttagacccggtagggctgaagtagtaaatatggaagtggacaagttaaccgccaatgatttcctctaggaatcattatactcgatatggcttctaaatctcgtatcagaactgaaacccaacgactaatggaggatgtgcatagactttagtgacctgaacaggcctgcccaaaagattgctttctacttccccaaatcgatcaaagggtagatgtcacatctaagtacaagttgctcacacaaccaaatcatgatgcacatcactgatgaggaacatactagtttccatactaataagtgtgtttactgctataaggtgatgttgtttggacttaagaatgcaggggctacatacaaggagatggtaaattggatgttcaagaattaattaggcaaaaagacatggtggtgtatgtagatgatatggtagtaaaatcctagagctccgaagagcatggtcaagatcttgaagaggccttttcaataataagaaagtataggatgaagttaaatcctaaaaaatgtacctttggagtctcctccgggaagtttctagggtatattgttagttcacaagtaatcaaaacaaactctaaaaagatcaaagcctttattgacatgccttctcccaaaaaatataaagacgtccaaagtgttactggacggatagccgcactcagtcgattcatctcaaaatctacagataagtgtattccatttttcaatgagttgtaaggcaacaagaagtttgtgtagaccgaggagtgggaggctactttttagaagttgaaggagcatttgactcgagctcctattttatcaaagcccatgtaagcggagggtttgtttctgtacatggtagtgtctaatcacgccattagtgccgcacttatgcgagaggaagacctggtccagtaccaggtttattacataagtaagagattattgggtgcagaatccaggtatcccaagatcgaaaaattgacatttttcttgctagcgctttgtaaaagctgagaccatacttcaaagcccacgccataagagtacacaaatcataccctgtggcaagtgcttcaaaagtgagagtcttctggcaaattgctaatgggccatggaacttagccaaatcgatatctagtaccagttgcgagtatctattaagggacaagcccttgttgactttgtagtaaagtgttaaagcttaaatgacctcccaaaagatccagtccctaagttggctacttggagggtctatgtggatggaacctccaacgagaagggggcctgagctggggtgatcttaatctccccgtaagcgcattagctccaaagtgctttgcactttaaggttcacacctctaacaacgaagctatattagtaagaatgaaattggctatgaaagtatgggtctaacaggttgatgtttacagtgattcccaacaggtggtgaatcaaatttctaggttaaagaattgctccatacgtcttattgtcctaggaactgctgtaaggttttaagagttacaacgttcatcaagttctaagataacaaaattcattcacaaacatgttagcaaaactagcaatggatcttgagatcatcgaacacagagacgtccttaagtgccttttggaaagaccaaacattgaagtctagagctaaatgccatagctgacaactctcactcttggatggcacccatttaccacttcctatatttggcagagcttcccgcagataatgatgcttctagaaaggtttagtattaggttcatcattaagtattcatggatgagaagttttaccaccgaggatagccaatgccttctggagcaaaaataagtgctataatccatgagattgatggtgggttttgtgtagaccacactttcaaacctaacctttctaagaaggtccttcttaggggtacttttggcccacaatgaagaaagactgcatagaatacgtaaggaagtgtgagcaatgctagagatatgccaaggttctacatggacctcctactgagatcacactcatgagtagtccattgccctttgcaatttgggggatagacctagtaggatcctccccacgggcaaaggatgagtcaaatacgcaatagtcgcagttgattacttctccaagtgggtcgaggctgagcaaatgaacaaagcacctccaagaaggtcttaagctttgtcattatgaatatcatgtgtcggtacgggctcccatataagatcgtctctgacaatgggaaacacctcgacagggagcacttcaccaacttctgtagcccgatcgcaggccaatgggcaggtggaggccattaacgagattctaaacaccaaattgaagaaaaagctctaagcttgtaaagcccactgactagaagaaattccacaggttctttgggcctattgaccaacaaagagaactttaacaagagacacgccatacaaaatggcttatgggtgtgaagcagtaattcctgtggaggccacagttccctctgactgataagatacctacgacccttcctagatgttgggttttatgccctaaataaaatccatttcaatataattagatttactaattaataaagatcagaatcattctacgttgcatggttcacatgatttatttcattattatgtttgatgtataaattctattaagtccagaacatatataaatttgttcatgattatagtgtcattagcacactgttatataatcatgattatatgttcaaaagtttaattcccataatttataagtttattacattcagactaacatgataatcgacgataaggtatacttacaccttggatataagtgttatgtcatttccagaaattgtcaaagtttaccagtatcggat

SEQ ID NO: 244432 - DNA, 1755 bp, Cannabis indica
cctgattcactcgagtacagctcgagatatggcagatctatttgctaccatcttaattgctatatttcatctttcctatttaaactccattttaggtttatggcaagttaccttgtttgtgtttaaaccatcaatactatcttcgtatattcctatattgctgaaaatggaagacttagctagatctttttctgcagccctccacctcactgatactgaaaacacaatccattcacttgttgagcatgtcgacccaaatgagggacttccaccagccccaccacagtttcaccttatggccaccctttataccacaaaaaattttaatcacaatgccttgaatttttttttagagaaacactggaagggacaattccctgttagtgttaaagaaagagcacccaattccaacctttaccttcccgcttttcactgtgatggagataggcgtaaagctatcctcaaccaaccatgggtgtttcacaaatgtcctattctgttggaaatacctgatcccgactctactctatccccagaaaccatgaaaaaaattcatttttgggtccaggttcacaatatcccgttctccagacggtctgtttccttagccaaattgttgggtcaaattgctggcacccttctcgaagttcatcaaccctctctacttgaaacctggggtttatatctccgaattcgcattatgtttgatgttaccaaacctttaccctgtggtctccctatcatgtttccaggcctagccttcccaacttggctggaaatgaaatatgaggacattccttatcactgctattactgcggccgcctaggacactcttatccttcttgtactgagtatatgagagcctcagatgagtcaagccagcccccaccccttccctatgagaatgtcctgcatggtaccactcgtcaaaacaatggtcctttgggctccttcccaatccttctcttaactccataccctcagcatctcaccccagtctccctacactgaaccccactacaaacaatctgataccggtacaccaccctcggggacaagtcttgcaacaagatttctctttccacaataaccatggaaaccataatgatactgttggcctatttctctctccccaccaaaacttgggaaactcgctgctcacggatcatgtggcaggatccttgacccatggccaatctcaatctcttgtccccccaggccccaactttgttgcactcctatctgttgctagtggaggaaatttatcttgttctgtttcccccagcagtcatcaactccagggtcccgaagttcatcttctccatcatctagtcaactacaagcccccctgatgatttccacttcccaaacccaactggagtccctccctgttgctaacattgctgacatccctactccttggctttttttatggccagtaatgatgctccaccttgccgccctccccagaaaaagaaccaacccacaagtgcgagtggtttcaagaaacaattggctacggttggtaatgagcagagagaaatgctgaagagacacatgcctcactctggtcaagaagtggtggaggttgtctcaagtgaagaggtaggtcctgtggattcacatgttgggttttgtgccctaaataaaacccatttcaatataattagatttacttattaataaagatcagaaataacattttaagttgcatggttcacatgatttatttcatgattatatatataatgtat

SEQ ID NO: 244433 - DNA, 1537 bp, Cannabis indica
aactttattttgacaaaaaatcaattcagggtcttatttatactattttaaaaaatacagggtccattttatcatttaacaaaacacaaggtccaattaataacttttgtaaaacaaaaggtccaaaatggtatttatatattgaataatataagacctaatatgaaattatactaatgacgatataatatatattaaatgatactaatgactattagcgtcttttaatatttctcgcaaattaactttttgagaaagttaaagttaaaactcactagtttgaaacaatgattaattacttaaggagcaacaaaagtaatagtgtaagtacttaccgacttcctgagaagtagctggagttgtagtgaaataaaagaataagaagcaaaacaagactactttgctcataacaatcttattctccattttctaaagcttcaagcaaattaaggttgatggaggtggtgatctatgaacaaaagagagagtttgtgtttttgttttgatggttgggtttaattagtatgtttggctgttcatttatatagaggtatatatataggtatagaaaatgacacgtaagcttgataatgacatggaattgtattgatgagccacttggcgattttcattagtacatatggtcctattatattagatgacaaatcttaatcaaaaataataataattcttcattttttttataaaaaatggaatgatttggattttggaaatttcccacacactttctatatttctgttcatattttgtgtatatgattattatttttattagtttgtccatttagagtaatgaaggtacaatactcttttgtattgtataagtaattatgggaaatttgaggcacacattttagtttattttcttacacttaaattatggtgtaattattttggtggtaaaaatatttcattttatgtatagttaatattataccacgtgaatgaaatgtaaaagtattgagtcatatataaaaacataagatacttaatttattactaattagttttgagatagaacttcgtgatacttgtcatagtattagagtttcatttcgatccatacacctatctaaatagtttgccaacactatgagataggaatgaaatgattcaagattagtgagtaaaaatagccaattaaatatatgttttttttatatatatatatcatttttaaaaatttcccataaaatagctatttttaaaaaaatcatatttttacacaaattttgtataaaaattcataaaatttataattttcttataatattgtaataaaatgactacaagaatttttaaaaatttaacaaatttgccaaaaaaataaaatatacataattagaattttagtaccacaaagtaatttacataactatttaagtttcaaatatctttataagtttataacattcgaattacattattgaaagaaaaatttttacataattttgaagtcaaaatttataaaaaagattacaaaaatattttaatatgtaatttttttttattttta

SEQ ID NO: 244434 - DNA, 1539 bp, Cannabis indica
taaaaatattaatttttatatttatttaggtccaatatgtgaatgtgcaatccaaacccactaattattgtattaaaacttaagtgttgctcaagctttattatatttgtgatagtttaattatttgtgatatagtccaaattgcagaaatcttaccgtaccacaatatttttttgcggtgctatttctgtagttttttagtttcacgatacgagtacagtttgagaaattaaaataaactgcatatgcaagttggtctgacgtaaccgttgttaattcacctttgtcatttctatatatacatagcaatatatatatatatataaatttctataaatattggtgtttactttggatggttttccttttaataatattaatatttggtcatcactaataagtagctaggcgacgaatactgacactgtgactgagtcaacaatacgcagtagtacgtacattatacgtacatattattgaagcttattagctaactaatcatatatgtttcaattatatgcaaatttcaactttgaatggttgttaataacttataaattaatattctttaacaagcaggattatattgatttaattatatctatgtaagtgatgatatattattacaattaattttcattgattaataatttgaataattaattataatgtaaaaatatttgtatttgatttaaggttgggaggcgaacatggacagacaacgacgtggagtaagtatgggagctccaatgactccgccagccatgacaagataaattaaaactgtccctttcactcgaattatttatataaggtctttgatcagttttctgaagttgatatattatcgattcccaaagttttaattagacaactataagtatcaagccataattatatatatgatagatttttgattattgaaatctataagaaaacgtagttcaaattcacagttgaactggattagctagtggtgttcacagcttaggaataagccccggccgtcttggttatttgcttatctttttgttgttgttgtttattgttacggcccacctcgtgtactttgcctttcgtcttgtctgttttattccttacaatctaatatcttaatttgtattgttggctcaaaaattaaaaagaaaaaacatgtacaaaagtatatttattaaataatttttcagtggatacattattttttttagattagagtattttaattttcgacatcttgataaatttcaatttttttttaaataatttataactgtggaagataaagttcaaaataatccaattagatagtatatataaataaaaaaaatggtagagagtatacaattacctatttgaatattatttttagtacgatagattatttagaattttttgaaactgagcatgatcactactacaaaaatggattttcccgacgcttttaaacagtcgtttaaagtattgtcgtcggtttctataaccgtcgcctattcggccgtcgtaaattgggcaaaataggcgacggttcaaaaccgtcac

SEQ ID NO: 244435 - DNA, 3758 bp, Cannabis indica
aagatcctggtaaaataaattcccacagttaaatgctgcaataatggagtaggtgttcgatttattaagtatacagcagtgtttatgagatatggccaatagaccaaggctaaggaagattgaaaagccaaggccctagctacatttaaaatgtgttgatgttttctctcaacaactgagttttgttgaggcctttcaacgcaagagttatatacttagatacctttttgaacataaaaagattttatattgagctcgtttgcattatcacatcttacagctttaatgtttttagaaagttgtgttgaaatgaggttataaaattgtgggattaagtgtttcacatcagatttggattgtaacatgtaaacccaagtatgttgctgtgatcgtccacaatagttagaaaatatctataaccttcaatactttgaacatgaaaagggccccatatgtcaaaatgaaataaatcgaaacaagattcagcaatatgattttgacaattgaatggtaatcgtttttgtttagccaaatgataaatagaacatggagaaaaatcaatatgctcagaatgtaattgattattgattatctttgttgtggacaatgaagggtgtccaagtctaaagtgccaagaatggacactattacatgatttagtagagtaaatatttgaattacaattattaggaggattgacagattgtagtaggaagtataggttgctaatacaattagctatcccaatcttcttgttctgtgtaccctggagtatgcaagaattatgagtgaacataattgtgttagtaatggtaagaaggtaactgggaacactaaaaagattaaattaaaaatcaggaacatataagacattgtagatggttaagtattttgaaaaaaataatgtcacctgatttaataactctaatggtagaaccattgggaagagtaacagtgttagtaatagcagtgttgtgtaaattggaaaatatagaacgattacaacatatatggtgtgtagcaccactgtcaacaatccataaatgattagaggaggaattgactttaccagaaacatgagaggcaaacggtttggatgtatcagtgggagtatgagttggttgcaacttttgagtgagaagagatatgatagcttgaatatcttcctgttttgtcaaattggcaagaacaccatactgatctgcagaggttgaggcattatgaacagagggagtttgctctattttctttttgtctccatagctagggtcaactaatcaagaaaaaacacttttcctttaagtggctaggtttatggaaattggagaaataaggcctcattttctttgcaggtcgaggatttgttgaggctgctgatgctgagggattttgagcaagagcaatagctgggggattgtttaattgaacagaagcaagaaggggaattcggggattcttaagtttcctttgtctttcttcatggataaccatggagaaaactttggacaaaagggaaatggatcaattaacaagatttgagcacgaacagggaaaaaagattcttttaaaccagtaaggaattgaagaatctgttcttgattcaagaaggccgagttgtcagcagaagcagcacaggtacatgggatccgtggccttaattcttggatttcatcccacatacatttaagctttgtaaaataagagctaacagaatcatctccttgtcgaagagtgatcaatgtttctcttaattcaaaaatctgaggaccattaccttgatcaaaatgtgccttgagttcggtccacatttcagcagaagtttcaagaaagataatgctacttttgatttctggtgtgactgaatgcaaaatcctggacatcaccatttggttgcatcgaaaccaatggtgatggagaggatcttcgatcggaggttgatgcaaggtgcctttgagaaacacagtcttgttttgctccaacagacagctcaaaatcgtgacgccaagcctggaattgtgatcagagagaggaggattaaccaagatcaatcctggatgatcaccggagctaagataatatgggcttgagctgtcttcaagagcaggtcgaggaatgtgaagatgattttgggtgagattgtctccagtcatggtggaagctggaggaatgatcagtgtatctgttggtggagcagctggaagtgtagaggaattatttggctaaggattgtggccagaattcctggaagcagtcgctcgagttctaaccatggttgagtatcaatggcagaaaaaacatagagaaaaagaggagaaagagattttatcgtctgataccatatgagtaaaaacagttatgatctttattaatgaaataagagaggtttatatacacacccatgtattacaagactcaatagatgaataacataatcagttagtaaactaactgtaactgacaagagaaacaaacaaaactaacagtctaacagtttaacaaatcagttgtgtctaagacagtgaacaaaaatatatagcatagtgataaaatatatagaaatgttcatttcaattaataaaaaatacaataaaatttaatatttactaattaataaatatatttctttgatgaataattattttattttttattataattaacattaaatagatattataaaagaatatttttatttttcaaaataatatataaaattcttatactcaaccaaacaatataatttaagggtgctgattcggtcacgctttattaaagagagtaacttgttactctcttaaatcataaccattcattttttatatatttactgacattactatgacactggcaggttgaataacagaagtaagctattaatgatatttttgcaagtcaccaaaaaaacttgtggcacattattggctgccatattttaatgcaatgaattggtcttttttaatttttttgaataccaaattgttcttaaaataggtattcaattcacttgactttcaaaatattttatttaatgactgaaatgcctttaaaaataattagatagaaaaatcctttagtttgaatgtattttttttttacctaaatttttatttaggagttttttatttattttttattatttataaagagttttttatttgattttttgtaagttgttttttgtgttaattaaaaaatatgagactttttttggctttagtaatgattaatgtaatttaaaattgtaaattaattttatactttaggatgtgtaattttttatgggacattgacggctaaaccacctgaactttacggtttgtaacacttaaccacaaaaatcgaatatttggcggctaaactacctaaaccgtagttccgttttgctctgcacacctccgtccaaaaaatcacagttaagtgccacggtggactgtccacgtgtacacacttgtacacgtggcaaatttttagtgacccacataattttaattttaaatatactaaaaataatttaaaaattaaaaaaaaacaatttataaaagtaaaaaaaaatacttttttttctttttctttttctttttctttttctttcttctctctctctttctctttcttcgagtactgggagattgagtttgaatgaggtgaagttgattaagatgaggtcgaagtgtgggtcttttggcttggctactaatatggttgtagccgccactaccaacgtcgcgtcgagagtgattgagatgaggtcgaagtgt

SEQ ID NO: 244436 - DNA, 1470 bp, Cannabis indica
atattggtgtcaacacttatcactaccttaatgaccattcaaaaccgaaaccagttgccacagccatgtttgttgccctaatttgggcgcaattgggttatcctagctactacaatatatctttgcttccatgaaatttgcattgccaactctatctttattattgttgcttcatttggcttccttacttcgtttgtgatatttggtcctatgttacatattctaataccttttttttgctgctggtcacagttgataagtgggttgaaaacaggtgggcaaattaatataggatattcagataatattaatatcatgatgaattctactacttatattttttgtacttataatgtcttttcgtttatatatgttgtggatattatttaattatgtaattgtttgctagataatgagaagaattttggagagattagttaaatggaagaagttatattttatatcttaatagtgatttttgatttggtaccaaataatgagattacatttttattttaggactttatagactaatctataaacattattaaatgactagtttctacataatttttaagtgaaagataattctaaaaaattcaagagtactcaaacaaacaagaaaactctagatactttagtaaatataataatagtttagataactttagtaacaaaaaaaaaaattctaaaaaattaactatattaaattaataactctaagatttagaattattttgatatctttaaacttgaatttttaactaaataatagagtaattagtgtctatattgtgtaattgtgtttagtttgttgtgtgtttgtagtaaatggaagtttgtgtgtgtgtgtgttattaagtgttagatagacttatattgcttatttttgtgtgtattaagcaaaggaaaaaaaaaagctgaaatgagtgttgggaagtgtttgggacaacaagaaaaagagcatgaaaagacttgttgctgactgtcattgctatagcaattatcgtgtagcaattggccagcccagtaagtgaattgtggcagaaattccagctggcgttaatgaagaataaaggatgcttatgtggtgaaaatgtgtacaatgactcagccaatgtgtggaaaaagaagggcaagtggacaatgacttggatttctaattagggtaaactttagtaccctaaatggggggcagccaagagaatagggagatatagatggtggctgcacttgaaaagaaagaggagtacgaaatttcagagagaagtacaaagaaaaaaaaaagaagaaggctaaaaagaagagaagaagaagactaagaaaaggagaagaaggcaacctcaatagagacgatttgagctcaccaactcatttctcttgctctcctcttccattttgtatcattttctactctttgattttctctttagctgcatgaactatgttattttttggttttaggttttt

SEQ ID NO: 244437 - DNA, 1488 bp, Cannabis indica
cagaaatataacttatgtattatcaccgcaaaaaattaaacttaaatatttacttacaaccgataattaaacttaagtatctatgccgtaaattattcataaaaaaaattattaagcacaataaatatcgtgtatttatgacaattttttttttctcaaaaaactttacctatggttgataataagatctcatttttcaaaaagttttacctgtagataaagtgatctcatttgtaaaacgcactttagattagtggatatctgcttaatattcttcttgtagattttctcttaacaatcatgatgtttgtgagaaagataagcagtgaagtaaactaagtttaaacataatcaaagttaacgtagatggtgctctcttcaatcaatctaataattttggtttcaattttgttgctaaagatcatgagggttctttaattgaggccttccatttatccaaatcaagagttgttagtcttgagatcgcaaagacatcaaaaatgcaaactacaactacactgcaaagaatttcaaaccacattttttattcggtgtgatgcgttgcaagcagtttgtgcggtgtggacagtttgatgaacactctttcttattattagaagtttttatcaaatttatttattatttttttaatcttatatgttttgtgttgtttatttatgtcatatatataaaagtaaattttattaaactttattaaggtgttgtttggtaacatttttgttttataatttcttaatcacaaaatgaaagtaaagtttttgtttttgaaaaacaaaaatgcgttctgtaactacttttatttttcaattttaaaaacagaaaataaaagtatattcactaaagttcattttcattttttaattttatttaagtcgggtctaagtccaggattagagatcgagttcaacactagggccgtgaggggggggggggatttgggtctgggtctggtcagagttcaaaaatgaaaacagttttatagaacatgttttcaaaaaataatttcactttatcaatttaaaaaaaaaaaaagaaaaaaaaaaggggtttcaaaaaaatattggattttgagtaaaagtttacaattttattgttatacggaattttttacaaaaatactgtctttacataaaaaaacaaaaaaaaaaaaaacaaaacaattaaaaacaacagtagaacaactaaaaaacaatcgtaaaataaatgtgaaaacttaacacagtacacagtatttttgaaaataattccgctcacagtaaaaaaatggtgtaaaaatctcattaaaaaaagtattatcaaaagctacctaaatttttctatatttatgattaaactcctaaaaattggattatttcacaaatagacaaaaacaataaaaaaattacaaaaatacggtttaatggaattttaaatatttttacgattttttttattttatttacagaaaatatagtatttttatgttgt

SEQ ID NO: 244438 - DNA, 1801 bp, Cannabis indica
tttcttttttttttttgaaaaagcgcaattaatggatgagtattattatgacttagttttttttttttgccatgattattattattaggaaaatttaaaaatatttttttaaaattgttttcatatagttgtggggtttaatttttatctcaaaatatgtcattttaacttaaattaagcttttaatataacctttttttttatattaggcaaatctattaccatatttgaaattaaaacatttttactatataaaatacttcttacaagtacatattcaattaataatatcttagaccgttattttctgttttctttccgttattttctgttactgaatgtactgctctatataaacccaacaaatcacaattgtaccaattcaatgtaaacttttcactcattcaataaaatctctctgtttcttctctgcctttcttctaatatggtatcagtagaaacatcttcaagaacccattaaaagcttcttcaagatcattcgaaaagcttcatcaaggttccaatcatggtgagaactcgagcgcactcttcagctacttccacagatcctcaacaaccagtggtcgatgcttccaccgctcctccaccatcaaacgcttccgccggcaatctgcctcaatctgcaccacccataccagaacagatcagatcagatccagttcaacgtcctgcgtatgaagatattcgatctccttattacctcagtaatgccgatcaccctggtcttgcattggctactcctctactcactgatcgaaattttcaaccgtggagaagagacttcatcctctcaatcggtgcaagaaataaaactccttttcttgaaggtactttacctcaacctttaccctcagattctctttacagttcttggactagatgcaatcaaatggtaatgtcttggatattacattccgtatcacctgaaatcaagagcagtatcatgtatcttgatactgcttctgagatgtggacagtactcaacaaccgcttcaaccaaggaaatggtccccgaatctttgaattaaatgagtccttgacttaccttcaacaaggagaagaatctgtcagctcctacttcacaaaattaacagccatgtgggatgaaatcaaccagttacggcctcgaataccctgcacttgtgcagctgctgctcaatcccacgatcaccttaatcatgatcaagttttacaattcctcaaagggttaaatgagtcataccatgccatccgagaccaaatcctccttcttgacccatgtccctctctcaataaggttttctcaatggtcattcatcaagaaaggcaaagaaccttaggcactcgaaccccacaacccctcactgcagctgcaactcataacagcaacaccattcccacaactgaaacaaatcccatggcaaatgcatcttccaagaacaaaagacctaggcctcattgcactcattgtcaaaagccgggtcattacaaagacaaatgctactttcttcatggttttcctcctggttatgggaagccaagaaacaatgacaccaacactactcaaaatcgcaagaatgatggagcttccacatctagaaacacccctcaatcctcccaagtttctgccaacacaactgagcaagcaccactaactcatgctcaatgtcagcaaatcatttccatgcttactcagcaacttcaacccactgatgcttctacctcagatgggccaaacatcaacaattttgctggtaaacccgatccattatctcctctttcctggattattgatagtggt

SEQ ID NO: 244439 - DNA, 1686 bp, Cannabis indica
gtcatctgcgcaattcaatttcataagagaaattagagtgacatcataggcagatgatttataaaccattcatctaatgaaatactatctaagcaaattctaaatgataaagctaatagaaaaaattaaaggataattttgatttaaaataagaatccaacgatgtctcggtaggcgagagtcaaagttaatcttattttataaacttcttcattgtttcatattgcaaacactagtctaagttgtcatctttggtttttcattgtcgatgatgaagaagaggattcaaatgtcatggagaaaaatgatgagtgcttagaattagaaagtgacagtaataataatgttgtatcaattattgatgatgataaattataattgtactaatattataatatcaaataataattagcctatattttgtgatctaatatgttatgaatatgagtaattatttaaatctaaaatatgttctctatgtatagtatatccgcagaaggtgaaagctaataaaaagaagagttaagagataaatataagggtgccaatattgaggaagcaatttccaaagagttggagcccaaattacacattacacttcatgaggagatggatactcgcagaaaaaatggtaaaaagttcaacaacatgataaaacattttatccccatccccatgaataagttcaagtaaatacatgtgtcaaagctgaaattaatgcagtgtgggatagacttgaggtatttattatattattctttaatttataatgaattatttgcttctagacccctaaacattatttgctataacaactaaccacccaaactcaacttatgtttgcaaatttggttttccatccaataacttctgttaactctctacgtgactctatataaattgtcctaagttattttttagtgttgtgtcacctaaatccgatgatgtgtactataatttttttaaaaaaataaataaatctaatttaaattagttttaatttaaattttattattattattattattattttcctttctctttcttcttcacgtttaactttctcccccgactctctacacaaccaccaccagccactacgcaaacctcattctcatataagttttgaaatcttaaaagagggctttgaaaaaaaaaaagagcaaaagtggtcttttcaaaccagggaccgccataactaacgacaggaaagaaaacatgagcatgaatagcgaaagaaagagacatgagggttggggatagaaaaatcccaaagtgagggagaaagaggtttggggtgcaaagatcctgagattttgaggggttggagcctcatttcagggttcttttgggttgacgttggctaaaaatagtcgatatgagaagagaaccagatggagagagagtgggggagatagagaaaaaatagttttcttttaagtttcttattattatttttttggttgaaattttttatgtataaatcagttgtgtattattgatggtttcagatctgggtttgtttattttggtttgatttttgttcaaattttttcgggtgtggtttggatgtaaaaaatatattatggtggtgtgggtagtgatggtgggtggtggtgaatgaagattaataaaatccggaaaagaaaaaaatcaaaagaaaaacatcgatatagtggaataaaa

SEQ ID NO: 244440 - DNA, 1816 bp, Cannabis indica
caaatgtcgaagcccccttttgcacacttcttgagcctctccctatagacggaaagcctattttagaacagccctagaacactttcgagcccccattgagtctcgtatttccttaggttgctataattcctgaatttattgacgtattgatccatctcccatggtctatcatttaggactaattttgaagcattttacttcgccatcatctgctcctctaagtcagcttcctctcgacgactgcgtcgaggcatgatctctgtacaaaagaagaaaaacccaagcagttagccaccctaactacctaatatagaaacggagttggggtcctcccccacgaactgcttggagaggttccaactagactaactgcctagaaacgaagactcctcagagttattcgttccaagcagggagtagggaacgacacatagaaaaaacacgacggagatcaacagagagcccaaaacatttttggggcaagggaaaaattttccagcatgataactgcaaaattcaaaaaatagcatgatttatggtgcctaaattctctagtgatagcagtcacagagatcaaaaaccctaaattgcctaccagaccaaacatgaaaaatgatccccaaaaaatatgatctagaaaggaaaaaagtaaaatacctgatatcgaaagtggggatgtcaaactaatcgtcgttgggttcggttggggaagtcgattgcacttttcatggaggagggaggctagggcgatcaataagtcgacctctgtgtcaaaatctagatttgtattctcttcctccagcgtaagactcatgatcgctgggggttgacagtgtggaaattctcgtgctctgatccttagtagaagatgaatgtagaaatcgacagcacattccaaattgctgagaataaattagttctgagtttagttcttggtatcctcgcaatcgatgttccccagagtcaaggcagaaaccaatgataaagatgccttttttcaattttcgcgccaagaagtgaacagtcgtaaaaaatgtagtcgtttctagaaaatgactcctcgatggtcgagcccttccatcctcatccgattgacacatgaatgtattatcatcacaaatggaagcccccttgcgcagtcgagtaacattcaaaatatcatgattttattccttagcctccacatgtccatattgaaagagtgatgcaagttgccaccatgcacagcattctcgaagcttgggggtaaatgttatccgcgttttcggtattggacacgtggaatctaggtcagcatcgaagacccatcagtgggatcctcaacaaaggtaaagtgggccaagtccacttggataagtccttccaggaatgtatcccaatttcgcaattgcaaagccttctgccttcaatgagctgtacccaaaagaatgtctagtaccacgagactggaaagacaagacaacgtgttcctgaaagacccttctaattttcttttttattcctacgttcaaataaagaaattccagctgccagatcgtaacagagtattgtatcatgattaatggagaaactttctatagtgaatattatgcaattaagtcacaaattaattgtccacaatcagtgcacatggtgttgaccaaatcaattctaatctgatctgcctagtcagttgatcatcttcttcatgagctggacttcatgagacaacctaagtgtattatttactgtaaactccccaatagagagaaaaggaaaacttagagcttgtttggctgtgttttcagttttgtgtttttaaaaatgagaataaaaa

SEQ ID NO: 244441 - DNA, 1906 bp, Cannabis indica
ctctctctctctctctctcaggaccacgaacgaacaggaaccaccccttttccctgtcccctagccttgatgacagcgatgtcgagaagccgatcgaccctcctcctcgacgaagacggacgaagctctccttcttgccagtgtctcgacaagagccaacaacctaccaccactccctcctcccccgtcttgtccatccaacgtccaccacacctcatgagtagcgcaaattgtaatttttttttcttatttttttaaaagcttttttttttttgagtacaacttactaatttttttttatatataaataatatatttcttttacaattttttttagtttaaaatataaatttaacaaataaaaaatttgggttaaaaaaatgttgaccaagtcaacccgcccaacctgaacccacaacacgtgaacgagtggatttagattcatatttttggacctgaaacttgtgaaactcaaaatttgatcaacctgctcgatgtttcagccctaaataaatgtgatgattaaacacaattgtaacttttgccttttcaaaggttttttttcggtgaaaatttagtaacttcattaagaataggcaatcagtacaaagttacattaagaaaatatttggaatattattgttgacacaatttttcctcaactggtctaagaggaccgtaaaaagcaagaggactgcgacgaattaatttggctaaataaaaccgcaataaatgaaaaaagacaccaaagatttatagtagatcaccccatgttgcgatactaatgggactatgtctactttatttttattaaatcgattctacacaccagagttatgttctcaagagtgtgtgggttatagtacaaaaggagatttctaggcgaaatcaatatcgaagcttatgggtaaaaggctcatgagagatccaataccataaacctgacaatggtggtggtaattttcttgggaacaatacaccaatgagagtaagaatagagaatggtcttctattctaggtaagtgtgtataagtcaatggtggtgggataatggaggcttggtgtcgtatcaatatgaagaacttaagaaaaaggtgaagggggaagaagggatatgataatattgccaagtcaattagaggtcttggaagctatgaaggaagcaatcaaggattttcaatctcccccaaaccctagcctatcactatctttatataggcctagggtttgttagtgatcccccacatgtatgggtgtctcactgtcaaatccagtatctttttctaaataatgaattaaaaaaaggatgaataaataaagacctataaaatattcctaattcataggaaaatatcccacaatcattgggattgttaacttgcttatgtggcattgtgctttgggaatggaaaatttgagagagacgaccatgggatggcacgtgtcagataattcatgtagagaggcacaagtgttgtggcacaactctcctaaaatcccttatggcccacacttagttttaaatctaattaattcccaagtaaagtgtgccaacttgtcttataacccaattttgagctcgataacttcaaaattgcgctatgaaaaatatctttcaaattcaagttaaaacaaatcaattggataaaatttgagggagttatgcctattttacctaagggtagtatgcacttttcagctccaaattcaacctgtgccatgtcatcatgattcgtgacacctcattatggtgcaggtcagccatacatgttctcgaacacctcgaggtgtgttttgactttttttatggtgaattatattttgggggtctcgggaccccaaaacctcatttcgatgctcgaaatcctaacgggagacttgcaccatcttttggtgccaaaatatg

SEQ ID NO: 244442 - DNA, 552 bp, Cannabis indica
ttgttacataactaacttctaacagcaaatcatgacagcttactaactaactttaactaccaaagttcaatacacaacaccttagcaattttaatagccccatcaaattcttaaccatgatttctattttagtcatttcgtcaagactaaatttcacttgtaattgtttcatgtgtgtttttgttattttttttttaatattaattcttaaaatgtagacacatattcttagaatttgtccttgtatttatgcttgtatttctcacttaaactcttgaattgtacttagattagtattacactagtgttataccaacaaatcggtttaaataaaataaacataacactcaaaataaaaaatatatttaaaaaacataatgtaaggagaatatttgcaatacgttttatagtttgggatatttgttttaagaaaacaaatattccgtgtaagtcattgttgagagaaattatttactcttatataaatatagagtatctccactcaaaatttagaaccagaagttacattccgaaatattttttttaaatttt

SEQ ID NO: 244443 - DNA, 2636 bp, Cannabis indica
gtgtgctgcattgtttatcatgtgtgtgaccacgtaccaaaaaaaaaaagttatcaaaaattaagctcagggtcctatttttactattttggaaaatacagggtccattttgtcatgtaataaaatagagggtctaattagtaatttttgtaaaacacagggttcaaaatagtatttacccaaatatttataataatgatagttttatttgaattgagttaagattgcatatgaatgagttgttttggttggagtattctttagcagacaaaaataagaaaaggggaaaaggtattttgagtgagccaatgcaatggttggtgtgtgaacaagagaagtttggtattgttcaagtttgatatttgatagactatatccctttcatatagtattactagtatcacttgtttgatatagtattgctagtattactagtatcagtaatactatagtaatagaccaattctcagttggcatcttctttttcctcatggaacaattttattgattttgatccatataaattaagtaaatgaagtagacccttttaaaagacaaaacaatgtatactgaatgtaaaaactaaataaaaacaaaagtaaagaaccaaaaacgtaaatgcagaggaagactagtatatatatagtccaacgattttcttttttctgtaatagtccaaatatttggtttctagtgttatattattattatttagggctatatatcatatatacgtgtgctatcataaaggacatgtttggatttagatcatattgtcaggtgtatatattggtctcttcaaaacaagaaaaaaatgggattgttgttctttcatttcccaagtccggcagtagcatgtgttttgtttatggtggacttcgtttcctagtcagtagtcgcggacctaagatttaaagtgaggaggcgaatttttttttgaagtgagaggagccaaaaaaataaacttaaaaaaaaaaatacaatgggattagaactcttgtcttctaatctatatgctaaatagcttaactattacactaaagttaatattatacttataaatatatcttttattacaaatacatgttacaactaattaaattgcatatatattttttttccaattttttttttcagggaagcgattgccccacctcggttatatgtgagtccacccctgctagtcagtgtcaatgctctgttaactaacaattgaagtcatttcctctatttcaaattattattttttatctatatacctaaatataataaccatgaaacatctcatttgtaggattaattatggtaatagttattatagattatttgagcgaataaaaaaaaaaatagatatttgggttctatggattagtgaattggacatgccattttgataaatagtagtagtagctatggattagtgtttgctgtaattcttgtactgctttttgactgaattcttgaccattcatcatagatttgttatctatttactgatgaattaatccttattttttcttttttgctgcattataaaattgttcttaatactactgcatttattttatttttactaaatcttacagttggtacactggcaagcaatgcaataatgcaaagcagtggatagaataaaaatctgtactgtctaagtattttgctttccactttaaatattacttaaaatatttatggtggttgtaagagttttttggcttgaaagtaaaagacgatatatgttgttacactaatggacatgaagaggttggatatgtacgtccgtaatcttattgaaggactggttttgattttttttgtttgattttttgtggctattgtgataaaaacgggcacaaagttgagagggtcaccttttcacacactcacctaccctatcaataattatccaaaaaataagagataaacttgaaagaaacaaagcttagcctaccttagcatatcttagctttgttattgttagtcatataaataatgttatgcaagcaattctaatatctataattacaggtgaggaaaattacaaagaaatctgcaatttttctctatgtacagcaatgcgttattttatagccgacacacaaaaagtaaaaaaaaaattgcgtaaaattatgtgtcaagttgtaaccgatgcaataatctaattagcttcggttacaatataaaactaagtttctttcttcatttaagaactgacgctaatagagcatactttttgcttcagttctcaaccaaagcaaaaaacaatttgtgtcggtttagaaatgaaataaataacttgattttttgcgtctgctgttattacgtcagttgagacaactgacacaaaatgtttatgtgtcatttaacaactgaagcaaaaagtcatttttgtagtagcgctaacaacctcgtaaattatcactaaactcctaaaaaaatccataaattgcagaattgctgaatttcgtgtttcattgacaaaaatggtatataaaaacaaggatatgtgcagatctattcatatcaacataaatacaactaaatcaaacagtaattactaaagaaattacatacccattatttttttgaaggaatttctttgtaaaaatattagtttcaaggttgtccaaccaact

SEQ ID NO: 244444 - DNA, 1213 bp, Cannabis indica
aatataataaaaaatatatttttagtgtaacttttagtattgtaattagaattaaaaaaaaaattaatgctaaaatagtattcttttagtgttgatttaacactaaatttaggtttccccattaaagtgccctaataagtccttttagtaattcccaattaatttataaatccaaatgttaattaaattggtaaagtatgttatgttacgcgccgcagttgagtttaagagaaattagttggaattaaaagtgtgtctgagttgtggattctttgactgttgagtgaatctaggcccgattcacatactcactccatggggaagagggttttgattcgttacacccgtaaatgtaatcagtttctagcaaactaatatcgaccgcccattctcgataagatcaagcactaacggacaagatcagactctcggggtaggaccgtacattttgactttccctattagagggtattttagtcattgcagtgaaattgatggtttctgattgggcagagaatcaaagaaacatcagatttcttaaaagattttgtagtaggtggtcccttcccttcatttgaaattgaatgttgttgttgtggtccttgttctccgacactccatccaattcaggatttgaaacattataaataaatatcatgcgctaacacgtggcgttactgtattagtgaagcatttaatggacctgataatactgcaccttttaacagtttaagctttgtttttttcgagtaatgtatttttactctccaggagcgggccccatacccaaatctaacgctaattcttacgtcctcgtcttctcctcaaggtgaaaacaccctgtctaatccacacgcgcgcgttactcacatcctctatctcctaaatttacactaaatttattggagcattgttattggacattagtagtacccaacactttaaacatctccaataatagtattttttaaggatgttaaaaatttatacatatttaaaaatataatattttattttatctctcttccaattatttttagtacttttatttttaaaaatactctaatatataatactctttaaaaatgttataattatgatctcaaaagtactaagtaccaaaaatacattttaacatttctctatttattgtctcatcattgtcgttaggtattgtagtgctcacattcatcctatgaatgattagttattt

SEQ ID NO: 244445 - DNA, 994 bp, Cannabis indica
aatttttgctgtgcaatttaatacagttttagttatatcagtgtgggcagtttgaaaaattacttaaaatgtttagggtactaataatgaaaaatgtaattttaattgagaaaaatatgcattttagtagcataaaaataaaaatatatataagtaaaaataagaaatataaattttatgaggataaaaatgaaaaacataaattttcaggggacaaaataaaaaagctataaagatataaataaaagatattaattttttgaggacaaaacgtgaaatattttaaaatatatatataaaaatgtaattaacaaaaaattaagggagacaaatgaccccacgtgacccctcttggcttagccccgatacctaactatatgttgaacaatttattgagttgcatgcatttagttatgtttctcatatttagattaaaaattggaaaataaaaatacttttacgatgttcactgcaattggaatcaaatattctagctatgatttacttcttaggacttttcaaggtaaaaatttcactaaccaatcaacgagttcttacaaattgttttacaacaaaagtttttagacagtaattattaggtttatttttatgtatttttagtgtccaatttaaggtgcgttttagtattttattgttctaatttatgcttggatttgttagtttttattaggtttatattgggtattggaggattttggaaaaccttcctaatattgtatttaaaggggctgggaggttagatctaacatcattcataaaattgagagaaattaattctgagtatagaaggagggcaagaagcaaaaggcaccggtggaggactccaagagtgttctacctcttcatcttcatcttttatgttttttaattgaatttctattattttagaattatttctagtagctataatttcttttaaggattattatgtaaaccacttgaatttattctatggattaatgtaattgtttaa

SEQ ID NO: 244446 - DNA, 680 bp, Cannabis indica
attggattggattggatgatgcccacccctaactatatatcattaaaggatcacagtttattttgtcatagaatattaagggaactccgtatgagatacgatgaaatgagagagttaggcttttggaaaacatttctatttcagctgatactagcatgtacttttacagggaccattatttgttatttctttcaatgatcatcattactaaatctatagtttaatttagaaactaatctaccaatttaatctaacttgattttattttcttattttttttattcaacctagctatctttatgtataggtagcctttgtcatgtttttatttagcaatataagtctgcttggtttgtttatatatatggttactattttttttagggatatatggttaatatttactaatacaacaatatttttttgggcttttttatttttacagcaggtttttatttatttatttatttatttatttttacgaaaattctacatagaaacctctattgcaactagcgctgcaacctaaattgcaacaaaaaatcgtatagaaactcctattacaactagcgctgcaaccactttagaaacccaaaccgtaaatttaaaaaaaaaaagttaaaaaatagtaaatgaggtaattccgctatttttttttgacaaacaataataattacttt

SEQ ID NO: 244447 - DNA, 844 bp, Cannabis indica
ggtaccccaaacacattgtcccaaaggttattaatgaaacaccagtcgagcaggagtacgattttttattatccaggtgaaagcatcaccatcatatggtgtgtcattcaagttacaatggtcaataaaagcacagaagtcagtcattaaacattcatttcgcactggaccaccttatttatcagtattggatagaatctcattaaagtcaccaattacaagccacagttgattaggagaattgtcagcaagtctgttcaagagggtccaagaagctgctatatcatgtgtagaaggggcaccgtaaaaagccgtaaagtgaaaggttgggccatcttcaaaagccataaaacaattaaaaaaaggtgtaatcaaaatgtgagagcttgacagtcacattatcttcccataaaagcattaattcgccacttaaaccaattcttggggcctctaaaccattagcaaaatgaagactgttacgaaaccgagtaactggattagcaccgagttttgtttccatgagaaacaatacatggggcaattgttgttgaacaagcaatcgtaaatgtctgtatgcatttggattccccaatccctgggcattctagcttaagattttcatggcgattggcggggttgcatagcaacctctgttgttgtagacgtaaaagtggttgtagaatccatgtaaagaccacttagtttaatttgaaaattagcagttaattatgattaattatgaaaattatttatagatatttaaataattatttatgctgttattttagaattctgaatgcatttttatgtcatttagtgaatttcataattttgtatttccggt

SEQ ID NO: 244448 - DNA, 1816 bp, Cannabis indica
tatttggtttggttttgagttttaagccttctaagaagttaagtttggattgtaaacttgagtatgttgccttttgtatcttcttcatctttgttctaataagattgtgcaaagccattttaaatcttgtccatttttcgttgcttgatcgagtttttattgccatttgcttgtcctgtttttactgtttcttgttcaaaagttgtttatgttttagattgtttaaatcacaacaactcttttctatctagtacaaatttcgctcttgttgatagcaaaagacttagaatttacgagagacaacataagttctattaaaagagcattttagagttagaaggtgaaactaactggttattcaactagtaacaaaagtgtttttggagcttcagaaacccaaaagtcaaccagggtagattatttagcccataccgtcaattggaaatctataaacaatttatctagttccttgaatataaaccacgcagtaaaatctttttctttttggacaatataagagtgttgttaggtctacgagttcgttgaaacaaaagcaaactcgaaaaccattggttaaacacttggataatggtcacttggttttaacaaatgagattacattgaagaatgatatgggaaagctttgttacattaaatcatgtccatagtgaaatttgggaaagctttgttacaacctaagaattgctcttagaatattcttctaaagtctacataatatgctcatataaggtatgtcaattagctaattacccaaaaaaacacatatcatgacattaaagaatataaatattttggcaaaacccatgaaattcattgtgttaaaaagtctattttctttactaaaaaacaaaggcctttttatatctttataataaaaggtataaaaacggttacaagttgatatatcatagcacagcataacatacatcacaatgtgttagattttgtgttaaatatgatgttaatattaataagcaaatggtttaaaagtaaaagcaaaaaaaaaaaaagagacttcgtggcaaagagagaagacctctaaaattccaattaatgtgtaggatattactcatcaaatcatcaacattaccttatctttaatttaatttaatttaaattaattcaaatgtccatttcattactttataatatgttatcttctttctttcccatatctcactacctttttgcttttctccttttcactattatatatattgctttctattcctttctctttatttatttatttattttttataaacaaacaagtcctttcttttgccttttgttttagtcctctactaactattattctatactttattttaattagttgtaccatatttgttttttaaacaacatgtgacttgatattaatgaaaaaaagtgggtggtttatcttttttccattttattttagtaggaagttatatttaaaaaaaaataataactaaaagtattaatacgtttttttttttataaatttacatcaagtttaagggatgaccaagtgcttgtgaaatcggaatatattactgtttatcaacaaatgtattattaattaatcttatttaagatgtattattagagatattagtgattgttgtaataaatttattattatttcttttgtttatggtcctaaattaattaatagtatagtttatgttctggctaaatttacttttacttcactatattggatgtcctgatagtccttattctttgatactcttttctctgaaagttttttccattaaatttactctgaaggttttaatgaagccatttt

SEQ ID NO: 244449 - DNA, 834 bp, Cannabis indica
ggtaaatcatgtattcggagagtatgaggctcgagggaaaaagatgatagcgtatttgagaaaaatacacgatctgctcgcactgttcaaaagctatgctctttagcgaattccaagggaagaaaacacgactcctgatgcgttatctcaacttgcaagtagcaatgtaaatgatagaacaaatttgattcctatccagtctctcaaagaacctagtatcaccgacacgaaagaggttgaaatgattaatacatccctgaactcgatgacgcttataacaacctacctcaacacttgggaactcctagataatagaaatgaggctcgaaaaatgaggaggaaggctgcgcgatacatcatagtagaaggagttatgtatagaaaaggatttttcatgccattacttaggtctgtcacacaagaagaagctgcaagacttttatctgaagtacatgatagattttgtggcaaccatgctgccaggcagagtttatctaagaaaattcaaaggcaaggttacttctggctgacaatgattgaagactccaaggcctatcttaaaaaatgtgataaatgccagagattttcaatgatacctcaagcaccgcccaacgagctaactcagatgccaattccttagccttttgccatttggggaatcgacctcgtcagacagttacccaaaggaaaaggtggagtgtagtacgcagtggttgcagtcgattacttaaccaagtggatagaatccgagccattagcaaccatcacgtccaagaaagtggaagacttcattgtgaaaaacataatttgccagttcagattaccatacaagat

SEQ ID NO: 244450 - DNA, 1522 bp, Cannabis indica
atatatatatatatatatcagaaggtcaaaaatagcattttcctcagacatgtaggacattctacagcatacccatacagctactcattactaaccaagcttgacatagcagtatcaagctttagttaaacacatgctttacaaaaaagaaaaaaagctatagttaaacacaaaaaattcaaaaaaaaagtattttggttagttcattgactaaaaagactaacatgaatattaacctttctatgttttgtttatttcaatttttctttcgttttaaaattttgggtaaaatgatcgagcctaaacaattaaatgtatatattcttccaaaagcaaaattaatctatttctctctgaacaaaatttaaatttaacacaaagatttccgacaacaaaaagatatctttccttgaaaggagatatgattaaacgaaaataaacccgaaacaaagaagacgtaaatgaatgaaaatgcacctttttcacttcgaaccatccagagccctgatcatccactgcttctccactgttctccatggtccatcatccccaactttaccaaaccaaaatcatctttctcccgacctcaatatttaaatatacttataaatatataaatttatatcaacattatatataatatataatatatagaaacctcaatttgaaccaagcgaaaaattgatcatcttaaatcaaaattttacaatgagtaataatctggagaaaattcttcaatttgcacaacgaaatttaaaatttcttattcgaacataatggacattgtccccaaataaatgagtagcatagaaaacactgatgggaaaaaggaaaagaaaaaaactgcagttttcctgaaagttcaaagctgaaacaataaactccgagaaaatcgaattccaataaatttgagaaacttaggtcacgaaatgtgtaaattttcgtttcaaatgaagcgatttatatcaaaattggaaagggttaggagggttgtccttactttttctgattaattgttattatttaggcaacaaggaaaggggaggagggaagaagagtatgagtgaatgtgtcaatcttgtgagtgagaaagaaattgaagaagagtttgctggtggtattataagacaggatttaaatacatatttgcccttgttattttaattaatgacattcgtatccatgagagagcttttgtcaaaccacgggtcgggttggctcggagaaatggatcgggaaacggacccgccgacaatgtaatatacggtagtctaatggtatattagaacttttcacttttatttttttcttttgatagaaagcaaacttttataaaaactagcaaacccgaaccaacaaacagcaatcttacaacacagaatacacaatcgccaagtcaaaaaaaccacaaaaactctaggacgcagcccaagaagccagcatatgagctgcatcattgttcacacaagaaattcagcaaacattacacgaactaatggtatggtattgttttttttttttt

SEQ ID NO: 244451 - DNA, 1239 bp, Cannabis indica
ataaaaattaaaacataaaaaaatttcgacagcaaattatatcatatcattatcattttaggagatgtactaggaattaacctttctcatatagataataaatccaagagagagaatcagagtatactttgtttttttaactttctggatagttctcgtcctctctgaaaaaatcttctctagggcttcaatgttgcgtcgattgcagtcgtcgccgatcctcggcgtttatgtccgtccatggtcaacttacccttgtggcggtgggaaggagtctggctcttcaacattaatggtggatttggctcttcacgatctgggcggagcatccactgcagccatcttccctaatacaggtaaccttcacttcagccttaactctttactttttgtcccatccgatttctcttctcttgcattatcatctctcttgcatttctcttacctcattaatcacccccatttacttctccctttagccttagataataccaaattaggaaatttgataccctctgcacctccttggacaatcatttgtcctaccaaattaggcgtcccctacttcatagtcagaacccctagatttgatttaggagccactgccatttctatttgcatcattgcctatcctgacatgaagcatttaattcttcatttcgattttccctcggagaatttgatccctgttcgtgctttctataaaaggcctattgtacatatacacaaggtacagctcaaacagttatctttccctttttttccttcctttgtcccaatttgcaacctgcatattcccctgacttctgaacattcccctaaccctacatccaatcgaccccttttaacaatggaagaactcaccaacaacttatctgccaatttgaacctgactgagattgagacaaaaatacactcttttgctgaaccatctgaactgcctgaagatgaaaacagggaagagccttcttccttccttgctgtcaaactactaactacacgccatttcaaccctgaggctttcaaaaagcaactaaaagaaatgtggccagagcgcttctcaatcaatgtgctggaaaaagagcccaatttctttactgtggaatttggatgttttggggatcgcagaagggtactcattggacagtcatggcattttgattttaaactcatcgtgatatctcctcttgaagttggatcggttgtcacagtgaagatgctcacttcaactccgttttg

SEQ ID NO: 244452 - DNA, 1574 bp, Cannabis indica
tttcaaaccaatttgcacatgcaattttacaatttgactctgcttctgaacatacagtagccttgtttgttagctaatttgttaataactaatctagttggttagattagttgtaatcacaactgttagctttcttgttactatgttacttcgtgtaactatttttagctttctttttagccaattcatttagcttgtataaatacaattcgctctgtaattcttatcagactgaaaatttcaaattacctaattactacgattgattaccaattttcaatttaatctaattatcaattcatttaaccaattcaagaatcaattgatcaatttcaaatagatagagacagaaattttacaagcttcccctgcatcgtaaacataattcggtcgggtagtgcttggatttcgcgaaccagggtaaataactccactaaaatgatttggaaatttacaatttccagtttttacaatcttgcaagatccttacagaagtaattaccccaaacaaccaaaacccttggcagctcaagcaagatccccttacttcaaatcattgaactcccttcaatggaagtctcgatctgaactcctttagatctcatggtgaggatgcaactaaaatcccttcagtctgaactcatcatcttcaaatcttaatcaacaactttggatcttcatccacaaagttctgagctttaacctgtaaaatagagaaagatagaatacaaaacaacaaagcccgacctaaagaatctccgatcaaaaagttatttaatgaaaataatagcaataaaaagtctcagtgttaacagaaaaccaagacagttgtaacaaaaaaacctaaaaaagtctgacgtggaaaatactaaatcataaaaagctagttacagcagtctaacatgctagacatgacaagacataagctctcatgactggacatgacttggaagtgtttgcatgtgacttttatttgatccatatgggaagtgccgagacagttgagtggggtgtgttggcttgtaaaagtttcaatgggtgtaagtcacacaaagacatccatagagatgtgaagttgttgaatgaatgcatcaaagaagccagcaggactaagaagacggagcgcaagcgttaagatggcgctaagtttgagtggaggccagagggatgtgccagtgagacttagtagtcatgtgagcctgcgaaggtcaagaagggtgctagagtttgcttgaaagccagaggactgcatcattcgaacttaatacatcgtgggagccggtacgacgtgatgctagtgcaaattagtcggatggttgagtggacaatgcatgcatatggaaatcgataggagtgctatttgagatagttgactcaaaagtcacatcatgcgggatgcacttttagatggcatggtgtgcatgaagagttgcgcggtcagacattcgcgtgtgagcttgttgtcaaggatgccaacagatgaagtgggggagagaccctcatggttcactcatcagactagggattcattacaagcatcgagatgagtatcatgtggattgatagttgttcag

SEQ ID NO: 244453 - DNA, 1434 bp, Cannabis indica
ataatcaagtacctctcattcttttgttatcaaattccattgccatgtcatcttcaataacatctataatattattcttgaccatcctcatatcgagatttacagaaacagaactgtttaaaccattaccatgttcatttatcggtggaattatttcactttttatctcagtgacattcatgatggtatctttttgtgtcacatcctttacatcaagtagaccaaattcactaccttacataacaattgcccttcaactttttccaataactttatttgggtaccttgtgtttcctgttcttcgtgatcttgttcattcgactttcttttctaaatatgattttaagcaaaataaacgagtacttcaatatagtgaaccatataattaatgtgttgtatataatagattactacacttggcaaatttgaaatatggccttgtggcatcaaagagtttgaacagttactcatggtactaatgtatataatagatttttttttatacattgtttcagaggattagttttgaagatgaacatcagtttcttagtattcataaattgtaatgaggtcggttgtagaatattttttttggttgtaatggttgcttttgtaatatataattcttactttcaaatatgtacttattattattatttatctttgtgcactttttttattattcattcaatagttaagctaaatttgtatcatatacagatattggtaggcagccaatgaacccacatacttattatttatagtatgtgagccatgttgattaaagaatgataaagcttgctaacacattgtagacaattatacttttaagactaattagtaatttttcccttgaatttagacatgtaccaaatcgtgctttttaaacttttttggccgttgaaaattcctccctaactattgagattgttagatttaaagacttttatctaatttcattcaattttaatgtttcagtgattgtttatgtactaaatcatgctccccagactttgatatctatcaaatcatgcccctcaaactttaatatgtactaaatcatgtcccttgaactttcatccatgttagaactttttttactaaaattagataaaagtccttaaatcaaacaatctcaatagttcagggggaatttttaacggccaaaaaagttcaaggggcatgatttggtacatgtcaaagttcggagagaaaaattattaattagcatacttttaaatgataaaaagtgtaaatttattcaaaagaaataatatataaccagtttttcttaccaattgtgttgacattaaactattttgaggatatttttgtaatatcatgtgttttgggtaggaataaaaatataatattaaagtagtgtgaaaacacaattaataattcttttctagataaatttaaaccacacacaag

SEQ ID NO: 244454 - DNA, 982 bp, Cannabis indica
aaatgttaattgacttcaagtcctacagtttcactggaatcattttgactatttcacatcatcactataattataaagcctttcttattttctaattaaaaaataaacttaaaagtaatagacgacaaaatcaagtctagttaaatattgatattattccttacacgaatttcttccataaattttccagttatctcattcacacttgtaaataatggtgttcataaaagttggacggtgcctaattaattactatattgttcaaaaaatatataattgttgtacttgattttcatgaaatcatactactatatagaagtcagaattcacggcggtactaaaaacgtttttttttcaaaaaaaccgtcgctaaaaaaaataagtaactgcttaaaaccgtcaagaaaaattaatgttcctaacggtttataaatatatatttacaagaataggcaatagttttaaagaattcgtaaatttactggacccttatacccgacggtttaaaaccgtcgcctatagtatagacgagggacaattttaaaccgttgggtataagggcccaataaaaaattgttacctacttctcgccacatttttcacgtgcccacctacttcttttctatttcctacatgcctatttatttcttctccatttcccacaccctaaaacgaaaatcttaactctccaaaaccccacccatgcctccacaccatcgccctcctctctcgccgtctacctccgtctctcaatctccctttcttctcgtctctctcgtccattgatctccacccacccctcctcccgtcggtctccctcttttctctgtcgcatacgtcaaaccaccaccgcctcccgtcagtgtccctctcatctctgtctcatacgtcggaccaccaccacctcccgtttatctccctctctctcttgctctctctctgagctcgatataaatacatttatttatttacatatactttt

SEQ ID NO: 244455 - DNA, 1110 bp, Cannabis indica
tataacattagacatattccaatttattttttttttgaacaaaaggagactttttattcaaaagaaccaaccaaatacaaaagcaaagctggcggcagcagccaaccaacacacaaaaaacactaccagctatttacaacatttatagcatatctatctttcttcttagaactagtacaatgaaagccaataattctagtcttgaccacatttcttatacttttactaagacaagaagctgacaaacacatagcattaaacaagcaatcattcctgtttctccaaatgtggtagagagtggctgcaaagactgaatttaacacttgctcagcaaaatctggtttggtaaggaaacatctctgctgcaactcactgaaacttttcggccaatttaggataccagcccagatttcaacaccagcaattaccttcttagtgaagatgcaatctataaataagtgactatgggactccatagcatcctcacaaacaacacaaagagctgaagtgataggcagaaatttacttaaaaggtcacgggtgagcaaatgttcgttcatgatttgccaaaaaatgaatctatgtttaggaacaatgaacttatgccaaatagaagtagcataagaggatttggcagccccaataagatcaacatagaatttactcaccttgaatttattccccttagccgcctggttcaacatgacagaattggtcatcttccttatcttcaaaatctttttaaaataccaactaaagtcatgattcgctgaaatagaccagaagtcctcatcctttaagtaaatggaattgatccacttaacccaaaggttgtcttgcttgctcgaaatcgcccaaacatgtttagcaatcatggccgaattccatttcttaccttctctaaaaccaatgccaccgaattgcttgggaagacaaactttctcccaagagggtatgtggagcttgcttctattgccattcattccccaaaggaagtcacgacacttcttgtcaatagcatccacaacttttttgggaagaatgaagaggctcatccaaaagtttcgaatgccaaggagaaccgagtgaataagttgggctcgccctgca

SEQ ID NO: 244456 - DNA, 843 bp, Cannabis indica
tttgatttgagaaatttattggtcttgtttagtttccaatattcaaaaaactgttatagtgatttggttcaaaaactatgaaaatccagaccaaaccgatccgtgaacacccctagttctaacattatttttgcataatttaatcatatcaaaagatctagaagaaaataaccgtaataaaactacaccatctacggttctaaatctacaacttcaagctttgatgggggagatgaggaggatgatgagagaagagttaacaggcataccgtgtggacatgccttagctgcaatctggttgtgcaaccataattcccatctctatgtacacccttattacaaaaaagaggctttcaaaaagagttaagcaaacacaatttttccagtcccaagtcctgacaagtggccaaaaatgggagaaaatccaattcttcctcttggagaaaacattttgccagggagacctaagaaaagaagaagaagaagcgttgatgagccaccacctccaacttgtacaaaggctagaagaactgttgcacaaggtgatggagctggaatctgctccaccgaacaatgtcggagggtctaatgcataggatgcagcattttgatgtagtattttgaattagtattttgacttagtccttaggaatgtattaggattgtagaaacaattagtgcacaagatgttgtattttgaattactgcacttgatggttttggattgcagaaacaattaactattaagcctaatttatgttttttgttaggtattttgtattacattttcatgtccagtgcaaaagtatgcacataatatgaacatctggtatttatttatgg

SEQ ID NO: 244457 - DNA, 1498 bp, Cannabis indica
tcagggagaatttttaacggccacaaaaattcaagggtgtaatttagtacatgtcgaaattcgggaaaaaatattactaattagccaaatttgtaatatatatttatatatatataaaactatatatatatatttacttttaccatttttttattagagaaattgggatcacaatatagaatactatatattcaatttctcacccaaaagtgatttttttttaatttattttattatcaccacacaataaaaaatattattttattaccgactttatattatatccctgcaagtacaggcttaaattttaccatatttagttgtcgttgttcatttgtctcagtgtataggtttggttagtaaatagttactactttaaaatattaccatataatgtagcagctaagaattgacatttcaatttacaatgcttccatttatgccttctacatattatattattcccttaaactagttgattttattgtttatatagtaaatgaacaactatatgactatgactgaaaacgaccaatagaagtaaacatttagataagtacattcatttttataaaattaaattacggcatggtagatgacaagggataacatttaaaggcctaatgggcatattataattatatttatattatgtatatttaatagtctatgaagaaaatgaagttattctatattttaaagtgaatatttatgttacaacgtatatatacagcttctagaaattaaatagcacattacgtaactctcggattaacattgaattataaaatataacataagcaagattgtgtataataatgatttatatatatatatggcgtataataccacgtctaattcacataaaaatcaaaataagcatacttttcaatcaaaacttataacaatgatacaaattagtgacgcatacataggattaagttaattaactcataaggaaaatgggaaataagaattagctatataacagatgatcacaacaaaaattttgtaacaaaaaataaattgtgttactctcagacgtacctatctcgttactaaaagtcggagctaattaaaaatattggttaccaaaatcacacttgattactcattaaatatatatatacattacataattatcaaatatatttttataattttatgtaatgaaccgtgaataaaattatatttgggacatctctaaattaagtactatataaaaaaaaaaaattacttttagtgacaacgttttttttttttttaaaattcggcgtttatagataacataaattttagtcataataaaaaattatttgtgactaaaatatactatttacataagttgtcattaatttaattttagtcacaataaatattatgactaaaaatatatttagtcacaacaaattaattgtgatttttgtaactaatacggaaattttagtcacaacatatatttggtgatttataattagtttcaagttttgttgtgacc

SEQ ID NO: 244458 - DNA, 759 bp, Cannabis indica
agggcacaaaacccaacaccttgcatgagcccaagggctactcggaggttttggattttagtgtcgtctctaactggcctttcagtattagtggtagatgggacctctgtgttgggagtggattgatcggctctcaaactggtgtttccagtatcctgtacacttgttgtgatcccagcatgaggggaagtcactccatggcctacagtaagaggttgtgtattagcctgcttggggtttgtccttggtggtcttctcgtgtttccaagaatttgaacgttacgatctgtcaccattgggtcacactgattattaaggcctttagggtttgtacaaccatcgtgttttcctgtcaaaacataagacaaagaacttgtgtttttgctctcaataaaagcaccaaaatgttgacctcgcttctagccaacgatagtgagtcaaataataagcaattaaatgatataattaaaagagaacaaaaccaaaaggtaaagtgaatacaagatttcaaaaaggttcgaccccgtgagtgttgtaatagcctactccccttatattaaattgacttaagagaaggaacaaactgttcttccccttgaaagctcttacaactaatctctgagtaactctttagatcattattttctctctagagtatatttctgcaacaattctttcgatccctttcatagtgaggctaggtcactatttataggggcttaatgcgtgagggattgtttcccttttgcttacaatgca

SEQ ID NO: 244459 - DNA, 1098 bp, Cannabis indica
taaaatcaaaataagtattgaaattaacataaaataatgtgaaggaaaaattaaaaaatatattaagagtaatttttaaaaattatttaagtttatattttttttttaataataaagtgtatttattattttatagagcaaatagaacttcctttaattttattgttgagagttaaacaatacattaatattatataagaaaaactttcttcaaactaaaaaatatcattatatatctttagtgcatatcttacttatttattttgttaaaatcatgtcaaaaatctcaattagtgatgtaaatatatgtcttgccataaatataagtcgaattgtaccgtgtcgtgccataaaaaatacaatcgtatcgtaacgtgttataaaaaatataaatcgtattgtgctatgttataaaaatatacaagtcgtgtcgtgctgtgcttagacttgtgttgtgctcaaatttgtatcaccctttactcggactgacctgttttcttatatgagctcaaattagtattctatttttcctcattttatatacataatcaatgagataattactaaatttatgtattttttatagtttcaattattttttatataattttttaataatttttttacataaaattacataaggagatcatcaaaagtattaaaatttgaatatttactaattgttgaccgaggttttcggcaaccaatttaataatatataagaaagctgtaagaaatttaatgcatgtgacttttacgtggttggggcattaatgagccttagtcaacgagtcttttttatttatgagagtatttaatgcagagaatgttcttggtagtttttctctcttttgttcttatgaaacccagaattctcggcccccggcttaatgtgtttgggggtatttatagtgtttttgtagggtgatccctagaaccgagctacatatctttctgtatcttttcagtaggggcacacattcccaacagatgtaaagtagaaaatgcatggtctataccctaggtatcttaggggttaggtgaatataatcctttatcccttcttgactgatgtgatccctcataaagtagctgtca

SEQ ID NO: 244460 - DNA, 1736 bp, Cannabis indica
cactataggcgtgaccttggtggcgtgtgggggttggggtaagtggagaggtctcacttgggacgcccatgtaaggaggctcttagtctcatttaatagcacaaattgtgctacctgatcataaaattaattagatacacgaataatgtgaagaaatacaaaacagagataggaaatataaaaaaagtggttgcatttgaataatttaacctatttataaaacctaatggcagtgaaataatttgtaggtttctttaatatttatttttcaagggcttcttaatttttgagcaattttggattgtccgtctcttttgggaggatgtgtggagggtcactttttttttgaattatcttttcctgcattattccatctttctactgataatgacctgcctataatttctgaagaagattcttcatttttacaatagatgttagcatgcctatggtgtaacatgaactggttttatctggcaggtggattaattcagctgacacgaatgacacggctgagaatgaccgaatgcttgttcctaggatcccagcaggtgtttcaggaactgcattagctgcttcacttctgcgtgatggttggagtgtaagctactagtttacttatattgtttgtttcatttttttaatctttgtgatttagcatggaaatggatttgttattgccatatccttattttctattctggtacactaaatagctggcaaaaatgtattcaaagtaccaagaagctgttgatgctctgcgacatgagcagatgggaagaaaggaatctgaggcagtactgcaacgggtatggtgtccactgcttctttaaataaagaggatattgtttgattgtttttatttctatatatatttgtgtcttgtgctcttatgtctgtaaaatattgcacagataaggttaattgcactttcttttcttgaactatgacaccttaaatgtgttactccctatgttttttctttggcttactttgatttgccaatttttttgttttcttggtatgaaattccttcttttgtaattgacagaatcaaaatggttttaacatgtcaaagtatgtcgtaaagttgagaaatgttagaactggctggtattgatttttttttaaggaaaaacgcctttccaaaaaattgcatgcttttacaggggatctgtgaaaagcaccataattctgtcatgtgaattttacctcaagaattatttgtttcctgcaatattatctgaatttttgtttcatctgtattggtcctctgattaattgtggcagctatggagaactattgctcttggcggttatttgttctggtgttaatgtttcttgttgtataaagtttgtgaaattaactttttcttttgtagatcctgtatgaacttgaggagaaagctgagctaattttggatgaaaggggtataagttcttactttctttttcatgagaaacaatatgatcctagtttcgaaaaaaaaaaggaaaaaaagggaaacaagatttattatattagaaacagaaggattacaaaggagggtatctttaactacaattcaagatgatgtggggtcagcttaaattacgaactaccaaacaatctataagtaaattggaataagaattctgttaaaatccttagtctaaagcatctaaacggcgacccaaaatttattttttctttcaataatgatactgtctttttcctagtgagttttcaagtgtca

SEQ ID NO: 244461 - DNA, 1284 bp, Cannabis indica
aatattgataagcaagctttttttaatcgtcgaacttagatttctaattcttcaaccgcggagatacgtatctcagattgcacgatagagttctcttgtaattgttcgattggttgagtcaagaaaacagccacaattaatcaaagaaaatttataattttggaacacaagaagaccgatcaagagcatcatgatcagccattaatttcgaagactggtcgtcaaaacaaaaatatagataacaacaatcaagaacttcgaaaatcaaaaggtgaaactcaaaacataatttaatttagtagtttcaaggaattcaaaacacattagagtgttgcacagttttttgtctctgcattttaaatgcgattaacttaattattattatttaggctcttaattttagttttaatgaatttaagcagttgaagtgaaggccaaaacccaacgaggcaggattagaaacattaggaattggaagaaaaggagtcgaagacatcgagaaacctgaaaattcaaccatgattcccttctatgatgagaatttgtacatgcttaatatgaaaaatgatctcgaactaaaggtgagagatgtcaaccaattctttacatatttttatttgtcattgagtttctgtataaattctcttccccatatggttaattatattgcccatttgctttaatatgaagattttcagtttcattgataaattagatttgatttctttaggctgcggaaacaattccctcagcagaaggattaagtgctgcaaaccttgggcttattccttcattctctactacaaaacaattggctacggctgttgagtaagttattattcttggtatcttataattgtcactaataaatttcttccaattaacatttaagattaccgttgtagtaagattgtgtaaaaagatttatttgttcactacctttgagtttatagtcaacccttaatcaagacaagactttctacttggcttcctttttcaaaatttattcgagaaatttcgactgtttagataatggagttttgatataaaattgctccaataaaattcttaatactatcttatataggtgggtttatagtgttctattaaaataatgtatttatacttaaacttttatatttaaaattgctccaataaaattcttaatactatcttatatatgtgggtttatagtgttgtattcaaataatgtgttttatgattaaatttttatatttatatatatatataatattatactgtgggatagtgtaataaaataat

SEQ ID NO: 244462 - DNA, 1615 bp, Cannabis indica
agaatgctcaaccatccaagaagcttcttcatgcttcttcctctatctcgccatcatccctgcctatgctgcctgcaccagtgccaaagctcctcagtcatcccaagcccgtaagtcgacctacaatctcaactaccctccaatcatcaattctcctattgcatctctaacccctaggtttggtgatcatgatgaatcccattcatctgatcgcacctcgtagaagtcgtcttcttctaatggtgttcccaatgccaagagagccattgttcctttgcctgtggcaagctctcgaattaggtccaaggtttctactccaaagaaaccagaggtggttcaggccaaagaagtctccaaagagaagaaaatggtgacctcattttctagggcaaaaaggctcaaagatcatccaccgtccatctcttcatgagattgtgaaccagaagaagagcttgaagataaagaacaagaatcaaaggctgggtctaattctagtgaggaatttatttcaaaagatctctcttctgttgatggttctggttctgaaagtgaaatgcctcaagatgctcctgtcagtacaaaaccagttgatgttcctgctgcagtttaaaagaaagacaaaggaaaaagacccatggtttctccaagccctattcttcctcaaaaaaggaaaaggccctttagtattactcttgttttatatgtggaagatattcttcttgcatctaatgatatggggttgctatgtgaagtgaaatgatttctttcaaataactttgagatgaaagacatgggttcagcatcctattacataggcattaagattcatagagatagataccgaggtatcttaggtttatcttgttagttttatgatactaaatcaggtacgcagcgaaaaagttttgtattatctgattatcattgtatcatagctcaatggatctccagatgtgtgcacattaaattaaaaataataaatagtaagtttagagtatatctcttaaagcctatcatggtatcctcgaaacttcacgtatgttgtatcccttaatccagatgatgaggatgatgcaattagactcacgccagtgtctttcaaattgttccacaacacacaaggaatagtacgagctattaggataaagtgtatagcttttttctttttgaattctcaacacatgaaaaagaacaattgagcaaaaaatcaatttcctttttctctctataatttcaaaaattacagtgttctgggaagtgagaattatgttttcatttctcaaactaggcttctatttatagtagttaaatttctttaattaaatcatatttaattatttaaataaataaatatctataaccaattcaattattgatatttatgagggaatctctcaactacttgagagaatatctcaacaactttgaaatatctataactactttttaaattagatatttatctaattgaattaattaaataactaattaacccaaaaatacaaaatccatagggatatgacataagctaggcgcctacccttgttgtttaggacaagaatggtgtcttttgtcttgacaacttttgtcttaacaaatcttgtcttgacaaatt

SEQ ID NO: 244463 - DNA, 1888 bp, Cannabis indica
ttttatttttttttttattttcacttaaattttattttctactagattcttttttgtaaaaaataattccactaaagctttttagataaattataatttttaagaatatttcttcacttattaattggttatacgatcatttattaggtaaatcctagtctatatggagatgatcaaactcgaatcttgatatattttcaggttatctaaactttatgtttattatctaatatttttttcatatttattgtgtagttatgtgtaacttgtgtatcaatatttttgtaggctggtcaaatatcttgtttcaatacattgtgtccaggatttgttttagtttatcctcaacctatgatcgaaatgactttcaacgaaacccttcctggcaaattacctacatgggaatttgatttaaatatttatcgggtaaataaattaaatatttaatataatcattttctattttttttcttttaagtttatcttgaatactttgtttaaataaaaaaatgtgtttagatttaaaattttgggtttgtattgttttgtacttgtttgatatgatataataataggataacattaccggaaattggtggcttcaatttgggacggatcttgctcatgttggatattggccatcaagcatatttagtggtggattgaaagacttggctacatatgttgattggggaggagaaacttacagtccacttggtcaaatcggtcctccaatgggttctggtttacttctaaaacaagatactcgttatgatgcatattgcagagcattaacaactataaatgaggcacacatacaagaagatgctaaacacacacatatttcatccatcgatattgacttttatttagttaaagattggggatttaaaagtgactttggacatctcatgacatatgggggccctggtcctagatgatttatttacattgtaatactagtaaaataaatttttcatgaaaaaaataaataaatgtattattatttgtgtttttgatagactttattacatataaatataatgttggattgaaagtcgatacgttttaagtattaattatactttcaagtgcacgaatgatacttttgaaaatacaatgttcatctaagtatgaagtcaaactcaaaagagaggttactaacataaaaaggaaactcatttaataaaccaaagtaataaaattctaacctaactccaaggatttgatgagatttatttttagaaatataaaagaaaatacattaaagataatatacaagtaaatgtacaatattacaaaaaatgtgtaaaaaatataattacataatttaatataataataaaaaatatttacaaataaacatatatgtttacgattttaacttgttgattactttcaattaatttttttaaaaaataaataaatgcataaagctaaatatgtaaatgtaaaagttaatatttatatttttatatattactaaaataatatatttactaaaatttaaaacgaaattaaaaaaagaatattttatttatatttttataaacaatatatatgtttattatatatttgattagtatcattaatgtttataaagttattattaatctagtatgtttattatgataataaatataatttgtttattaaaaagtcgtaacaattttaaaaatgaaacacttaagtttatttatttatttgaataaatactttttcttttgtttattaaaaagtcataaataatttaaaatgtaacatttatacttattagttattaaaaaatatgtttaagaaaataaacgaaattataatttaatgtgaccttatgtataaatactatgtttatattattatgggataattgcggcataagtctccaaaa

SEQ ID NO: 244464 - DNA, 1638 bp, Cannabis indica
agagactcaggaccaatctagacaagcagttttcaaaatttctagaggtcttgaaaaagttacacataaatattctttttgctaaagccttggaacaaatacctagctatgtgaagtttatgaaggagatcttgaaagaagagaaaaatggaagactatgaaacagtggcattgaccgagggttgaagcgccatactgtagaagaaactctctcccaaactcagagatcccgggagtttcaccattccttgcaccattgggagaatagaagggataaatgcattgtgtgacttgggagccagcattaacttaatgcctctgtcgtttttccacctttgcctatggtcgcgaccagccattaagttggttgcgactaggtacgaaacacaggatttttgacctaattctgatatttttccaattggaggcacaaccctaattcctatgtaagggactcgactcagattgcgaaaatcatcaaaaatcggccccaaaaagtgaatgaaggaggagaggaagctatcttgaagatccaaagcgaaataaccatctagtttctttctcccactctttattttctttatgactatttttgtttcaaatttaatcatggatatttatattttatttctatgaactaaattcccaattagggaggatgatgaatgttgtttaaagtttcgcctagttaatgtaaattgccattccttttatcatgatttgtgaaattatctatacttgtgtttaattccatgtgtaagcttgatgaccctcgatctcaattcaaaatctgaaaagtgagaattgagaatggtaaaattagataatctaggttttatgtgaaacgagagtatttgcgtaacctatgtgacacttagattattgattaaggttgattacatgtgattctaattaagagattaattagagaacatgtgatttagaacctaaaatatcttaaaaagagtaaggttaaattgtataatctgtcattcacatcaagaaaaggatagcaattaggcattaacaattgtgaaaacaaaataacaggattctcttccctattttctcatcctgattaatctttatttgtctggttaagtttcttgaattttcattctgtttataatcttaaaaactattggtttgccaaattgaatcataaatctagtctagtgttattcaatccaattgcctgtggttcgacctcacctgtgtgattttactacttgattacgtgcacttgcatactgttctataattttcgtaacaataatcgaaatgaagctcaaaagatgagaaggaaggctaatggtatatcatagtagagaaaattatgtacaaaggagggttctccatgccattgctcagatgtgttacccaagaagaagttgcacgacttttatctaaagtgcacgatggattttgtggaaatcacgccgctggatagagtttatctaagaaaattctaaggcaaggttatttctgcctgacaatgattgaggattcaaaggcctatgttaaaaaatgtgacaaatgccagagattttcaaagatacctcgagctctgcccaacgagttaacttgaatgcaaagtccgtggccttttgccatttggggaattgacctgatcggaca

SEQ ID NO: 244465 - DNA, 1990 bp, Cannabis indica
ataaacaaaccatttcaaaataaaatctataaaagaatttcttgactaaatagttgaataactacacatcacaaaattaaacaattggttgtataaaattaaactatataatgatgtttcagattatgacataaacgacttactcattaagagtcgccaccagttgatcgttcgagtcaacaagagcgaaccaggtcgactcaccaatacgacatttctgtgaatcatcgatggccaaaacaatcagcaccgaccaaatggtgctgaaatgaggtgtttggaggaactggtgtatataatgatttttgggattgcgatattttttccctttgttccttttcttcctattttttcatgtagagatgctttaatttcaaacaaaatcgagcacaaattggtgaagcacttgcggcagaggttagtattgtaccagtaccttcaaggctaatggctcttattggtcagtctttgaagtggcagcaacaccaaggattggttcctctaggcacaaaatttgacttatttagaagaacaagtactatgaaacaagaagacacatattcattcccatcatcaactcttgcacataccataaactttggcacaaaaagtcatccagaatgtgctcgtttttcccctgatagatagtttcttgtttcttcctctgttaatggatttgttgaggtttgggattatgttagtgggaaattgaaatgaagaacggacatggggcagtttgatagggccggctcctcctggtgtgatttaggggtgagggtttgggagatagtgctaagtagggaactgaaaatatggagggaaaagtttgggatataccgccaaaaatgaaaatttttaaaaatgaataatgtatatttttagtaatgaataattatatttctccccccaaaaaattaattattatatcatttattattttggtatattatttaacattttaataaaatattcccatatcatattttaatatattaaaaataatatatcaaactaatattaataaatctagttactatatttttaagtagtaaagttgtatttactacgcattaattcaataactatttattattatacaagatttagtaaagttgtatttgctactatatttttttttaaaaaaatataacctatattagtcatattttttttaaggattaaatttgtagtcgcataatgtatatccaatatagtaataattaatcttatgttttaaggcgactaaataattaattggtacatgtaaattattaataattgtaaaaataatttttttttatgattaatattttaggtgtagaagatcattaacttttaccaactaactattttatcacaaatttaggatttttagtgacttaataattttagtcaacgaaaattattactcccgctacaattataatttagcgtcaaagttctagtgactaaatacaaatttagtcactaaaaataactaataatgactaaaaaattggttgttgactttttggttgtaattaaaaattgtcgggatattgatagctaaaccacctaaatataaaaatttttaacacttaaccacaaaaattaaaattttgacggcaaaacctactgaaccccaattccgttttgctccacacacgtttgtcgaaatctcaattattatatatattaaatttaaattgatttttccaaaaaaaaaatgctcagtacgatcttttcaataaaaaaataattaaatgaacatatatatacgtttgttaattagcttatatattatttgctcttttatagctcactagcattgtatattttttagcagctataatatttgtagtgacataatatacattaattaaacatgttaatttggttttatattttatcgcgactaaataattagttggtatatataaaccattaataataaatgtaaagtataaaatttttttaggacttaatattttagtcattgaaactctttaac

SEQ ID NO: 244466 - DNA, 1124 bp, Cannabis indica
aaagaagcaaaatatgtacaaataacgattcggtaaaagagaaacagaccaacatgggtatgcagctttattgatgtaacaataaagcactgattgagattttcagtaagcataaaaacttcagttgtttgtgtacctttgccaattcttgaagaagtatatctctcacaaaagaaccctaaaaattgtcattatcaaaacattcacacattagatattaaatttttgatcttgtgtattaacagtggataatacaataccgcatacaacactaaccttttcagttagcataaaggaaaggacttgcttgataaccaccctggactcaccaccttcttgattctgaaccaaggcctttcctgctctggcacgaagtgactatgattgggggaaacagtgactttaaaatgttaatctaacgaattggaaccatggggcaggaaaataccaaacagaattgagaaagtaaaggccaaactactcaagtacatgaagtgatcaataaatcggttatgcttaattacataatatatgagaaaaatgttccaaaagttctacaatctataaaagtggacattgccaaaaattgattgaatgatgttaaacaagtcaaagattgacgatggaggagagaataaaattcacctcggatagaagagactccaatcgatcaattctaaaaacaccttcctgccaaaaccgtcaaagaatcaggcacacgagaagatatatgaatatatatatattggtaaataaagagaaaaagtgtactagatttacacaactaagaaatcaatttacgaaaagcaaagagaaatcaatggttttgggttcaccttataaaggagcgatcgcaaagatgactgcagcttgggtgagctatcagttagtacctttctagcaatccaggggtatgtactgcctaaaactttataatcaggattggaactgatggcaattccctccaacacagcaaggctaaaatccaagagaagaacaaaagagtttacatttaaaaactactaatacactagaaaagtagagacagtaaacattacaagcaatttcattagctgataaggtaacaatgacgaggtctactattcttgtttgtcgattaatac

SEQ ID NO: 244467 - DNA, 714 bp, Cannabis indica
cgtgcacctatgtctctgttatgtcttttcatcttttgttattaatgtagtgtgtaatgtttctaaggtttagtgtgtatgtgtaatgttactaatgaaataggatagaaatttattcaaatctgtttggatgtaccgactctttgaatcttctttgaaatccctaaccagtttaactacacctgaagaatttttttttaattaacactcgaatcaatacaagagtataaattcatcatgatatatatcaaatttcatttagctcataccttgacaaatatgaccctcaattgctgttcagatttgttgagaccaattaagattcttttgagtaccaaaaaattaaagtgaagagtgaacaaaataaagtaaaaaaatttaacgatactttatgtgtatatatagtatatctgaagatatagtattgtttaaaaatcaaaattcaaatttaaatttttaaaatatttattgttaattttataactataatgttctaaatttgtggtttttgatatttttaggtataatacttataatagggcatttagatttttaaatttaaaaaaaattctctagagatatttgtatatatcttctttattatcacgttaactttaaaatttttattaaaaaaatataaattaaaatcctaacatataaattaaaccctgtaaaccctaatgttgggttttatgccctaataaactcatttca

SEQ ID NO: 244468 - DNA, 818 bp, Cannabis indica
tttgatattgaataatctcgattacattgaaatagagttttatttaaggcataaaacccaacacatagtacaaaatatactcttgttaatgtataatatattccattccattttaatatatattatataatttgttatatacaaatattataactaacataatctattcattacttgtatctaaaactaaacccaatgatttatatataaatgggctaatccaatctcacccattttattacttattttttatcaataatcatgcttaattttggttaatttatatatttattaacatgcttacaacatttttatgacgcttttataaataatttaacatatattcaactaaaaaaatatattttacgtttgagaattataaaaaaaaaaatgtaagagtatatatttttcataggtcaatatcgtttattttcgtgttaggcgtgtcaacccatatattacctgtttaataaacaggttagtagcactacaacaaaaataacaatttttgtcagttttcaaatgacatttaaactttttctatcgattccaataactaacgtagacatcatagatgcaaaaatttattagtttgcatcagtttacaaatgtcgatattaattttgtgtgacggttgagaaacgttaaaaatattgagaaattacacatacaacttgtttgcgtcggttgtagactgacacaaagaaattaaaaatatagccacatattaaacataaacaatctccacaaatctcttatttatacacataaataaccacactacccaattaaattgctaccacaccctggaaaaaaaa

SEQ ID NO: 244469 - DNA, 1763 bp, Cannabis indica
cttccccaggcggtgtgggatgcacagtttacccggtacttttcccctttaccggatcacggcactactgactgccacgagagagagagagagagagagcaagagaacatatagaagaatgagagaatagaattcgagatactcagagaatacaaaaaaaaaaaagcaaagatatcaaggaagtatctaaatttggtataatcttttggttaaatattatcactttaaagttgaaatatgagaattagggtaaatattatatgaggacaatttccaaaaaaaaattgaaatgcttatttcattaaatcaactacgactcataaagacacgtgagaataatttttcgtaacggattccgcaacattcaagctaaaacctaatagtcacgagcgaataaattatggactcaagggataattataagagataaaactaactttgaagggataaaagtaattcaatttgattatcgtataaaaactaataaagttatgtggcaagagtgattgaaaacacattgtttcactaaaaataaaataagaagagcataggagagagtgagaacagtagctaaacataccttaattagcagatcaaaggtaaagcaggcgaggataaagagagggcagatccacgtggactaatctaaagaaaagagatggtgcaatatacatttctcttataaataggggaactcctcattctagataagagatgattcttgatcacaccatcccagttgaaaatctgctaaaatacatctttaatatacttttgagttcaagatcagaaattgaagaggagaattacaattgattgaggaagaattataaaatctagtagagttgtgttcttataattggatcaatatcctagtgtaaagaattttgaataaaaatataattttattgttgagccaaatttaagcattaacattgtatgtcctcatccaattggtatagacaaaaatataaattaaaagagccaacaaattaattactccatccaatataccgttcaccataaatgaatcaaactactaaaaaaaaagaaagaaaaggaaacaagtgacaaaaaattaaagtgggtgcataatattttggtgcactaatatgtttgctataacttttgtcaagtaattattttttttagtaaaaatcttgggaaaattttaaaagtttacttttttatggcataaataaataaagctaagtggttatgagtttttttattttttttacatttatatagtttttttatgccatatttttgtaaaaaaaagatagaaatcccatatttataaaacaacaataagttttgtcagaaaggtcgccggcaccgaaaaagtcgccgaaaaagtcaccggcaccgaaaaatcacggctgccgaaaaagtcacaggaaattcgctggaaaagtcaagatggccggaaagtcaacgggaaagtcaacgtggtggaaaagtcaacgaaaaaatcaacgtcgctggaaaagtcaccaaagtaaaagtctcatatataactaaaaaaataaccagttatatgaataaaaatgaataactcaaaccatttataattgaaatataaccggttctgtaacataatgaataaatataaataacataaaataactcaaaccagttataattaaaatagaaccggttctataacagtgttataatgaataaaaataaataacacaaaagaattcaaactggttatataacataatgaatacaaacaagtaacacgcaataactcaaac

SEQ ID NO: 244470 - DNA, 749 bp, Cannabis indica
aataggcacattgctatgagaaaataagaaaacttgacacctctccacattgggattcttgatggatgcttctcactagatggcattgtggactgtacaagcgcgtattttttcaataattttactcataactttcaaccaatgtaagcttattatgctcttgtatgtagttattttctcattagagttacaaatttattggtaattaattttttatatggaaaaggaaaaaggaaatagaaaacatttgcacaaattaagatatataagagtatattgttagttaccttaccagtaatgagtcatgatcgacatataattataaatattatattaaattaaaatatataaatcagatttttatagccactccaataaaatatatagaactagaaggaagcaatttagtacgtctctcacagctttaatgcctagataagtcaatctacaattctagcatatatgaagtctacggtcaacttcatccaacgcccaacactttgattaggcgggaagaaaatcagtgagaatcagacaaattttatggagatacttatatacaataagtcttcatttagaaatatatttatatattatattgtatacacattgagttgtaccaaaataaatataattatttggctgattgaaaaaataaatttttgagaacctaataattttttaatcaatttaccaaataattaacactttattataatttatttattatttttatttattaaagtttt

SEQ ID NO: 244471 - DNA, 582 bp, Cannabis indica
cttttagctataagagcatcttcactgatgtttggagagaatgcttagtgatgtggcatagtgcttggaaagagttgattgttgaatgtgtttggatgtcaaaccaaaaaataacattgatactaaaacttgatattgatgctatactcatgttttttcttttgtttaatttaaaaaattcttaccattaaattattgttagaagtaagagtactgaaaatgatatgaaataaaaataaaataaaatgttatatttttaaataatgtgaaaagtttcagtatttttaaaaaatgtaacttttggagatgttctaatagcttattgagaaaccactgataaattatgcttgtgactattagtccaaaacctttaaaattattctacaatgtactattttaaaagggatgcaccgatgcacctctatttattttgttatctggaagaatattttagtttaaatttttcatagtcgtgtacgttatagttatttatttgaaatatcttacaaaattttgagactttcagagaaatttagtacgccaaaaataaggttcaaagaatctcttgcatgtataactctt

SEQ ID NO: 244472 - DNA, 1324 bp, Cannabis indica
ccttgatgtgcttgaggctccaggcacgaatgcccgaggacttgctcgtgttgggtccactgcactcctcctgtattaccctttctaaaggaaaacagctgaattcctcaggagccacggaccttatgacacaaccttttctctgcttgataccgcacgactttaatatgccgcgaacataagccccaatcgaactaaccttggattcgatgagttcatcctcgaagatgacacttggatcttgtggggtctttgatttacgagacttaggacacataatgtcaaagtcaaggtcacctggttcaaaagaaatagtgacttcatgtaaaaatattggtctcgtgagtggaatataagataatattgtgggttcaagccaggctacgtctcgcaagaagcgacgtttgccctcaaaaatctcttgaagaaatcgcctataatgattggaaacttcttcctggtctgacttaatcaaatggtctctaattttgacgtcattcatctctaatttggaccaaggttagaaatttttgggtttgaatgggagggctaaatgcttaggatattctatttctaaggactctgaagaataaacttctgaatcagattgggacatttctacaaaaaagaacaatctcaaatcctagatgaaatttattatactagaggcttaaagaatatgataaacctaaatttacatcatgcctaaaccctaaaagttacccagaatacttaaaccagaattgctaaaaccaaatgaagtgacaagatgcaaaataaacgatcataacctagaaaaataaagaaaagagaagaatgagacatttactgtttgaagtcgagtagttgtgtgataaaaagtcctgtaaccggagagggagtgaataacatgaagaattttttgaacacttgaggtcgaaaagcaaatccgagcaaattcgcagaaagaatgtcaaagacaaggagggcatgcaaagtttcaggaaattgggatgaaattttttcagaaaagcttgagtttttgaaaaggaaaaaatggtggaaagatggattccttaccgttttatacttcgaacttagttaccatcacatcaaaatgtagaagttctaatggataaaaatgggagagaagtggaaaatattgttcattaatgctaatgatgtccctcgaaaccacaaaactaccaaaatcaaaggcatgcatattttcaaattggattatgaccaaaatacccacgataagcatttaaaaagcactttttattataaaatgactttttaaggggcaattgttataccataaatttggctgtactttagaaag

SEQ ID NO: 244473 - DNA, 766 bp, Cannabis indica
tgtacttgcggtgtcttggacgcgtgtcaccttagggctattctcatttgaatttcctttatccctggctgtcggattactttgtacaacacacatggatatgcatgctttgtatggtagcgaggcatgggagacaacctctgacatcgtacataggaaaggtgcggtcggtgagcccgcaatctggcgtgcgggctgaattttcgcgggtcaaaggagtacctcggaccgattgatacctcaaggtggaaggctcatgttcttctcgggagcgaagggtcctgtcttctagaatggagagagtcgctacctcgcaggcatctctctcgtggcctacacttggggagacttctttcacgaagaccaatttcgggaagttagggcctttatcctctcggaatgcgtagcgaggcccatgggtgcctaatgattctttggcttttttcgattaatttccatgtgtcatgattgcgaaaatgcgaataacactagttatttagcatataaaaaaaatttaacatgttgaaaataaagtttaaacaatttatttcacacacatataaaataaaggagtctcgcgtgcaacatactgtttgaattatgtttttgatgtgttaaattttttaaatctcttaaaattttatcaaatatcttaaataactacaatgtaaaaagaaaaaaaaaattagagtgaagtactaaaaaaataaataatgcagccctttttaagagagtgatacctagaaattaatttatttattttttt

SEQ ID NO: 244474 - DNA, 2331 bp, Cannabis indica
ccatgcaacattaaatgttaattctgatctatattaaaaagtaaatctgattatattgaaatgagttttattttgggcataaaacccaacatcagcaacacgaaagaagttacattccaagagttagtcgaaggttctccatgtcagcaaggacgggaaggattccaggactcccactattcatctgctactgagaaggattagagtcccctaaagctacgagtaatccaggagggtagcaggttagtgtggccggaaaggatgtgtccagatgctcctataacctatttggttgtatcttatccagagctcaaggcgttggttacatatcttctgacaccaaatcaaatcttgtcccttacgttagaccatggtagtgtgcatatgtgcctctgaagccccctttttgtccaaagacttgtctaggaaaaaacatttaaaggtgaaacctttaagctacacgtgtcctcattgccacgaaatgccttacagcatctatacaatacatgatgggaaagcttcctaccgaccaatagttagatcatcatattgtagtatcaggccttgtggcgtgttgagtaagaaaccccagaagggtaaaggttatgcccttacccacatgtgagcctctaaatacccttacttttcatatgctaatggtaaaaaatttcatatttaccaaacatctactaaaattcctactaactttcttcttcttcaagaaaaacaatagaaatatagggctaggtttatattgtaaacagttgttatattcaaacactcacctacaaggctaatataatggaatcatggactagggattattaacgcccaaaccatgtaaaaattatctgtttattatttatttttttacatatttcttaagttataatttattaatttccaaaaatctcagtaaacaagtacggtgaaccgtttttcctaggaaaaggtgaaccatttgtgaaatgctgaatcatttaaggtcagatttgcatggatttttgtgtacaatggctataaatagctagtcttttcccaaactctatataaactcatttgtatcacattttttagatgggtttgagcatttattaagtataccaaacatattaaaagtgtttttctctctttataagtactaaatccaagtaaacacctttcacacacttgggcccaaacttattcttatgttctctagtgtgcttgcaattctctctaagatttcacattgtatttcatcttattagatagagtttgctttgtatttttaaaatagcatatccattgtattgagagttgaggttggcacaagtagaaaaataactcagttgtaggagaggttgacattggttatataaacaacctgagaagagtgagattgtcactgtaacaatccgagagtgagattggatcttgaacaattcaaagtgattgatagtcctctagaaaactattgttgaggtgaattttgcactagaggaaaaataacttggttggtgagattggcacttcaacaatccagtgaggttgagtccttggaagaaaactcttgtgagaggtttggccaaaaccttggtgaaaaactctccaattaaaagagttagtcaagcccgttaacttggctcgatagttgaagtcaaaactagggccatagctttaaagacaaagcatgtaggtagcttagttctaccaaaccttgtaaaaattgagagtttacaatttctatccctaaactctttacattttaagtttattaattatgtatacttgtgcttatctatgagatgcattaaatttgaatatttgcataaattgtctttagggtttttaaatttttgaaattattttaaatttccaattcatctctcctcttggaaacctatcataggctaacaattgatatcagagcatgggatcttatttttaggtatatttcacatacttagagtatggcgtttccatgtaattcacacaataatatgctagaaggtttaagaacaaatagagtaccattttttgatagggtagacttttcttattggaaaattaaaatgaaaacttatctcaatccattgattatgatttgtggcatattgtatgtcatggtccttacattcgtatgcatgttgtagatggtgtagaaattgtaaagaaatatgatgcatatgatgaaaatgataaaatgatgatgtctaaaaatacaaaggctaagtatgctcttatttagatagagatattttttaaaatattgagcaagcctcatcggctcatgatatgtgtaaaatgttagaggtaacttgtttgataaatttgatacgcaagtatacg

SEQ ID NO: 244475 - DNA, 1802 bp, Cannabis indica
cctttatatgcagcatatagatgcaaccgtccatatgctgaggaggcgacacttcttctttccattgacatttcgatagaagggtatcattctctctacatatgtgaccactattattagcagtgcatggacaaatcacaggggtcccagaaaaactttatttgggaggattatatcatggagtactgcagaggtgatcatcatgtattattttagtaagtttttaaagtttaaactatgattacaagtttattatggtttgttaattgtttagctgttctccataattacaagaccaattctatcctagattgggataatgagttcatttacttcattctgcatcttcccacacaaaggcaccgggtggctgttgaagttgacattgagctatgaaaaattaacatgtactactgtgattccagcatttgtccttggaagaacatggaagccatcctgaagccctgggaagagttgttgccatcattaatccatggaaccggagatttctcaaataataaccagatcatggtgttaactatgagcgagatcaaggtgcttccgaggatgcattcatctcgagtcacccacgacttagttccgaaggccaaaaaaaggtacatagtgataaaaaattactatagtaataaaatatgcttacagtctactaattccatattttgtgttgcatttagtggtgattgtggcatttatgtcattgagtacgtggaacgtctattgatgcaacgtccaatagctgatgtcacgtaggaacggatgaagatgtttcgtgaacggtggtacgtcgatctgtattaccaaaacctcagttgaatatttgtgtataattaaaaatacattgtatattttgtctaatttgcttaatttaagatatagattggtttaaatgttttgtaaatgaaaggttggcgaacaaatggaggtacctacaacttcaaaaaaaaaaatgaaaggctacctctactgccagggttcgctgaagggtgtcgtcgatgcagattaggttattttaatggagaatcggtcaagcctggatctttgtgcccgtattgcgagtctcactgacacagtacaaagttttaattgttatgttatgattgttttgttgttagttttaaagtttgtttagtctttacttatgtttaaaaaaattgacttatttcttgtttactgtttaaaattttcaattttttttctcaacgtcaacaatctatcgacattcactcgataaattatcgacaaacatgaatactagggaatattcttaaatatcgataaaatgttaacaaaatatcgacaaactgtcacacatcgcgaaatatcatcggcaaaatatattttcaaatttaatcgacaatatgtggatatactatcgataacaataattttattttaattgctatagttatcgacatgatgtcaaaaaactatcgatatcatgtcaataatggtcactcctgacgtttctttgcatattatcaacattacatcgatattgtatggacaagctatcgataagctatagaaaacccagattttgacataaaactagatctaccatttcataccaaaaatactagttctaacaaataccacacacatataatgaaaacaaactacatactattactaatgtctcacaaaatgcttaaaacataacttacccatcataatggtgaatgattcttgactgattaggggtgaggtccggtttttccaccaccgagagagagagagagagagagagagagagagagagagagagagagagagagagagag

SEQ ID NO: 244476 - DNA, 2256 bp, Cannabis indica
gagagcccacaatctctttctcaaaaaggagatcctacccaagacagtttcctgcacaccgacccctggccgttatcgcaaaaatcaacaatataactgcaacaagatacatagtttaaaatggagcctccctcaacattcttttcaaaatcaactcatgaaaagatgaggcttcaactcactaacttggcaccctacaatcaagtgatgtatgacctctttggcggaagcatcgcattcatcaggtatattagattaccccttactgttggagacatccaaccaccaatattctaatggcacagttcatcataacatgataggctaaccagccctatacaacttgagggcataacattcatctgcgatctcttcctgaaattcccaacaaggcattagggaagatgtcaagaggagatcagtaatctgccaatcactattacaacttggccttgcccaaatacaaaaaatagaagatgcacccattagattaggagcatacaagcttcataatattcaatgatcttatcagctacaacatggaggtgtgcgtggacgacatgcttgtcaagtccaaaagggctgggggacatacagaggacctagatagaaaatttcagaatcctccgcatctacaacatgaagaggctcaaaatagataagatccaagcccttttgaacatgaagtcgcccacaacaattaaggaagtacaaaaccaaacatgacgcgttgctgcactaggcagaattgtgtccatgtttacagaaaaatgtgtacccttgttcaacattatcagaggtagcaaaaagtttgagtggaaaaaagaatatgaaatcgcattccaggagctgaagaaacaaatcggcttagccacatgtgttgccaaaatccctagacaaagaagagctaggtgtgtgcctaatagtcacagaacatgctgtgagtgctgccctcacaagagaagaagacggtgtacaacaccttgtataccataccaacaagagacttatcgatactaaaagttagttcccgctcatgaagaatctgacccacaacttgatcttggcttccagaaagctaaggccatacctctagataatctctataaaggtgtacaccgatcaacaattgcggcaagttttacagaaacttggatcatcaggccaaccactcaacttaacaaagtccaagctgtcatcagcttcatggctaatcatagaggcatatctccccaagtctctcaatgttttggagaaaagcatgagccagagaagaagtgagagcaagaacccaagaggtgcattgaccacctgctcgatgcaggcatgtcccagggcactttgggggcaactaatgcacgaggtaacaaggtcaatttcaaagcttctaacaacgaggctaaacatgaagttctgaatgctggcctcaggctagcatacgaagcgcgggctaaccacctagacatgaaccatgactctcagctagtcgtaacttatgtcgttggtgaatatacaactcaacacaagaagatgatagcctaatagagcttttgagatagctaaaaggctatactaaaaggcaagcccccaaagaatggcataacagccaatacactcgctcaactagccaactgcaccttttcaaccaaggctaacttggtacctgctcatttctttaaagaactaagtccttatatttcaaaaggaacaaacatgctagacaatcaacatggatacactacagtagcatacctcgaaacaaaaaccttgccagaaagcaaggattaagggatggctgcaaggtgtccaatcttgcacagcacacagacgtggtatcccaacaccacctctaaggagcattaccaagaaagaagctgaatagctatgaatagaagtgcgcaaaagctttacgataattacgctgagggcaaagccaatcgagtgttgaagggatcaagcttcagcttcaacctgacctctagaaggctggtcgaccataatctcagcaggctagccatagaatccacaatatggccggccactacctccacatgctagccagccatggcctcatccaaccacccaagcagcgctccctcgatgtggctggccacctagtcttgccctggctagcctgatccaccagtagtctgctatcatacttctagtctacagtgaccaagaggtacacaacatcttgctagcaggatcccctgacaaaatggaaaaaaggaaagatcaaaccaacttaaggca

SEQ ID NO: 244477 - DNA, 1963 bp, Cannabis indica
acttatctaggtcttcctgcatattcaagtcataataagaaggagttattcagtaatgtcaaggaaaaaatctggaaactcctacatgcttggaatgacaaacttttctctattggagggaaagaggtactgttgaaagctgtggtgcaatcaattcctacatatgcaatgagctgctttcgcttgccattggggttttgcaatcaacttgaatctatgatggcaaatttttggtggggttctaacaaagatgggtctaagatacattggaaaaggtggaagttactctgtaaatctaagtttgaaggaggaatgggtttccgatctttcgttgattttaatcaagctatgctagccaaacaagcttggagattattcgaaaatccaaactcacttttagctcgactcttgaagcacagatactttcccaggaactcttttttggaagcacacaagggtcattctccatctttaacgtggcaaggaattcactggggccgtgagctacttctcaagggtcttcgttacaagattggtaatggtctacaagtgcgctgcggaattgatccttggatcccagggcatgatgaatttcacccaatctgctactctggggaacctactacgcctgtgtcatcttacatcttggatactatggaatggaatatgcctcgtttacatgaggattttgctcaaattgatatagaacggattcatactatccctttgagcttttatcaatcaagtgataggctaatctggcatcataacacaaatggtatctacagtgttaagtctggctttcaccttgctagctccatctcggagaaggaccaagaatcatcctcggatgactacaagacatggtggaaatatttttgggcacttcaaattcccccaaaggtgaaaatatttgcttggaaagtggtccagaatgctctaccagttgccacgggtttatgcaaacgcaaagtgattgattcagctttatgttcaaggtgtaaacacgcatgggaatcagttgggcatgccttgttctcctgtaaatttgccagggctgtttggaaacatactaaattcctaattgattataaccatgctcaaggaatgtttaatggagactacattatacatttggcatcaactatggaaaaagtggatgttgaaacactcatttgtgtcatgtggggcatttggaatgataggaacaaagtccttcacggtggaaaacatagagatcccattacaattgcatcctttactttgaactacattgacaagtacagaagtgccaaaagttctctctgcaaaaaattgcagcagccagttgcacaccaaactggcactcagcatgcagaatctacacaccagcatttgcaccagcaacatagtacatctgttcactctacaggactgcattctacccggtccaactgccagcaagttgacactaaccatggtgtggctctaccttgtactgatttacaccagcaatcagcaacagcaacaatataccagtcgagcacattgaatgcagatgacagtatccaacttccacgacaattaaccaatatcacttggactcctcctgctatgcataagcttaaaatgaatgttgatgctgcggcaaatttcagcaatcaaacacttggcattggagctgtgatacgcaactatagaggagatgtccttgctgccctctccaaacgtgtacaaggatgttttcgtagtgatgaaatggaagcaaaggcgctttttcatagcctcaattgggcttcacattgtccatttgcaatagatattgtggagacagatgcgctaagagtttcctcagctctaaactcttctcataacgatttatcatgttttaatgatctaattgtagatatacgttgtcttttatcctctttccctagagttactattaatcatgctcgtaggcaggctaataaagctgcccatg

SEQ ID NO: 244478 - DNA, 840 bp, Cannabis indica
gctgatttgatttaataaataattttttggttaaaaaaaaaagtgccatcaatgttttgaaatgtaagttttccaattgggagcccacccatatagaaaaatttcccttccaaatgttattacccatttctataccgttggtggccgttggagtagaagaaaagaataaagagaggaattttggagggaaaaggaaagaagatcaaatcttcttcttcactcatcatcaatcgctatgttattataaacacaagaaatcatttaacggtttctcttttatgaatttattttaattcaatgattgcactcttcaattttcatttactctcctccatatggcttctacttcttgccatggcgaattgcactttcggagaatcgtcgacttgtttgacggtctacagagaaggaggtgctccggctgtttttcaatcccctaaatgtcctcgctggaagctttcatcttctgaatcctattacgcttctcaatcatggaccacagagccctgtcaattgtccatgcttcaaggtcgaagacattctcaggaagatcgagctctctgcgttctcgatctacgaatccctttccccagtagtatgaaaccttttttttccctttatctctatatatgattgtgattgtggatattgttatttttcattggtattagggttttctttctgtaaattgttcttagctgagttgatttttagagtaagttaaattcaatacgattgtatgccggttgatatacaaccgaactgtgatatttttgcttagcgtctaatctcagcacataaactagagtttaagttatacttcatcattgatatattcaa

SEQ ID NO: 244479 - DNA, 1616 bp, Cannabis indica
taaccgaccgattttccaccctacatcagacagtcaacaactacaacaacacagctgactacaaatgcaaggccaatgatttaagtataacttgacccaaataagaaaagtatatatatcaacctgtccaatgattttggcaggtttgtggccgggttaacccgacccaaaccgagtctttaactttttttttcgttcgctcttgataatgaacctttttgactatgatttctttgacttaaccaggtataaaattttttatttttgaattacctagtctgtgaaacactcaaatgataagtaaacaatggacatatgggattagattaactccaccattgaaaaaaatgaaaaataaaattttcttcttgaaattacgaaagacaggtttcagttaaacttattgatttattaaattatatataaattacctttaagaacaatcttatagaataaaaatagagaatagataaatttatatatataaatcttattcaaaataaagtaaaaataagaactgaacaaagaacaacatatatccatagccaaataacagagaacaaattgaataaacattagaggagtacaaactacgaagattgctgcaccgtcattgccaagaagtctgcatttgcgccgttgctgagaaaaatggcagcttgtgccttttgacattgctgagaaaaatagaagcttgaaccaaggaagactcagattagagggaggagaaacaactcagacaaaagactaggggagagatgctttaatttaaggagattgatttgagagaagataaaaaggcaccttagatttagggtttttatttgttaagtttaatgtatagatatattaaaaataatttggaagaaaaaaccccttaatcgggttaaatggtttaaatcggtttaattgggcgggttatactttttttcaacccgcccaatatataaattgggcagtttaaatttttgtcgagtttttcggtttgtattttttgtcgattttttcagtttggtctggacgggttattcgggttgggcggtttaaaaaaatttatgtacagccctagtcttggacatccagccaaacaagttatgtccaaggtcttagatcatgtatgtcctcaactcaaatgtaaagactacaacttctgtgatgcttgccaattaggcaaaatgcatcaatttacttttaagtctaatgtaaataaaattgttgatccatttgaaattattcatactaatgtttggggtccatctttctatacttcaagggtggttataaatattacttttgttgtgttgatgactacactaggcttgtttggatctatcccatacaatctaaatatgaagttaattacaagtctctttactcacttaaaaacttggttgagagaacgtttgaaacaaaaataaaaagtgtgtagacagatcttgacaaggaatatttgcctctgtacaaacactttcaagatcttagcataacccttaggcaatcttgtgcacacacaccaacaactagggttgtacatcggtcggtttaggcggtttatcctatatattttttacccaatctaaagttcgggttactaaaatttaaatgcaacccgccca

SEQ ID NO: 244480 - DNA, 610 bp, Cannabis indica
attctttggtgttcgcttttttctttttccctttcaattgtttttgctttcgagatcatggcaaagataaaattaaattcgaaatcagtagttgtttttgatgtggttcccgtgatgtctaaaattacagaccataaattgattggttcaaattatttggagtaaagtaagaccattcgactgtatctgagaaatattgacaaagatgattatttgactgatgatcctccaagaaaaaagacaattcaagaaaaatatggctccatgaggatgctcgcttgttccttcaaattcgaaattctatgataatgaagtaattagtttgattaatcattgtgaactggttaaggaactaatggattactttgaatttttgtattctgacaaaggcaacatgtctcgcatacatgatttattgagcgaagaaacaagatcactctcttatgagttactttatggcatttaagaaaacatatgaagagcttaatgcattattgtcatttagtcttgatgtgaaggttcaatagcgccaacaagagcagatggctattatgagttttcttgcatgactctcatttgaagtaaactctgcaaagtcacgagttctctc

SEQ ID NO: 244481 - DNA, 650 bp, Cannabis indica
ggcatcacttagcttgtaacgtgtcatcatagactgcacatagcacttggcaagcataacgaggttgaaatcatgtaggaggcggaatcccagaccgccttcatgcttaggctgagagagtcggctccaattcatccaaatgatgtcgttacctatactacttgtggtcttccaccaaaaacgtgccattaatttttcaatttcatcacaagtacccaatgggagaaggaacacactcatggcataagtgggaagagattggatgaccgtttttaacagaatttttttattagcaccacataataatttactagtccaactatttattctgttaatcactttgttcatcaagaagccaaggatagattttttttatttcttccaatgatatttggcaaacccaagtaaaggctgctctcggaggcgtcattcataccaagtattgagcttagttggtcctgaagactttgttgaacatttgaactcaagaagatggaagactttgtaagatttacttgttgcctagaggcagtttcaaagcggcaaagaagagacataacactgcccgttgcaccagtattgtttggcaaaagagatagctgtcatcagcaaacatcatatgagtgatggtgggagcaccgttagcaaca

SEQ ID NO: 244482 - DNA, 1214 bp, Cannabis indica
atgtgtcaggaggatcacagaagcaccactctaggagaactttaagatgcccagattaagttgtatgataggcgcacaaatctgaagacccacctggccaagtacaataaatgatgcaggtggcgagtttaagtaaagatgccaagtgtttgtgcttctccctgatgctcaccaagtttgcagaggactaatgaaaaaggttggctctcagatcaattcatagctagaaggaattgtagtctgccttctggaagcaattcatagctacccacaactatgatatggaaacggtatccatcaccaatgttaacaacaagtaggagaaagcctcaagaatttcattcaatggatgatggagacagcagctaaaataaaagtgattgatgacatgaagcttgtggccttacaatctggacttgtagtttgctccctaatatggggagagatgcaaagaagaagggttgagacattttttgagttcatttctagggcacaaggttttatcaatttagaggatacttttcaataggctttcgaagtccctccagcatttgctccttccgtgaccactccatgctttgttccacaagcctctgttcctggaacataatacaccctgacagtctatggaccttatgcatccatacaacacctacacaaacccatttttttgggtatggagcggcacaaatcggatgcagtattgctcccagacagtcaaagcctcaaatggatgttatggaacaaaatgtaagtcattctcagagtaagagaagtggaaagaatcaaggtaaaagtgaaactttgaaaaagccaaggaaggattatgaactgaagtacagtgagtatactagcctggttgatacttgggaaaacttgtacaatgtaacctggaatatggttcactacatgaaccccctaagaattctttaagggggaaagcttaaaagagatccaagcaagaggtgtgagtatcacagagacgtgggacacataaccaatgaatgtggctacttaaaggatgaaatcgagatgttggcaagaattagacacttgggtcaatgggtatgcattcctattatctatcctaggcggggttattcacggaccgttgctcattttgggacagtaaggtaccataaactctttgcaaggagtagatcaccctcaagctcctaaatcacaactttcagccctacctgctctgctagctc

SEQ ID NO: 244483 - DNA, 1082 bp, Cannabis indica
aaatcttgttgtgattctctctcgtgaaataagccatcatttgttatgttatttctatatctaaaactgatattgttactgtactgaacttgatgtaataaataattaaaataattattcaacgatactaataaaaaattgatcattatttttaatttgtgatcattactattttttaatgtactattatttgaataatataatatatctttttaagataacattattaaattttaatgtaatttttatctttttctagaagtattccagaaaaagagagagagaaaacacataagtaggtttagacagtgattagagttagtaggttatagaaaaaaatgtgtgagttaatatttttaaaattatgtgatatttgaaaaaaaaaatagaataaaaaagtaagtaataatatttagttttacttaaaaaatgtaaaaaaaaaaaaaacaacaaaaagaatagagtagaataaaaccattttagagggatatatcaccgcctcatatctattatttatatatggagagaaaatttgtaaccatgatcaagtaccaaaaaatatatatacttcaattttcttatttctttggatttgttagggaaagatgagatcatatagggtttaagtttagaattttccaaaaattaatatatttctctttctctgtcatatatttctctttctcttccaaaattattattgttgttgcttgactctatagtatcatcatcaacttcctcatcactgtaattattgtaatgttatatgctttcttacgatatttttcgctccaaaaaatatagcaagaaaaaaaaatattaaattaaagcttgaaaaaattctttaaagctctaaattctcaaaataacaataataaagaataaaaataaaaaataaaaattaattgaaagagagaaaaataaaaatcacaatatatataagaaaatatttatagatttaatgcttttgttgtttaacatagaaacaattgatttaaaattatattttatacatctattttttatgtatacatataaaaattcacaaatataactttaagattgcaatagaaagaattttt

SEQ ID NO: 244484 - DNA, 1574 bp, Cannabis indica
ttttttttaaggtaccttgtcttcatttgtcaaccagttttaaaggatatacattaattttgtaatgcttccaccctctaagtgggtggttcagcttataactgccttgcttgtcctactctacactccaccgaaagtattaactacttttttttaaggaacttttttttaattagcaagaaattggcttaattagcacattatgattaattgcatgccaaggtggattgtctggtaagagtcctggtaaaggcacgagcacgacaaatttggttgtttcgttgttttagtttccatttttaagaaatgcatagttttagtgagttaacatgttcatacgcatatgaatgtttagttgtccatcacttacaatgtgtcgtaaatgtgtatagaaaagctagggtccaccttaataccatgatcagtacataaattactgtttactataatctctattagtgtcaaaactatataaaagtagttaaatacctggtggaagaagtataagagttaaggttccgtagtaaaagtttaaagtaagacactcgattagagatgcaatagtggagaggttggttaccctatccaaactcataacaggtttttctttttaatttattttctgtaagtttcaggaatgaagtcaaaaggatggtggaatggaaggaaacctctttctccaaaattcaatgcatctttacttcatttatttcacaaaaatatggaaagagagagaaaagagaacaagacaaacaagtaaacaatcctcaaaagcaccacaccagcatagcttatcatataagcatgggcctacttttgcactattcatgcaactaaaaacccactgcagctgcaggactactaattatttcacaagtattcttctaaatgattaaggaatctctttacaccagcaaggtaccaaacctaccaaacccatactagatcacattcaaacaactggttggtttggcagtctctagcaaccaatagacaaaaagataacaataacaactgtttggcagtttctagcaatagagaatgaaagaatctttgtaaactaagttgataaatttcattatggtttggctgttggaagggaatagatattttaaaactaataagttcaacattcattatgctgtcacaccatcttgacaacaaaacattcaactattatgttacttctatttacaagcttcaaaattaccatccataagccaaaaattgaactcacataaaaacatacaaataaaaaaaaaaatactgtgcatgtattgtaaagcattcttgagatattgaacgaataattattccttttacttcattcatatcaagacgagcaaaaaaaagaaaaattaacaagactgtctaatataaggaaccaggcaagggaaaatagcatagaaagacaatttacataaatttacaaacatgttctgagaaatttaagacaaggacaaagcttgttttttaatgtaaatataaggatctcagatcttcaaagtaacacgtcgggctctgacaaatttccagtaaagttcactctgcagtaatcgggaaattgcaaacct

SEQ ID NO: 244485 - DNA, 2113 bp, Cannabis indica
ataactaatgaaataacaacgaacagttctcagatctaactttttgaaaggcttcataggcatccaccaatcaatcgcttgattgggattgggagtgcgaatggaagaatccactggtttttaaacttttttttacattttttttcatgagaatcataggttaacggctttacaatttcatgagaataatatgttaactgcctaacaaggaaaaagttaaaagaaataaatgatcattaaaccaagaattgtcgttagatagtcacttttaatacataaagatacattctatgctagtcttacctcatttgtgaattcaagcgtggcagtcaacctaaatagaaatacttgctgaacgaaggtattatgtcacaatcatgcaaaacgggtaaacaacttcttaaaacctttttggggatctaaaatcaaaactagaaattttcttatcaataaataacatgacaaagctcgaggaaacacgagaaaagcgactaaacggggaaattgcctaaaaatggcaagctatttttctgagtctacaccaataaaactagtagaccgtttctgcagaaatagcctgccatttttactgcagaagaacaaagaccctctaatttgattcaaaacaactccaaactctacactaagctccagaatacctatgaacatcaatataaaccatttctaagcaacaaaactagatataacacaaaactacacatttcaccattgttgagccaagtttgagttcaagaactcaaacttgctcaactcaagaattaactatcaaaaccacatgaattaagcttaaatcaactatcaccatttttgcatgtttgagttaaaaagaaattcgaaaactaacacggaaaggcttagatttacctcaacttgagctaccaaagatttcttactgaaatctcataaatcaaacaccaaaactcagcttctccttgcttcttattgggtttgaaagaaagagaaagataaaaatggattttttttttcttttcttttaatttgtttaatctaataaatcaataataaacttaagtttattactaaggacttagtggcaagttaccatctaaattctaaagaaatcagccacaaaatttaaaactaaaatgttaattttaccctcacataagtgtttaatttacaaaatgacttagggataaaatagtttaatgcaataaccctacataatcccgatatttcaaatatcaacatatgagtactctcctaagacaaaggttctaagctaatgtatgtcactaaattggttgttcgtcgcattttccatcgtcaccgagcaaaaattataaatttcatatatgacataaagaatacagagtttaataaaatctctaaaattaaaaaattataactctaatgcctatttttttaaaaataagacccacaacatgtataaccataaaataccaaaaattaaactaatcactattactaatccataatctaatcatgcggtcattacattaagcaaccaacaaccaagttgacatctcaatagctaagttggcatttgatgtcaaagcaaattcctcaccatacattgatctctcttcgttctctatatctttgttttctgatgtaaaagatacattgatctctcttctctctctatgttttatgatttctaatgcaaaagatacattgatctctcctctctctatttatgttttctaatgcaaactaagtaactcggtcagccttggccgaaatcttactaatgtgtctttttctaatgtcttccttcccatgtcattaatgagctggtttggttttatttaggactgataatacaacacctagaataggtattaatgtcctaaattgaaaccaaacaagaaaattgaataaaaagtgattccattcttttctccaactaaattaccttaaatacaaaccaatatatttaatatttatatatatatatatatatatatgtgtgctttttactttgcaaacatatacataagcagtttagttttttttccctatttaagtattactggcttttcaatttctagctttacaattaaacatgcaaaagaaaactaaacaatagatgaggtatctcatagtt

SEQ ID NO: 244486 - DNA, 1828 bp, Cannabis indica
taaaatttcacatatatcataatcaatatacttaaaatttaaataaatctctataattgtaaaataataattaaaagcctacttctgaaaataagtcataattatctgctaattctcataataaaatttagcggtcattacaatgttagaccttacacatttcatgttcccaaaaatgcagatgacagaaggattttgaaattcaaatgatgataagggacagaacctctgacaaaactcaagaatctagaaagaaaaatagattccgattgaatactaaacatacgtgtacaatagcaactgtaaagactcgtaaagtaaattaaattctcgttctgagttatgttgagggagaaactgtcccatgggcctaatgaggacaagtcccattttatcaaaaagaaaaatgaaaatctagtgtgcaataactgacgatattaaataaagcagtgagctcttgagtgtttaataccacggatggcggcatccaagataaattcataaaagaaccaaaacataagccacaccacaacaaatttaagaaaagagacatctttaacccaacttaagtgtgccatacttggcaaccaagttacgaatatacatcaaacagtttatgtactgaaacaacccaaaaattgagatattcaaattaacattgatcgactcaaacctaatagattttactattcgagataaacatatacatcatccaacccacacaatcaagtaatcgtgataactagataactaaatcattcggtgtaatgttataatctgtaggggtgtcacgtgtgtaattttataaattagtttataataataaactaacattttagagaaaattgtgatttaattaaaactttaaccaattatttgaaatataaaatatattctagccttataaactacttaaggtcagggatccccttttaaaatataacaaagaatgttaacagtcttacaacaaaatacttccattcatcaaagtcaccataaataaaatcatgactctcggataagtcgatatgtacatttgtcgagaaagacatctaacttatgacagacctagctcaatccatcccctcacctgcaccacaaaacacccgtaaaaagactcaacaagaaaagtagaagcataaaaagtaaatatcaacacatagacatattcaagcatgttcatattattataaccaaataatcacgtattgactccacaaccaggaaatcacaccatccaatggataacaattactaatgacagatatttctctaataagacaaacaaaagttgttacttattaattaaccattactcattgctgcctaatgagaaaatcttgatactgttgtctaatgaaataactcaatgtcactgtcgttgcctaattagacaatcgataagtagggaacctaacaacaggttcaagtagagtaatgactctttcttatattgttgccaagacaaccaaatagagtaataactctttattatactatttcctaatgagataattaaataaagtaataactctttcttatagacgataattacataatcatatattgacatgttgtacaattgtatatttcttacctcaagtctaaatttaagtgtgtcggtcaacttgagtagaaatcgctcgacgatctgggcccctatgtcacaatagcagtacattggtaaataattcattttaatccattcaaggacttaaacataaaactggaagtttttctatcaataaaatagtgttgcaataccgtaaatattgataaaactgttaggttataattaacctatgtttcgggtctttaaaattagcat

SEQ ID NO: 244487 - DNA, 1306 bp, Cannabis indica
aaattaaaaattaaaaaataataaaaaagataaaaaaaaaaccctaattcccctaaatttcttctcttcttctcctgctcttctctcactgtcctagccgtccaccaccattctggcccgcaagaaactctggcgtctcccccatgtccgagatgaaggttttcggtgttgatgtgagggctcacacagtcgaaatgtggaggaagtggttagagaaagtgggtcaacaaatttgctcttgaacgagctcgaactcgacatgtggaggtttcagttgctggagatgacgaccgaagctccctggggcgatctttgttgatggcgagcacgtatgagatggcagtggagaggttcgctggggcggtctttgttgatggcgagcacggaggagatgggagtggagaggttcgttggggcggtctttgttgatggcgagcacggaggagatgacagtggagagctttagggcgatggcactggaaagacaacaaggacaacagtttttgccccttcagtgacttctccactgttgcacctctctctctttcatttatttcttttgacagatttaattgttagatctaagattttttttcttatggatttgaatgcagtttgtttgtttttgtaggatttgaaactgagatcgtggtaggtgtttatgttattgtttgattgtgtttggatatgagttatggggttgtgtttgaattaggatggaggtgatgatagtagtggtggtgagcagttgtggtttcgacggtggtgatggtgtgcatttgtttcgacagtggtggtgatggtgggcagttgtgagggttggtggtggtggtagtcaccaattgtggtggatggtgatggtggcttcgacagggatggcagctaggtttagagcaatgagagagaaggagaagaagagagaattttttagggaatttaggttttttttttttaatttttatttttttaaaatttgttttttaaattttaaattaattaatttttaaagaaaatacttttttatttttaatttttaaaataattattttttagttttcttaaaatatttatttacgtggaccaataatataatgccatgtgtacatattgtccacgtagacaatatagcatgcacttaacacctaaaaatgaatggaaagggctaagtgttaacagaatatgagtttaggagcttttaccaccaaaattttagaattggggttagttgtaaaaatctgaccacttaaggaggttatgccgcaaataactcttgcacatagtgttggatattattttaccaggatct

SEQ ID NO: 244488 - DNA, 918 bp, Cannabis indica
aatttaaaaaaaaaattaatatgttgacatttagcgtcggttagaatttgaaacaaaaatgattcacctctatttatacccaacgctaaaagtcttagcttctatttataactaaagctaaagggctctattttgtaacatccccaaactcaattaggtttcctattttgatcgagcagtagagcctcttttctctctctccgccctaacgctaaaccctactgatgccacaccacctcattatgcactaatcctagctctctctttctctctctgccccaaaccacaaacctcatcgatgccgaagaactcttttttgctctctcctcacactctcgctttctcctcctttcgggcctccttctctcgctcttttctcctttcccaattttctctattgctccgtcgggttgtaagctcatctcttacgtcaatgggcaattctacttctactttattgtcaacacgaggcatcactaaaacctatataaatatatacatatatggaaaattcaatatgtgtatatatatatatttacatgtataaattaatttatggtgaatttttgttctgtgttggttgctattttttttttctagtttagtttctttcttagtttttccttgaaaggatttcttagttgctttataaggattgtttgaattttatgtattaatcaatgttgggattaaactcacttaacttgtcaagtcagtatgtctatctatttgctcatcagatgaatttgaagaaagttattatttataacagttggctaaaataccaacttaaagggaacccaccagcaactataaataggggttcctctattctcaaagggagttctgagttaagagttatgatctctaatctccaaaagctcgtactttagattcagtttagagagagagagagag

SEQ ID NO: 244489 - DNA, 1413 bp, Cannabis indica
ttcataagtattttgggtagcgtgcctaattatttagggcgttacattaatactccacaaatataccatcgttacaatgtaatacaactaaaagtttcaaataattaaaacaacaatatttctaagtaataaaatagaacaaaacatcatgaaaataaatacacaaaatataaataaatgtaattggattatcggtttttaattggattttgaaattgacatataataaccgatccaattcaattagaatccaacttttagcatccaatccaatccaattataatgggatatccaatttttttgtaattaaattaaattagatcggttcggttcaattaaatggaaccaccctttcatgtactccaagtaaacaatcaattttttttttaagaaaataaataaacaatcaaatgtcatcccaaaagaaaagtacaaattcttaaaactcattttaaatttggttaatttagtttttttagttcaattaactttattcaatgacatctcgaaaaaactttattcaatgaaagtctccctacttacaaaaatttgaaaccctttagttataaaatgaggttttttttttttattatttatacatttaaaacttttttttttttgtcatttatacggacatacaccgagtaattaacaaagcaatctaaaccgcaacccaaatccacatcgcaactcatgcaacaaccactggagcaacccaaaccgtaaaaacaaaattaaaataaaaaatagtatttaaagtatttttctataaaaattatatattttacataaattacatttaactacaacgagcacccattaaccaaaattattcttattattttttttataataaaaattttattttttttaaagctaaatggagctcaacaacgagcaccataaatttttttacagattttaaaatttgacctaaaaaaactaaataaaaaaaaatccatcctcatcaaattgtttgaaatatgtaaattataaatcataaacatattcattaatattttacaaggttttttttttcaaagtgaaaaatcattcaaaaaggcactaagttaccacaaagggccagctccctgaagagaaaacaaccagtggaatttgaaacatgagcccacttggcgatagagtctgcaaaatcattagaaagtcttgcaatagaatagagagaacattaaacaaaacacaatagaagagccaaattatgctcaataattggaatacatctctacttaggacccttacatatccatatgcaaggtatcaatcagagttttgcaatttgaaaagaaagtaatttcgtgccacttctgcttcacaacaacttccaaaacaatgagaatcgccacaacttcaacaaaagaaggaggatagagcttggaacaccttagaaataa

SEQ ID NO: 244490 - DNA, 1169 bp, Cannabis indica
aagtgtttaaataaaagaagaaaacttatatcatcaaatttatacaattataaaactttcaaaaaataaatccatacaattataaaactttcaaaaaataaatccatacaattataaagaacactacaatcctaaatttctaaactcctcatcctcatcatcaccattctctccgaatagctgctttgcaatctccgacatatatggatagtagggttgttgataccttcgacatctgctggtatatctgtggcatttgcgcattggtgtcacaggcagcagctattgcatctgagaaattggcggcatctgttgcattgaatctatccaaaaatttaaaatttataaataatactaccaagagtctcaaaacaatcatagcacaaattaaaacacaaataataatatagaaacactcgaatgttatatacttttcttcagagtcaaagaatataatattttcaagaataaattaaaaaaactccactataattaatgatattgtaacttgaatacactacaccgcctttaagtagaagaatcagtaaacaatgaaatgaaaattgcaactttgttcttgtgcccagttgaacatatagaaatatagcagcaacagtaaaaaaattgatactataatgttcaagaattcaactaatgcaagacacatatgttccttattattattacttcaagcagggccacccaagcatttttggggccttctgcgaaattttaaaatttggcctttaaaaaaaaaaaaaaaaaccatgtacattaaaattacaattctattagtttttttaaattgtttcataaattttccaattaattttttttttatttatgtataaataataggaaaaaaaagaaaaaaaataagacattttctaaaaaataaaataaattagggctttagaaaaattaggggccttgtgcaatggcccaagctgcccaatgcttaagccggcccgacttcagacacaaactgtagacttaatcaaataatgatagtatattagatagacaacttcttcattagcaagtactatggttcatcaagactattattgtcaaatgtccaaataatcttatatatcaaattactaagacaaatcaagagacaaaactaggattagcctcaacacaccgagaggttgaaagcaagatat

SEQ ID NO: 244491 - DNA, 2423 bp, Cannabis indica
agtctaaagaatgatcaacgtgtcacccaaataaacaccatgtcacctagtgcagatttcaagatatcatttgccccctaagtccgcgtgggaactatttattggtacgtggacttgctcggcccacgtgctaggtaaatagggtgacacgtgctcggtatgcgaaatgggtgaacaaaaaaatctcttcaaatcttcgagctatcttttcgtatcctggtgcattaaaggtcttttacctcgagaatcacacccttgggatgtgtgctggcggttgtattgctcgaaggtactgacgatactcttttaggggaaacctcaaattttagaatatagaattacaaaaataccctttcaaaacctaaataaggaattttagaattcacttatacttttttaggcatttcgaaacatggaaatatcagaacaaaaactttttttttcaagttttcaaactttctttgaagctccaagggaccacaagggtacttccaaattttaatttgtagttctgaacaaatttcctttaagcgatcttcgacagtgagtaagtttctaaactttatgcaatcctttgaatttacacttatactttacaacttcttttatggatatttttggctttcgaataaggttgttcttgatttttaagaattaaaatttatattttgatgttgatcatatgtacttggactataatcatttgattctcgcaaattcccatattttttctctgaaaaatctcgaaatacattcggcgcggtttttctaatgaattctgggtttgtactattcttgaaaaactttgaatgaggatcctcttcattaggacaatctccttcttttgattttcaattgcgtctagtcggagtgttgaatatttcttgcttcaaatttcacaccacagctcggttcttacccccttttccttttttgttgataaacccgggtgatttttggggtggtaagtaatgagtagatgaggacttgttataattactacacgaggaccatcctaggctccgtgcaagttcgtcttcatcaagtgaaagttcatcatccagctttgacgagtgggaagtgataagtgatgagtcagaatctccacaacccatcccacaacaccattattacctcgaccaaattagtgatgacaactacggatgattcattgggaattgaattggggactaaggcgatatttacccacttctttgatatacaaggtcttagcgggggtttcgcacactttaccagttggtgagccaaaccttcaaagagacctttcgtgctggtggaaattgcagtcaatgttgcataatttccttcaccagaatgtccgcccaaggctaaaaaggtggcgcaaactaagcaaacttacaggaagtttcatccgaagattctcatttagctcggctaatgactttggctcgtgctacagacgagggttctgaagtggtgcctattggtgacaccaaggtgtagagggttaaggatcagggtgaaacccgtccagcccaagttgaggtactaatggaggaagaagttgatgctacccgtaaacccttcagtagatttggcaaatacaatgagttcgggctgcctattaccgcacggggacaactttaaatagaaaacatccattacgttatagaggaatacaagaaagcccacccatcctataattaagaaaggcctaaggacatgtgggtctctccccgtctaccttaaccataataaggttgacaaacttagatacaaatgggcttattgaaagtatcgtagcctttcttccatttgatggccagctagccaatgaccctggggatgacctatatgcgtggtctgacccacatgctctgcaaggagctcttcttcctcttcatccatattttcaaagattggaaaaatattataaaaattgcccagcacaattttcaccgaaggggatcaaatacttggttgtattgtataaactttccacacaacaaaaatgggagatacccttaccccacaatataaattggttctttgatctgaaatccaacctcgggcaaggttgtttggcctatttttaattttcacaaatggaatgctcttggatgttcggtacgatggactatgatgtctctaagatcagtgggtacattcaagattactacatcgtgcaaaggatgaaggccaactacctttcttttcaattggaaaagacttacgatcagtcattgttcatactagggttgaggacaacggctcaagctatcttaaagatgtcgagcaagactcaaaatatttctttattaacctgaagaaaattttcttcaatacggcttgtacccgtcttgggaaattggagaggataagccaaaagacacaacacatgttcccgtgcaaccaactttaaagccaaagaagaagaaaag

SEQ ID NO: 244492 - DNA, 1602 bp, Cannabis indica
tcatgatgaaaacaataacagtcgtcgtgaagagactaatcgtcgtccttgaaaagaactaatgtgttcatagagaccacccacttcaagaacaacatgttcaacacgctcaacacgttcaagaagaagccaacgtggtcatgatcaaaaccccaaaactgggaatgaggaaaccaatactaatgatggtggttttgtacctatgagtgagggtgcctatgatcccactaggtatgtactgttggttgaattggaaaatcgccaactccgataacgtcttgccgaagcaaactaacaaaacacagagttggaaagagaggtagcctcagctagggcgactcaagaaaatgttgcacaaaactaacctgatcctggagtgagaaggccaagtggtaggttgttttgtgaaaacaaatgaagtgatgacatgtcaaattatatcaaaaacaatcacaataaaaattatcaatcaacatatcaggagaatctaaaccattttatcttagcataattggtctttcctctaagaaaatatacaatgtcttctaacctaagttagtctcatattggaagaccttggaaaataaattttactaagcacacacactttaacatggtggtgtactggaggaacgaagtagtttggacttttcactatgtagtctattttatctatgtaatctgtgctaaggtacttatcctggtataaatttaagaagtatattggtcgaacccaccctgatcagtattacttaaatttgttaaggatggagctctaattacacaaaagaatgtctcaccactttcagaggtactcgctcctagagtatccttgtttcggactatatcttaaaaataaataatgagctcttcagcctcactcgtctctttgggaaacttgctcctccattcagccaaccactgttcgtcagctttcatagccttcaaggcctcctcaacaaaaatggtcgcaatggcctctttcatgtcatcaggatctcattaaagaaattcttggatgttctccttcaccgacatcgtgtcgatactttggtggggagaaattttagagacttttggtggttacaaggtgagccacctacagcttcttgggtgacaagaaattataaaaagtaaggttttcctccaactctggattcagaggtgattcaaaaatgcaatctagaaagaataaaatagacatcatgaagatttgtaaagacaagaagtaaaataaggacaaagatcgaatacttattgaatatgctaaagtccaagctgagcgttagaactctcctcaatgggaagtcaaaagtatagaactaatagtctcaaaaatcgtaagtatacttcacgtgactgattgggtagaccacttttttggagtatcattctagcctgtaaaagccaatcttctccttgtgacctctcatgggttgagatttaatcgtgtagaaatacaaaagatccctttaggtgttggtactgctttcttgtgtcacaaacaaagaatgtagcatacagataaaagatgatacacatgtgggatgaaatggaagggtgcaactttggctactgcacaaaagttagcaaagtaacacc

SEQ ID NO: 244493 - DNA, 1404 bp, Cannabis indica
atacacattaatttttactatagataatttacttaattatgatgttgaaattaattatacatttcaacgtatatagtgtgtgcaatataaatatgtcacaattatttttcataaaatatgctatgttaatttatgaactttaagccctttgagattttatatatcttactaattatataaatctctatttaactataatttattacggatttaacagaaaaaatatactcaattaaaaagttaaatttaaccgattttatattgctcaaattaattttttttagaagatcaaaaagttgtattgcttcaatcaatttatatcctaacagcactttttaaaacaaaaaccattttagcaattacagccaaataatcgttgggaaatattctcatcttcttgatcacaaagaaaacatctatcatctgtaatgatatattgaacaattcaacaacctatctttcatttgtaattgatttaggacagcaaacctctccataccagctttaagattggtaaaattattttaaagagttgcatcttgtcactgaaaaagacatccattcacaacaagtaaacactcactcacacctaccactttttattcttgtatatgggtttgattagtgcatacatgtacattcatattcattcttctttcatatgtctttcacctagtatatatattattgagaataatattaaatagggaaattctacaatgcattctcttaaaatggatatattgatgcccatttatctgttttagtacccgaaataatattttagtcaaattttttatcatggtcatgtacgttatagttatttaagacatcctgcaaaattttaagaaatttgaaaaagtttatgacacgccgaaaactacgtttaacagtgtgttgcacgcgtgactattttattttatacgcgtgtgaaatagactgtttgaacattgttttctatattgtaaattattcgaaattgctcaaaattttgtaggttatcttaaatagctataacgtacatgaatatgaaaaaaattagactaaaaaatttttctagatgccgaaacaagtcaagggtgtatcagtacattctttttaagagggtgtattgtagaatcgccctattaaatatatagtgcatgcatatataaccttttaagtttatttgaagttttacctcttcattaataaaattgttctttttttttaacaataaaattgtccttaattccatgcatataatgagaaattttaaatgtgtgtaatgtacttgttggaataaaaatggttggttttttttgttggaaaaagataaaaatggtttgactcacggataatataatattaatgtgggggtttgtaacatttttttaatcaattttttatttttaaaattagaaa

SEQ ID NO: 244494 - DNA, 2988 bp, Cannabis indica
aagatgaaaatgccatagatataaagaatgtggttgtcgtcttttgatggctcaggtctagttacattaaagagttcttaatattgtccaagtggattctagtcacagaataaaaaactcatattccatacattaacatacagtttgtatccattgacagaaaatagatattaataacttgtgaaagtcatactgtattgttcaatgtattctaggaaactgaaattgaaatttttatttagaatctaaaatttaaattcaaagacttaaatttataccaaatatacatgagtaattattctagctttgaccaccactactaatctaactctaagtttaggttgcctaaagtaagcatacacaagtaggagattctataagatcgaggattcatatcatttcgggatagaatgtcgggaatacagtcatctgcgccattcaatttcatagaagaaaatagaatgacatcataaacagaagatttataaaccattcatccaatgatatactatttaagcaaattctaaatgaaaaagctaagaggaaatattaaaagataatttcgaataaaacaagaatctaacgatgtcttattttggcgagagttaaaatcattcttattttataaatctcttcattgtttcatattgtaaatactaatctaagttgtcatctttggatgtacaactagatgttgcatttacaaatacttatctgtcgaggtctaacactattatgtttgtctaatggatcacaatcctttgggatttgtcccattaaaaacaacaagctaagttagaacaacaatgaagatttgtcgtagggaagaattaatgaagaagaaggttggttcagcaaaagaaaaaattactcagcaacaggttatctcagtgcaaccagccacggttattgcaaaaaaggctgatgaggagaagcatgagcaatgggtcattaatcatgagaacaagagtgacaaaggctggaaaattcctaagaaaactagtcaggtggttcaaactcatagcaagaatgtggaaagtaaagcaactggtaactcatttaatgctttgcaggggaaggaaggcacgactcaagatgatgttttgcttctggatcatgttcatgaaattgagggtaacttgtctttgcctttgtctcatggatagctacagtatcatatgttggaatggtaggggtatcaataataaagataagcaagatgttgttgctgaattttgtctaaaaaataagttgggtgttggagctttgttggaaacaaaattgaaggggaataaaatcaaggagctatttgatacaaaactagctaaatgggagtattacacaagttccacaatagaaggtcgcttacttattgtttggagaaaaagttttgctagagttattatcattgttgaatcttctcaacatacgcactgttttgtcgagatgacgggttgtgataaagctttttgtgttacttttgtctatggtcacaacacaatagatgaaagaaaaagcttatgggaggttcttgatcaaaccaaactgccagtgaaaccttggttgattttaggtgattttaatgcagtgttcaatgtggatgatagagttggaggcaacccgattaccatcaatgacactcaagactcttctttgtggttagcctcagctaatgttgaatccttgccaaggttaggctataattatacctggactaataatcaagaaggggacagcagaattttttcaaaaattgatgatgtctttgcgaatgaagaatggtttgatgcttctcctgatgcgaaagctctatatcaatgggaaactatttctgatcattgttcttgttctatctctaatcctgcaacaatcaagatgggttacaagcctttcaaatactttaatttctggagtgaacacccagactttaaagcaacagtgatgcacaactggaggaagctgattgctgctaaggggcttaaggctacttatctcaagctcgtgagattaaaacattgccttagaaaatttaaccatgattctattggtgatattggcaggtcttatcaggatgcaaagtccaaatatcttgatgctagattacaatctcaagctcacccactggatcattcttttcttgctatggaaaaagaagcaacagctctctttatttgtcagggaaaaatgtatcacaactttttgaggcagagaagcaaggtcacttggcttcacaaaggagatgaaaacacttcttttttttttcatgatatgctgaaaaagagaaagcttgaaaatagtatcacttcgttcatcaatgatcattgtgaagttgtgaatcattttcctgaagtggtcgatcatttgtgtctcattttcggggtatcatggggagtagagatctgatttataataagttgaatgctgattgtatcatccagggcactagacttgacctgaatcagcagctgggcctcatcaagcctttctccaacaaagaaatcagagctattttttttagcatcccagatgttaaatctccaggttcagacgggtatagggcaggtttttggcatgaaataggagcagaactttatgcagcagtcaaagatttctttaatacaggtataatcccgaatgagtttaactcgactcttatttctctaatacctaagattgagaatcctactaaagctgtagatttcagacctattgcttgttgctctacaatctataaaatcatatccaaactgttatgctctagactgtctgtggtgcttccaaatttgatcaatcaaaaccaaggggcctttatcaaaggaaggtctattgctcataatgtgattattcttcaagacctcctgaaaaattacaagagaaaattaatttccccgaggtgtgcttaaaagatatatatcagtaaggcttatgatactatcatttgggagttcttggaggacttgttggttgcctttaactttcctcaaaagt

SEQ ID NO: 244495 - DNA, 1422 bp, Cannabis indica
ctcttcacagtttccatagcaccctgagtcatgctcatcatttgctctccagtctgttcagttcatagcaagttttgtttcaatattagttattaatcattcaatatcaatctaatcattaatcgaaccaaaaagattattagtacctgttggaggaatccggcgctttgatcctttccatgttggatagaatcagttgctgagtcagttgctgaatgagcagcatcagtggtcttatccttggcttcgtttgctgagtcagttgctgaatgagcagcatcagcagtcctttccttgacttcgctggctgagtccttagcgcattgtgacatctcttcggccttagcctacgaaacataataaaaagtaaattgtcaaattaaccatgtacaatactaaaatttgtaaaataatctcacttaatttaatctaagtgataatggtcgcacagtatatatctatagtcaatttataattataataattatttatgatcgcagtataattaatagtggtatgcaactatttattatgctaataaattttaatagaattttttattaaagctatttttacaatacactctaaataaataataataataataaaacaattatagcaatagaaaaagaaaatgtttgatcacaatgtgaaagtatatacctgagccttagcttgggtttcctgcatgctagacatattgattttccgggaaaatttggaaagaaaataagatgtgtttggatgattctttcttttggttgtgctttgtttttcacttaatttgtttgtgagaataaagcatttgaagttacatataaatactagttatggcaacacaaattagtgacacgtggaaataggattggtggatgttgtgacacgtggcagtggaataggtttgtagatccggttgtttctgccatggaatttggtttggggttataattaattgaatggctaaattaagattagtattagcataagaaagacttggtcttgtagaaagagaatgttaattttacaccaatcttacacttgaaatagtctttggttttcaaaaaatataataaaataaaaatgagaacatatttgtccacttatataccactagatacacaaatacttccatttcaaaaaatatatatatactaatacttcaccttggaaaaggaaaatttaataaaagagttttttttaagttaaaacatcaaaactatcaatttacttactaaggctgttcccgatgcgggaagtgcagtttttaattatttttttaaaccaactcgcacatataattttctcaatttttcaaatcgtacccgcaccgcaaaactgaaaacccgtagaaactgcaccataaaaaatagtgcggtgcagtgcgatttctgcagtttggactatcactaaataattaaaata

SEQ ID NO: 244496 - DNA, 951 bp, Cannabis indica
caactttgctattaatggaggagtattactttctgaatgttgtgcctcagccaacacaataacaccaaagcttgagcacttcagtttagcattacctcttgcatcaacattgattttaagacacctagctttcgaagcactccattgaaccatctgtcaagcctcacatttttttcctccctgaacaaagttatcatactcaatcagcctgtcttacaatgtacaaccaaaatcatcaatgattatgtaagactagaattttaggaagcgagcataatttttctaacagatctgttcttaaattgtttgtaagagtgttttggaaaagttttctgcaatctcttttatgttgacatcaggcaactaaatcaccaagttgacaaggttaaccatctgagcgtagagcagtagttgcttctcatctatgtccactactacaatctggccttttagtgacactatttagtgacacacattaaaagtgtgtagtcactatagagttaggaatgaatttttagtgacacacacaattagactctaaatattggtattagtctcgtgtaatgtagtgtcactaaaactatgaagtgtcactaaaaattaatacccatagtttttttaattttattttttaaaaaaatactgacctatagagtcacgctaggagagactcaaaaaaggtatgcccacatgcatagtgtgtcactatatcataattatatatttaattattttaaataaatttaaagtttttaaacttatttttttaattttatttattaaaaattctgacttataaaataagaataataataaatggggtgtaaattaataataattacatttcaaaaaaaaaataataataattgtaaaaaactgtttttttttttttaggtaagtaataaaaagactgaacttatatagtcagtttctctctctctctctcgcctc

SEQ ID NO: 244497 - DNA, 3389 bp, Cannabis indica
tttttttatgcttatattaaatgtgaaacctcaattgttttcctccatcaataatttttttaggacttgaaagaaatacttaattttaattttataagcacagggtgtaattattaaaaataaaaattgaaatagactcatcatttgaaattatatatttttgataattttgtaaaagataaaaatgtaattaagtattccatttaaaataaggtgtatttataatttattagggtacaaatataatttttcgattcttaataaaaaaaaaagtccaagaagaattacattattgttttgattacgatgtagattcatatactgcataattaactaaaaataccaaatgatcattaaacttttgaaccaaatgataagattttttttattgaaaataagtggatatgaataaaataaatacattaacaaccataataattaataaatcctagtataactctaatccatacaacactccaatatgttttttcattacattttcatctctactaaaatacattctcttaattttataaaatataagacttgtaagatgactatgagaacctgattgttgacttaatttcatttcacgttttatttttagggtatcaacaatcgttctaaattacctgcatacaaacccgagcaaaacctaatcacatacttcacatcataaacattactctcaaacaacttttccttaagagatagaattctgacaataaatttggaagcaaacatcgtgtgagaatcttgatcaggtagccaaaatcataaacaactagaaaagttacccacgtgattttgttgttgcaaatgagtttataatgcatcataagttcaaaaaaaataagcaaagtcaatcccttcaaagcggtttctttcaaaatttatgccttgcttcttcaaccagtttatagaatctggagcataacaatcacgcaatatgatgaaatctctaaagttaaattgccatgtgatgtagtgtttaccatcatttgaacgaggcaagttttcctctgaatctgtgagtgtgaaatcgagttgaataatatttagtaagtctatatttatgtggtagtgaataaatggtagaagtactctttctctttttacgttagggctagtctggtgataaacacatctcaaaatttcaatatcgataaatatgttagaatattgagttgagatttatatagatatatctatagatgtgttttgaataggattataattttgaatatatggttttcgaatgattgaattataagttatatttataggtttatttcaacttaatctttttaaatttttatagataattaagttattaatttctcaaattggtttctctatttatgctttcacctaaaaatgttagaaacatatttataagatgtgggagacttatcattgggacactcatggtggcttcttcttcttcccgccaaaaccaaattgtagtttaaatataaatttatgagtataaataagcaatttaattaaattaagggtaattaagatttttaccgatgtaccaaattatactttctgaattttttagtaagtttgaaatttcttccgaattgatatcctatcgataaatatcaaatacttatcaaattttgatagttaagaccaaacaaaacaatgaagttattcattgctacaaaaaaaaataaataaccaaacaaaacaacttatcgataaatcattgataatatatcgataactaccaaagttgacaaaaaaaaatataaaaagagaaaccatcgagaatctattgataaagtatcaaaaacgtatcgacaatcaaattcggtcagaaaataccataactaccatcatctctcacacaaatccaagaaacacagtatattataatacaaacaacaatcaatcaaacttaatcaaccaaaatattcttaaaaataattttttaaaaataaaaactacaaaatctaatctttgagggtcgacatcccaagtttgcgggaatctggtggtgcttcggcgttcagtgtctctttgattctgtccttcaatggtctcaacggtatgggtcgaggataggggtgtctgggtcaactgggctttatgccaactggggtctgggtcgaacggggtctaggtcgagaagggtggtagtctcgggagtcagacagtggtctcagggaagggttcttcgtcattcaaggttaatacgaagagaaaatagagagagagagaatcaatgttactgagagggggaaattcaaatgtcgagggtatttttggtaaatcaaccaaatattagcataaagaacttatatttacactctaataatttataagtacacccctaatttaaatataccctattttatttatttaaatattatttttcataaatactgctctttttatataccttagaacctttatataagaatactctattcaagaatctctaaattgtaattagttatatattttttaagtctcatattaacaaagtatatctctatataagaataattatatctcaataaaatatatacatatattttataaatttatttatgtcgaattaataattgtatttcacattgtaatacacgtataaatattatatttacacaaaataattttattataatatagtattaagaattatttattgttattgttgttacattgatattttatagtgttttgattttttttttatagtataactctattaagttataatctctcaattagaataaaatttacttggtcttaagtgtattcttagatagaggttttactgattattttttttttcttttttctttttttggttatctcttcttctttttcatttttaatttttttaattaattattactttttgaaaatttaaaatatgcatactttgcatatatattattattaacaattaatcaaaagacaaaaaaaattctatggccgtaaaaaaaaatcaaaattgaatagtatgatcaaaaggagaatagagtaaatcttaaataaatatataagggtaaatgtcattttagatcatgtgttttgtaaaagttaccaattaaattcttttttgttaaatacaaaatagaccttatatttaaaaatgataaaaataggatcctgagctcaatttttcaataatttttttaatataactaattttaaaataatttataatacgaatagatacagaaaacgtagtcagttttgtcataacatctctaaatcatattattattaagttttattatgataaaaaattaattcaaggtcctatttgaacaatttttgaaaatacaggatccattttgtcatttaacaaaatagagagcccaattggtaacttttgcaaaacacaaggtctaaaataatattta

SEQ ID NO: 244498 - DNA, 1440 bp, Cannabis indica
gaatgaatcaattgcttaatcaagttttgtttttgttggttgttggctcctcagacattccatgctaggattctatccattttgaagaggaggtactccccctcctcttatcttgactggttatggttcttgaaactgaatatcaacatccctttcttctgagtgttcctccagaatatcaaaagcattctcagtactggtctgccctcgctgatcgtgctcttttggtttccacccattgataacgagtttaaaaccttcaacatctgttacaatctcttttttcccctctactttcttctccttcaccacccattgctgctgcttctgtactcccaatttctttctgcaatcttcagcaatatgtcccaagccattacaatgtttacacaagattggcttccactcatacttaattaccactgaggcagtaaaaccatattcatcctcgaattctatcttcaccacaagctcttggtgcatagaaacttcaactgacactcttggaaaggttagattctgcctttgtttagttactgcatccaccaaaattggcttcccaatttgtcctaccagtttgaagagagtattttgcccccaatatttcaattccaggttttcaagttggatctagatgggaactttgcgaatatcttccttcctgaagttagaatctggataccaagccttcattatcacaggcctcttattgaaaaaggtataacccccatttagaacaaagtccctgtcttctatggaagcaaaccttatcaggaaaatgccatatgaaatgagcccaactttatcaactttttctttccaaatcctcctagaaaacccttccaacacctccaatggaggattagcccccagaacgtaacagacaattgcagagttccaaaatgaaacctcctcttcgatatcatccattgttattttcacattaggttttccagcagtttggaaggatgaatttaagctccttacaacagaacctgatctaagcacagggggaacagagttcttaccgtgattgagatcactgttacattgcttgttagcttccatgaagtgtgcgaagtccgatcgaacatcttcctgcctctgtaactcgcgtaacgatgatctaggtgatagagcttggaaagattctggatcaggttcaaactcatcttcctccatatctgaaaaattaataggttctactcccagtacagcttccatggatctcgttttcttgacatctccagaggatgacggaccacgcttcttcactggtttggttggttttactgcagcaggcttcttccccatgttcttagacctcgtatttgccatggcgccagctcgagagctgagagaggaagaaccagagaaaaaagctttctcttattattcaactagttttgtttttaactatgtttcagtgttttaagaact

SEQ ID NO: 244499 - DNA, 1103 bp, Cannabis indica
tcaagatagtattaacgtcgttcggtgattgagcactgatctcctgtgcttcttctgcccacgccttttcaagttcgctgtcaaatctaagcttttgtaagtcttttatgaaagctcgcagtagtctcagctgtattacaaaagaagaaactttatgtgttagccctcgacccatgcccggttccacagtaaccaggcgctctaagaccaaagcaactgcagaacgaaacagcggctttggacggagaacagagctctgctctgcctcctgaataggcctgtcttgcaaacttctcactttcatcctcgactcctctagttccttaacaatggagtttgtatattctttcttctgctgaagctggctttttatctcttttgtgattcgatgtattccgagggcgagctcaactattgcaatgggatttttgagggctagcaaaacaacagcgtaccatttgaacaaattagtactagcttcattggtgggtatgagtttctcataatcatcaacatagcgttgaacatctgagatcacctttgcttctttcatcaaccacttcttctcgatttcactcaatgtttgagtcattcctctcaggttgagctctgactcccacgcttgattagctctcagctttatttcttccacagttccactgacttgttagccgtctggaaatcttttgtaagagcatccaataagcttcgttctcttttaatccacctgtagtcatctaaatactgcacaattttgtagttaagaaagatgaagacaatggaaaacgcaaaaaccaccccaatagttatttcagcaatgtcttcctcgacagggtcttcatcggtattcgagaaaaagggtatgtatgccgccaacatctcacacttcactctcaattctcaaatattagcaatagctctttcaatcttttattctctcttttagtggtgaaaaattacacagttcggttttaaagatccaaaacagcatccagctatttatgtttctctacgctcaaagacaattttctcttttttttttctttttatatcaggaaaaacacatctatcttaccagtggaaacgacaagtactatctagtc

SEQ ID NO: 244500 - DNA, 2149 bp, Cannabis indica
gaaagagcattttttggggtcgtgacctttagaaaaaggttttcgttggcttgtatgtgatactataaagattcgtgacaatgcatggattacaaaggaccacgttggtcgaacctactcttttaagggtggtctaatcttccgttggttagtgatctcaaacttgagtttggtggatgaaattcctctcttatttaggatatgtttgattctattcctttctctttgtttgatagaaagatagtcttatttgccacttttttgataatggtatgtatattgttaagagtggttattggagtactgtttcgagcttgggttggggccaagaatcagtttcttctgaaacttctcgattatggaagcttctttggggccttaatatccctccatagataaaaaatattatttgagaagcatgcttgaattttttttcgtcttatggaaacttgactcatcatggccttaatgcttctaaggtatgtcccatatgctttcaaaataatgagactactattcatgcactttggttatgctcccctgttaaggcaatttgtctgaatgggttgttaaaggtcttgattcgtaaacgatatgcttctagcttctatgaactcatgtaattaggttgtatgaatatcttgagcaaacaagaattaatgggaggatttcattgttcatacataagtagtttatggtgaaacttaactggataatactttaaatttgatacagttcagtggtttagagaattttactgctagcatttaaatttggaggattaaatgcaaataaaataatagttgggaaagtttagccactaaaaattccaaaacaaattaataatatgagtgatcaatgaatgtaatattccttaacacaaaaaaagtaatattgacaataaaagtatctctttaaacttttaaaaggaaaaaacttatttgatataaataactcaaaatgttgtgaagagttcatccatatatagtaaccaaatataaataaaaacatatatacacgacatttctaacattaatttttttaaaaataatggaaacattaatcaatggagaattattacatgttgatctgatggtacgtggcacctaccacctttttaaatatatgtgttttaacctttaataatattaagtaatttcatttagcaacaaagtgtacaatatttatctaactatatgttaatatattatttaattaagtaataataataattacataatgtagtaaatttctgtgatatgtataaaaatgatgtgtgatttggtatgcttagtttatttgaaagggcctttaatatatatagattggtttgtgaccccatcatcacccaaagtcaggtaatattgtgatgatgagattgggatctacattacattcactgaggtaggcacgaggtgtagtgaatctaagtttgggagtgacctaatttttgtcaaacttgtaatgacaaacaactgctgtgtgacctgatttcatgcaaacttgacaaattagcttcgaattagagtccactctaccttgaattcttgacattgtcattagatgcacctcggccataaggctgagatggtcaaaaattcccgattcttgatgctccataggtaagattggcttgcatctcaagagtagtaagatcaaatacaacattaattcactacaaaaaactgctacttttagtgacaacttcttagtcataatataatttttttgtaactaaatgtgacttttagtcacaacaaaatattacttgtgactaaatcatagtatttagttacaagttgtcactaatttagttttagtcacaacaagtattgtgactaaaaatacattaatttagtcacaataaattgtaatttttatgactaatacatttagccacggatcttttagtcacaacataagaataataatttataattagtcacaatgttttcacttttagtcacaagttttgttgcgactaaaagtaagattttttgaagtgattgtgatgatcaagatggctctcatgagccatgagcatggcctagacttcttcaagtgtcaaagcatcacttcttgaagttattctcgagaccactggatcgtattctaacagtagagctagcaataacgtctagacttaatt

SEQ ID NO: 244501 - DNA, 1680 bp, Cannabis indica
ttgacatttctagatcatttacatactatatacactagcaacatgacgtcatattttcatatcaatagttactctagttcagacttctaccttgagcgtaaagcaatgtaacatagtactctagtgcatttctagatccactcacattacattaaatattttttaaattcacataaataaataaataaataaatacaaaaaaatttatacaaggcattacaccaaaatctcgaacatgaggaacatgacacttgggtaaggtgataacgtttcagttgaagatgtcaaacggtaaagtgtattggttgtgccaaggaatttgtcagaatcatggtttgtcaattctacatgctgtagtgtttcgtcttaccacttggggctatacatatttgtcattctgatcctaacttctcaattaagacatcatttactctttgcttctcaaattgtgttccttctattctattgcatagcgtaattttttcttctgtttcagagaaaccagttatgtgctctgataaagcttcttcggcatggggtggtcaattcaggcttcctcaccaggtgagtagggaacatttatctcacttcctttaccacccatttccgtccctgctcttctccctctcacatttgttgctttggtataaatgtctttcagtttatgactccaactggtcgacctgggtctcctggctcacaaatggatttcttgggtgaacttcgtcgtgcaatatccaatttcagtgctagttttgactcttgacctgagttcacatcccaactcaaatgaagtttgaaattggttcttcattttacataatatttgttaaaaaatcattgttggtttaatgtgtcaaaactcaagaccatggtccaggcattgatatgtgatacccaaaccaagaatggtgttaaatgtgtaattcttcttctgaagctaggtttgtttaatgattcatttagttttgtatcatgaagatgacaatgaaatgctcgtcttttgaaaaggttaaacaaaacatgaccctacattgaaactgattatatttatttgtttttcccattaaaaattagtagtgattgggatggctcttctacacaagtatattatcttcctagcagcttgatcttaagaagcaccagtatctgatataggaactcacgtcttttcagttcattcttgttaataatagaaaatttattatttatattattattatttatgtagttaaataagcctttcatatatcatacataatataatatttgaaagtaatgactactgatgacgttgccagatcatctacaagcacaagtcgaaaattcatagctgctagacgaattaggtaagatcatattccctcttccaagtattccaatgcctctttcattatggtatctgtaaaagccaagtgattgaagtccaggaattctcattatgtacttgcaaagttggtttgtatccgttatacaaccgttttccctcttgtaaataacatctacacaacatttccttctgtacagaaaaatattatagaaacgtgtaatattagttagtatctttaaatacaattataaaaagagagttcatactcaattatttaaactccatcttcttttctttccataagagcaatttcgtatttttttgaagctcacaaattatttaaaataatt

SEQ ID NO: 244502 - DNA, 666 bp, Cannabis indica
tctatattttgttcgagacaaagtgctcaacaaagagattcaagtgcagcatgtccccactgaacatcaagttgctggctgtcataccaagccaatttcaagcaccagatttcatgttctaagaagcaaactcagtgtctcttgcccagaggacacttcatttgaggggggctataaagagatgctaagttagttggtttttactcaactaactttctgttaattgttagttaaatgatgtaactaagtaactaagtaactaactgtgatgttgtaacaacttctcttctttacttgcttatccaatacttgtacataaatttctgtaaaatatttttcatcaatgtacagaactttcaattctttctctctactctcgttatcttcacatattttaattagtacaatttcgacttaggatatttttcttagtaatttttttgatatctttattattattcttaaataattaatatttataaatttattaaaaaattaaaaattgagaaaattaaagagaaaagagatatagttacttgaagtaattttagaataacatatgatgaccttatacttctcttatatattgatatatagaacaattctcaataggtattacccattgatggttactaaaaatttaattataaatattaatttttaaaa

SEQ ID NO: 244503 - DNA, 1748 bp, Cannabis indica
aagtacttgtcttctagctatactaattaaaatgaaaagcaggtctagaataataacataatcacacttttaaattgttagacaattgcttaggttagggtcctaagtaatatttgggttcacatatatatattttaaatatttaaatatatatttaattgctcaaattggattgaatttatatgtacgggtaaaggtcctaattaatttatgttgttgattatttgtttataatatatttctatgcatgcatgcagggtcctcatgcaacagagggcaatcaattcctttacaacacatccattcgagtcttttgcaacgccaactcttctgaaagcttcaacccacaaaaggacgtaagcctgccagaaatccacctcttaaccggcgaaatgccatcggcattccactctccacccgaaaatgccacgcgtccactcttagccttctttgccgggggcctccacggcataatccgacccatcctctttcaacattggaacggccgagacggcgatatgcaagtccatgagtatctccctgagggcatgggagactaccatactttcatgctaaaatccaagttttgtctctgccctagcggatatgaagtggcgagtcctagagtggtggaggctatctacgccgggtgtgtgccggtaatcttgtctgatagctatgttctgccattcagtgatgttcttaaatgggatgagttttccatcagtgtggagatttcagatattccgaggttgaaggagatattgagttcggtttctgaagaaaagtatcgaagacttaaggaagggttaaagactgttaggaagcattttgtgttgaacaaccctgccaagagatttgacgtgtttcatatgattcttcattctatatggctcaggaggcttaatgttgggcttgcatagttatgagtttactttatttttttctttattctttcttttttaggatatgtttcatgtacaaaggtactaatatgggcatagttgaaagttttattttatttcatttgtaaaagtgtaagggtttacacaaagtgaaagtttatttattttaactatataatttaaaagactaatatataatactattttatttttctttggtaaatataatgataaaataagtaatgtattattagaaaaactattgaggtactttctcgtctcaaactcccgtgaaaaactcggtttcatatagcccacataaggcaaatgatcaattctaaatcttcttaataatagatagaagaaaggtgtagcattaagtaattaccattaaacatacgttgtgcttatccatgatcaataaaaaatttgaaatgctttcatattgccttgcatgtttacatccaaagagcgcatgcccaatcgatttccaacttgatgcacatagagagcatgttgttgaattaataatttttttcataaaaagcgagcaacacataccttccaagcaataatgggaatctttagtagcaaattcaagttctaaaaatattttcaccattcacgttgtggatcagaagtggaggattgttgttgttcttccaatgatgttaattcctaaatgaaaacccgatttcactgtgtatgaaccagttgtagtatggtgacatatgagtcggttttggtttgcaaaaaaactcagtggaatcgacatgattcgatcaatatcgataggcttgaagtaggtattcagcaaagaaacatcccattcccgattaacag

SEQ ID NO: 244504 - DNA, 1197 bp, Cannabis indica
cacacttttttggaggttggtgttacgtttttcagtctggcaaaatctgactccatatgcctacagtaatgcgcaatgagtggttgtaaaatgttttagtgacatgtacggaagagtcactaaaaattggctttccagtcaccttcattagtggcgcgaagtaaaaaaatactaaataattttagagtcactcaatgtgagttattaaaacccatttttctagtagtgcttgctcccttcatccaaagactgcattgtagatcattatcatcaccattatccatacattccaaaaacgaaatacattgttcaaaaagatgcccaaatcgaccacattcaaaacaaaactcaagtaagcgttcatagcagaaatcaacccagaaattatcacttacttttggcaaacagatcattctcccacagagaagtggtttcgttatattgatcttaacacgggcacgcaaaaaaagcccccaacccttgcatgtagtctttataaacttctataaattccccaataatgttgccaagagcttcaaccaaaccagcagacttgctgagaaaaggtaacctgtagatttgtacccaaaatggagtatggaccatgtctttctttgagacattttgcaggatatttggtgagtacaaaactataagatggttttggaaatgtcaaagctctttattcaacacccgagctttgtccccagcacaatcaaaaactatatggaacatatcacccttatattcagtgatggtaaaggaaaagtgcctattccaatgaccagacatttgatcatagaaaaaccggtttgtacacggttttctcaataagcacacggaccaacagagtgtgaccagggcgtgatgaagagattgagtggacatgatcaggtaatgagatagtagatctttcctcttcagtaagagaaagtgaagcattcatagatttcataagagaattcatagaatcgtggtagaaagaaacaaaaaagaaatgtgagcagtatataggcagtggaagaacacgaaaagggaacccaagaaaaatgaggagcagtttagatcccagtaagatgaaacaactgacacagacccaattcaggcacgtacatataatattacattgtatttaaagattagttatacattataatatgtacaaattaaaagtgtttctatcattaccaataagat

SEQ ID NO: 244505 - DNA, 1070 bp, Cannabis indica
tttttatttttatttcaaggttgtagtttagaatgagatagaaaatattttagatttattttttttcaaaaaaaaaaagaaagaaaaacaacttcaatatttttgagattccgagacgaactcgaacctgacccgaccctaaccagtgacttcaacccaaccccgacaccgaccgtgaccctgatcgaaccctaaacacaacctcaggcatggacccaaactcaaactaggactcttgtctcggaggctcagagctgacctcaaaactcaaaccctagcccaaaaccctgtaccccagtctcgacctcgatcctagactcgaaccccaacctctacccctgaacccctatccctatcccagaaccctaaacccaaactctagatgcagacctcgtaccttggacctggttttggaccctggactttgaacccaaccctggacctgacctcaaccctcgatccccacactagacctcagaccttggacctgactctagaccctaaccttagccctcaaggttggactcgatctcggctcttgaccccccacctccactcccaccctcgaccccggaccctagactcagtcccaggtcccagacctgaactcaaccttattgacctgtaaaaataatatgaaagataatgagtgaggataaagaaattgatgagagagaaaatgagtaaatgatgtgagataatatgaaaaaaaaaatattgacaaatatacaattgtattttaaaaagaaaataacatcttattgttcttaaatactttttttttttttgaaactgttatctaaaaacatgaccaacacacctaaacaaagaactgttttttaattttggtgccaaataagtacttagactttataagtcaaagtcgagagttagaaaatggttagaatgtgaaaatatagcttaaaatgaaaaatgaattgtatatgtgaggtatcgtatcataaaatcaattgataattaaggagatgataaaaaattttgattttataaatagtattgtataagtttttttagtacattatcagagtctgtattgacaaaattagaga

SEQ ID NO: 244506 - DNA, 1139 bp, Cannabis indica
gtatacgagagccattgttacatgagcattcaaaaaaaaaaattgcacatttgtgtaagtactctcatggtaatgataattttaagaaattagtgacgttactcccaggaggcacctcaccaacagaaggagggttgtagccttcaactcctgaagcttctctgacaactagttcactaccattcatattgaagtctatttcttcgagattttttgcatcaaatcgctgctcacattgcctgatgaagtttggcacaccatcgtctgggaaaccttcctagttaaacgacttggctccaccatttgcagcccaagccttataaatggcattaaagcacaagccattgtagtagattacatcgagaagggtctgatcttcaagagtagtcacttttttctccaagaccttgacctggtctcttagataatcagtcataatagcctgcttcttcaaagcatcacgagaagagtcttcaagatgagaagctttcttctgagcagccactaagtttttcttcaaagtgctttctcgagttttggcaccattagccacttctcgaagcttggtcatctcattctcaagagaagcaactttctccttcagaatagtcacacggtcttcagcagcgatatcttagtcttctgcaaccccatgcttctcaacaagcttcaccaccttcttgtgtttgttatccatggtgtaggcataaccaacacaagcctaaagacaaaagaaacaatttcaggtgatgatacaacaaaagaaagttaagctagaagaagacaagacaaagcacttactctaaagatatcgataaagcatctttgataaattatacacgggggcttggtgctaaccaacggctgcaacagaatgttctcagccctatcaccaatcaaggcctcattgtaatatcctattttcttgtagggtaattaattttttttatatatacttagtttattttgtttgctaatggagataatttatcatcttgaatatttatgagtttagtgtagtatgagatttctttttagtgacaataaaatttcttttattttgaggctgtgtacgtataatgttagataaataattaaactatattggagataatttaatatttaattatttgtgaata

SEQ ID NO: 244507 - DNA, 1063 bp, Cannabis indica
gtagtgttcagtccattccaacatatgttatgagttgtttcgttcacttaaacatttatcaacacttgaaagcatgatgaaaacttttagtgggttctaataaacatggaaccaaaattccttggaaaagatagaatctactatgtaaatctaaactggagggaggtatcggattctgatcttttgtgtattacaatccagctttcttggaggatcattgaaatgccaaattctttagtcgtcttttgaagtgtaggtattttttaaacaactcttttctggaagcaaaattgggacactcgcgttccttaacacgacaaagtatacattggagtagagagttgcttgctcaaggacttcgatataaaataggtcatggttttagtattcagtgtggtaaggataaatggatacgaggtcacacagaaaataaaccgctaacattcaatgggccgcctcactcccggttgctcatttgatcactattgaaaggcagtggaatttggagctgcttcaaaaaaattttgggcagttggatattaacagaataactactatcccattaagttttttcccatctggtgatagattaatttggtaccagacatctacaggcatatatacggtgaaattaagttttcatttggcagcaagtatagatgaacaacaatgttcttcatcttcatattcgcaaaaaaactggtggaaaacattttggaacctgaatcttccaacgaaaataaaaaattttgcttagaaagctctgcacaacacccttccaactgctgctgctcttcaaaagagaaagatcattgattcactagcttgctctttatgtacaacacatgggaatcaattgggcatgctcttttctcatgtccacacgcaaaatcagtttaaaaaatacaaagaacaccatagattttcgaaaagctcagcatatgtatagtggtgactatcttattcatctttcaactttgcatttccaaactgagtttgaacttattgtttgcatcatgtgagctatttggacagagaaaaataaggtagtccacggaggaaa

SEQ ID NO: 244508 - DNA, 1076 bp, Cannabis indica
tcagcccagtggccgcggctagatgaagcttggccgcggccatataaaaataacagagaggcaattttttgttgctatctagccgcggcgagaaggaggcccgccgcggccatattattttggcagaaaggtctttatttttgacctttctggccgcggcgagcccattcttggccgcggcgagcccattattggccgcggcgagataccatcagatggcaatttaagggcacgaaaaattcaaaattcaaacactttattccttcaaaaaccctaacctccccgaatacccctcttccacaccacttttcttcttcaaatcccattctaaaccctttttcttcaattctaaccataaatcttcatcccaaatcattctaaaccattattcctctcatcaaacactcattccctctcaaaatcaaccccaaatccctaaaacctcacccaaatttcaaaaaccactattcatcttcttccttctcaagaacttcaagttttcctacaatggaggttgactaaaggtgaattctcattgaggtaataattctaagactctctatacaatttttattggataatttgtggattgttggagaattttggaatttttgttagatttttgggatttttgctcaataaattgttcaatagagttgttgtaattaggatttggtttgtttgtgagtgggttaattcctaggaagtggatttttaaggggaagtgctggcaaaatttttaaaaatcttgagtgttagaaaaatttgggtgagatgggtcctaaaagatctagagtgagtgaacaaaggggagcttcatcatccaacccacctaggggtcgctctaatcttgatagagtgaggtttgctaatatggatgcttaagagcgggttttgaaattgaaagataggccattcattgaagatagagggatggacattgttaacctgagccaaactacaaacattcctgctgtatttgcatccattagagatcaaatcttaaataggcagtggactaagttcgtggatgtcactgggcgtagcaaccaaaccttagctttagaattcctagc

SEQ ID NO: 244509 - DNA, 764 bp, Cannabis indica
taaagttttaagcatatttaataaaaatttcccaatttaaattagtattggggtttgtgttagtgcttcttagcattatcccaagtatattgggcttctacccacatttacaacaaaaattaaaaacaaaccaaaagagtacgacttatggagagaatagagagtattgtctaataattgactctcttagtgcttatgtttcagacattttaaatacaatatatacataaaataaaataataaataaaataagattgtttttttattttttttattttaaataaaatagtaatttcattcaaataaatgaacaccttgaatacaaaagatgttggagttcagcagtagagaaatcataaatactacaactagattgatataaaaaatatttaacaataatgtgctactcaatttgctgatcgttttatgctaaataaattaacattaagaatggtagataataaaatttggcaaaattgttttcttagtgcttatggtttctaattaattcatttaacgtttctctataatataaccatgggttcattatgggccataacacactataacagaaagaattacagattatattaaggcctcctcatgatgagaaatatattaaaaaaaaaaaacttgtcacgtgtaagtgtgaagtaatattattattagttttatgaaacaagagttcaatacttttgaaatgtatgggtgagcagagtgactattcatactaggaatgtgaatttgggctattttcgcgggcc

SEQ ID NO: 244510 - DNA, 1257 bp, Cannabis indica
ttttagttcaataaattatatttttttttaaacaaaaatcaatttgttatattgttgtgtgaaagtttgtgatacttattcctcctaattcacatgctacaaaacttacctaacattttgtttagtttttaatgttgcaacctaataaaatttaacacattttctcttttaacaatttttctgcaaaataacacattaattgatgtggaacaagaaaagaataacatatttattactatagtgtattagtgttgcttaaagttaaaccttataattaattcataactcagacagtaataatctttttcagcttaattttaatacattcattaatggccaaaaaaaaaacacattaatttatatatttaaggttgagcgtgacatgatgatatattattttataagataataaaagctaatgaaacataacatttatgaaaaatatcagcttgttttttaaaaagaggttgaatttattggtcatggaaaaagtaaaaaagaatcaaaacgtatttggattaacacacaaattatatatagtttcttaaaatgattttctaatgtcttgattcttgttaggttttggatctttataactttttacaaaaacaaattacatcaaagtgggttgatcttaatatagttccaataaaaggaagaaacaaaaatttataactagtccttttccaaacaaaatctatataactagtaactatactgacttctattaatatttatgataatttaatttaatcactaaatgctaaaatgactacatcagacaaaagaactagtgtttaaatttaatgaatccaaccacattcaccacgatgagcactgagtagtgctagtatcccattttatattgtgtgatatccattaattttattaagagtgcttttatggtaattatattatataaaatattcaagtaattttacagttagagaaccagaaagagtgtaaaataagatgtttaaatcatattatataaacattttaaaaaaagaaaaaaaaaatacatattatataaatattactgctgaaactaactccatcaaataagtcaaatatttaagtttattttatattttttgtttgatacttcatttatatacacagacatgcattaaaagacaaatctcatttttttctctaataaaaattactattattgaccttgtgagagctagcggtaccattaaagtgtgtatacctaatgttggaacttaattagtgccattttaagtatggtgc

SEQ ID NO: 244511 - DNA, 949 bp, Cannabis indica
gaattgatgctctttgagagtaattttcatttaagttttttttaaaactttttattaaaataaaatttattttatcactaataaattggaatactattataaaatttaaatcaaatataatattaatttactttttaaattaaatttaacacaaaatttatccaaccaattggagatggtcttaatggaaatggcaacattgagaaataaaatgatgcgaaaccgtagaaagatgggactttgattactattttcacggacatatacaatgtcaaatgcatttgaaacaaactgtaattatgatgccgcgtagcttttaaaacaaaaaaccgtaaaataactaatgtagtaccaaaatcaccacccattgacccattcctctcctttgcatttattacattggaatatttacccctcacctaatctccatatacagggccctagtggatcactctattgcccagatgagcccatgaatgaacttttcattctacaaatggacgagagaggctgtcgctttcaaacgtttacctcaacttgagctggacacagtccgttcaaaccgagtaggagtaaagcggctttaccttcaaaattggcgaagcacagctggaaaatggaaatgactaaagaaaaaaaaacaaacaaaagaggaaaggcctcaattgctcaaaaatacttaaatattagtaagttaaaaatatatatttttttaataaaacttagcaactttattaactagcaatcgctaataacaatagaacgcactttattggaataatcctctaactgaaacacacgatctgtagagaaacaagaatcctggctaaaacatgaggcagcttgtttgcatatcgtttgacaaaacaaaacttaacattatttaaggacaagagaagagtatgaacatcatgaactaaaagaccaaaagaggatgacaaagtaattt

SEQ ID NO: 244512 - DNA, 898 bp, Cannabis indica
ttttttttttttttttgaagattatataagttttcaactatttatgtataatgccacatcataattcatgatgccgagtgttgacggtggaaactcgtcaaccaaaccgtaaccggaaaattgaaacttggatgtaagacttaggacaaagatgaagctatggagatataaaaacttaaagaaaaaaagtagaataactatggagaaagataaaaacgcatatttctctaggtcaagtgttacaatgatttttcaaccctttctcttatatgagaacggaatatttataggctctaatggcctgagatgcacttgtggtcccaagagacaagttggtcttatgtggctgcgagttacatgtgtaggaggtcgtcttgcgtcttgtattattgtcgggtgtcaggtggtcttgagttgcaggagtagtggttaaagagtacttgttgtcgagacatcaagggttgaagacaatgcgtctccactacttgtgccaacaagtcatgttgaggatgtggtcctactcgttctcgtacctcttcgcgtgcaagctttgtcctttgattctttccttaacgatctcattttcaacacgtatccaaattctcccttcacttcacaatgttcataccatatacacactcacgggcccgcacgctagcccctcactcaccacgggctcgtatgcgagtcacacacacacatgggcttgcatgcgagccctcacacaccatgggcttgcatgcgaccccacatacacacacatttagaagggttcgcacgcgatcctacacacacccattcacatgggctcgcacgtgaccccacacacacattcacatgggctcgcatgcgagcccttcacacaccatgggctcgcacgcaaccccacacacattca

SEQ ID NO: 244513 - DNA, 2920 bp, Cannabis indica
ctagcgagagatcacactgggacggtggtttgggtcgttatttccaggctcaacttcagagacccgctgattggtgaggcggcggcatgtcatcttgcattagattcggctcgcattagaaatcataactatgtcttggtggagagtgacttagaaacggttatcaaagcgctgaaagggctccactatatttggaatcttgataattatgtctctgtctgtaatcaactctctaagtgttttttatcttgtaatttttcttttatttctagagtttgtaacttcgctgcccataatgtggctagatgggtcttgacccaaaacattacaggtttcgtagagttattctcgatacctaaaactatcctttgtaatgaccgtgaggtctaatttttcgatctatttaacgctttattttcaaaaaaagtgtatcaaaatttgaggaataggtacacttttctcaaaactcaaaattacccctctcacaaacccaactcaccccctcactgggctctctctccctccattctctctcgtgcacttcgctcgaactacaatcccaacccaaaacaacggccacaaccaccatcacaacccaaaacaacaaggaggacaatcatctcatgacctcaactcattcttgcgtctaggaccaccattgacagccaaaccccatcaacaaccatttcaaaaatgtctaaggtaagttttgaattcctatttaactatttatgcatatgtttttttagggtttaattgctcattgatttagggtatatttttgctttgtaatgcctgatctgtgatatgtgtgagtttgattagatttatttgttttgggtcgtatctgtgttagtgcaagaaatcttggttttagcttaggcctgatgcatgtccgatataggcccatataagtctgatgcaagtgtatttgagaaaataatagtggttaaagataaaaggttgatagaggacgatgtaggtccgacataggcccaatactaaaccataaatgcttaggtccgatagaggatgatataagtctgatagcgagttcgattatttatgtgtttttatttattataaaatgcttctcggttcgacgtaggacgatggttgctccgggtccaattgtatagcatattttagtttttaatagaatttttatgttcgatagaggatgatgggggtcgatagtgtgtctgacatttgtacttttgtattaaattgctacatgtccgataatgggtctaataggggatgattgttgtctgatagtgttatagcttttttatatttccaaatatacatgtagggcagatagaggacgattgtggcccgatagttggaccgatagtgattgtgtttttaatttattttgatgtttgtgtgtttgttactggtttgatataggcccgatgatttgctgcaaaatttctaacttgtattttcttgtgtttttttttttctagaattcaagaccaccatgccttataattccagtctcaagtcgtgtcacttggcgtggcggaagttattactatctgagaattaaggtaaaatttgaggaattccaattatggaataaggtgaaggaatccccattcaaacaattcttcgagagaaaaccattaaacttttttgggggtattgattcatcaattattcatgcacaagatcaaatctgagaagtcagacggggtacacttttatttcacgaagaagagatacaaattcattcgggtcaagtttgcgttggtgataggttgaacttgtcaccaagcctatggaacaagaaattgaagaaaaaggaagttcgaaccgactgattgtcgagtacttcaacggtgatccatctatcaactttggccaactgcgcaaagttttcgagagttgcacagaagttgatgatgtatacaagttagggaagaccttattttttatgggcatacttactggtagggaggagaaaactgtcgttcctctttttgtaataacaatggttgaaaccttgaattcttctacgagtatttataggaaaagattttctttaataagttgatggaaacttgtaacaaagactttatagagtttaagaataaaatgaataagaagattgagaatggagtttctcagaaggaggaaaaatactcatcatacagctatactgcacggtttataaaaaatttaaattgggagcgcactacaaagaatttcaaatcgttattttttttttggttggaggaatataatggaggcaatttaagtggtttaagcattttgataaggagtcctaatatattttcatgataaattttgatgaagtatagcattttccaataaataattgatcctcctcttcttgcacgtgtgcttgtatccacgtgccaaatcccacgtgcattcccgttggacaaattcccgcactacttttttttttcctctcaaaaaataaggaataatagtaaagtcacttcgtccaaataacataagcctggatgtttgtgaaatgtgatttttcaattttaacacaatatgattgtgtttttatctctctctcttttttttcttttataaatttctttgtagctttaaattattatattatttgtaggtagagcatgagagagcttgtcgtctgccactacatcactaataccaatatttaatttatatgagttaattattttagtattgttgggttaggtcaaaattaaccaatttccaatagaagaattataaaaataccaatattttcttcattttttttataataataaaaaaaattgttatatgctttctataagaaatgttccatgtattttaagaaaattaatttaaatatataaatgtttataaatagataaatagagccctttttctgaggctcaaagctaggatagaaagacaaattacacaa

SEQ ID NO: 244514 - DNA, 1510 bp, Cannabis indica
cagacgccatgtctcaatttgacatgtggaagtagctaagtccagtccacgtcgaatgtgatgtcgtggtgtagagactgatccattttttcattcccacttccttttagaccgattattagtattttttactgctctttcctaaaataaattaataaaataatgagatgaaacaataaactacaaaagacaataatatgttcgaatatcaacatggtgattacagctgaatcattatgcaaaaggttgtttaatgataaattttgagcttctatgaaactttaaagctaaaaaatggaagaaactttccaacaataaaatcactcattcccataacctatgccaaccatatttgagcagaaaattatatcaatctatttagatgaaatatattgaagaagaaaaacaagaaaaactctaaacacataaagaagaaagattcaaggtcaataatttcaatatagataccttaaatttcacggtgcaccaacgatcacacaatatctcccaatctttttgatggtcatcctttagatctggatgtcgttttctcttggccctctcaacatcctcttctcctccaatttctttgaaatatgaatgtaacttatacttgtgacccctccaagctttacccatttgctcatcaatacactttacggtcgtttcatcaagcaagtcaatatcatatgtttcctataaatataaaataatatttattttcaatttaaatattatatttatatatataaatagaataatacttcaatggagtcagttgatttgttcctagcatagggtaagaaaatcgccaagtaaaattataaagattgatatttggttagtaaaatactttactttcaaccctacttttaatggagaatattataaaaatataatgtaaatatggtagacactatagtatatatatttagtatgttcctatttcttaaaaagcaagcaaactactttttttcatagaaacaaactctaattaatctcctattaaatatatatgctttttttaaacaatttaaaattcacaaataagtagaatacacaactattaataaataactaattttagttaaacttttatattcaaatatttacttcttatctaatttatgatatttttttgtataatttatttttaaaatgtaatattaacacaatagtttatgtgaattgattttagcatcttctaatatcaaatatcttaccagaagataatgtcgcaatggtgctctaacttcctcatggaccattctccactccttgtaatgaaatgaaccatggttgcgaataataaacccaatgtcattattaaatctgtcagcatttgtacaaattggttgatgacacttcttatcaaaatggattggtaactttccattagccgatgcctttgcaatgctagcagttctcacaccatcagttagcccacatgatttgttggatacagattgtcctacatttgatatttattatgtataaaaattaatattat

SEQ ID NO: 244515 - DNA, 1935 bp, Cannabis indica
ttaaaatacattttggaggagtgttttataattattataaagtgagtaattttgtttaacttgaagttttgacttaaagcataactatggcaaggagatgttgtgatatgcagctgtattggaggaactattttcataactacctcctaaggcattgatattttttaaatgtgtcagtaagtaccggtatggtcttatcaaattacttgtaaaaaatccagtttttgtgaaaaagcactttcacaatatcgacaagaagatgttgtcctctcatactggtttagttgtaccttgccctcaatctgggtacattatcatatggttctcggagacccttgctagcaccacaccccaatatctacgaaggcaattttccaaccctttgaatcccttcctcaaaaactattcccataccccatgtagaaatgagactcaatatggcaatgaaaagtttcagaattagctttggattagttagttaaggatacttttgttattaatagtttgttatttacagctgcacattttctgttacagcagcggttagactctcctaaccgactcttaattgtaatgagctatttaagctctcaaaccaattgtaaaatcagttcagtgcaataatacacaagatactctgattttcctatcttctctctatcttttctcatatggtatcagaagaactccggcccacagcttccatggccaggccaactactcgatcccaggatggcactacaccattgacggtcgacaaccctggagcagaggtcaattccgaacctatccctgctcctcctccctcagctgttcctcgacgaatttcaccagctcgagttcaatctcagaatgcgaatccaggtcttcatgtaaattccaccattgtcgatgatgattccactcaggcgcctcactctcaattggttgctgatgatcactccagcccattcttcctcagcaccggcgaccaccctggactggttcttgtgactacggtcctcaacggaaccaactaccaaccatggaaacggggcatcacgatggcactaacagccaagaacaagatcgcgttcatcaacggatctattcctcggccagaacctggtaatccccaactcaattcttggttaagatgcaataacatggtcatgtcttggttggttaattcggtttcctttgagattgcacaaagtataatgtgctttgattgagctactgaaatgtggaacgatcttgctgagagtttcaatgaaggtaatggccctcgcatatttcatttgtagacccagctcactcggcttcagcagggtgactgtactgtttctacatatttcataaaaatgaaatccctatgggatgagttgaaagaatttcaacctataacctcttgcacttgtggtgcaatgaaaattttcttggattactacaaccaaaaccaagttcttcaattcttgacttgtttgaatgaatcctatgcttcagttcgtgctcaaatcttgcttaacgaacctattcccaacttgtcccgtgtttttgcaatgatcattcaagaagaacgtcaaagatcactgggaacaactgattcaatccctttggctgctgcatcaagctccaccaatccaccaagtgccaagaaacctaggccttcttgctcgaattgtggaaaacccggccacctcgttgacaaatgttatttctttcacggatttcctcctggttatggggacaaaagaaaacaagataaaggcaaagcaaaagccaacattgcagccacaaacaacccgaggttgacactgatagcagttctgttcaagctgatctatcctctcaatgccaacatctcatttccctgttgagccagcaactcagcagcaacatcaacacagatcctgctgcaacaacccctgctgcatcaaacttagcaggtaacaa

SEQ ID NO: 244516 - DNA, 429 bp, Cannabis indica
aaaactggtaactgacattattttgtgccattatcgattttatattttaagaaaaaaaaagtaagattcttcactttatgttccattttcttctcttccatatttttgcaattttgaaaagaattgtcaaaagtagcaataaacaagtgcaaaaaaagatagaaatcggtatcctctgtttttttggccaatggtatagcaatggagattcaatatttatgtttgacaatgatacagaatacgattggtatgcaaaatgtcagaagtttttttcccttatcttttccttacgccaacaacgatcttccatgtcaacatttctctattttttggtgtgaagagacgaacatcattccaccattgtagtagttgggaagcctagaaataaggtatcaaaaagaaagttctctaccactcatccatctatat

SEQ ID NO: 244517 - DNA, 819 bp, Cannabis indica
gttctatgaagagtgaatcgattcagtttcagttaatgttttactaagttgaagtaaagataacaaataaaaaatcgtttcgatgatattgataaactctattggatttataaagatatatatatttatatatattattttaataatatttataacagaataaaaaaaaagaaatatatatacacacatgcatgtatataatatgcgtgtttgtacaccaatcaaagtttagatagatagatacaagcgtttctatgcatatatctcatttaattaactcatcacatatcatcctcttagttcttaaatatttgactctattaaagacctaaattatttatttattaggatttcagtcgttttcttcaaccataaacatacgttatatgtatatatcatcaatacatgtatatatcatcagttattgtaaacggcgaaagtatcgatgtttggtggcaaccttggattccatggttggaatatgctgaatttcgtgcgcttatggaaacaattagaggaagggcgccttatttacgcaatgtggcggatttgatgtaccgtaacacgagaagctggaatcatggctttttgtgcttcgtctttggcaatgaaattggaactaagatcgggggaattcaaattgtgaagaacggagtagaggactttgtagtgtggaagaactcaacttcgggtcacttttctgttaagggagcgtattgggctgctcaagttggccgtttcaatgacactaataagttgtggggttggatttggaagtctagcattcatcctcgtctgagcatgatgctttggagagtt

SEQ ID NO: 244518 - DNA, 672 bp, Cannabis indica
gaggagattttaggcaatatgtgaggacacaagaaaacgaacataatcagcctaacaacccgaataatctaagatgacaacctcaacctgcagagggtgaggatatcctagttatttctagagggccacacctcgcaagtaatagcaatagtgcacagaaaaggtacattaagtaggtgaaaaacgagacatcagcgtttgctccaaaacttctaaaaagagcaaaatcagatgaaccgcccattgtctttacagatgaagacggattacatgtacgataccctcatgcagatcctcttgtgataatagtgcaactcgttaataagagagtaaaagtagttctcgtagataacgggagttccatcaatattttttacaagaaaactttaaagaagatgggattaaagaaaagaaaattgagactcagcatggtaaacttatgtggaattacaggctacaatattgcgggattttataaattaaaattaattacatacataagaaaatatagtacgtatgaatttcatcttacaacaaaattaatggtcagcttgctgtcccaaaataaaaggattatgacaaaaaccctcacaatataaaactgaataacagataaaaatcttattataaatatatatattttttgaatgcattaattaatacatctataat

SEQ ID NO: 244519 - DNA, 2285 bp, Cannabis indica
aacattgtgatttcatggatttttaaatctgtttcaaaacaaaatttcatctagtgcactttattttggaaatagttgcagcaatttgggcagatctcaaggtgtgatatcatcaaagaagtgaccctcacatctaccatttgaagaaagatctcatgaatttgaaagtagagaatcaaactgtgagtattatttcacaaaactcaagactatctaggaacaactttttaattacaggccaacatgtacctgtaattatttaacttgtggatgtgttaagtagctccaagaacatcacaacatggactacgtaatgtcttttctcatgagattgtctaatttctattcacaagtgcgaggtagtatctttatcatggatccattacgtgaaattaacatagtttttcaattagtgacacacgaagagaataaaagagggaaccataattccacatcagatccaaatcccaacaaggcttttttttttcttccaaaggagataaagctacacacaataaaccaaactctcacgcacctaaacctcatcctccaaaaagaggcagacctttctgcacttattgtaatatccacagacacactgctgaaaggtcttacaaaccataactatccaccaagttacaacaagaaaaagaaaccaaaagatgctgcaacaaatcaagtgcaaaccactattgggaatcgtccaccttctaaacataatcacaccatacttcttcaactcacagctactcaataccaataacacatcaatcctttacacctcatccacttaaaaatttatttcatactcagatctatctaaatatcacagtgattttattcttgcagtagcagctgaagtgagccacaaaattacaaccaagccacacagcacaaacatcggcttcgtgccatggacacaaaactcatagcactttgcaaaacgtaggcctcttcccctaataaaagagcaattgaatggttgttggtctataaagtcaaatacaataaggatggaaccataatgatgtaatgcatgcttagttcctcaaggatacacgtagcatgagggcctcaatttctttgatactttttcctttgtggacaagaggatcacattcaaacttcaccttgccatttcaacaaagtaaagaacttacacgcaacttgacataaacaacgcctttcttaatggagatgtagatgaagaaatttatatgccattgcctaaatgtatagctatcccttcatgtgcatgcactaatcttgtatgcaaacttcacaaattaatctatggctttcaaaaatcctcacaacactggtacaagaaactttcaaatgcgttgctttatgaaggatttaagcaatctcaagtagactatactcttcagttggtcttaaatgactcttttgtggaaattttagtataccttgatgatattgtgattgtatgtcctaatctcactgttcttcatcagctttagaactctctacaccaataattcaaactcagagctttaggataacttacatacttcctccgctttgaaatcactcatgccatagaagaactatttctctcataatgcaaataaaatttgcaacagcttgaagacacattgaccctcttaacaagctaaatgatggatgatgctactaaaatgagagaaaaattgagctttcctagggtacttaaaaaggtctctttgcagcaagcatatccggatttgattgagtttgaagatgagaaagggtgcactacttttgttggtgttacttacgagtggaaaccagtagtgtgtagccattgctctagcatggggcatattgttgctgattgtcgaaagaaagtggaaagaaaacaagaatgtattgtcaagaatgattagaaaaaggataaagctgaggagaaaccggatgcagaggggtttcagccagttgtgaaatgctggaaagtcaaggataagggggaggagttagttgcagcaggaactagtaacacattccaagttctgcagcagcttgataaaggaattgagaatggccaaataggtgagaaggaggaccgagggcatgagattgctaacaagggaggggggagcaccctctcttggaaatggataaaataatggcatggaatgtcttgggaataaacaatcagcaaaaacaaatcagtcgagcaattgattgaataacgaaaaatagggctggttggactcctcaagacaagagttaaggctcggaatttaggagttttatatatgcgtatgtttgaagggtggtgc

SEQ ID NO: 244520 - DNA, 2156 bp, Cannabis indica
ttcaagattaagaagctgagctgaattgaataaatcattccaggtttgactaacaagcgcacgatcgagacgcacctcaatccaattgggggagcctcttccacgttcccatgtaaatgggtaaccaacaagatcaagatcaatgagattacagtcatttagtaccttattaaatccgtcgattaaactctgagggtagtggttgccaccatttttatcagcttgactggtaacattattcaggtccccgatgatacaccatggcagagtcgaagttcgcttcaagcttcgaataagattccaagtttggtgtcgatttcctctgttgggctcaccatacaacccagtaagacgccagggagaagaggacgggctaacaatctgaatatcaataaaattgaaagagtagtggagtaattgggcttcagcactattcctccaaagcattgcaattccaccactgtgacctcttgcatcaaccgaatgcattccttcaaagcccaacttcacctttaatctttcaataataccactattactaattgtttcacaaagaaatagaaaattgggtttcttttgaatcacgagatccacaaggaattgaaaagcccatgggttcccaagcccacaacaattcgagcttaagatactcatggtgagcggtgggcctgaaaaccagagcccaccaataaattgttttttgaacccaattcaaaattggctttctgaacaataacaccactatcatcctcttccatagtttcacttgtaggcccatttacacttacagaattaacttcagagtggcccacttcaattgttttggtagattgcattggttttgtacgatgccttttagggtcaactatgacattatcctccagctcctcattaaaacatctccttgatacattccaccatttttggaattattccccattaaagtctccatgatttcctcagtccccataacaccttttgatttaccaaggttgacttggttgtgaattaatgcttctgtatcccctgcgattggttccttgatcataggaacataattgattcgctgctgtccattcacactgctggatgtccctccggtatgagctgtatcatcatcttcaccatcacgcagccactgacttccgatgaggttatgtcgacgacgaggctgagccctcatccacacaccatatggtttaacgatttgatctacaggaatatcaaaacgttttggacagaagttctcagagtgtccaagcaatccacaaataaagcaaaatgtgggaagaaattcatacttaaacatggcccaaaaaccttcatcaccggtacttcgcctcaacttcattcttcgtttcaaaggtacggtaacatccacagttactctcatacgcatatagtccctccatagacctcgaaagttcttcgggtctgactcgacaaatgtaccaatatattttcctgctctctgtaacacattttcagatttgaagccgtattgtaacccatgaacttgaacccagaaatcaagagagtttataggaactaagcgaggattatcagctggtttaagctttgtgaagacaaattggattcgattgaaagtccacgggcttccttcaatgactcgattgagatctagttcgtggtagaactggaataagaatcgattaggttctaattgtttcacgtacatacccctgcccggctgccaaagagaggccatcatatggcgcataacatcataatctattgctctggccgtgagaaaacgaccaacaatgcatagatcaacatgtgtaatctcggttgctggttcttcaaactcaaacgtagtaatgcgatcatcttccccttcgatctctatatttccatagagttcttcaatttctttcactgagtaactactagacgccatgatcaaaataacgataacaaaacaatcactataagaacatactcaccatgtcaaaagacaagactcttgttgtgtgtcattgttaatgatgaagaataatattttacaagttagttcaatccaggtgattgattgtataagttttaaacttcttaaaaaaaattaaaactaataatatagaattagataatataattttagtgttattatacattgaaattatatttttattatc

SEQ ID NO: 244521 - DNA, 1798 bp, Cannabis indica
acatagaaatcagcagattcaatggtttgctcgccatgatcagaaaagagacatattctagcataaattataagtgcataacaattatcagaaacacgtattacataagaaatcggcagattcaatgatttgctccgccatgatcagaaaagagacattctagcaaaaattatatgtgcataacaattatcagaaacacgtattacataagaactcagcaaattcaatgacttgctccgccatgatcagaaaagaaacatatagcaaatgcatgcacaaaataatgggaggaaataaaagctcagatgtaactacttaatggatattagaattctgcacgtaagattttgaactaacatggggcaaataaaataaaggaagcattaccacaaaaatgttctcatttcaaattcaagtatttcacagagatcgcatgagcaggtattgaagagaaggaaaagaataatagtgttgaattaaagaaaacggtaaatgaaatagaaatcagaaaaggaatttagtaaaatgatagttagatcagcagcaccgtacttccgaatgtagcaacatcctctcgtcgaaacctattgctgtgcaactacttggagcagaattttgtgaaaaagtatctacatccatgaaaggaaaacaaagttataaaacaattaattttcatcatataatagaaagctttaatctgttaacacctttatgtatttgtttagtttccaactctgaatattgaaacgtaggagaggcaaaaaatccttgtctcagtatcccagattccttgtgttcaccgcatatctacataaacgataagagattgaaccaagttaccttgcaagaaacaccaaacaagtataaaaagaaaaaaaaaaatatatacccagaaagaaggggcaaaaaccataaacatacatcacagtggacaatgtcatcaaagttgagcatcgtacaattggggcagaaccacctcaagacttccacatgtttctgcaagggctcccaatcactgtcgtcatcatcctcgtcaaataggttgttgttgtcatacatatcttgaaaagtcaattccttgtgccctctagcctttttctgcagagaagcaacaatagattattaatctgatcatttacaaccacattcccaaaaaccatataatctgaaagtgatttgacatatccattgatccacttacagtatccgattgtgaaccagaacatataacttccgaaagattgctggatattcctgacatatttttctcttcacaacttctgtcacaagctaaagcactagctccatcggactccaaatttccacatcttccattgaacccttgacatggaagacttatctcagcctcactattttttatacgactcatttaataggttttgggaatcacgttgtgttcagagattcgaggactaaactcagtttggaaattttggaagtacagtcgaggaaagactgctacattttcatctcaattctgggaaatacttgactcaaccctaattttagaaggaggaggggtaaggaagtaggcagaaaagcggaaaacagattgaagagaatggagaacaagcctacctgcctgcggattctaccaatagtagactggtggtctgtttcaaatgtaagaagattgaagaaattgattctacttgaaaggccttagagttagaagaactgcccctatttattattacaagagtaataattctttttttttttgaaattaacttgtgcttcattgaaaaaaccagaagtacaaagcaaacaagttaaa

SEQ ID NO: 244522 - DNA, 988 bp, Cannabis indica
aaaaataataataagaatgttgaagttaatagtgtttattatttataagatttatgattagagaaaggggtagggagggggcagagctagttaggtttggagtttttgacttttgggatcattgatgatatatgctggtcctgctgccagtgtgaaaaaggcaccacctcctcctattcgagcacaccgaccttgtttgtaggcgcctcataattctgattctctttctctctttttctttttcttcttaaccaaaaatattctaattaattggtctgtaaaaaaagataagtactatatatatttatacacatatatcatgtgatgtgatgctccaaaaattacaatttttatccatttatatatatactttcattttcatatatgtgcagtgttgtgtgtggtttcaattaattaataaatacaatatttttagttacctcattattcatatatgaaaaggccataaattttgttttaattagaaattgtacaaatgatcattttatatatagttattgttcgtcacatgcaaatgcaatgttaccttagtatatgtattggcattaattggtatcttaactaattaaatgaaaaattctttttctttttctttttttcctatttctctttattaatttctgtaattaattaccaaccttggataatgcaaattggttactgtggtccaattatcatctacttcccctttaagaagaaaatggttggagagaataataactttcaaaagcaacattactatatactatatactatatatacgtgaatcgatttggtcgggttatagtatatttttattaacgcaatataaatatcaagttgcaaatatttaattataaactacccaattaaaaattaaaaaaaattcaacccgtctaataatttcgtcaatttggtcaggttaacccgtctaaatcgtttttcatttttttttataattattaatgttagtttttagtattcaaat

SEQ ID NO: 244523 - DNA, 2538 bp, Cannabis indica
aaattgaaagcaaaaaaaatcaaaaatttgtgcctacggctataacgttggtaaaagaaccaaagcaaattggttatgtgtcactttaaaaccaaagcaaaaagcactttttgtagtagtgcaggaacatatcccagcttcgtgaccataaaaccttcaacccttggcaaaccattctcgaaagcaaagtctgctacaatgagatcagagggacgagacaccgtgttgccggaagactcttccaagtttccctttttattcctgcaaacaaataaggaaaaaataattgtcagatattaaccaagaatcgtattagattaaatagggaaacttcctaaaatgagtatcaagcaattaatttctagataatttcccacaatcaaagtgcacggtgttgaccaaatcaaaccaaattccatttgcctagtcatcgaatcttctcctttgtgggtcggacatcacgagacagtccaagtatgttattcactgtatacttcccaatagagggaaaagggaaactaaatttaattcttagactactgtaaatacccatcaaatcctctggactaaggcttgaaatctctggcaaacttttttgaggaaaacttgagatcatatattctttttattcctaaaggctctttcaagttaagaactacttaataacactaactcgaggcataaggctaattaatgccccaaccacgtaaaaaattgtttatctttttttttttactctcctttgttaattgttttttttcatcagttgttattgtttatttttcgtttatgaaagttttcgtaaactccctataacccatctttcttctttacaaataacagtgaagcaccccatggtgagaaactcaatatgatgaatccaagattaagtaactcttgtaaaacaatcttacatacccttagccccacatgagtcatttgatagggaactttagatatcaattccactcccagaactaatttaatgacaaattcaatttctcaatgaggaggtattccaggaaaatcctttggaaatacatcttataattcacatacaagtctcatactttcatgtccaattttaataggtcatccagtatccaccactatatctaggaatcctatgcaacctttgtacattaggtctctatctttcataactgtatttttgggtatacgagattcttgtaccttacccaaaaatatagttgggttggcacttttaggttgaaacacgacacaactgtagctcgatcaggttggcggttaactcacaaccgtcaatcccaaaaggtaaggatctaatccatctggtactgatcatcaactccctagatgataacagagttccaaaccctgaagcatatacattgagaggtttatgaaaactttctatcactctacctgacacataagagtgtgtagctctagattcaataacatcgtataagaaaagctattaatagataagcattgattccacactgacacatttcacgccaagaccctaactaacacttacaatttctttcccaactataacatttactactcacaactaataatcatggtttttattaaataatattatttgctaaattctcatatgtttcctattatcaaaagcaataaacatttaatcacacatgtaaataagtatttactctcaacacttactgcaccatgattcgagcttgtatttcacgattcttgtacatgttcaactagtttttaggaagtttaaaaacctttgcgctttgataccaaattgtaatgtcttactcagaaaaatgctaactgtcgtgattacaatctcgttaatcgagatctataagcatagtgattaaaaataaatacataacttaattaaataaaaaacatttcacaaaacatactctacttaaaatataatattaattatacatgtttgggatcctatcaaattattttcaaaatatctcaagttatttgatataggccgacctaagcgtcaaagggaaatttctttacgattccctgttggacacaaccctcgtggcctaggttggccaaaacctttataattcatcatcaaaacccacaaactcttggctgacctaacactgcttttcccttgctcgcacaatagagatctcatgagctaagacccagcaagacagaccaataatatagtatgaacaattatattaataacacttcatacattacacctctacgtatataattgtgccactacactgtagataatattatttcatataaattgatgccatcgaatctaatgtctatatgacatagacctacttgttatgttcacacgttttgtttacatacaaggccttactagggtttaacctatttttcgctaccaagtctaacctagttatacagttctcatataactcttcttacttattcacataatacaatatatcttaaggtaaaaatcctaattcatgattccatatataaacaatcatatatcatataactgcgtcactacgctatactcttgttagaaatattttatcagga

SEQ ID NO: 244524 - DNA, 1516 bp, Cannabis indica
actgcaataaaatcataagataatgtatttttatcttcacttgttttgattagggtcatatatgtaaaaattgataatgttaaaggggtttcgccacaaatatccctaatttcaatgatttgtgagaaaaaaatagcagataaaaggttcatattcagaagaatcttgtgcagtgacaaagcgtacaaaatatattttaactcttaacaaatattatgcaagaattataccccttagcttttggtacgtagtgatgctttcattatttttaagaaaataatattgagacaaagtgagccgcagaaagtgatatgagagaaaattgatataaaataacaagacagagaaataaaaatgttggtattatatattacaatccgtatcacataaaatcagtaattcaacaattattaattagctatttcagacagtttctggaaaaagaaaaacatataatttcatgtgcataaaattagagataacattttaacatgttaaaagatacataccttgtcaaaatctttgacaagattagcctcaatggaagaattatattcatactcttcccataattctttaatctctgcagctgcagtcgacacagactaaatatttaattcaattcatagaatcaatcgttataaaattcattacaatcaactgataccccttaaatcgccaccaagaattttgcacatttcatttaaagctgcctgctccatcctccttttctcttctttaggcacgccatctgatggtgttatatctccaacaatagctatcaagtttaaatccaattcaaatattaaatataaaacactacagtaaatgcatggacataaggtacaattttagacgaaccaacaattttttcttttctttcgttctttccattttttcttttatcatgcttttcctaactaatcccatggggtccagaaagttcaaccaggagacctcccatcccagtgatcccaagattttttacattagggggaattgaacctaggaccgtgtgcctacccacacatctcagtattcgcccttactgctaggccaactcttggatttaccagcattttttctgagttaaaaatcatccaacttttgaagtagtgtaccaaataagtgataggtgttagataaacttcagtcgtttagagatacatttcagtgtttcacacaaatttatttgcaattagtagcttgatatggttctaataatgtacaatgggaagacggccctttaagcatcaatttgaaacagaatcagccacttctgacttcacaatacaacctttattttctccagaaattcttttgcatgaataaacctcactttcagtaaattaagggagtcctatcctagttgatactcagatcataatcacaatcttaaaagcattggattaatgtattccttcaaagtcaaaatacatgtcgggacccacgaacgaagagcataaagtataaggaaataaaatgtaccttccgcaatatcatgcacaatagctat

SEQ ID NO: 244525 - DNA, 1145 bp, Cannabis indica
taggaatttagatctgacaagtggctgttaagccttctctattgacacccaaactcagaaaatacaagaaaataaaagatagaagggcaaattcgaggattccttaagcctcccgatgaattctaaagacacccttactaacattttctttccatatttatacaccctcaggcccctagaacattcctaataatttcctattcctgtcctatcaagtgatttaaggatagccaatactaaagccagtttccatagtaaaacacatatgtgagtgaaatttggcaatcaacaaaaaatgagacaggaatagagaccattaacaattaactagtttactctgtgtgcaaacctgtgaaacggctgagcctatgtcgctctctacagaattcggtacatgtttttctggttctttccgcatgacctctattaagtttagcctgaaaacacacccctaacctggattagtaaatacatcaaagaattgttaaaggattctatatatgcatgatggtatatgacttgaaaagaaactctttgcctttacctcaaatgactacatagaagctccaaccaaggatcagcttttaaatactcccccaatattgaaactgcatcagatactacaccaacaatagaaatgacttaatgaatgggtaatgtatcaaataaaactagggaagacattggtttaagattgaccgataaaatatgagtattaatgagatatacatgtatctttctcatcttgagctgcatagtttttgtccaaagtcaatagagtctgttttagttgacatacctgtagccagagaacacaaaaatgaagtgcaagggttactcaattagatcaatactagatataacaaagtttacagccattgtcacatgacagaaaagaaaagaaaaataccagaaaagataaagatcatttaaaacaactataagttgacagatattgccacttgatagatgacttttcactggaaacaaacaaaagtaacctctaagatgctaaacatcacaagaaaagttgtgatataaccacaagaattatcatatgacaagtccactttcctcacgtgtatatttccaatgaagagctaagaaatgaaacataaaaatacttaaaaatacctcagaatgat

SEQ ID NO: 244526 - DNA, 697 bp, Cannabis indica
ttgttcccgggtgtaaagagtattgtgtggtatgagagtcatcaagaatctaatgtttgatatatttgtcgatcggtacactaatcctactcttgtatcgtaataacccattagatgacagtgaaaagtcttttaccaatctgatttctaatttctctttgtacccttgtagcttggaatcactttgctgggccattctaattctttcttgcaaatcaaactgcatggtgatgttagcaagttttctaaccacaaactcaatgcccgctctagtcatatcctcagccaactctgctaaaatcttctttaattcataaacttgctctctctttttgacatagagcatccgctaccacatttgcttttctaaggtggtagacaatctcacagtcataatctttgactagttctaaccatcgtcgttgcctcatatttaaatccttcttagtgaaaaattatttgaggctcttgtgatcggtatagatcttgcactttttgccatataaataatgacaccaaacttttagtgcaaaaatgactgttgcaagttcaatatcatgagtaggataccgctgctcatactctttaagatgccaggatgcataagtaataacttttccaaactgtatgatgacacagcctatcccctatttggatgcatcacaataaatcacgaagtttgttgggttttatgccc

SEQ ID NO: 244527 - DNA, 1181 bp, Cannabis indica
tataaagaataacctaccatattgaaaacacctcaacactaaagaaatcaaagtttttaattattccaatatcaaataaactttgaaaaattaaagtttaaaattaaacattacacatattttttctattaataattaaacattaacaataaaattaaaatgctataaataaatttatgaatctttataaataaattttttctcaaaatattttctttgtctaaaccctttggcaacaagacgtgccttgcactttttaacagtatcactgggtctcaatttttttttgagaatccacttgcaacctataatcttacacctggtggtaacacaactaaatgccaagtttcttttgactgaagagagtatatttcgtcattaataacttcattccacaaatcaacatctagtgaagtcaaagctaattcttgaaggttagaaagatcatcttctaaagtatatgcacaaaataagaactaaaatctttagataatctagctcttttacttcttctaggttcaatttccatactcttttcatgttcattattcttagtaatagatattttactagatgatgcaccttcattgtttctcaatttaaatgaaaatttatgttcataaaaatcagcatcattaattagaatccaaaataacatgcacatttaaatcataaaatctatatgttttacaaacatcatatctaataaacacacattcatatactttactagccattttaatgatcgattttgatgcagcgttgtttaaggaggcccagagttttggtgttgggtatgtggcacacaatttaggtgggttcttgatagaaggttgcacaaagctattccaggggtcgaattctcttgaagttgttgaaataatggggatccgagaagcgctgagttggataaaagatcatcaatggtcacaggtgatattcttgaaacggactgtctttctgttgtgcaagccattcgtagctccactgttatgattccacgtttagtcaaatggttaatgattgtaaggctatacttaattctctgagaagtgtttcaattcattttgttaaacggtcaccaaatatggtggctcattcatttgcaagagccgctatattataccgtaattgtcgttttaatttggcgtctattctaactgttttgttacctcatttgg

SEQ ID NO: 244528 - DNA, 620 bp, Cannabis indica
tttaatatataaagatataagtaaatgaacatatattcttattgttgtttagtaatattaaattatatatgatctgatatttaattagactaatatcaatataacacctaaaaaagtgttaatcatcactgatgtctttctgtatttctatatatctattttaaataaaatatatatggaattcttagtttaatgaatcgattttttatgttaaatttaacagaatatactattacttaacaaaatattctttattaattttataatattatgatgtatattaaaaacaaaaattatgtaaatattttatttaagaaaattttaattttaatttaaaatacttaaaatattttagatatttttaattacattttttactttattggtttaacttcgagttaaaataagaaataattctactagatcaggcacacaatgattcactacgatatctcacttgattttttttttttacatataaaatacgtatatatataatacaaatgcaaatgacaaactaatatagctgcaatcagtgacggacacacatacaaagttgtgagggctatagccccagtaaaaaaaaattgcattaagaaaattaaatatttttcttttta

SEQ ID NO: 244529 - DNA, 1423 bp, Cannabis indica
caatctcagctggattctctcctctataaagatattctgtggaaacaacgatcaaaagttcattggctgcaagctggtgataaaaataccaaatattttcacaataaagccaatgctaggaggaaaactaacttcattcgaaagcttaagtgtgaggacggaagagtggtcacttctgtggatgagatatctcgagaagtgtctttctttttcgaaaacctctttaagactcaaggatcggatgatcatgccacccagtacctcctttcagccattaccaaatctctggataatggtcaaattcaagctcttgactccccttttgaaggttttgaggtgaagcaagctttgttccaactccccggagacaaggcccctggaatggatggccttaatcctgctttctaccaaaagaactggaccactttagggcctgacttcacttctttgatccttgacatcctgaaccatggtaaggacttctctgttatcaatgaaactcttattgtgctaatccccaagaagtccaatgcttcctctttgagggactttcgtcccatcagcctttgttcaacaatctacaaggtcatttccaagatgctctccaaccgtcttaagagtgttctgggcagccttatctctcctttccaaagtgccttcttatctgagaggatcatcttcgataatattttcattgctcaggaagtcatccacgccattaatcatcgaaagctgggtaagttgggttgggcaggcctcaaactcgacatggaaaaggcgtttgatagagttgagtgggacttcatattggctattttaaataaattcaaatttcctctgcgattcatcaacttaattcaccaatgcatctccactactaaaattcgattcagcataaatggccacattacaaatcctatccatccctctcgcggcattcgacaaggggaccccttatctccataccttttctcctttgttctgaaggcctcacagctgcccttcgactccaagagttaagtggatcctttaaaggcatttctgtagcccgcaatgctccttccatctctcaccttttgtttgcggatgacactcttatttttacggttgcctcaccctcgtcttgtaatgccctcaagacagcccttacgacttatcacttagccactggccaaaaggtgaattattccaagtcctccatcctcttttcgcctaacactcattcgaatatttccacctacttctttaataccttaggtcttgagccaagacctttcatcagcaagtatctaggagttccccaatgctttgggcgctcaaagaaatcgaacttcgacttcatcctgcagaaagttagttcgcagctttccaactggaatagcaagttgttctctaaggctggtaaggaagtgctcttaaaagc

SEQ ID NO: 244530 - DNA, 1541 bp, Cannabis indica
gtttgaaaatatcattttttaattttttatttataatactaatattaatatttttattaaaaatataagcttaacaattacaaaaatttaaaacatttttaccgaaattataaattacataaaatatttacacataataaataatattaaacaatttattttaaaataattaacaaatcaattttgttttgataatataaaaattaaacttctttatgacaaaggtatctttattttttagtgggggtgtggattttgggttttttttttggtgcagattatggtatttgatgcagattccaggtcggatctgtacattgagatggccaagaacgaaagcaacgagctggaatgaattgtatgtattaacaaaacttctacttatacattactttggcacaggtttgtcaactcctttgacatgttcatccatgttgcaattgaaatctgctgaacatttggttgattacgtaaaacactttcgagtttatccgagttcgccttgttcctgatgctggaccttggacagttttgggtcaggtctgttactatttcttggttggactctgtgtatgtattaattgagcctctggatatagaattatggtcctaccaacctatccccgaagtgcttattcaagtatcacattttaacattcatatcagagattattgtaatgcataaaagtttccttgttttcgaatatttctccttatacactgatactatcttttttatattatgtttgttttgctttttcctcccttacataagaatgctcagcagggattaggtttccatgttgcttgtggtccaatgaagccagtcataaatttaatgacaacttgttctttttgttgtatagagctatggtggtttttgtgcggtaacctaattgagttttgcacaagaaggattgaaacaagtcctcttaactgaaggattgaaacaagtccgaggacttgtttcaatcctgcaatttgttgtaggttgaacttccttctgggggcatcttaacccccagaggcctgcaaactcttggcctctcatgcttaggttcttttgctggttttgagcgtttgcactacatgtaagttttaatgatatgtgtcagggatttcatgaacttattggtttactaattcttttggtttatttttttcaacttttttgttcttataatctgtaggtttagacagtctgggatcctgtattagttccaggagcaccaaaacaaattagttacaactttttggacgctgtaagacatcattgccctttcattgttgcagtttgagaagtccaatgctttcaacacaaatccaatctatgctcatttgcataaatccatatactgtgaaggtaaaatactttaattaattgactaagccacaaacaatcatgtgatgcatatgcattgccttctttaaagtggtgtggtataatgtatgtgtatatggaatatttaggacatcatgcattctaaagcctactctgcatgtgccagtaaatcttattatatcaatatagcttgataatg

SEQ ID NO: 244531 - DNA, 1478 bp, Cannabis indica
tcattccaatactttaatatgcaaccaaacaaatgaatggaatgaagattgtttgctttccattttattatatttcattacctccaaccaaatgacacttaagagtacgtgcaccaccaaaaggaaacctctctttttttttacggccactactttagcacaacagtacacaaagacggtacacgcatgccatctgtcaaatatcgtgtgatccctaagcatacggatcaccttcgtcccatgggatgacctcagtctatgggcccccagtcaacatatttcatgtatttacctcattagtgagctaagtttacatacaaatccagcgggtcacggatatacctaaacccaaatcctaatctataagtacaatatttgccctcatgcgaagggttacaaattcattatgtaaacactatagtagaaagctaggatttgtaagcttcaaatatgattgactcgtggattatggtttattaacacccaaactacgtaaaaatctccatctctactttctattgtttttttttaatttctcaacttttatttaaattagtttctaaaattctcgataaacaatataaattattacacaatataaaatattctccaatcaaatattaactcaaatatcaaaattatttaaaatatataaaagaagatgtataacttaattatataaaatattaaatataagaacatacatggtatgtttgccaccacaaactaagaatctgatggcaaaacctcaactaaagttcttttacaccccatcaactccaattatttatttatttatttatttttgaacaaccatcaacttgaattattgatttatagaaaatattataaaaagtaactttttaacaaaaaaaaaaaaaaaaaaaattagaaggatatatatgttatctttaattattcctcaatttttggtagacaaatctaattcaagcaaacatttttatctatataatccaacttttaataagaattttctaaacacatgaatccaatatctttataatcgaattcacaaaaatgaaaacatctactatccgagaattcgaactcaacatttgaacatatctaaaatggtccaaaatttcatcattaacattaattgaatgaacactccaactattatttccaactattatttaaaagaatatataattcatggacactaaaaaataaaattaaaaacaaactagaataattcatcatggaataaattcccaagttttcttaccctaatggttactgaaaaggaataatcacaaatcttgatctagtgttgtatacgatttttttaaaaggaatattataatttcctttttatatttgaagataacaaaatggcactataaaaaaatatagaattttgatatatatatacacacataaattataaagaaaaatttacataatagatcaaaaatttaataaatacatcaacacagaattttttttcattttta

SEQ ID NO: 244532 - DNA, 1179 bp, Cannabis indica
gagtcatttaattctgctgcaaaggtttctgataccttttatgtgtttattttgtatcgttttagaagttcatgttaaggatgttcaaaatatacttgttagtaaatctagatcctggtaaaatatattcaaaaagttacatcattttaacttttagaaaaaggaagagcagtgttagcacctaaattatcaaagactgagccttccaaaattgagaagatcatagcattaatctcacttttagcaaacatagacctgatgtcaaggagagtatcgactttacattttttcagcccaattgaaaaagaattttatcagacagtgtggccggattgtaaatgagctcccaagaagctctatacatgggagccttatttggcccatagagattgacctaattaatagcctcagtaaagttttctaattccttgcgagacaaagaggttaaaacagtaggtaaatccacactcttaggaaaggaatgtggtttcttggattcatgttggctctcttggtattctgaggtctctctccacattaggtggagggtccattggttggtgcccacgagtttaagtccttttagaatcttgctcaaagtttgcttctctttggaggacctcagcacttggtgttttcttactagtgttccgtgcattaagagttttcccttgagcactagttccaatgtggccaattggcctatggggaatctcttttaccaactcggataggcctctgcatgggtagttctgaaaccagagtgataggcttctttcatccattgagataggttagctctcatttattcctgctcaactcgctggctctcaatattctgtcagttctccacgaaccagtgttgaaactgctcgtgttgtgttttgagagagtcccgcaattttttgttgtagatcagtcacaatttggctaagctgttcaactcgagaattggcctccttagggtcttgcaactccacgtgtggctctccaggtggaatttactcgtcggttctattaccgggagcatttggtggccttgggggtcaaacttttgagctagttctagggcctccacctatcacctaaggtgtaggagtagttattggaatttttttaccaggatctagatttactaccatgtatgttttattagcaacctcatatgaattctaaaac

SEQ ID NO: 244533 - DNA, 1968 bp, Cannabis indica
acgacaatgatacccccctctacaagtattcttgaaccgtgtatctctgctcaggattgctgtgatctcaacgcaatcccctctgtagaagagatttctacggctctggatgaaatgggacatgataaagctcccggtccggatggcctccctcccagtttttacgtactctcatcattgggacactgtaagcaaggatctgatggaaatggtgatgtacttctttaaccatggagtgttgcccaatttcatcaatgacacatcctttgtcctcatcccgaagaaggagggccctgcgtacacaaaagactatagaccgatagccttatgtaatgtctcctacaaaataatatccaagatccttgctaaccaaatgagacatttactacccagaataatttcgcctaatcagacagcctttgtcaaaggccgaagtatcactgaaaaatactatgattgcaagggagatcgttcactccacgaagaagaaacggggatcgagaggcttcatgatgataaagattgacatggaaaaagcctatgataagctagattggaacttcatcatctcagtcctatcttccctcagtttcccttcgtcgttcattaattgggtcaaggcttgcatatctgtaaaggagataaaactgcttcttaatggttcggtgatgggaaaattcaatccttctaggggcttgaggcaaggggaccctctttctccctccctctttatcattgccgctgaaactttatcgagacttttcctggagatggagagtaaagacctcctcaaggggtttaaaatgagacgacacggtacgccagtcaaccacctcatgtttgcgaacgttttaattctgtttggccaagctactatgaaggaggccaaagcattcacggactgcctcaataagtactgcagttggtcgggccaatctatcaactttcagaaatcatccgtaatgttcactagaggggtccctcgggctaggactcatgctatttctcaattccttgggatgaagagaatgtctactaatacttcttacttgggtatcccgctctttagatcatcaaaacgaaccaaagaccctgaattcattgtggaaagggtgctaaatcgggtccaaggttggaaagccaaattactttcaagcgctggaaagtcatgcctcattaggttcctgggctctaccatctcaaactacgtggtttcgtcggatgtcatacccatttccattgcaaaaaagattgataaggcgcttagggatttttggtggggcgatcttgatgggaggcgatcgatgcacacccctgcatgggaggttttatgtcgtcctaaggtctgtggtgggttggggtttcgcactacggaagccatcaatttggcttttctcatgaaatgggcatggaaagctctaactgataatagtagcctgtggagtagagttgttaatgataaatatataaaggatcacgatttcctggatctccatgtacgaggttctgattcgatactatggaaagcaattctaaattcgagaagcctcttaaccaaaggactgtgttgcaagattgacaacggaaacgctacgtcgatttggttccatccctgggttcccaatggtgttctccaacctcatccctgtttggatgctacggaaggtgtgagcttagtcagttactttatccgaaataatcagtggcaagaagacctgatcagaagatggtttaatcatgatgacgccaagagaattctcaatattactcttcctagtatcccctccttagactcttggatgtggctccctgaacacagtggccacttctctataaagtcagcgtatcgggtggttaaaaatgtggatgcattggatgccaacaatgcaaaatggagaattatttggggatctaacatccatagtagactaaagattctctggtagaaaattctctccaataacctcc

SEQ ID NO: 244534 - DNA, 1453 bp, Cannabis indica
caataacttccatgataccacattcatacaccttcatggaaattacggcctgtacaagggagtaattcatgatgatgatgatagtggtgaagattatataaatttctgtgaaaagtttagtcatcgtttggtgatgtaaagttagaaaagattgctactgaagtttctgtggcatcacagatgaacaaccacaaaaacgttttgaagctcttgggttactgcctcgactcaaagtttcccatgttggtttatgagttccctgttcatggcaatctctctcattttctcatagatgggaataatagtaacgaaccaccaccaccacgactgccatttgagagcaggttaagaactgggattggaatagccaatgcacttgcttatctccatcacggccattcaaagaccttcatccatagggagatctttaaggaagcagtgtacttagaccaagactatggtgccaagctatttgatttccaatcatcaattccaattcctgatggggaaactcatgtagatgtggatcttattgaagggactatgggacatatgtctccagaggtatacagaaaggagtgatgtctatgcctttggggctctattctctgaattattgactgagaagagtttgagacatatggctgattctgctgcgactacgcataacagttgttcgtgtgactactggtttgatgcgtggaaaaatgagttgaaggacaatacattgggagaagaagaagaagaagaaacaagacttcaaataatggaatgtgccaagcttgtggaaaagtgtgtcaaaaacaatgtggatgagagaccaaacatggtggaagttgctaaagctctcatctttatcaaaacccacaaaacccttttaccttaaatacatattattgtgtttcttgtcttgttatactatgatgagattcatcaaatacttcgatttgtttacttcttttcttatttaaaatatgaatgtattcttggccaaaatatgtggaaattgtctgattaacagaagaaatatattgttacataaacataaacggaaggaaattgtatgtttccagccattcattttggtagtagcttcgatttattaaccatagatcagccaaagaaaatgaacaggaattagaaagggtattagatggagttacaaagtcaaaataaggtaatatttttatttttaattttttaatcagtagaatttttatttttgaaaaatttgttttttatctataactatttttcaattttttaatgtaaaaaataaaaatatataactaaaaatgaaaaagaaaataaattttaggctaattaggatattttgcccaaaactttgacatgtatcaaatcattctcctgaattttttttggccgttaaaaattcccttaaactattgagattgttagatttaaggacttttgcctaatttcattcaatttt

SEQ ID NO: 244535 - DNA, 2330 bp, Cannabis indica
gacaaaagtccttaaatttaacaatctcaatagttcgggaggaatttttaacggccaaaaaaattcagggggcacgatttagtacatgtcaaagttcaaaagaaaaaattactaattagcctaaaaaaattacacataatttaaaaaattatgaaaatataactaaaataataggtattaaaatattcacataataatgttaaaagttttggaactgccttgagaagttttgttcttggtctggtcaaaaattcaataagctcaaaacgtcaatattctttcgcaataatacccccaatggcatgaggagaggtatcaaggaagctttgggcattgattctccggagggggtcattaagtacttaggcctgcctctcttcagatctaggcaaaaaagatgcgaacttcaatttcatccttgacagtcttacctctaaactgcaaggctggaaggcaaagacgttgtctaaagcgggtcgtgttacgctcattaagtctgtgggcctgtcgcttccaatctatgccatgcaaactaccaaaactctctgatcgacttgtgaactagattgatggtctggttagggacttctggtggggttttgagcaggggaatcataggctccatcttagagcttgtgataaactctgtcttcctaagtctctagaaggcctaggttttcggaaaactaaagaaatgaacctggctttcttggccaagtgagggtggaagattctgactggatgccagtctttatgttataaaattttggaggccaaatatttaagagggaaggatcttctctgctgtagatacaaagactctgattcctaattttggaaaaatgtggttaaagccaatgcaaaattggtggctaatggcagaaatactagcatctggagggatccttggatacctcattataaaggtttcctcccgaaaccaatgggtgacatcctgacaaacaataactgagtggctgacctccttacaacctctggcatatgagatgttcacaaagtaaacaatattttttatcagaaaactgttgcggcagtcttaaaaggaggaaacccctcaggatagggagaggatagatgggtgtggactttggaggccaatggacgattcttgtgtaaatcggcatatcttgctcagggtacggaaagagctcgtcactgtgaggtggctacgtcgctttggaacaagttatggaatagtaaaatactagagagacataagattctttggtggagtatcctgtctaaggcgctccctgttagattagagattggaagaagatttcagattgaggatatgagatgtcctttatgcggatcgagggagaaatctgttgaacatttattttcgtgcgatgtggcgctacacttgtggcgtccctcaccttggggcatttaccctgtctgtgacaatggtatcagtatttgggactggtttaaattcatttgaaatcttaaaaataggggtatccgagctgagaatgtcttcctttatgcttcgattgttgttgacaccatctagagggcgcgcaatgaagctgtacacaataatattccccctgatgttttgaaatgtattgtccttatttgcacttcttttgcagagttacgtgcttctcttgtgcctagcccgactctgaccttgagggagatatgagatccaactcctctggattggattaaaatgaactatgatgttagaatgggactggagagtatgttcatagcggctgtagtaagaaatcatctgggtagggtggttcgtatccacatggctcggttggattttatggatgtgttatgtggagaagcagcggcctgttgtttggctatcactgcggcgatggatttaggttttagatttgtaattgtagagagtgactcgagactagtgatcaatgctcttaatgggaaggagtcccattgggctattgagaactatgtctccttttgtattaagtcttctcattcttttatatgttgtaattttatgaatgttagtagaacttgtaactatgttgcctataatgtagctaagtgggcgtttacccacaaaatgtacggatcctttccggtctcctccttttgggggaacctgttttgtaatgaccgggaggtctaactattatctcttattaattgtatgattacgctgtttttttcaaaaaaaaaaaaaaaaaaaaaaaaataaaaagaaaaattttaaaaaaaatattgagattaatttgttaaaattttcttaagtttcctttttttttatattaaggtgcacgattttgtgggtacacataaatatctcccaaaaaaattat

SEQ ID NO: 244536 - DNA, 875 bp, Cannabis indica
ttttttttaattttagattattttttaaaagtttttaaataattatattaggtgtactaatataaatgtgtcatgtgtacattcttgtacacataaacaatttaggttgacatttaactgagagaaatgtatgacatttcaaatttgctaagggattaatagtttggagagttttacctttaaaatttaaatttgctaagttaagttcaagtaaaataacagttgagagagtttagccgccaaaaattctattcttaataatagatgaataatttgcatgtgctaaaaataaatcaattattataatttttataaaataaaatatattaaatatatagaattataaatatattttaaatatataaaaatataactggataataattggatcggttcggttattcattggatcggatgtcccatcccacaactgatccaatccaattggattttcaaaatttacatcccattcaatctaattatgattggatatctgattctattaaattggttaagatttgatcggtcatttataattgaattacatgactttctgtaaagtgttcatattaacccaccttcaactatgttcttttgaacatccttttcccctaaaatagtaggtgagaatcataccaaaaaaatgactataataaaaattggatctcgcagttactagtattttttgaagaattgataactatgcgcgttggtgtaaaagattctctacttttatgttaagttgtaattttttttgtttattttcaaaacttgtaatttttttggctcataatgtggtcagttgggcttatgttaactccatttccgatagaggaaattagactctataccctttttatattgttctctttcat

SEQ ID NO: 244537 - DNA, 3310 bp, Cannabis indica
tgtgttgctgttacttttttagtgagacaaaatctgactttatacgcctatagtgacgcgcagaaagtgaatgtaaaatagttttagagttactcaatgtgtgttactaaaacttatttttatagtagtgcaagtcggaagtacaagtatagtactggttaagagtgatattatggttaatagtactttcaggtatagactgatgctataatagcggtacaactatcgtgctaagcctatagcgcaattatagtgctagttgtggctaatattatgatatatcttaccaaaggtaagaacgttcttgatttatctgttaagccttgtagatatgtgtatggacgcctagatccaagttagtaatgtgtatatatgttttatattttatgcttttcttacttcactcacagatattgtttacatgtttaggtaaagaaaaggcgagggccgagtaatagtgagtccagagcttgaggatgattgtacatatcatgatggttagacttggagagttcagtctcggagcgacttgggcttttactttgtagctgcaaagtgacatgtttgtaaatgtactttgaaaaggttgtaaactttttaaattgggatcccgacccttatgtaaaattatgtttacttaaaaagtttaaacttgacacgatttatgagaaaccctttgattagtaaaggtgtacacagtaattaaaaaatcactatagtgtgcctaagcgagtaggcccttacaatttagtatcaaagctgtcaggttgtttaccgaagaccgttaagatatgtacagtcatcgttagagacaagctcgactcatagtttagtaagcctttacttgtttagtaatttttgtgattagaaaatattataggaagtatgttagtaatatgttagctgattagtgcattgcctaaatttccatgtatgcaattgctaaactttatttgatcgttgactgatctacttgacttatgggttcacatgctaatcttataatatggatgtccggcgaaacacaagaagttagggtagaatagttaagaacggaggtggtcggggaggtcaaaatccacctcatccccatggacgcagaagaggtcgtgatagatcacatagagatggttatgaaaatccatcacaggctcctcatgaataggagcaaaggtttgcaaagatgcaagcccaaattagtgagatgcatgctcgaagtattcaacatgatgtagtgattctgaggttaaggcggcaaggttctcttgttatgcccgaattagtgagatgcatgctcgaagtattcaacatgatgtagtgtttccagtagaacaacttgatgctagtaatcgtatgaagcccttgtatagtggttttgtaagcaagcacctctagcctttttgggaggtccagatgtcatgaaagcatagtggctgattgtgattaacattattcttaactttatgggtgtcattgataatgatatgatgacctgtgctttgttttaattccagaaggacactctcgtgtggtgggaaatggtatccctcacttgggacatcactacaatgacctcgaaggaatttcaagacctgttttttgcccaaaactcagatctgactattttcgaccctaaatctaacatctactcacaaataataaacattaatcatacaatttattcatttgacatgtacaacattgtcgatggtgaaaccgtggttgatggagaagtcactgggtccgcgatggttattgagtccatgggggtccttgggtcagtggtcgtggtggtcgtagagagaagggacaccaatgttgtgggtggtgagttgtgggtttgaatccttagagtgagttcagagagcaagagaaataagagaggaagcgagaggattaggtgtttcaaatggaaatagtagaattgagttttataattaaaatattaatatattctaccaatatgaattaacctaataaataaatacatataaattcaaatttctttaaaaactctaatatagacaaattaataattttcaataaacttgcaagtcatgaagtctatagtttgacatagtatttcgtcaatgctgtgtattcagatatatatgtgatcaagtggtgagacatcgcctaatgtatggtgttggtgtgagttgtatcaaataataatatatagttatactcacatttaatttatatgtatgcatggtctcttcaatcttgggtcagcattatttgatattggttcataaacgtaacgaatctatatcatccatacttaattaattgataaatattgttattgggaattagcggtaatctctagcactttttatagctgacatcttatgtttagttggcgatattttttaaaattatatatgagatttaatatttaattataccaataataatatgatatataaagagaaatttgacattttattctaaaaaacacttatggtgttattttatgccaccctcacaaaattttttttaacatgctaatcttttaatcttaaccccacaatgcccctctctcctacaatccaaaaattcagcctcctctctctcattccatctcgtgttgctctctctctctctctctctctctctctctctcttttgcaaccggccgactgctcactgccgccattttcaccctcaacgtccacggccgactgctcactgccacacctccaccattttcaccctcaacatccaccacactcaacaaacatatgggtaagtgtttttcttagtaaataatgttgtttttgttgtattgtatggatctgaacgtaattagttgtaatttgtggcttttgtgtccttgaaatcgaggtagagtttgtttcgagcagtctgtatttttctgggtttttcttttttttttgcaattttatgcgacattgtgcgatattgtgtgcgatgtcatgagaaatccaaggttagagataaaatgattaattttagcgactttgtacgattttagtgcgattatgtgtgcgattgtcctatttggcgatttatgtgcgacctttgtgcatcgttatgcgattttgttatgtatggtatattgtgcgaccttatgcgatatgtttccttctttgtgcgatttgtgtgcgacatgatacttgtttatattattgatttattaggcgacattgtgcgacattagtagtagcttgtgcgatttagtgtgcgatatagtatgcttattttttctgtttatttgtttgtatttctttgggacagattcaactgtatttgtgcctgtactgtatgatggcgtttggactgt

SEQ ID NO: 244538 - DNA, 2311 bp, Cannabis indica
cttcgtgctttcttaaagctgtagtagatagtttaatcaaaaaacattaaagaaccaatttataaccattctttatctacatatgattaccaaaaccaaaacataccattattttacagtacatgaacaatacaattaagcttgctgctaaaaatcagtatgaatataaacgaaacccactcaatcaatcacattactaccccttggagactcaatgccttaaagctttaaacatgttctttgacaccgaaatcatacctaactgtgtttttaatgcatagtggaaaaattattagtgtttattgaaagaaagagtattattattaagtagtaatagcatttagtatcatttagatgtatagtattttaaatgattattgatattgtattatagttattaaattaaattatgagaaattcaatatttaattactctaataataatataataacgagaatatttatatagtttggttgacatttagattgcagattatatattaattttttttttttagtcaatatattaacttattttaaaaatgcaaatagattatatatgatgtaagactttaataatttgagaagagttagagttatttctataaccacgtaattttttttttttataaattgcattaataactaggtaactaaaataacatgattcatatttttatttttcatccatattcaaacaacattaaaagttgttgtttcttttatttttatgttaattattattttttatttcttcccaatattatttcgagatagaaatataaatctagttaagtagaaattaattttaatttttttttagttcagcctcacctgttacctgtatgaatactgctcgaccaagtcaaacaagtctggatgctccatttattacttacaaatcctaaagctttttttttgtgatacacttccagatcatgaaaggggatgtccaaatcattatcacaaaggcaacagtacttgtaatttgttccaaaaaacacaccagtctttttggtataggtcccttcgtcggctttcagtgtccgtacgatctcggaagcgaaacgcaacggccgtagagatttctccagccgaccgccgcctgagaagacgaaatcaaatgtgttatcaccgaacgggaatccgatgcgcttctccatttataaccaacggtttcgatgctttcttgaaaatccctacggaatccgatacgccgatctcctcggcagggacggacccattaagagtgatgtggggcctatagtaccacgaacaaaaatattgttttttaaaaaattaaatgtaaattttttaatttaataattataggttaaaatagtagaaaaacccccactaaattagataaatttagtaagagtgattataatatagctataaatatatttttatgataaataagcccccacaaagtaaaaattctgggttcgtcactgcacgtcggtcttgccccttcgaggtttcaacgcagacagacttcgattccggcgaaaagtaaccgtgagaaatcagatcttgaaaaagccgaagaggatttacttattacttatatattatattatgtgatgagaaaaaacaatagtacggctaatttctaaaatatcttttttttaataaaaatggaagatttttgagaaaaagataaaagataaatattgttttaattaattacatttgaaataagactattttattaaagaaaatcagttgtagtttcaaaattttaaataaaatatatatatatattatttaatttataatcaatagacgatataagatataaaagattgttttcattaattatatttgtaatagaagtatataattctgaattcactataaaagggtgaaagcagaaagggtttaaggtcacttatgtacgaattgaacaaataaactccaattcaattaattttatattattcatcaacaaatacttcaattttcaaatcaattaaaaaaaaatgggagcaagtaattttcgtttgctgaatatggtgcggcctttccttctatttttacctgaagttcaaagcgcgaacagaaaagttacactcagagagaaagtattgtacaatgttttagcattgttcatattcttggtatgcagccaattaccattgtatggtattcaatctataactgccacagatccattctattggatgcgtataattcttgcaagcagtcgtggcactgttatggaactcgggataacaccgatcataacatcaggctttgtaatgcaattgcttgttggctcaaaaatcattcgagttgacaataatgt

SEQ ID NO: 244539 - DNA, 679 bp, Cannabis indica
ttttaattttttttttccataattgataaattaattatttttcaaaacatgataattttaatttttgcagatttccaaatccactgtcaaaaatggttataattttaccattatatttttgtacgtatcagtggtcctttttacagaattttcactaatcttaaaactaaaaagacgactactataaagtgtctatttggatgcagaagtaagatgtaccctgatattgagatttttaaacaccaaaaggagaaacaataccaccgttatttcaaaaattattctgtggaatgtcatatatattaatagaagaaattaagataaactactactgaattgtaaaaataatacaatgactaaaataagagattaattacataaatattacaagacatatatacaatatataaatattataagaaatctagaagagatgaattacatgtaatatacaacatatataatataatatgaagaagaagatatatatacactcactcacaaccttgagtggagatttgtgagaatcaccatgacttaaacagctattacacctttatccaaaaacttatttcctcccatctctaagcactaaaggaactctcatagaaataactttgataattatcaagccttgtagggtttctagtaaagtattttgttagaaacttggttgtca

SEQ ID NO: 244540 - DNA, 1459 bp, Cannabis indica
cataaatatcactaaccgaattcagttaagatatttatttatttaaataaccaaatatgatttaattaaagggttattaactactataaatagaagtctgatttgagaaatcacaacacttactttgacatatatattttcaaagtataaagagtaaagaaagttaacattttttctctcaatggctcttgctcatgtgttgagaactcaacaagaacaaatctatacactttatcctatagccaacattattccttgtgtgtgatgatcgatttggaagacacttgtgtgagttcaaattctattatttggattaagggatacaaaatacgagaagtttcgaggataccctaatagccttcaagaagtatatattctaaactagtattttatgttttgatttaatgtacacacatttagagatccattaaaatatggtacaatgataattaacaatacgatgtatcataaaaccaacatgtcccttttagtgctgtgtgcattttcccaggtctaacacaggaaatgaacccttgattttgtgggctctagtagggctgagcatgggttgaaaatgagtcgaccaacccggccaacccaacccgaaatgggccgaaacatggtcattttttatgggctaaaatacatatgggttgataaaactctaacctgctgctatagggttgatttcggcctggggtttttctaacccaatgaacccaaaccgaaccgttcagcccagcccaagcaaaaaaaaaaaaaattacatatatatatacaccagcccagcccaaataaaaaaccctaaccctaattaattatttcattttcttttctctctattcaaccctaacacacaaagcagcagccacaaaaatttctccaaaaaaaaaaagaaaaccgtctcagtcaacctcgccttagcagccgtgcgctcaagccaccaccagccgtgcgcccaagccaccaccagtcgtgcacccaggccaccatgcaccagctgtgttctcccaccgtgctgcatcagccaccaccacactccaccgtccaggtatggatttatttggatttaaattgatgaatgccattagctttatctggatttgaattagaggttagtttgatttttaaaacaatgaagaatggggatgagtgtgattttgaagaacatgaaatcaatttttttttttctgtgaatgtgttctagttcatgtatgtatgtatgtatgttctcttatgggctccatctttattgtggtgtctcctttctactcaggctagccttcgtaggcccaactgcataagtttagaaatgtatgtatttatgttttaatattgagtgtctcaggttcttatggatttcatcgagaaatccccaaagtgagctcttcatttctttggactttgccattttcttcatatctcatccttattttttctgataaatataatatttgtt

SEQ ID NO: 244541 - DNA, 1075 bp, Cannabis indica
attttgaattttttaatccaatccaatccacacaagtacggatatctgcactttgcggattggatcatgcagattggattggatcggctaattttatgaacatccctaccctgaactttggcgtatacctaactatatcctctaaacttttatccaagttaggcttctattagtaaaattacacataaatccttaaatttaacaatcttaataattcgataaaattttaacagcataaaaagtttgacggatacaatttagtaaaccacaataacaattttttttcaatgtgtaaataaaataattcatgaacaacattactacactacacactcataatgatatttttattagatcaagcttcattaaatcataacattgctccaaatagtagataacaaatcacaggaaaaatcaccctcaagaaattgacgatcaacattgcttgggattgcctaactagatggtgagtaatctgattagcagaccgtttaacaaactattaaaacacattactttgagatcttaataacaactgacagtcatgaacaataaactaaaagcagagaacaaaccaaaattactcctaatagcttgaacaactaaaagactatcagatccaaagtaatcttcatgaatgattgagttttcagccaacttagcacctccttgattctaagagcctcgaccaccattagttcaacactgcccgaataaagacgagtagcagccaccaaaagtctcctggacgagtcacgaactgcaaaaccaatctcataattaccagtctccaaaaaaatggctatgtcaacattaatattgacactattatcaattagcttgatccaacgctcaatttcatcgccaacatgcaatgggttcaatgagggagtactccccactcctagaactttactccactggtcaagagactgaaatgcaattgacatcacttcaccaaatgactgccccttttgcttccaaactatatcaatctaagcccgccaaatagcccaacaaaacatagctactctagccaaagtgtaatgtcctactagtttagacgtgctactgt

SEQ ID NO: 244542 - DNA, 581 bp, Cannabis indica
cggcgttccaaacgagctcaaaatgtactatttaacacaggtatcactgaaaaataaatgcagcaatgctagttataacaaataaaaaaattcctctaaaaaaaaaaaaaacaaataaaaaaattacttgttaaatgcagcaagaaaaagaaaaatactttctattaaaatgtaatatttttttccgctagaaaatggtatttagttatagagtgattgctaatttgattttgattataataaaccctagtcacaacaaattatagtttttattaatactttttgctaagaatgttttagtaataatataaacttaattataatatttttaattttaatcataatgtttttttttatttgaaaacactgaaaaaaattttcaatcataaatattattgtgactaaatgttaatattatagcatatataaacattggaagcttgtaggtaggaaaattatttttgttcatgcatacttgtaagggtatttttttcttggaatttttatattaaatgggcaaaaaaattttcaaaaatattttatttttgagattattctcacgagaactgtagttaaatacc

SEQ ID NO: 244543 - DNA, 549 bp, Cannabis indica
ttctctcactatatatatatatatatatggcttcatgtggtggtagtagtagtaatagtggtggtacggggtcaccgtgcggcgcgtgtaagtttttgaggcgaaagtgcgcggcggattgcgtgtttgcgccgtatttttgctcggagcaaggtgcggcgaggtttgcggctatacacaaagtgtttggagctagtaacgtgtcgaaactgttgttacacgtgccagttgctgataggtgtgaagctgtcgttaccattgcttatgaagctcaagcaaggattagagatcctgtttatggctgtgttgctcacatttttgccttacaacaacaggtaattaattcattaattaattaattattattattattaaaacaaattatgcatgcaatttaaaacaatattgtacaaaattattacatatttatgtcggtatttatttatcgttataagatagcttatagttttgatgtgggagaattgttcttgttgagttatagtcgattttgtttgcagacattctttaataaaatttatttttttaaaa

SEQ ID NO: 244544 - DNA, 792 bp, Cannabis indica
aaattattaaaatagggtgtacttaaaaactttttgatgtaaataaaatttcctaatgtacttaaaaaaaatatgacaaaaatactcctctaatcataatcttaaaaaaaaaacaataataataacatcacgctaaaatctaaattgtctcttaaacttcatgtaacgtcagaatatatacgaaagtgagagaaataaaaaaaatattaattattgtgtaacttagaaagagattctgtaaaatgccaagtgtcagagtttaaaaagtccagcagaaagtgccacgtagaaggaatgtaaaaactgcgcgtggaatcggcgacagtggaaagtttctactcataccgtcgacccactaatttctttcctgaaatatatatttgattcttaaagacaaggcagacaaccacgcccagttgtctcgagcccagtcaatagaccgcgttgggacccactttaaatccgtttgcaatctcaaatgtcggttatacccttctctccacacaacccttaacacctaagcaatggaagggtatttacgtaaattagaaaatggagacaaagcccataaaacggctctctttctctctgtttggtttgacaactgccacccaataccagagaggcacatacaacacaataatctctctctctttccatttcttttactaaatatttaattaattacatttttcaaaattaacaataaatattttttgttaacattatttatttatttatttattattttgggttcgattttataacttctttacagagagagagagagag

SEQ ID NO: 244545 - DNA, 874 bp, Cannabis indica
tagggtaatatcctccaaaagcagctatttgtgcttccactaaattgttatatttttgggccctcttctggaagtcttgaagactaatgactcattcttgatgaagttcattctagaaagaggttctcgttcggataccagcttgtagcaacaccaactactatccatcatccacttttttggttttggaagcttcttccttaaatatttttatgaaatttttcagagttttaactggcagttgtttaatgttgcttgaagtgctgacctcaagatttattttcctggctgccataaactatcttttgaaactaacttgcaacttattttagtagtccacagatccaagctacatttttttaaacccacattgcagtggaccctcctaatgttaacgggaaacataaacagttcacgtcattagtgattctcatcactgtcattacgcgattaaatctcgataagtgatcactaggatgtgagtctccatcatataagttcattttgggcattttaaaattctttgggagctccgcttcaagtatgtttctcgcacaagcttcctagtcctaacaatcagactcaaaataatcccccatttgccttaggaagactttggctatatcttttcgagggatggcaagttcagctaggatgcccttattcaatgcactatttgagactagtacaacattcttttttccctctaagtgatttctaagatcactgtgcttggcgttaagtttttgtctcaagttgataggaggatccttgtgacccttcccctatttctccctcgactctaggtgcacagatacgcttttttggtctccccgatcttaaggaccagcattttgctttggaaacctgtccc

SEQ ID NO: 244546 - DNA, 1102 bp, Cannabis indica
ttttaaaaaaaaaaatctaaaaaccaaatttaaatttttttaaaaaaaaaagttcgaagaaaccaatcgttactcattcctatattatatagctattaatatagttaaaaaataaattttatataatttaatgcattaatttttataaaatataatgctagataatactcaagagtaaaaaaaaaaaaagtaagaaaaaagaaattacaacgtggatggaaaagaaatgtccacgtatagaaaacgacaagaatatgacgtagtttgaccataaccgtctgtcagatgaatctgacggcaggcggcacttatactctcacaatctttctctttttaaattttaatttttctataatttaattaatttcataataaaaaataaaaatgtgtaatgtatcaccaatccattagcgcacgctcccacactcacactcattctttttttttttttttttttttttttaccaccttcctttgtatggtatggatgctgctctactgggagtgggacccgactttctctctctttacactttcctaaatattcttctttcctctcacgtcaccgacacgtttcgctatcacacagctttgctgactgggactttcttctgtcccctcgtattgtgccacgtggcttctgtcatttgagaataagactaacgatgcaaagcttatatatatgactatgtattgagtccatgggagagaagagatgggactatgtggaacgatgccatcattccttctttcttcttactcatcatttcattacaagtacttatagattctatatagtgtagtttaggaaatgtatttcgtgatgtacgacagttattagatgaggtagttatttgatctgaagactagaattgatttaagactaattacggttaaaaaatagtaacgtagcttgtgacccattacccataaataaattcacacacattataacgtatcctgagatccatttaccgtacaacgaaatacattctgtgttttatatttctaagcacaaaatcgactgcatatatatatgtaaacacttatgttagaaaaattaataataaacccaagatctatttgtatataacatagaaca

SEQ ID NO: 244547 - DNA, 1606 bp, Cannabis indica
aacacggagggtactaattgtaacataattattaaaagttgttatccttattttttaaataatcatacattgtaaattttaaatttcttcctaaaaacccaaataaataaattcaaaaaaaaaaaaatataagaacacacacacattttatgtggttggggcattaacgagtcttaatgtacgagtcaagattcttatatatgttttgctggaaaagcctttgggaatacaataagcatatattctctagtttgcatgagaaaatattacaagagctagagttcaatcttgaatctgaaggatttgttgggtatttatagtattaagagaattatacttagttttccttttttcctcttaaaacacataaggtagggctgaatccgttaggtccagcccatgaatgagtcgatctactactaggcagatgggatacggttgagttgtcaatattgtgtcctataattgtggacaattaattgttaattaattacttgatctttatttttggtagttttccctttcaacttgatacgaacttttggtcgagattcgtagaaagtaacttccttattctgtgcaatttggtaagcgagaaaactatgctaggcttctaggaacacgctaattagccttccaaaaatgcggttctgaacatgcttccagatatgtgctatccttggcgaaagctcatcttagcgaggaacatagattctttcctagaaggtctagctggacttgggcttggcccaagtttttcaggcctactggtgggctttcgatgatgacttggagtccctatgtccctagccagaaacacggataagatttacccccaagcttctagaatattgtggattgtggtagcttgcttcaatctatacaaagagacaggtggaggctaaaggtggaaccttttcagttttctaaacaaaattaactttcaaagatagcttttatttattttagatttaggatctgacgtggcactgcttcgttggtttgtgaggtatttattgaattaataaggcgtgtgtggcaacttaagcgttttgatgactatttacttatgcataagctttgaggggcataacactatgcactttagcatcgattccaagcaaggcaataaatgttggatgaaagactttttgaatcgttggatctgccttgtgttttcggagggttcatttttttgttgatttagaattcacacgaatcgtgctttgcaactaataccgcttttgatcatttttcttctatttccaactttcccatctacacacttataattaatgaaagccaaaactaaaatctagaacttataataaggcaaaccagtttgaagtgtgatatcgatttctgtatacaccttattttaaaaattatggagaattcaaaaatattctacccctagtgattgagactccactaccaagagaaattacaattatggaatttaattttgaaattaactctttgattgaccacaccaatgccatatcagtaacgcttgagtatctgagtcatccaactgtggagagagtttaactgagcctctcaatcgatgttagtgtgtggtttcctaggccacatttctgttcaa

SEQ ID NO: 244548 - DNA, 1139 bp, Cannabis indica
tacaattagttaccgattttttaaaaaaatcactaaaacttaaagaaaactaatatttacgtggctcgccacgtaactttcatctagtatatataaaaatgttaaagtatgataattaaggaaaaaataaaataaataattaaaagtatttagagagaattaattattttaaattgtatgaggagttttattttattaattaatcaattaatattaatgcttattataacctggataaaaaaattaaaaaattgagagaattaaagaaaaaaaataacttttaagcaattttaaaatatcatgtcatcacctaatacttctatattaatatctatttgtattaaattaataatatatccacccttaacatatcacatatgatatctaatgcaactttaaatatatattcaaccaccataaatagttcacgtgcactactattataaatatacgtattgtaaaaatacatctaacctcatttgtctatcaatactagggttggaatcacgcatcatcttgtgattccaacaaagaagaaaaaaaaagtggtttgaacattcacgtatacggaatcttctactcttttgggttcgataagttttcgacagccattgttggagctactgacctttgactcacgactgaaacaagaataagaattgttatgatttaggttggggttccagttgtgaaggggtatatgtgagatttgcgatatagtttaatggttatttagggttgcaatttaggttgtgactaagcatgacttagattgcaatatggtttaatggtaatttagggttacgatttagactacgacgactgagcatgactaagattgtgatatggtttaatagtgatttagggttgcaataagggttgtagtatcagttgtaatttgtgttgcaatatcagttttggttaggaaattaatggaagcttcatgtaatggtcttgcaatttagtgttggaatttattttacctaggatcttagatctactcacaagtatgttgattaacatcctaaatatgaactttctaaaacgataaaataaacacatataaagttaaagaaaccttacattgggtgcagcggaattaaatgactccttccactcagatatctaacccttgattc

SEQ ID NO: 244549 - DNA, 1213 bp, Cannabis indica
gatgttaatgaaacataattgttagtaaatctatatcctggtaaaatatatccaacatacatagagtcgcaccgagatgacaacaggcatatgctaggctatcaaatagtatgaaaaactgctaccacatcaatacgactagagtactgagtataggctggattcgcagttattctacttttttggatgacgacctataggtgaatttagatgacaattacgtttataataagtaaggagagttgttaaagaggatatatgtgttttatcacatctctctcaaatgagttaatttgtaaggtgcaaaacaccattattagtgaggtgcaagacacacttattgatgagattaaactctatattatcctctgtattccaccattgtttaagatggaataaaactaggccaaagagcaattattttgggagattagtcaccaaaaaaacgagtgatgaaccttgttatattttgtctctgtttcatttagcttattctgcatttattttctaatttatgtaattgtttgattcagctattatagtactttacttcttattttattgatgaaccttcttaaattttgtctctatttcatttagcttattccgcatttataaactaatttatgtaattgtttgattcagttattatagtactttagttcttattttatttgatgcttaataggtgttaattcaccacataaataaacatattcaaaatatataaatatatgttcataaagtatctaatccgaacgatccaatccgcaaaatgcggatatccgcacttgtgcggattgaattggattaaaaaatctaaaatctgcacttgtgtagattggatgttgtttgacctcaaaaagtaattgatccaatccgatccgcacttaattatatatttaacaaaattataatatatatatataatataatattaatttctagtaataatatataatataatctgacctaaatttcaaaaaaaataaaaatctgacctaaaaaattttaaacctaataatcatttcactttcttctctttctcctaccgtcgctttcatctcctaccaccagtcctgatcttgagcccttgccgaccaatctagatcttcagtcaccttaacagcgcccgtctctttagtcacttgagaaatcgacaccttctcttcagccgaccatctttttaatggtatttcttctctctctctct

SEQ ID NO: 244550 - DNA, 798 bp, Cannabis indica
aattactaattagcctttaatttttttgaaagaaaggtaaattttaattagaagggttaagtactactataaatacgatgaaagttcaagatatatcaaaagctactaaattacgattaaatttactatcacaagtataataaaaaaaatatagatcatgtcatgttatgtcatgccataaaaaaaatatgggtcgtgtcgtgtcgtatttagattagtgtcgtgttttactcgcatcaatcaattttcttatacgggctaaaattcgttctttacttttctacattttattttttacgatgagctaattattatttttcgtgttgtgccgtgctcaaactcataaattcgaatttcactcaactaaatgtgtaaatctaagttactgtgaaagtcacaaaaggttacaagtgcttgtctaatattagaaggctctacatcttaaggggtgtaatttttaatgaagatgaattctcatataaatctggttttttaaacacaaaacaatcaaaaacacctgtgtttgtctctgtccctttctggtctgcatcttccaccattaacacaccagctgccactcaatttaaacctcaaaccatcagtcaacaaagtcagattgatagtgttcatcaagactcaccaaacagaacaccattcgctgactccccttcaagatcaactacatgtgaggtaattaatactgatcatatgtctggtagtcctaatgtatctaatagttcactaggtgtatttgctcaacaaaaataagagcttgaccatgagaatgcaaccatggct

SEQ ID NO: 244551 - DNA, 828 bp, Cannabis indica
taagagccattcattccgtgggtgtaaggatccaatggaggcttgaagtggggacgttacagtgaagttcttgggcaatttatcgaagtggatacaacctctcttaaggagacttggggcccttatcttcgtgtccgtattgagcttgatgttacccagcccctgccccgtggcactggttttcatttccatggaatggctgtccctgtttggcttgcctttcgttttgaaaatgttcccgatttctgtcattattgtggccgcttgagtcacatagtgaaccactgccatgagttcctagctaaatgcgactcttcctcggctccaccactactccgatatgttcattctctaggagcaaaaatctgagtaacctcaaacccattctatattgctagtactcgaactcggcttaggcctcacattgatagcccatattctttggctcccttgtcgcaatatagtttccatcaacctcttatcttttctgaaggtttttttcatgaacctccttctaattatggtgtgcaacatttgggtcaaccacaaaccacttctataggtttctatatggctagctcttcccacaatgtttttcctcaccaatcacatgatcttaaccaacctgcaaacctccttccactcaattcagcccctgttacaaatgcaacaccttcatatggccttcctgcatctctccatcaaccccacactacaaataataacaacctcaatgcctcacctgttaccactactgaacaactcaagattccacttcctaagtcctctttgaccacgtcagcttctattgtggctaccacagggggt

SEQ ID NO: 244552 - DNA, 670 bp, Cannabis indica
cttggttgtaatttgaagatgatatctattactgaatgaatattgttgctatttgtgaatattgggcttgcttattggatgaatatgatgagctaaagatgtattggagtggttattatgctggggatttatctaaagatatttttttgtgttcttgcagtttgtgcactattcaaaataaagaaattgtacgttaattatgggtgatagtgaaactgttgttgctcatacaacttccatgtcgggatttgtagcagcaggctataatagctccaccggctatgccgatgagagctcaaatgttgcttctgccgatgaaatatctacttccacagcttccaccattgcagctttttctgctgatgatggttctaatgctagcgaaaagaatgattataattctctaatgcaagcatctgaagccactacaggtgttgaagccatggattcatcccaagctactggctatgatacttctgtgaatggaactgctgaaaatggaactgtgacggataacttgggtggagctatggatgctcaacagtacgtggacggtactggtatgtctttttgggaatgttacattataattttgcttcataagtgggattgctgtggttttttattatttactttttccagctaactgacatctttgagcaagtttgct

SEQ ID NO: 244553 - DNA, 1167 bp, Cannabis indica
gggagaattatattttagggtttataaatgttgtggactttttatttatttggcaatagtttgttatgttttgacatcaatactctattaacatcaaattaaacatgttaacaatcattattattgatgcgtattgatcgacacgattaatccatcaaaataatgtattgacgttgttttttcttagacacatcaataacgccaataattattacatcgttgatcgatatcgatgacatccaataaaggtcatgaaaaaaatttgtcttaacagttctaattaatataaaaagaaacattaatccatccattatttttttatcaaataataagagaataatatcgtatcaatatctatcacctataaacatataattaattaaactaaaaatctcattatagtgcatacatacatatatatatatagaacatagaaaaagaggagcatttgttcctttccacttgagtggatatatatatatgtatgacataaatatatatattttatgtttttatataattcttatttagacatgattcttctctcatcagcagataagggacatagcactattataagattaggtttccacattagtatcaatattggccatttcaaaataaaataaaatgttgaccattcttgtggggccatctcattatagcttagcttcatcacaccatagattgatgacaagtggcacaaatgactctaaattgatttttttttaaaaaaaaaaatctaaaaaatgagttatatatatgtatttaaaattttaaaaatttgtagtaccctatatttttaataatttttattttataaaaacaatattttacttatactaattttgtttgccacaaaaaataaaaattatgctagtttttttaattttttttctttctcttcaaattcttaaaaatatacctataaaataaaaataaaatatactttaaatatcataataaaaaaattatataattttttaaaaaaagttaactacataattaaaaaaaaatctaaaataaaattaaaataattatttaaattaacacaaataatataaaataaaaataaaaaaaaaagtaacgtagagtaattttaaaatttaattaaactttaattatatatattaaagtagtattctataatttttagttgtaagtgtc

SEQ ID NO: 244554 - DNA, 951 bp, Cannabis indica
cttcttgtgttcttaggctcctttgtctgaacgttttactttcctttataattgtttgggaatgttctttctcaaatttatggttttggcagtataaatttaaaaagcatgcaagctgcgaatttgagcaacgtaatccctgcaacttctcgctcatcaaactacattgccctcagatatggtgatataccttcaaaagctaccgtgagtttagtttatttctagaactttgaatcttggtatcttttatcttatatataagtcgttttggagactttgaagttgttatggtatgttaggttgaattggacacattttgcattattgagaataaagatagcatgctcagtagctagctacttttcatttgcataaattacattaagcaggctttaatgaataattgacaaaagtaacattttttcttttaaatcttccgtttaatattgataaagtttcagcaagttatttagatgcatttatttgtgcctagtattcttatcacaaactggttccagtacaaaaatccttgaaaactgcttaaacttaatttaattagtagctgattatagagttttgcatgatcacctgttagttctattcctaatatgacatcttttgagtagggatttggagtcgagcggaatccatgctgcagccgttatatggttgtattccaatatggatcagcagttctgtttaatattgaggaccacgaagttgaaaattacttggaattagttcgaagacatgcttctggattacttctagagatgaggaaagatggtaagctttgtttaaaacatgacatattatgattaaacaaaatcacttgccattttagtagattgaatctgattgctgttttagtatggtgggtagcaattttggaagtatgtgggtagaatgattttttattccttaaccaggtagaatgaggagttgataatt

SEQ ID NO: 244555 - DNA, 1540 bp, Cannabis indica
ttttttttaattttttcatataaagaaaacagaattattattcatgcaaatgggacaaaatctattacattaaagatataaatatttatggagtaagattaacaaaaattagcttacctagcaacctcaactaaggtttgaaaaagccatcaacaattaagtataaaaataatatgaagtataccaaattttttaaataaaatgaatatcagatagaattcacctctcaatagttattaaataataaataacactactaatacaattgtaagggcaagttcaatggagtggtatggtcgtatgacggtatgggagtgttacttatcagaagtgggaccaggtgtgggtgaggtggaggagagagagagatttgtaaaagagcattgctattacgcattagtggtgactagtacttttgcgacatgtcgcgttgcaattggctagcgatactcccctattatattaaattatatgagacccgatacttagttaaaccaatagcaatattgatacataggagggtgctaggcaccactggtgccctttagcatttctctttatgaaaataacatggcaaaatggtttatgtttagctacgtagctctaccatttgatttttattttaatttctaaaaaaaatactgattggttaagtatctgagagttaatctaaataattaagaaaaataaagaataatcatatatatatatatattttataaaaaaatgattaagattaaatctaatcataatttcaacaaaaaagaatgattttattacaaaatgatatatatacgttgttgggctgggctggcagcaacattagtggggacgttttagtccaaaaaaaaaggaaggtgtgtgtgttgtggatattttttggagaggagagagaataataataataataatatgtataaggtgacgtggccacgtggagtgggacccattctaggtgtttgccactcattttgaaggggtctctcctatccagctgtaaacttacacgcgtgttgcccactcaactcgacgattatgtgggccccacccttttgctaacttcaccacctcaacaatcaccactttacttattttcatttaatttgataatttcaatttcattatcttttattaagttaagtgagctcattatcttatcaattcattttatttgtcggaaatttttatttaataagagtagtgacaaaaacatatttttgagatttttttgcaaaagtgtaatgttttgaaaatattgagtatatttatttaaaaaaaaaaaatatgagtatattaaaaaaaacaatgaataattttattgaaattaatgaacaattttacagaatataaatagtcatctatattaagtattttagtgcctattaattatgacaatccaaaatgtacataactatatcatatatatatgagtagcaaatcctttataacatatcgacacttgaaaatttataagaaaaacctagtaaaataaccttctgatctctacattatacatttatcagcaccagaaacaatacta

SEQ ID NO: 244556 - DNA, 3434 bp, Cannabis indica
agagagagattgagtttgagttttgtatgaagaatcttttgtagatgaagaatattcttgggtaagagtgtgagagttgaaacactttgagagaactcaagagagaatttgtcttaactgtaatgtacttgttcttgctcaatcataaagaagatttgatggtgttcaagaactagagtagagccatagatcacatcgatctatgagacttgaactagtatatatcttggtgtttatttattttctacatttattatttctagttttccatactctatttttcatccaattattgtccttaatttgttaatcttgtcattactaattgtttgattatttaaagtttcatcgatttgattctacactattagtcgtaattttctcacaaatcaaagcttggtatttgatcaagaatgcaaaatcaaaattctttttgctacaattcttgaaggaaactttgaatatcatcaatagcgagattcaaattggagaaacttgatggaacgggggactttacgctatggagagaaagtttgaaaggaatcctagtgcacctgaatgtctccaaggttcttggagacgagaatttattggaagaaaagaaactagaggaaaaagcataattggaggagatggtgtaatacacgatcatcatgtatctgtcaaatagtgttcgaaggaaactcattgtagaaaagacatcaaaaggagtttggaataaatttgaagaactatacttaaaacaatcaatttctaacaagattaatttgctagagaggataaacggttttagaataatttcttcactcactttatatgaaaatatttatagatttaatgagattattgtatgtttggctaatataaaccacaacattgatgaaaaaagcaacgccataattatgttgagattacttccaatcgcatatcatgaagtcaaggtagccatcaagtatgacagagatgtgattactttgcaagatgttcttgtcgcacttaagtcgaaagattttgaactacaattggaaaaggaatccaagaaagaataagtgtacttggcaagaggtagatcacccaagaaagtaagtttgaatagtaaacaccattactctcaatcaagatcgatgtccagagggaaggaaacaaggaagtgttacttctgtggacagtctagacacttgcaaagattttgcaagaagtataaggagcaacaaggcttcaacaaatctcacaatggagataggaaggataagctatgtcaccataggaaagattcagttatagtcacggaagatagtgacgactgctccatagatggagaattgttctctatctcaaaatcttcaatgaatagagagtgtattcttgatttttgatgcacttatcacatgtgtccaagtcaagaatcataattttaattataaattagttgatggaggtaaagttctaatgggtaatgatcattcatgaagggtcattggaactaggaaggttgtcatcaaacaatatgatggtggaattaaggtgttgacgaacgtaagtcacatcccggaccttagacgaaacctcatatccctagatgcacttgaagatgaaggatatggatacaagtccatacacgaaagcttgaggataactaaaggttctctggtagtgatgaaaggtgaaaagatcaatggtttatacattctacaaggagaaactgtcccagctagagaggcaagtatagtgaaagggctagaatcggatatgaagttgtagtatctcaaacatgaacatatcagcaaacaaggcctcaaagaactgcacaaacaaggtataattgaaaattaaaattttgtgccttaccattttgtgaagcttgtgttttagggaaacaacataactataagttcactctgacaaggcacaaaaccaaaaagatacttgaatatgtgcatattgatctttaggcgctacacaaagttcctactcactacggtaagcaatattttctttcaataattgatcattatagtaggtgtgttttgacctacttgctagcacctaaggatgagtgtttggaacaatttagaaagtagaaaactcaggtggaaagccaaacagatcttaaaactaagaaacttaggacgaataatgagtttgattttattaactccaaatttgacaatatgtgtcaagaatttagaatccgtgggcataaaacaatagtgaatacctcggaggaaaatggtgttgctgaaatcatgaaccaaaccttgttgaacaatgttagatgtgtactattcaaatctggattagaagaatcattttgggggaagctctagcaactgcaacctatcttataaatagaaacccaaattgagtcataggcttgaaaaccccttatgaaatatggtacgatagatagccaaacctagtgaacttaagaacatttgggtgtacaacatatgtacaccaatctattgataagctttaacctagatttgtgaagagaactttcctaggttatgccttaagaaccaaggggtatagaatttacattttgtggaaggagagaccaaaggttgtgatcgcaagaaatgttgttttcaatgagtatagaatttacattagtaggcagccattaatgatcgcacaaggcagaccaccatactaataagaagggcctaccaagtcaccaatcaacaatcggctactacgtccagtactcccttggacaggttagaaaggtatgaagttgggcataccacacaaagtctcaatggtcaaccatcgaattcaaggccacaggtccaacctgtaggccaaacgatcgacggatagatcctgccatactgtccttttggaggagttatacacagtaacttcaccactactaaaattccttgccaacctgccggccaaacaactaagacaccaaggtcgcctggtacttcagtgtttgataggttggcgctgcacatgaccttaggaatgacctaaatcaaagaagggacctggacaaacaatatccaccaactgtccaaccaggcatccgagcccaagatccagttccaagagatcccaatgttacacaagctggtcaacaagccaaaaaaaattcatccatttgtgcaaacacaactggatcaactaaaaatatgttacaagggcctgaccagcccaaaactcactaatctttaactcgactgggcatgcatatcacccttctcccctgagattgaagttcaaaatgtcatcctggaaaatgtatacaggtgaaaaagatccttacacacatctaaagtattttgagatgcagatggacttgcaaggggtaaggggtgatgtacggtgtgagatctttactgccacactcacagaggctgcccagcaatggtatttcaagttgcctcgaagaggtttaactcatggaatgccttctcatcaga

SEQ ID NO: 244557 - DNA, 1793 bp, Cannabis indica
taatttttttttaataatttataatgttgaaaataattatttattattagtgtaataaaatatttaaatattattttagatgttgtaaattattcaaaaaaaattagtaaatttactaataattctatacaactataacatacttaattataaaaaaaaaatagaactaaaaaaatcacataaatatcaaactgcagtctatatataggatatttttcattaaattatagttcatttattacttcggttcttttcccatatcattacttataataagcttttggagtacatcgtttatttattttaacattcaaaaaaaaaatggtctattttttaattattatatatgttgtagttatttgtaattatttataaaaaaaaaaaaaaaaaattactgaatgatttattcttttttctcttatacatttggtaaataattacttgaatttattttatatattacaacttacttataattttttttgaatatttataagtgatattaaataattacaatatacagaattacgaatttaattgaaagactcaagtaaatactgaaacttgtaagtgattactttttttaaaaaaaataaataaactgtgtataaaataagagagttaggcctctcggtcattacaaaagataaggtcaggtaaagaggagggctccactatactcgaaacattctgaaaagcccacttaaccacattatgggccgcaaaattacaacatctgtaaataaatgagaaattacaacataaaaaataattagagagttgattacaaaaattattataattatcaatgttccgaatggagtagattcctttcagcgctttgataaccttcttcgaatcactctcaaccaaaacaaagcagtgctttatcgaaccagctgattccaaacctaactaacacgtcgcagcttcgccaattagtggatccgagaagttgagcatgttagctactatccacaaaattattcccgtgtgatccctagccaacgccgctacgcacatggactcgctaccaaccttaacatcacagttgattttgatccaatctttaggaggaagggaccaagcaggagacaccataaccaacgccggtgcaaataagcaagatgcataatcagtataacataaagagatggaatcaatagcaagtttaatgttactcgaggagtaattgtgaaccttttcattttgggtcttccaaattgtgtctactacgatcgaggcataaaggaacaacttttcagaattcacccctttcgacttcaagttccatagaaaggttacccaatcccaaactcgacctcctgaatcaagaatcggaataactccccaaggggaagactgccaaagatggcacgcaaagttgcaataaagaaaaatgtgctccattgattcctcaccttccccacaaaaggggtacaacacctcttcaattctaattctctgagctatgagggcacggacaagcaaagcatcagaaaaaatgctccaccaaaggaccttatgtctctccaaaatgtttgagtctagagtttgttccacagggctggagcaacaacgcatgtcggggcactttttaaagcttggaccagataaacagacttagtcgtgaataaaccattcggctctttcgtccaaatccacctgtccctcctaaaaccactgggtttccctcctttaatgatgttactaattgtttccgaggtaaacaatgcctggagtttaggaatgtcccaatccccattatcaaggagtaactctgcaactttagt

SEQ ID NO: 244558 - DNA, 1214 bp, Cannabis indica
ttgctaagtccatatctaatgtgcttacatttaaagaggtttctttcatatttgaactgatttttgtagattgtcaagagtcactaaatttacactttgcaggcacaatataatgtgtatgttaacaaacctgagtcatgttaggtgcaaaaatcatggcaatgtttcgtgcattcattttgttgtgcttttcatgttcaacaacatctgtcatcaaattgatggcccaatcgagcaacgaagcttcagttgtaggcagttggtttacaagcttagtacagtcatcttctgtgttgcagtgtacaacctgttctggtgtgagtgaatcaagtactcctgttgggagttccctaaaccatgcctgcaaaaacagttaaacactcaattgttatttttttttttgacatgaacactcaattgttattaggaaaaagaaaataagaaaaaagttaaattgatacgaagactgactaatccagatgattgtgagataccactcttctggtcattccttaagataaatgaataccttttttgcaataaaggcaaagagagcttttgtataacagaaacttgcattttgaaaaagaagagaagtaatttactagatgtattacttgtaccttaatcaaacctgctaagcaatgaacttcaattccatgtggcactatgcctttgttcaatttgtcccggactagctcttcctggctattctccccagctatccgaaaaatcccttctgccttcaaccacaccaggaacaaataacatctacatcttttattttattaataagaaacatttgatgcagctattagtttagattgtaatttaacttacttgaagtcctcctccggcatataatctcttctgcatcattagaagaattgttgggacactgtttcctctaccatcgtaggtacattgcattgacttgggggacaccccaaatacgcttacactgatgataaatacagaaactttagaaaaataaacacactcattcatataattctagctaaatccatgcctacaatttcagtcacctcaacataatacacttcttatgaaaagaacataatagagttagtataaaagtgaagattggttccttaaacatcacatctcacaacacaatatctgttcaaaactaaattacagtaaagattcattcttaaaggattatctttctcaatatttatcaaatcttacat

SEQ ID NO: 244559 - DNA, 1432 bp, Cannabis indica
cttaaaaatcagtatacctttaatgggatgaggggcaactaaaatcccgacgctcctctttctcctcctgaggccccttcctcttgttggggtcgattgtttggccttgagcttgagtaggtctgagtttccctggggttggtaaggtaaaatggggccacccaagctcattgagtgctttacctcgggccatcgacatcatacgctctactgaaatagattttgcggaaaaccagctatatttttttttcaaagaaaaaaaaaacagtacaaagaaagagctttttaatcagggtgcgcaggtttggaaccctatacaaggggcgtttcctttcaaatgacaacaaccccttcttgctgtgagggcgttgcacgaaaccaaaccgcccttgaccagggtagagctagttggagtacattacctagccttttttttttctgcatcagcggtggtcccaccactggaagcagaggaagcttaccaaggattcggctctatcaagggaagtcatgaaattctttcactctgttcctcacttttttagttgtggtgaatagagactgaatcaataggggttgactgagctttaaaagaagaggcccgggtgagccgattctcccagcgctcggggaagggagtcgcagatcaaagccggagctcaaccatcagacacaccacgaccagattgaacacctcaagatccactactccaggagataggcattcaaatcactatcttcaaatagcttatataagagaaagagtggctcgtgcatcttttcttctttcagacaaacaagtctagtaggcagcataggagtcgactcggcgtcagcggcttcgtgccacactggagtgatccaatatgtggttccgcacgttccaccacttctccgttcatttccaatactgaatgtgaaacaccatgagcagcaggatgttgaggtccggaattcaaagtgaaaaagctacttgcaaacggctgctgaatttcttattgagaggttgactcacctaactagacccttacgttttgaagcccgattcaccagttagttcaattactcaattgttaatgctattgaccattcttctttctgtaagtgatgattataaaaataatctaaactcttttcagatcataaatgtcctaaactatatgccatctattgcatctctaagatagaataacatataatttgcattaagaaacaatctaagggtcacacaagctatatgaatactctcatttcacatcaaaacatgtgtttgttcacttagagcattcctaatattcacttttcatatttcaaattaggatcataaatcatgttaaaggtgatcaatctagaacatatatcaatacgaatatgaacaaatcacaaaaatccaaaaagaagaaataactgttggaatttattttaccacgat

SEQ ID NO: 244560 - DNA, 844 bp, Cannabis indica
aaaaaaagtaaaatattatatttttttagatgatgtaaaatgtgtaaataatgtttgggttggttgcaatgataaaagtattttaatggtgggacccaaaaaaatatcaaaatagttctaccatcaataacatgccaattacatttttcttattttaaaagaaaaaaacatatatatttattgtattagtactggtgccaagttttgatatcaatgcaactatagaaacataaattatttttcatactctctcatcaactcatttggcacaaggacctcatagtcttagccaactctaatgagagttgtccattcatttgactaaaaatttgtgggttatactatcttatggaatatgagagagaagagaaagaagatcgattaaaaaaaaaaattaaatggacacttgtgccccttaatattttgaagggtaaatagtgacataagtactcaaagttttatgtttgtaagcggcataaatccaatgtttatttttaacggcataagtacccaatgtttataaaactgtaattttttcctaattttgtcagtacagattctgatattgtcttaaacaaggcacatataaggcctaaatttttgatcatcggatttagatagaaatatatagtatcagttacttccaaatattcttttaataaattcatgtattgacaaaactggaagaaaattacagttttacaaatattgagtacttatgccgctaaaaataaacatgggtttatgctgctaacaaacataaaactttaagtatttatgccgatatttactctacattttgaattaaaaaatgaaaaaatatatatataattggctaaataca

SEQ ID NO: 244561 - DNA, 1162 bp, Cannabis indica
aaaggaccaacagacaaacaaaaattgggaccttaggtattttcaccgccaatttttgaggttgaggactaatcggcatcaatctcaagtttttggggacttttgccgcaattatcccaaaaaaaaacaacagtataatatatacacaattacaatcacaatctattctattcttctgtgagtgttgttgggagcatagaacagaagcatgaaagtagagtaaaaaggggtgaaagtcaatgattcaagattggggtctacatgtatatgtatataagatgttgatttgagtttggtatggcaacttcaccaaccaaataattctttgaatttttcctattcttattgattgatcaatttaactatctttggtgttctttatggatattaatgtcaaggcatgatgatatttatcaagatcaaatctagattaataaagtcatcaaataagacttcattaatctgtaaaatgtatgtgaccatttgaaaagattggtcagattgtgattagagaatagagagacaccattaattgtaatgtttggtgtgagttgtgagggtggcactagttccttctagtgattaaagagattatgttacataatctttggtgaaagtgaaatcataggatgaagataatgtgaaataagtagatcttttaggttgctgtgtatgttttattttatcatggattatcacaggaccgactagaattgcttaagccataaaaaacttctaataatccgatcaaaagaaagaacaaataaatgattttttcttattaacagttttgaaaaattacaaaaatcacgtatacagtttggtttgaaaaaaaaaattacaacccgcaccacccgcaaacagttacaaattgttgtcctaatgaatcataatggcatgtttactaataagtaatgagaatcaatagtaaggtaatcattcccttacatttgtttacttgcattattaaaattaaaaaagggagaagttgattaaataagggagaaaagaaagggagaatttctcccaccaattttgtaaggaattcattaagggtaatggatttttattatttttattttattttttaatattaaatatataatgacaattttgtcctttaaaatatgtcttgcaaaataactaccatataatatagttt

SEQ ID NO: 244562 - DNA, 1209 bp, Cannabis indica
ttttgggaaggtcttactatcaatgtggataggtgaagggtttgtggagagaactagagaaaaagaatgggatggaggagaagaaagatggatcatgggttaaataaaagaaaagcctagactttattgtgacgatatgttgtcacagtaggtataccaaactccatcattttactcatctattttttttttgacaaaaataacagaaattattatttgaataatatattgcgacaacatgttgtcgcaatagtctatttcataaattcattttttggcgcagaaactttttacgcggaattgttccctccaaagtattttgacctctattgcgacaaaatgttgttgcaataagtcaatatattttggaggcaaatatttgtcagcttgcaagtttatcgccattttaatttccaacaatttatcatcgcaatagaaattatatagaaaacatagcctccactgtgtccattattcgtcgcaataaggttccagaatttaaagtaaatgatacaatttgcccttgataaattaaatgaagtggcaacaactttttgtcacaagaaattgcaatagagacaaacatatagttgtcgcaataggcgtcgtcgcaatagatgtgttttcttgtagtgtctgcaaaattgtatatagcatgattttcaaaatgtaagcgatattcatcaagcatacctttgatacacattttgactagatcttttttagccatggtttcggcacagtcaagagctttttctcgaaaattttgaacataattaacaagtctttctctgaagctttctctttctcctgacaagtcagctatgttccatttatcttcaatcatgaagaatttggcgcagaattgagacaccacatcgtcccaactccttacacttcctgaaggcaagcttgcataccaagagtaagcgcgatcagtgagagattttgaaaactctcggatccttagttcgaaatcaagcattcctgctactggtatagtttaaatatctcaatttaacaacagatttgacctctttgcttacaatctcagccaacttacatttttgttcaaacacgcagctattacagtttgtccaaactgcatacaaggttgctaaaataatagcattcaacacctactccctaacattgtttgaaggcctagacaaccaatttctaatgttgtttggccagctgaagtaacca

SEQ ID NO: 244563 - DNA, 537 bp, Cannabis indica
aacctggagattgttactgggttggtctttgttaggcattttgtgcttttgttgacttttttggatgttgtggcttgactttgtttctgggtaatgtttgtttttctgtgatttgagttttgtaatcttaagtttgaaagtgggaattatattgcttgtttttgatctggttccatgttttaatgaaacaaattagtggacgagatttctactcttacaagtcttattatccatatcactgaatattattcaaacaaggacctttgttatttattgcctactatatttgattcttggttgtttcatttagttacccgtttcagtttcttaattttggattataggtttctaaacaagttgtaactaatcatttagtatatttttctatcatccacaaaatattacttcatttaattttctgaggattatgtttcaaatcgacaacaaccttgggtcttgtttctaattttgatctgttgatataaaatacgttttctactttattagctgagatgtttcccaatcttactcacacct

SEQ ID NO: 244564 - DNA, 1211 bp, Cannabis indica
atagaagctatagattttgtatttatgattagcgctcctactcatttgaactatcatattcccaagatgtatgtgttcagtcgtacgagcttcaacgaacaactctaagaacataaataacactcttgagatcaaacctaaccatatcaagaaagaacataacacttatccaaggtgtaagtaaactttatcactggccatcacatcataataaatccagtccactgatgaatcatgggacataaactgttgaagcatataatcacaattaccttccactgtgttgacatcactgtaattgtgaataactatatgtcttggatttaatagaaattgtatattaaaccataaacatgaaaactacatgtaaacataaatgacttctaatcttctattaataacaaataagattatattgaattggttattatttagggcataaaatcccaacattgtattcattgagttaaaattccgctttatactcgaccatttatctttgtttttattctatttcttgcatgcacatttggagaaatttcctcaaaaggatgtcacacaaacatctaatggtaccatagaagcatttttagcagaacttgattttgataatttatgagaaggttgttagggggacatgataattcaagacatactcaagagaaaacaaaggataagaaaagcaacatggaatctaaaaaagcagacattcaaaggttttgattttttggtgtgatttttttaagtgtgaagctcacccattggtcacggtttgagattgataaccaagtttatgtgtcctactcttcactatttgtgatgatcagattagtaaataagtttatgtgtcctactcttcactatttgtgatgatcagattagtaaataagtttatgtgtcctatttattttaagccaaacatgatgatgagattgataaccaagtttacgtgtcttatgcttacctatttgtgagtcacagtttgagtatcgattgttgttgtttaacaagttgtgcactcacaaaaattttcagccaatttttttaaaatcacacagattttatgccaatgaatttggctagatcaattttttatggtaagctatttatttaatgtgactaataacaataaaactatgtcggctcgtttggaacgccgtattaggtcgtattgtattgtattgtattatattgaattgtattttatgtaa

SEQ ID NO: 244565 - DNA, 779 bp, Cannabis indica
gagagagagagatacaagcataatgtatactgtactagatcaaaaaacagctaataggataatcaatatatacacatgaatgatttctttgctaaagttatcatcatcatatataccagcttcattcagtacttggaaaaatgtaaaaggatctagtttagctgtgcaagatgtaaacagttgttttattgcccaaagtgcaaccaatgattcaccgaacaaagggtaaaggccaaaataattaacaaaaacaaagagcgaaaagagcttcgcataaaaactattacttacaaatattgtaaattcttgagaaggccaagctgtggaacaagttgaccagacaaagctgcatttccaagatcactgcatagaccgtactttagtaaaaggtccacgatattttcttaaacaaattcactaatttagcagctattgtgagattatctatggcagaaacttacacccttatcacactattatcattgttgcaagtgacatgaaaccatgtacacgggtttacaagggtgggatcccaactctgcagaacattgttgggatcctgtaaattggacctcagactatgcaaggcatcacctgtttcaaaatgaatacatgtataacaattaagttcttgctgcaaagaatgtacatatgaaaataccatatcatagtctgaaaaccgcaaagctaaaaggaaaattccatgaacatgacactaaaagacagaaactacaataagaaaaaatgggaaccttataaaaatattgacattctaaaca

SEQ ID NO: 244566 - DNA, 1200 bp, Cannabis indica
gcttccatcattgcatgcatcgtgaaaagtgctcaacaaatgaaaagtctgctcaaatccaattgctaccattttcgggcatcccataaaacacgcgctcagcatgcgcgcaaaactcaaaagtcaacatttaaggccccgacgaaagaacaaaggacataatacctcctgacagggacacttcagttggcggctgatgacatgatgtaataaatagttcgtatttatcgcacgtgccaagattcatttaggaaaaaatactacaagctcccggaccatggtacgccctagaagcttggggttaaatgtattctgtattttcgtaatcatgacacatggattttaatcaagaaaggctaagaagtcattagctggccgactttctcaactgatgctttgggaggacaaaggccccaactcacggaaagggcctccgtgactaggagtccctcgactaacagtaatgcaagagggatccgtaagctgaagtcttcccagtcccaggaatcaaagccaccagctctcgtgaagagtatgggatttacccaaaaggatcaaggcatcttgaagatgcaccaaaacgggctacacctttagcccgcaaaggctctgcctatacgtgttagactacggacccagtaaccaagattttgtaggtacgacgtcaaaggttgtctcccacaacatgctatcatacaacgcctgggtgtctcattgtacctcaccaaatgatctaatggctagggttaagggaaattcaaaaggaaaagccctaggacgacacccgtaagaggtccaactcgtacaatttgacacccttaaattccatatgagaaaaattccacctaccgatccaacgattggattttgccctaacgatgatcaatctaaggcagcacatatagagaagttggtccataaatgcccctaaaaagcacaagagaagaggggactttttcaaaaaaaaaaaacaaagagaagactcattcttcaccacccttagcaaacacatttgtattaagccggatgataatatacctaagaactctagaatattcctacgaagcttcctcttcttcaagagaaacatgagggaaaggagttccagtccattgcatttgtatttgtataaacagttaccaaccgttgtgcctaataaaatagactcgtggactaagatagttaacgcatgaaccacgt

SEQ ID NO: 244567 - DNA, 1967 bp, Cannabis indica
tgactattttaatatataatctttcatcatttgtttacttccaaaaccataaataacatattctattaatccatttgttacttaaatatttatttcatttaagttatttgttgttataatcttccttttggtttattatatttggtgagtattatgtcaccctacaaaggttagacaatagacaatgatatccttggactttaactatgattgcttttctcttgttaatgtttctaattattactttcaataatggctatatatcaactctctagctagctagatagctttgataatttccaacttattttcttcaaactgtcctaagtagtaacaaagggttatgattttgatttttatttactatactcatgttttgatatgatctctatcgcttttgcatatagtataattttttagttaatttattttttataattataaacgcttcgtataatttttttaaaattttaaataatttataaaagtaaaaataaagtttaaataactttttaccacttgtataaaaaaaaacaagcatacatgtaatagattatttaaacattattttctccattttttaaactattaggaattatctaaatatttatatgtagttttaaataactacaacatgtattattattaaaaaaaattaattttaattttttttaaatgttaaaatagataaaaaaaaatgtactaaacgttcatttaaagtggtgtcttacaaatttaccatttctttttgtttaattatgtgtgaaaagaaattcccctctctttctagaataataagacatggaagaagtcataatacaatatttgtggctattattatattaaaacagtcttttcgggaatgcatttttataatagattaaatgtatctattatacatatatattataatattaggttgatgttataattggttttatttttagttaggtttactagatgatattaattgtaatgttttaatttttttttaattaggtaatggattttttttagctattgcggctataatagtgttctctttgaatcagagctgggtgtgagctaaggcaggctaagcctgcgtctagggcccacccagtctagggtccaaaaaaatatttttcatttttttagtaaatttttaaaaatatcacatgtttttttaataaaaggcccaataattgtctttctctaaggcccacccaatctgccttgctttggatgcgattttacatgtacaataaaactcaagtgggatatcgtagtgaatcgttgtgtgcccaattgagcgaaattatctcgtattttaattcaaagttaaaccaacaaacttaaaaacatagttaaaagtatctataatattttaactatttttaaatttaaattaaaatttccttatataaaatatttacataatttttatttttaaatatatataataatattataaaattaataaaaatattttgttaactaatagtatatacatagataattaaaaaaccataattaaattaagaattccattacataacaatatataagtttgatatataagtttgttaaagtatattacattattattattattattattattattatttccaaaaacttcatgtatattacatttatacattattgagtaccatcaaatgagaaaaatcaaccctcccgacaaaaaacattaataaaatcagaaaatttaaccccaagtttactagctaagaaatatttaaaaaaaattattgattaaatttaaataactgttacgaatgagatatctataaactaggaaaagtttatagcgatgacaacatcatggaagacaaagttaaaatagttaaagattaagagaacaaaaaggaagaaaccaaaaatggtgtcaaataatatgatgagaaccaaaatctaataacagagtttgcacgtacggctgcaacaacaacaaaagagacaaagat

SEQ ID NO: 244568 - DNA, 930 bp, Cannabis indica
ctataaaattcttgtgtcttttatattgctgtattatatatcgattgctataaatcacttatcgcttactaaatcagactcgttatcgttggctaaaaataaggtcaacaactatgccatctcccgcttcaaaacatatcttcatggaccagttcaaacttaaggaccttggaaccattcgattcttccttggtcttgaagtttgttgaacaaaaaaaggtatatcggttggtcaaagacctttcacactacagttactcaaagacacggggtacataggagttacgcccgcttctattcctatggaaaccaacttaaagctaagcaaagacaaagggaaccttctcccagatcccacgaattttagaagcctcattgacaaattaatatacttaacaagtacacgaccggacatctcctatgcggtcaatcatctcagcgaaattttattttctccttgggttccacatcttcatgatgcacatcgcattttacaacacttaaaaacaacccctggacaaggcctatacttcccatcaagcacaacaccatctgtctcagcttatgctgaaacaagtctatccccgtccactatccagatctccttttttttggatgttgattcgaggacttgtcgagacacaaggagatcaatttttgattattgcctattctttggcagatcccttgtgtcatggaaatcaaaaaaacaacaagctgtatcccattcatctactgaagtagaatatcgagccatgggaaatgctacttctgaactcacttggatcctcactctcctcaaagactttggcatcaatcattctactccagcactgtaggaatgtcaatggggcaggtcggatctgatttgactatgatccgacctgttccagatcatgtatggatttgccccgccccgctggatcagat

SEQ ID NO: 244569 - DNA, 706 bp, Cannabis indica
cgaaaaaaaaattaaaatatagttagtaataaaataaataataatatttttaatattaaatatgagttgtaacttagtgataatttgattaacttaacaaataacaggttgagagttcaaattctaatagttttactttttcactggctccaatttttatgtttgtctacaccacggcctaaattaatataaggtcagccctgcccctatactgcccagttaacattatcatcaattaaacttaatttattatgaaacacaaactttttggtcattaaaattaaatttaccaaacataagtttagtttaacgttgtccccaaaaaatttgcttcccttaaagctctttctttttttaaacaaacacaaggctctctatgaaatatacaaggacgtcgtagtcaaaataatgctggtactcttaaattaaaattactagaagaataattggcatgcctcagtaaaagtaggctatgagaataatatgtaaaaatattgatgaaaataaaataaaataaaatactaataacaagcaaggaaaatacctcaattatagtgtgggttgaaaacttgaagaggagaagactatatataactggactaagctacttctgtctttgataatgaaggatattggagaccaccaccacacttctacacttatggctcattaatctgaaaccaaagagataaaagtaataacttga

SEQ ID NO: 244570 - DNA, 1317 bp, Cannabis indica
actctttaaaaatgctataattatgatttcacacattattatttaatatttatcttaatttttagcaacaataactttttagcttcaattttttattaaagattaatgaatagcattgatgttacaacatagcatccatgcaaatttctagaatgacatcatcttctctccaatggtatagcatctcaatattttgccacataatatgtcaacctcaccaagcatcttctaaaattttaccattggagatgctcttagaagagtgtaatcaatatgtgcattgtagggtgagaatggcagggttaaatttaaaatagaataaaaagaaaatttcaagttaattaaaaaggcgaggaaaatttcccaaaaatttaaaataattaccccattaaatcaattacagctcattatgaaacgtggaaattattttgggtaactggttccataacatctaagttcgaacaacttagtcacaagctcaaaaattgtaaacttgaggggcaattgtaagtgatcaaaataatcttgaaggtaaaaaagtataatcgaaaaagaactaatgaaataaagcgacaggaatgttactgaaacacactatctcactcaaaaaagggcagaacatgaaagatagagcttaaccagcttggaaagctaagcaaagctcaaggaaattagaggcagagcttgaggggctcgaagagcagaagtggataggaaagcacgcaaagacaagcgaagaataagtccacatggaccaatccgaacgaaggaaaggaagggaaccaatagttcatagaaaattacatcgttcaaaagggagacgaattcttgttcacaccaaactagttaaaattctatcggaatatatcctcaaaacattttgagctcaaaaaataggagaacaggagagtgattagaggaactgagagaaaattgtgtgaactgacaaagcaaatgtatctcaattagattcaaatttagagtaaagaatttaatgtcataatataaatttgttgatgaactaatttttagcatcaacattatagagcaatattttcttttaaagaattactaacttatataataaaaaaataaataaataaccgatctaaaatgtttaatctaatccacactattaggaattacaaatttgaccgattgtatgaatttaaagggaattttgacattttatgctaaaaaacacacatggtgtttaattataccaccctcccaaaaaaaattcaactatgctaatcttttagtgttaaccccaaaatgcccctctcctcaaatccaaaaagtcagcctcctctctct

SEQ ID NO: 244571 - DNA, 2008 bp, Cannabis indica
tgaagttaaacaagatggtaatatcgggaacatgggtcaccattgtctctttcattagatggtctgtggaagaacataacaaagatgtgaaagttgaatgtagaagctcatggataggcatcgaaaggctgccattacatctgtggaacatgaaaaccatgaggagaattggagcgttgtgtggagggctgctagatattgaaaaggatactacagaaaagagtttcctgcatcatttgagacttaaattggaagggaatgagcatggtttcgtaccagcactcatctcgtttcataacgaaggcttggaaatatcactgaaattattcaaattaaacgattggggatatagattcagtggctttttcaacattatttggcatcaagattctgagttatataaaaaagaaaaagaacagaggatgacgaatgagggagaggcggatttgattaaaggaggagaaggaggcgagttggctgaggggattcaagcgacaattgtgtcgtccgagaatgtggcagaggtggttggcggcgacgagacaaatagagagggaggcgatcagagctcgtcgtcagattttgtgctacagtcggcggtggtgacccaggcgaacgaggggcagccaaaatctgcagattttccgtccatgactgagacgggcgaccaggcatcggtacagcagtcagagaaggaattaatgattaattatgggtgtgcataggagtatgccgattgagtgtcctcataaaaattcaagtagtggaagagagtcgattcctcttcagcatgtttttagccgtttattgaatagtctaagtgagccacgtgtgattagaaacccttctaattttttgaacacgtgtctttcttatgattcaatagatagaattaaatttggaagggttgtgatgggtcgggcctttgctgaaaatatagaggaaatggggcttaagtcttatgagcttagtaaatatatctctaaaaatagagagataataggttcaacaactattcagcttaatggactgtggtattaccagaagggcccatttaatcttatcttgggccaaaaggtgggacctcctacaatcttaaagcaaaaaatggtggactctgttgtaaatggatttagatggaataaaagtctggaaaatatagatagacttgacaggtgggagaaacagctggcggtgtacaataagaaaacaccaaaacaagtgatacatgattttttcgaaggaattaaggaggattcggccaaaaaagagggcagaattcagagtggctataattaatttctgggcaaactttgaagatcaaagaaaagaaacatgaaattcagttctgcataataatgaaaaattggaggcagtagaggttaataagaatggaaaacaaccagtaatatatacaaggaaaagaaattcaaaagccttggttggggaggaagatactatcaacagaatggaaatttgggaagatgatgaagacccaagagaggaagcaatagaagaggacttttcagaaagtgaagcttcggatattgattgtgaggacaatctagatgagaccaatgaagaatatgaagacattttgggtgacattaaagaattatggagtgagaaggataatatgatgagtggaggaattgggaagacttctagtgaagagcaagtccatacggaaaataattctgtgtcatggtcaaagatggtggattccatggctgatttggggatgaaaataattccaaataaggaaagagtgccaataaaagagtccaaagaagacacaacaagaagaaaatgcagggaattgagaaatttggactttgacatcaactatgaaaaaggtataaataaatcaaggatggaaaaacaagtataatgaagattcttacatggaacattagaggcagtggtgataaggagaaaagaagggctattaaggcaactttatgtaaactcaatccagatattagaataatacaagaagtcaagaagg

SEQ ID NO: 244572 - DNA, 863 bp, Cannabis indica
atatttatatgaaaaatatttaatttttggtccactaaagagacgcatgagactttgtaactccgatggggtggagttttggacaaatttcaaatatgaaaatcttccaatattttttttttcatatgtggaattatgggacactctgacaaattctatccatgtagatttgaagctccagttgggacgttggtgaaaccgtatggtgattggatgagagttcaaccaaggcgtactagtcacatgattggaaaaaaatggctgaaacagttcagattggcaacagaagattgtgagatgcatgagaaccaaccaaactccgatcatgttaccagggcaaatccgatgaggcaatcaatgccatcagctactctcaatcaaccagctgtgatcaaggagaaattagggggtcaaggtttatgtaataaagagggtgatattgggaggattgacaaagctaagagtgtggaaatagaatggttgaatgatgctgaaaatgctaatgttcaagtcattaatgaagaaggtgattgtttgttggttgctgatttgaagaggcgtagaacagagttgggccttagtgtggggtccaaagtaaaggtgggagagaggagtccagcccaagttcaattggatctaaaaaatgtggatatggtgggtgctggtttccaggcccaccaatcattatgagtcttttgtcttagaattgccatgggcttgggaacccatggactttacaattccttaaggacttggtgatccaaaagaagcccaattttgtgtttctttgtgagacactttgtaagcgtgatcaagtggagaaggctagaatttttctgggtttcgacagtatgtttgtcatg

SEQ ID NO: 244573 - DNA, 2200 bp, Cannabis indica
atataatctaattcaatataatacaatatacaatacgacctaatacgacgtaattctaaacgagccctaagataataagggaacttttattatgagttttataaatctatcacttattatatatgtacatatatttgtaattataatttaatttattcacataatttttttttctgaaaacagttattcacataattttaaaaaccaactatttaataatatcagtgagtggtggatccagcagaatcatgacatatctttaataaataattagttaaaattatttataattcaaaataattaaaaaaaatgaagatttaacatatgtgatttgacattaaataaaatataaccgcactacattgttactatatatgtgttttatatttacagatttatataaatagaaaaatgaattatcgattatagtttctcctgaagacatacctgtgcggttccccacaagttttttctttttaagggaactttcattagagttcccatgtgtcatatacatgtgtatattgaaagtagggacaatatgaatatataataagacattaaaatatttatatgtaggcaacattttgctgcagctagctaaatacttaaattgtagttactaaaatatatattaatatttattaattaacacgattgtacaatactcatttgtttctcttaggttatgatcagatatattgaccacttgaattaattataaacatcttgtccccgaaaaaaatgaaaatgaaaactgtactggatgtcagcttcctaaactacaaattttccatggcaatatatatatttatgtataaacatatatagtgcaagtactgttgatgatttaaaaacaaaaattaaatgaaggaaagagggaaaacaacggtagttaggccagaatcttagggccgctgtttttgcttgggttttgcatattgaattgaaatatgaaaattaataatataattatcccatttgcatttatagggaactaagaattattcattattttttttaaaaaaaaaactaaagttactcttagataattaacccttgggttttgctaattataaacctagctatgtatacaatttatagatgccatcttgaactactacaatcgtgtacaacgatcgatatatatacgtatatatattgtgatcgattatttggaataagatgtaattataacttatgcctgcataaagattcctcgtaatatttcttttttaattttattttcaagcagggttcatcagtcagtttggatttatatatatgaaggtttataatcccttaaaaaaacaaaaatatcaactgtagcactatgcagatccacaaataggaaatcaaatctaattctattcctgtaaataagaaatattcagcaaaggtatgggggcaactttcacgtaaactttatatgtatatagatttaattagcttgctagctcacattttttattttctcaaaagctttgctcatttttattttttttttggacaatggtgatgactttgccatattttgcttcttattattattcgtgagtatataatataatcacaaatttgagactaataaaattatacataatatatatgttgtaaaaataaaattatatatatgtgtggcaatgatgcatatagggacgatttttcaattattatctctattcacgttggttagttataatttttttttggctgcgtactttgtcaagttattttgtttttgcttgatgtattgttgtagaaatttggggtctcgtcgagacgttggacgaggatgggatcccaaagctcgtgcatcgataaaccaaaccgaagttggtttctcttatttttcttctctctctcacgtacaggtggatggtcgaagttgaagatcgagatctgaagccaaagttaaagtcatggccctagtcttctaaccgtggctgagatctcgactctctggggctctggagtgctcgacggtgaaaagtagagaagggccagaccatatcgattgctcgacaatggaaaatggagctccaagattctcttatatatatttatatatattgttcaaagaagattcattgcatacaacattatgatttgtcaggatatggttcgacattacgagagaaaaaattcgaaagctaattgtgtgttgaaattgaatatgaaaaagacttatgatacaatc

SEQ ID NO: 244574 - DNA, 1796 bp, Cannabis indica
actacttatttaaaaatctagagtttccatctcatcccattatacaaagtgttaatgtgggttttcgttaattgatttaacactacaaggattagcactttcgcgcttgcaaaagtcaaatacagcgcctgcaaaagtcaaatgtagcgcctgcaaaagtattgcggacgaatttttgagcgtcctcgggcgtccacaattgcgcgtctggaaaaaaccgtgcggacgcaatttggagcccgtacagaaagagaaaaacctttgcaggcccactaatagcgcctacaaaagttattaggaataaattttattttttaaaaatacctttgcaggcgcttttagtgcgtccacaaaaagctgataacatttttgtggacgcatttaaagcgcctgcaaaagtattttataaaaataaataaaaatttatttaatacaatctgctttttaaaattaattctaatactgatatttttataaaactaatattgcattcatttcttttaaaaggttgaatacataatattgttttctaaatttgtaaatcttacaaattgtaataaaatttcattatgctaactaaatttacaaataaaactagaaaaaatattcatattcatacaatattttcataaagtttcacaaattacatcttaggcattggatgaagaggcattactaacatttggaggctggtagttgaaacccggcaaatctttcttcaattgctctaaaagtccttcaaaattatcttgagtctctgttagcttttgtgtaagagaagcaatggtagcagcttgatctttatatagattatagaccgagttattagcagctcttgttccaccaattgccttcaacctaggcattggacctctttctttcttataacgtgaacgggttcccaataccatatcaacaatttggtcttcagataaaatatctggctggtcaacagtaacatcagaaccagcaggctgactaacatttgttttctgagcagaacgtaaattgtccatctccgtctgcaatattaaaacaaacaaattaacaataaaaatagtaacaaagtaaataattaattaaataaagtgacttgattgtgagtaaatttgggtacagtatttagtgtttgtaaatagaaataatcacaccatgatcatacatgtacacaaagagaatgccaaatttagctaattttcttgtatttacagtttccatgactaattttttttcaaccacaaatttagcaattcatatataacatttaacatcatatacaatataacaaactctatattcatattaattatattatgatggccaatactacgttaggtaagtatagcaatcaagttatagcaatagaagattttgtaataatgtaattaaatcgattaaatgataacttagttgcatcaaacagattttagtcaaagttctaatataactacacaagttgaaacaatgacaaataacatgcaagggttgttagatgatgtggtatgatatgattttaaacttacaaacttatcacttgcagtttcatttatccacccttttgttggatgccagtgcatatctttgaaattatccaccaaactaggcatttcttttgtggttggatcctcctataattaaatatataaataattagtatgacaaatataaaataaattaaaatgataaaaaataaaataaaataaatatttatcatattaccttgctcttcatatgagagaaataagactttgaaccatgacgactttcaaatggcatcattgaacgattagcagaat

SEQ ID NO: 244575 - DNA, 1163 bp, Cannabis indica
gacgcacaagcctgcaatgaattttcagaaagttttcatgttgcatttgcatgtataaacttggtacttaagtcaatgctggaattaccacaaaaattagttcttacatttaagggttctggtacgaggctttccactgggatatcagagagttccaacttcagaccagattctctagccagaattatcacctgccatacagattcattttaggagcaagaacttaccacaaaacaaatgacaaacaacaaaaacatgagcagtttgcatacaattttcaagtggaggttgtaacagatataacaaagacatagctatgtgcatttgatgccacatttctattttttttttttctttctttccatttttcggccctagcagttcaaccggccagtggccccaaagtttttgagtttgaaccccggaacaaatgcctaccagcacttcccaacactccttaccactaattatacaattaatctcccaattaaaatttaaaggtaattagtaattactactaattatactcctaaaatcatcccgtgataaattaatactagaggattgattaatttttttaatatcatctccaatttcataacaaaatcacatgataaaaattatccaaccttactctccacaagtggcatcttagagtgtactaatcacaagttgaccatctgttgatcttaggattcatcaaaatatttccatagattgaaatatacttctagttctacaacaaataatttcatggaaactttacactttgtttggaaagatggatcgaaaaaggatagattgtatataaggtgcggaaaagtgaaatgaacggatggatttgatgtatacttaagagttgtttggtatagtaggagagaaagaaagaactattttttaattgtttttctaagaaaaataatatttaaaaatgaattaacaatttcatgtcatcaatccactccacccatatgtagagggattgtttttggtggacctaaagaattggcaatccatagccatttccttcctttgtctctcttcctttctaccaaacaaataaaactaaaaacaaattattccattccacacacccctaacctaatccatccctcctttaatccaccctaccaaacaaaaggttaatcatcagtacctttctg

SEQ ID NO: 244576 - DNA, 1278 bp, Cannabis indica
tgattttggaccaattccacttagtataaaagttgagggcttccaagtgcacctgcacttactattacttctcctttgttacgtattaatgctttgtggtattttccttttgaatcggtgtaaataactccaatagcactgggatctgtttgtttaaacatagataataattagtcagcatatatatatttatatagtcattaaattattttatgtgaatgaagaacatgtatgacacactcaaatttaacatattatatttatgtgtaattaatcttaattatataattaaaagtgatgagattccatttatgataaatattaactatatatgcatgctattgtgtgtatgtgatttttgtatgtttctatatataatatggtgctatgtcaacttcacatgatgttattacgtacaaatttatattatattgtaacagagatatagaccaaatagtctaattaattaaattttattttgaaatggaattatacgaaaatctttatataatatatattattattaagtgcatgtgaatgaataatgttcctactaactagctaataatatagtgataatctatataattaattaacttttggtgaataaactactattattaagatattaagagtacgaattaagaaatcatttaatttgttggttgaagccaacttttctagtgtgtgaaatgatttaaaatgattaaactaatacaaattacttcaaaccaaaaatagataatattaaaaaggagagtgaaagaacaacatacttgaggatttagtggagaagatgattttcttcacgtaagcatgaattgcaattttcatgtttttgagatttcccttattaagcaactcaacagctccatgtcttctccccatattatcaaaagtagaaccagattgtttagttccaaccttatgttttgtagtgactccattatcaggaccaacaccagcttccaacaaagcctcctcaaccgcaaattgccaagttgacaaattcgaatacgaaactatcttgctcttcacccactcataggccttctcaacctcatccatgtcccattccactccagacttagccaaaaaatcattgtcagcttcagaaaagaacgcggcgtttatcatacttgtccctcccaaaaccctacctcttacgctctccactccttcctctgaagtgaacctttgcgccggggtatccccatcatcatcgtctgcttcaacgagattagttagaaacccggacgcaaccaacgtgttggggtg

SEQ ID NO: 244577 - DNA, 1130 bp, Cannabis indica
ttgcaggtgcagaaacagatgaaaaagacgtttgtcaaaggcatctgataccatgaaacagtagaaagtgaaaaaatgctaattgagattagcttgacaaaagctaacctaacaattagagtagtcctttatttatataagccacaagagtttgttacaaagcaagaaagaaatcaaaacaataactaacaactacctaaccaatactaacagatttttaactaacaaaacagaaaagttgttatgtgttatcagttcctactaaccaagtttgctttgggcgtggaaacaacactatagaagatatcagccacgctctttagaattgcaaggttgaaaagtatatttgggaaaagaacagttttggagatgaagtcaagctttcacaacaaagacatcacttcctggttgagattatcctaagatgacttcgagtggttcattgtctggtttacccgtcaaaaggaaaaaaaaacaaaatgcagtcatggtgggtataacctaattagattgctattggaattatatgtatgagtttaggggttgtaacacgagatctaccaaaggaaaaaatggctccctaagatcaatgtggatgctggtacttgttttataaccggcaactgtcgtcttgggctagtggccagaacttctgatggtttaccggtgagtgctaagaaagtgtttattcagcaaccttattgcgttaagtattttaatgcaagtaaattcttttcccaagtctaatgcaataaagggcactctaaagcttttatataagaaaattttgaatttctttatgaatgatgggcacatgtgataagagatctgtaaaaatatttcttatacaagcatgaactcatctctaatacttgagatactactaccaaatcccaagcattccacaatgtcacttattccactttatgttacaagtcaactcttgaatctgtttccaagggaagaataaaaagaaatctaatttacattacactagattacattacaagtactccacaaagcaatagttcactattattgcttttcttgatggtttctgtgcaaatgatgatggtagctgaacaattggaggaaaagtttctggcttccaagtaactagcattgtatat

SEQ ID NO: 244578 - DNA, 1259 bp, Cannabis indica
tattgtattgaatgtttatggttgctttctgacttttctactttctttttgcaaatatgtcttccaagttgagaggtcttacagggggaccttcaaatgaagccaaatgatgagtgagggccaaggtggctaggacttcttctcgtggtgaagatgttgcttggtcatcactgcctccccctccaccaaggtctgcaccagctaggcagcttgtgatacgggttgttggttagggtactcagaggcccggtataggagcggggttagttgttggatagagggctgctgatgtatccaacaggaacatagagagggctcttcctttcatggatgaggatttaaaggagctcggtgacggtagacctgacaagctttactctaccggtcttcgggatctttctcttgtcagttgtgcttttagatctattcatcttcttggcactataaaggttggctgaccatgtggcttattgcttatggctggcttaccttggatgcttctatgatgggttggctggccatagcagtcttaaaggggaactagctggctagtattgtggctttaacactgatgttgttctgtttcgatttcaagcattgatgaagttgagctcagcctgtgatggatctcgagggtcctcagatgttattgaagagagagtgaagaccttgcaggcttccttgtggcaaaggcaaagccatatctgagctggaggctatcccaatagagagacagagaatggtttctagcttagagaccatgcttggtgccagaaatacagagaacaccgcacaagttgccctcatctctgggatacagtctagccttgatgatcataagaaaaagttgaaggaagctctcgatggccaataggccattagggaggagtatgttgacttgtccttcgaacttacttatgagttccagttgcgcaacccttgagctaaactgtcatacatgggaaataaggcttttatggaaagaatgttggcccgtggaaagtcacttttcgagagtcagatggaggtagacaaagtcgctgcctattgagaggggtcatcatcagaaactcaagacgaggagctggccgacccacatgtgggggaggtggctagccaggacactgaccagcaggccggccagcatgctggtaatggggccagcctagactctatggatcttaatcttgcggctccaaattcagctccttttgcccctgcacacatttacatagcatttttattagtagcattcaaca

SEQ ID NO: 244579 - DNA, 700 bp, Cannabis indica
atcttttctatagcatcactggtcctctgaactgattctagatctagatactttctttccccgatttcatcccaatgaattggagaatggcacttcctatcatacaacatctttataggaagtcagccctattgtagtatgataattgttgttataggagaattctatcaatgccagctacttactccatgaaccctcaaagtttatcacacaggctcgtaacatatctctcagtatctgaattatcctctaagactggccatctgtctgagggtaagaagttgtactgaacttcaacttcgtacccatggccttctagagactctcctaaaacttggaagtcaacgtaggatctctgtctgaaacaatggacttcttatccccatggaaataaactatctgcttcatagataactccggatattgatcgactacaaatgttattttcattagtacaaaatgtgttgactctgtaaagtaatccactataacatagatcgagtcatacaaactcgtggttataggtagtccaaccacaaaatccatggtaatattctcccacttccgctcgggaagggtcaaaggctgcaacaaacccacaggtctctaatgtttagccttaattttctagcatgtcaaacacttggatacatagtctactacatcctttttcatatcacactaccaatagtagggtttc

SEQ ID NO: 244580 - DNA, 848 bp, Cannabis indica
ttgaaaaggagttcgaaaactacccgtgtaaaatgatatatttattttaatatcaattttacatctatgtacatgggagacttttttttttttgagataaaatgctattatattaaacaaagagttaaaatacaataggcataattggcagaggaacttcctccgaccatgaacatttagtttctgccgaaagagcatatctagccagcaagtgagcggcattattaacagatctataaatatgagagacctgaactccagggaaattaaaaactaaaagagaaatgtcgctaagaaaactatggaaatcagaaactagctcctgcgaagataataaaccgttaactactgccaaagaatccgtttcaatgaagtgcactggtagttgtaggttcttgatccactgtagactatgcattagagctaaagtttccataatgtcgggtttaaagcagcctttgaaagggcaagacattgcaacaataatgtcaccagagctattcttaagaatagcaccaaacccagacatttgattcattgcgttgatagcagcgtctgtgttcaatttcaggcgacccgaaggaggattgagcgaagagactgccgaattacctgctgaagatagagcaggagaagttgttgatgccgaagttgctgatgtttgtctagcagagtgataatcctccaagtaagagagtgcaaaaataaaggagaaacatcatatggtttttggtttcgtaccatgtttctatttattcctttctgtctaaaatgctccataaaatagtagcaaattgttcaagctgtagagaagacaagcaggaagaaatatgaagaaaaaattccat

SEQ ID NO: 244581 - DNA, 2493 bp, Cannabis indica
tagatgaaccctggtgagttttggagaggcaaacactatatcgaccaggatcttctccagcttttacacgatgaccaaccttgtcttcgcgtcagtccgtcctcttcgagtgacgaattttctaattcaagtttcgaagactgggaagtgagtagtaaaagttcacccactccagatctgaggtgtagcatcacttttactccgagcagatcgtgagagaaggctatggacgatttgtttgggagcttaggaagggttggagacgttatctcccatccaactggacctatatcgtctagcctggtgtcgctgacactatccccgtgggccatccaagctctagtgcctttggcatttcgattgctgctcctaccgtgactgttgcacgacacacacaacaatattcgtccaggaggaagatgatggcccacactaaacagatgatgcggagaatcaatgcaactgaccctcacatggttcggcatgccacgctgccaagtgtcgaacatgacttgtccgctgcagaggaggaagactatgagggggatgttgaggtccaggagatagaggaccagtatggcgaccgtcctgatagcccctccgagaatgaggaagagggagtggctcaacctctaagttttggaggataaaatgagtcccgagagccagtgtccaaacttggtgacgtcttggtcgagggggaagactatgtcacccaagagtataccgaggcagtcccccataagaggcatggtgctgtgggggccaagatgggtgtgtcctctgtgcgtcgtaactgagggccacctaaaaaatttggagaaggctgggtatctaggcggacttgagtgcttcctcccttctccaaatcaccgggcaacaaacccgaaacaagggtacggtgcctggtcgggtgcctacataaaacaaggggcgatgctgcctttgcatccgtacttcaagagggttgcggattacttccacctttgtccgacccagttcacacccaagggcattaaatacttatttgccctgttcgtcctctacgccactcaaggatggggtgtgccgtctccgcatgacattaactagctctttgatttgaagtttatccccaagcagagtaggttggggtacttctacttctctcaacccggatgacaagtggctgacgggcactgtggacacggaggttagtaaaattaggcattttgttacgagtactacttcgtggccggtatggagactgctcatactcagtttctgcagattccccgtatactgacgtcctcccttcacactgaggcttagagaaagggcccaaagaattcctcaactgctggagactgctcggaatatcactttgatgaccatagaggccaaatttgtgaagtactaactttacccggcagattttgtacccaagcccgtgaaggagaagaggaagaaatccaggtcgaaccaggctgagggagttaagcgagagaaggaactcattcaactgaagcgtgaggctaagttgaagggtggcgctggagccaaacagtatgctcaagaatattctgagcaagagaaggagaatcaagaatattcagagcaagagaggtcgcacaagaagtaagaagactctctcgatcaaggaagcacccatagagcatgctatccggatcagggtacctagcatgactgctcggtcatcaatccctatcgaaggaaagggaaaagttgtcctggaggagcaggaagacttgtcagatgatgacgctccatctgtacttgtttgggagaacgctcctgccagcgtacaaagtacttcaacttacatttatttttcttgatttttatgccttcacatattttatgtcttcttctgactatattgttttgtccgtgcagaaatgtcttagaagatgattgaggctctatagaatagagtggggggtagctcgggttcgtctcctctggccaaaaagtctagaggtggtgagactctgtccaaggagaagattccggttgacgaggtcattgatctctctaaggagcaatctactgtggacccttcaatcttgaagtctctaagtccaaaagttcccagggggagtttggacagatctgaaaaagctaagactggatccgagctagtcaagggcggatctaaacaagttagggcccctgccccaactctggtgctgtgcacggaggccaggagaggcaaagacatgcttcaccactacgtggctcggtcgctcccgaaagtgagtgaacaactgaccggggcggacagtgaattgtccttggagctggtcttaggaggagttttgaaggaaatttctcgagtaagttccctctaacacttttctttcatttttctttggatagttcagagtttaatgcattctccgtacaggctagtgtgaagatggcttatgcttactctcaagcaatgtcggtcgctgttaagaaccttgccacttctaacacgatgggaatgga

SEQ ID NO: 244582 - DNA, 1396 bp, Cannabis indica
cgctaatatctttttttttttttaagtgctttgttcttatgaacatttattttgtatactatacatataaaaacaaaatatttattatattatatatataaagagatgataaaaaaaatgaggtcttttaatataagaggccttatgcaatgacccaagctgtcatatgcttgtactggccctaatcctggacgtcggaccccgcacccaaaccttgagcccggaccaaacctcggacttggactcgtacccaaaattggacaagaccgaggcccagacatcggattcagacccggacccagacccaaacccgaactccgtaccccggaccctaacccggacgccgaccttggacctgacccaacctagcacctcggacctagccccaggtttggggtccggaatcgagtctgagtccgaggttagagtttggaatcgaggttcaagtcgggatcgaggtcggggttggtgttcggtttcgggtcggggtcagtgtcagggtcggggtcaagggtcggggtctgggttggggttcgaggtttggggccaagtccgggactaggtccgaggccaagtccgggactgggtccgaggctaagtccgggtttgggtccatggtcgagggtccgagtccagattgaagtctggggtcggggtttgggttagggtcgaggtccaagctcagtgtttggtttcgagtccgggtacgggtcgaggtcgggggtcaggttcgagtcggggttcgagtcgtagttcggatttgggtatgtgagcaaaaatgtaaaatattatatgttaaaaattgtttttgaaaatagaaaataacattttgatgttttatgtttctagttttataaaaactgtttttaaaaattttggccaaacgatcccttattagtctttaaaatctatactgtttttgaaaactgaaaatactttttaagttatgaagtcaaataacccctcagtagtttgtatttttcgtaaatagaaatttgtaaacagtaacaatatgagtattgctattaggcatcattagtgcctatcaccttctagacgtgtcactttacaattgactagcgatataatcttaaagttattacattaaactatataagacccgatacttagttagacaaataacgatattgatacataagagggtgataggcactattggtgtcttttagcattgctctaacaatatttaaaattcatatttttgtaattgttttgactttttggggtattaatgaaaatatcccccaaaaggaagttgtcggtacaaatgttatgtggaccatcattaaccgggctggagttctctctgggggtaagttgaaaaataccccttttattaatcaattaatcaaatttacctctaattctatattta

SEQ ID NO: 244583 - DNA, 1609 bp, Cannabis indica
tatgtggattttagttgtaatataggttgttaccttaattgctataggatataaaacttacgtaaaaatataaaaaaaaaaatatttttaaaaatataaaaataaaaaaaaattgcttaatgtattttgtttcatatgctgacacaacaaattaaaataataataaaatatatattatatatgtatgtttaaaaaaaaaaattgaatttgaagtatgggtctataggtatgaattggtgttataaataggtatataatacatgtgtattagagaaatgaaagataatatataaatgatgtcttaaaagtttttagtgagtaatttagtaatacttgtttttatgaaataaaattatttaaaaaaaagtgaaattttgagacatgtcttgtcttttgacatgagtgagttgtaaggtgtgtgttggaggtttgttctgttaattgttgggttcgattgttttgttctatggcttctagtagttctatggtcaatgatcttgaggatcattactcaaggattcagttagaggaggaagaagaagagaccctgttgtgtgacattactgctgatgtcaggcaactgattgatgatcgttggtgtttggttggaaagtttctaacgagtagggtcattgattttctgtcaatgcagcatacaatggcttctctctgacagcctggaaaatgtatgtttaagaaagaacttcagactaatctgtatttgtttcagttttaccatgagactgatatacagagggtgacagatggtagtccatggacttttaacaagttccaattggtctttgaacgattgaaaaaaggtgatgatcctttcaccatgaagttgaatcgtctggatatttgggttcagctacataacctttggcctgggtttatgtctgatatggtggttcaaaatgttggtaactacattggttcttatgtcaaatcggattcaaagaactttaatagtatttggagggattacttgcgggttagaaccaaaataaatgtagaaaagccattgaaaaggagaatgaaattgaagagaacagacggggagtggctgtggacgaactttaaatatgaatttcttcccacgttctgtttcatatgtggtattattggccattcggagaggttttgttctcggatttatgacaccccgctggaactgataggaaaaccttatggtttgtggatgaaggctcaacctcaaaggaaaaacaagttgataggagctcggtggcttaggacagggacagctggggattcccagttctccgatgaaggtgtaaacggaagtgatgaaccattgaatgaggttgttaatgtgatcaccaaaaatcaggaattagcatttgaaaataacaataatagggggattgatacattaatcttggaatgagctaatcgtggaagggaatttgattcacatgatggcggaaatcatggagaaattgattgtgatactgaagatattagtcatcagggggttaatgcattgaagggtaagaatggagtagacaaagtcaaccctcagcaagaagctctaatgattactgattcaaaacgtagaagaactaaggtggcaggcaaggaagtaatg

SEQ ID NO: 244584 - DNA, 617 bp, Cannabis indica
tgctaagtccaccatcccaatgctttctcctccaaaatacttgcctttcaactctttctctaagatctcaaggtactcacttacttcttccaacgcatttttctgctcctccttcaccttaaccactttaattgttgttgttacgatctgggaaaggatcatattcaacgtcaaattattacttgtgtaaacacataagttgttcgacgaaagttcaagctcaaaaaagtgaaagagagtgtttagaacaaatgacatatgggttttatcccaggtttattatttcttttcaaatatgttatgtgtggaaaatcataagcaaaaaaaaaattataaagattattttggaagaattgttaccttgtcatcaatgaaacgactccagaaacgggcttgagctctttcataagggtgttgaggcaagatggggtgagtcttccatgtctcatcgatatattcaagaattacaagtgattctgctaagggctttccattatggacaaaggcaggaactttcttatgaattggattatatttgaggagggaagtactcttgttcttcagatcttcttcatagtatttgtattcaactcctttgagtttcagagctatgttta

SEQ ID NO: 244585 - DNA, 2269 bp, Cannabis indica
tatttgtatattattttttatgtagttttgatgtttttttttacacttatgtgattttcttattgttttcttgtgtttttattgaataccgtaaaaatattaaaaaaaacgttaaatgtaaaagtgtaaatattttactaaaaatagcaatttatgtaatttttccaaaaatatatacatagaatttagggttgaacatttgggtcaaacctgctcggacctgatccgtaaaaccttttagtgaaaaaacttatatataatgggcagatcaagttgtacccgtgggttcgggttactattttatgtatgcttggatttgggtctaacccaaactcgcccataaacccgatcaaacacacacatatatatttttaaatttcaaataacttgataccctaaaactaaaatcaatacacaaaatctaaaactaaaaagattaaaaccatgcttgaagttagcctccctctcccctctctctcacgacccacctcctctcttcctcagtcgagccgtcgtgaacctttgcccctccccctttgcaaacaagttgcacgaggatctgaaagtgcagcactactggcaccagtgccaaagacagaatctagacctccctctccaatcttcatagcacgcaacccaaaggaaacagacctcctttactcctcccgccctcccatggggttctctctcgacaaccacattatttatttatttttatgttttaaaatggtaagtataacactctactagtttaggcgtggtatcgtgattttatattaattgtggaatccattgctaatcaacgtgcttactaaaaatcgtgaataattaaaattttacttgattactattgagttgaaaacaaataactcttatatagtcgggatcccgtgtttaaaatatttacgactgtgatacaaaatacttgatagaaaatttattgcctatagacaatacaaagtacaatcagctgtcccaaagatcgtacgctcccgatctaactaccctaacatcaattttcatccgctcgctctcacggttgctcactcttagccttgcccttacctgcacatgcaaacagtaactgtgagtcgaaaaactcagtaagaaaagcaaaatcatactcataaatataacccaaattacaattaggcgcccatacaccaacctgtaaccatatccccataccttaagtggtactaattttagaacgttcatacgacaatactatcgaccataatatcagcctatactcagtactctagtcgtacccatgtgataacgtcgatcagtatttgagccgaacatacatatattggtatccaatcaactctgcgtatattgatactgttattgatgtaatctaacaagcttaataaacatgtacgctaaacatgtaaacaacatatgcatatcattatactaatattacctcgtttttgaattcaggtgtgccggtcaacctgggtggaacagctattggacgatttacaggctcattaatcacaatattcgtaaattgatgagtgacacgctaaatcactttttggggacttaaaatcaaaactaaaagtttccctatctatggataacatggcaataccctaaatatcgtaaaaaatgagaaaatctagggtgccctaaaatgccccaactggtagaccaattcctaaccagaagaccaattcttagggggcctgcctagggatgaaccggaattccagttcctataggtcatactgaatcgggcgatcggtttagtacaagaatccccaaaaataacaccaacaccacaaaatgatcccaaactgcagaaaaactcctagagtacataaacaactcataataaacctaatccaagcaataaaaccaagaaacaaccactgaaacaaatatcaccatgtgagagcaaagtttgagctctaaagttcaaactttgctcaaacacccaaacaatttcaaaccagcttaaataacatcaaaataacctctgaaaataaaatcaaacaccacttaacatcacagaaccctaattcctaaaatcatgcctagaaacttagcttgaacttaggaaaaacaaagagaaggtagctatgatgtttaccttgggttgaatcaccaaaatcttgctagaaaatcatgaattgagctgaagaaaacctctaaatgttgctggttctcaagggtgagagagagagagagagagagagagagagagagagagagagagagagagagagagagagagtagtagttagttagttagtta

SEQ ID NO: 244586 - DNA, 1132 bp, Cannabis indica
ggttgtaattaaaaaaaagttgtacaaaattaaccccaggctctattttactattttagaaatacagggtccattttgtcatttaacaaaacacagggtccaatctgtaacttttgcaaaacacagggtccaaaatagtatttaccctaaaataattgtaattaattgatttgaaataagggcatttcaaaattttctccaaagtccaaatttatattttaattttactcaaatgtataggttatatatagaggagactggctcaagcacaggtggtttgaatatgactattaatattatgttgttacattattacatatatggtatcccattttgagaatacaataaaatagaataggtcatcttgatcaccttgtgggccgcgttttatacaattcaacagctgactatttcatttttgttgtacacttaattcgtattattacaacctcaattattataaataccatatcacacacatatcaagctacttcacaatccaatattcaaaatcacaaagtctttttgctctgcatctacaaaatatacaaaccaaagaagaattattaaaagaaaaagctaataaccaaaacaataataaaataatgtcagctttacaagcttcaagtttgatattatcttcttcttcttcttcaaggggaaccatcaatggtgcaatccatatccccaagcttccaaataatgttcgtttcacagttccaaaaaaatcatctttaaatttaaccaaacagatggttattgaagaattgaatagcttaaagcaaggattcaacacccaaaacgacgacgtttataataacaacaacgctaatacatccacgtcatcaaccgttacagctcagctctacgcgattctcgaggccgttaacgacagagtggagatgcacgataacattggccagcaacgagacaattggaacaaacttttattaaactccatcaatatgatcactctaaccgccacaaccatcgccggagttgcgacggcgacggcggttcccggaacatcccctttggctttgaacgtttcttcgacacttctgttctccgccgccgccggaatggtgctggtgatgaacaaactccaaccgtctcaactcgccgaggaaca

SEQ ID NO: 244587 - DNA, 1143 bp, Cannabis indica
acaggcaaaactcgaaaaaccgagtttctgccaaatcctcgaagtcgcgaccagagtcgcgaccatgaaaaagggtcgcgacctggctcattagtggtcgcgactactgacgtctcttgagcagatttctctgatttttcgccaatttgtcctgtcttttcaccaattaaccgaatttgaactttgataccccggaaacctgaaacaatgaaaatcaagcgtaaaaccgcttcaaaagacaccaatagacgagaaaatgcttacttttcagacccgaacacataggctaaatataacctaacaacacatgatagaaaacttcaaagccaataaaagtatgttacatatgcacaatgacaatctatttagtatataacggtgagatttaattggcgtctcaaatttacaaagaaaaataaaattaatggactatttccacaaaaaagaaaataagaaattaagtgtacaaaattaaaacataaaggaatttcaccgccaaataaccttatttttatgttagttgtgacttgttttgtactatgtatggtagtttgtctttggcatatatagtggtttgtttaaactatgtttcaagcttatcctaaaaataacgtgaggtagcaggtagcagtgacaccctttaatctaataataataaagataagtttttattcataaaaataattatttagaatattttttcaatattgaaataaatatttctattttagtttaatattattattaagtggtgtggttttttaattttatatatatttatttttataaggatatttttcttcactcactgttaattacaatttttttttcttaaaattactttattatgtgtgaaattttatacatttcttaaagttttgttattaattcatttatattatttaatctgtagatattcttttggtacgataaaaaaaaagggaaaaaaataaaatgagcgttttttaatatcttactttcttcacctacacactttaaagctttattgtatagttctcttagggcgtcgtttggtaacgctgtattaggtcgtattgtattgtattgtattatattgaattggattatctatcatatttttatataatacaatgttaaactttaatttatactaaaatatta

SEQ ID NO: 244588 - DNA, 1229 bp, Cannabis indica
aagatcttaaaaacagaaattacagatgaaagaacattcaaatgagtagaacgtagattaatttgatgggttctagggaagtgtgctcaccaaaagactaacattgctatgatgacaaagaatatttaagctatttcaactaaacaggatagcttgtgggtttggtggattgatgttgtttaaatgaagaatgtttatttttggttagtgactcctaatcccgatgctagtaggtattccaaaaatttaagtaagctcagacattgtattggcaaacaagctatgcttgatgcttaagttcggaagatataaggcgaaatacttttatctctctcttatttgtaaggacaaaattatatatcataagttggtttgacacagaatcataatttcgaaacacaggtttatcttttagcaagcaatagacttgattgagaaatttataatattcattgactccctaatgtgtcatgtttgtgagctggaagaagactcccattcccatttgttcttcaagtactgtatcttcataaggaaagtgttagctaagatcacttgctggtttggtcttgttgattggccagagtaactggcagacctactgagcagggatttgaaggcccctaaaggtgttgaagagctaaccataaatattttggctgctgtgatttacatggtgtggtgtaaaaggaattgttgttttttagaggttttgtggctcagttgagatcattagtcatcaggtgaagatggtagttaagactagagtttattgttttaatttaatcaagttgtcaaaacaagatgtaatgatgttaattaacaatctttaaattgtttgattgctgctttacggtgtgtattattctatggtaataatttttttttcttttgctctaaagtatatactctttttttaaacaaaatatatatttaatatataacctatacagtactaaacttaacccgtttctaaaaaaaaaactgttctcatatcttaaaataaaaataatatttaattatttaatagtgatgcatttctatgatattcatattgtagctggatagcgattatggtcactacagtatcatgacagttgtggaaaaatatctaggtccatacttttattagattttttaaccgctaactaccaatgccaataagaacagtgaagaagtacatggttcaagatcaacttaaggcccattggccattagagcaatgcggg

SEQ ID NO: 244589 - DNA, 1534 bp, Cannabis indica
tcttatctcatacaatattatagtttcctttgaggttctccactaccttaagaggaaaaaccaagggttaaatggtttcatggctttgaaattggacatgagcaagacttacgatcaaattgagtagtggttttttggaagctatgctctgtaaattaggctttgcgaataagtgggttaatttagtgctaaattgtgtctcttatgccaagtactctgtgattcataggggccgcataatgggaccgatcactccttcccggggaattagacaaggagacctgttccccttatttgttcattctttgtgcagaaggcttgttggctttactcaaaaaatatgaaaatagagggtggatccacgaatgtaaagtggaaaatagtgctcctaaagttttccatatgctttttgccgacgacagttacctctactgtaaagcaatcagtgtccaagctttaaaaattcaagaactgttgaggaagtttgagttggcatcacgccaaaaggttaattttaataaattatccatattttttagctctaacgtgtgtgacttccaggggagtcaactttgtcatattcttcaaatgcagccagctgatgttaatagcttttaattgggactcccaagcattttgggccgcaacaaatcaactgctttgggtttcttaaaggaaaaggtccgtaaatgtttacaaggttgggatgggaagttcccctcaaaggccgagaaagaggtgttattgaaagttattgctcagtcgcttcctagttatgccatgaatatctttattcttcctttgaagatcactcgggatattaaaggtatgatggcgaagttttggtggcaaatatctaatttgtctcaacggggtatctattggttgtcttgggaatgaatttgtcaacacaagaatggagacgatatggggtttcaaaattgtcaggattttaatttggcccttttgggcaaacaagattggagactccttactaggccacattcgcttgttgctcgtgtcttttaagctcattatttctccaatggtactttcctcaatgcttctcttagaaataacccgagcttcgtttggagaagtatcttagaagctcaatatttaattcaagaaggagtgcgttggtgtgtgggtaatggtcaagacatcaatattcttgacaaatcttggtatcctgtcaaggagaacccgtatgtttcttctacatcctggtttgttaaattctagagtttttactttattatgtattgatggttttggttgggataaggaaattatccttcatttgattaaggaaagggatcaaagaatcatctttaatatccctattcaaatttccaacagcagcgaccactatgtatggtccttagaaatttttggcttgtacttggttaagagtgcatactcttttctccaaagaaattatggctgctggtataataatgaggatgctattttctggaagaaaatgtgaccattaaagctgttgggttttgtgccctaaataaaacccttt

SEQ ID NO: 244590 - DNA, 763 bp, Cannabis indica
aacaaagcatgcccaaaagattgtttcctacttccgcacatagactagatggtagacgatgcatctgaatataaactactcaattttatggatgcgtactcaggctacaatcaaaattaaatacacgtggcagatcaagagcacactaatttccaaatggacaaaggtgtgtactgctacttggtcatgccttttgggctgaagaatgccagagccaactaccaacgactagctaataagatgttcaaggatgtgttgagaaagaacatggaagtatatgtggatgacatgttagtcaagtccaagacagctggggagcacaacaatgatcaagaagaagcattttctatcatttggaaatatggtatgaagctgaactcaaagaagtgcacctttggagtctcctcagggaaattcatgggtttcatcgttagcttctgaggaatcaaagccaatccggagaagattcaagattttataaacatgccttccacaagaaatcataaagacgtgcagagtttaactggaaggattgctactcttggcaggtttgtgtccaaatcaacagaaaaatacaatattttttaacgccttacgcggaagcaagcaatttgaatgcacaactgaatgtgagcaggccttccagaagttgaaggaccatttgatcagagctccagtgttgtccaacccaattgagggagaactgttacttgtatatggaagtgtctgatcaagccattagcgtcgcactagtgcgagaaga

SEQ ID NO: 244591 - DNA, 710 bp, Cannabis indica
ttttttttttttttattaaattgagaaatatctctttttcatattcattaatcaaaaatatatttatattatatcttactattataaaaatatatgtcatagttctacaaacaattttaccctttgtaaaaatagatgttgacaatattcccattttgttgaccggtcataagtcaagttttaactcttcctttttcttctcaaaattaaatattaacaatttggctattttgctaactaattcaacttataactcttcatctttcttctctctgataattccttctgcaaggagagatcataaactagccacagtgttgtgccaacaattgtatctattctttgaataactatgccagctctcataaacttcattctcttcctcttcttctctccttctctttctctctaaccacactactaacatcagattgatcacacctcttcttctttctggttttttcataatatatataaattaataaataaagtgtatttatattatctttgcttatggttcatgggattaacttatatgtatgtttatataaatctacagtttcgacatgcacaccttttgggattgatttagatttatgcttatctaaatccatagcttcgatatgcagacatttcatcttttttattaataacaggtatgtttattgatttcaaaatctctaatccctttacctctctttctctctata

SEQ ID NO: 244592 - DNA, 1340 bp, Cannabis indica
gactcatcaaattaagcacagtatagtatcatgcttacttcaccatttcaattgatttagaaatctgactctaaccatgttatacatacctagattctctcttcttttttttttcctccaaatattgttgaactatccaaaaaaaaaaagactcgataacaataacgagtaaataaaaggtgaagaaattatcaataaatctaataatcagaaaaattaagacaacccaataaacaagttttaagagaatcggcttaccgtgaaagaatttgcctgtcaaggtccattttcaaggaaaaagcactcccatatgtgttggccagaattttcctgtttatatcctcttgtctttttatcgcctaaaaccaaacatatgatcaaatttatcaacctcaaaatctaattcaaatcgaacaacgaaaccaagctattttcttgcaaaaccctaaatctttttcaatataatatacggtatgtgaaaagcaacaaccagttcgaaattccaaaacaatcgccctagtcagagctgaggcagtaggtatcaggacacttaatcagaagaggaaaaaccatattgtaagtgcattagagagaaagagagattacagattggcaagccgtctcgatgggatgagatccaacgatgtcgctcttgacgccattaaggccgaagcgaagagcatcgttttgaagtcctccgatctcgtgggctatggtcttgggcgcctccattgttgatttctttactgcttactttcgtctccgctctctgatttctgagcaaggcaaagttttgtgttttagtgacctgtactaaggaagaagagagatttctgggctaataaaagcaacttactcgccatgatacgtcgtcgtttcatttctactctttatgggcttagcttttagacctttagaagatgggccaacaagctttcggaaacccaatcattttgttcaattccatttgtaagtgtaagatcaaattacactttatacctattttttttgtttcatattttaatttttacttttattttacttttttaatttatacccacttttataagttatattcccattatgtgcattaaaaagtctaattttaataaattttatgaggttatatttagtactttgattataaaagagggtttttattaattaaaattattttagagttatatttagttatggcacgtttactatacagtaatcagaattggaataaattaatggagaaatgtaacggaataaatgaaaaataatcagaatcaatatttgtaatatgttgtttactaaaattttttagaaatagaatagttatgatttatcttgtt

SEQ ID NO: 244593 - DNA, 1939 bp, Cannabis indica
agaggaaaagcttaaggtatggtcgaatttcattttaagtttagaacaatttgttttatataagggtttcgtgaattcgaatagttatggagatgctgacttatagaattgttctttggtagctatggaactagtttcgatgtttacttgttgaatttggggtgattttgagttagaaatcgagtttagaaatttttaaagcttagtctcaacgttaatcgcatttttttatttaagggctcaattttaatttctgttaagcaaagatagtaatatttatggtatatatgtgccctgttgtgtttggagtgatttggataagttttggtagtgtttcggtgagtgagaaatttggtattttcatatttcaccatttttgaaaattcctaggacatcagaaattgtatttttttcataacttcttactcgggtgtccgttttggacgttctatatactgtttcgaagcttgcaatgagatctaaaatatggtatatactttagagcaaaatataagttttattttaatatatttttactacagtgtttggtagaaaaccttaagttgtcttttgcaactataaaatagtgttttggtataaacactgattggtttaccattggtgtgacatagggccgagttcatcggggaagtttctccatttggtttggccaacgtgcatgaatctagattcaaggtaagaaaattataatgtaccacatgacatgacaggttttgtaattattggctgtctgattagacagtaaaaatgcgaatgtgacatacgattttactgatatatgatatatggattttagattatgaaatgggttggcctgattaggcaatatgatatataagcacacctgattaggtgatatggtgctaagttatgacataggtgtagctagcctaataaggcaatgcgatatacgaatgttaggttatgatatgagctttcctgattaggaaatgcaatatacgaatgtatatgattactgtcaggccgtggcataatcttgcttgagtaggtaatgtgatatatgtgtattggcatttaggttgtacctgtggggcaaccgttataaagtcatgactttgaatcgaaaccgctatttgccaggtcctaaaattatcaattatctgattaggcaatcataatgtgatgatactatggagatgatgtacgtgctcacctgattaggtgatgcgatattccttgcgatgtatcgtgcgtaggtacgggcctcagtgatagaatgaaactgttgtagcatttcttcctgtcgacgtatcgggtgtaggtacgggcatcagtgatagaatggaaccgtgtagggtttttccattgccagctatggcacaaaatgaaactattgtaaggtttcttcttggcaacgtatcgggtgtaggtacgggcgtcagtgacagaatggagccgtgtacggtttccccattgccaggatatggcatagattgaaaccattgttgggtttcttccttgcaacgtatcaggcgtaggtacgggcgtcagtgacatatgataagtatcgggcgtaggtattgtatatagtcttttgagtaaatcttttataatagggatccttggtacacctttttactactgttatgatgtctgctttagtgttttattttagtcaagtttttaataactaattaatctattagtattaaactagtttataaaatcacacatgtggcgtccctatagattagggcattacaacttgatatcagagtagccatggttttaaaggtcctaaagattggtcgaacatttacatttgctacgaagataggtcgactaatggtatagtaagtacttatattatttgctattgaattacctgcctacactattatagagtatgttggaaaaagtagtatagtgatgcttatgataagaatatgtgtatggt

SEQ ID NO: 244594 - DNA, 888 bp, Cannabis indica
ttgacatccttgttgatgaagaactttcgatggttaccaggttttatactccatattttgtaaccctttacaccctatagatagccaatgaagatgcactttcttgcccttggctcaagcttatcttgtctaatgtgagtataagctatgcatccaaagattttgagatgttcatacttggcaagcttaccagttttgtcttctattggagtcatgaattaaatttcaaatgatggatatttgttaataaaatagcacgctgtcacaatagcttttcccaaaaggatttaggaagttcaaagtagattaacatacatctaactctctcaagtgttttcttttacatcttttcagcaatgccattttgctgtagattgttgggagcacaagtgtctcccaatacgagttttcttacagaattgtttaagtttatttgcgtagacctccaaattattatcagttcttaatttcttcacctttttactagattgattctctattagtgtcttccattccttgaacttactaagggcatcattcttattttttaaaatatgtattcatacatatctagaaaagtcatctacaatgaataggaaatacctgacaccaccccttgacaatgtaccaccctctagtttctgatatccatggaacaggctcctatcagagcatatgtgaaaagaacaccttgaatccataacccaaccatcactatagtacccttttgaaaccattaggacatcatagtcctcacttccttcacaatttgagatcacattttctatgccatgtctttgattgtattcttttagtacaaaatagtccctcttgagatgattggccttgttgcagatgacaaccctcttatcttggcccttgaccctt

SEQ ID NO: 244595 - DNA, 530 bp, Cannabis indica
aatttaattaattgatttaataaaagtagatatttttcaacttaaccttttttttcttcaatatattttagtttaagctaaaataccatttacatttattagaaaaatattacacattcttaaattacaagttttagacttcttattattataattatatattctagactttgttattatcaactaaaataattaggaattacatagtaaaattatatatagtatgtaagtattactacttaaaactaatagtatttagtgattatactcaatttttatgaagatatgagaattcaaaataaataattgtcatattacaattatctcaaattatctaatggtgtaattatctggactacttaaacaaatttagtaattattttgaattacactcaattccaattacattttaaatacatcttaataaattcttttaattcattttttgccctctcttagatgagattatttcataaatacagaaaaatgacaaattttttacagatttcatagtattttttttttttttt

SEQ ID NO: 244596 - DNA, 2253 bp, Cannabis indica
gagtattgtaacagtttctaacagctagaaactttatcccattaattccataactcacatatgtaacaactcacataattacatatttattaattttgatccttaggttataatctatttcagatttgtaactcctcatttgttacaatttatgtgtattattatactataatgatataatataacctccaacacataatatatatcaatctcatattaatatataatatgccacattttaatgttcattatatatttgttaaataacaaatatataacaagggcttgctttcgtacttggactccacgatatcaattctgaagtagtcaagtcttggtatacaactcaaaaaaccagactcattctctactcggatagtctgccctttacctcgctcaaataagcatacgttgtgcgtgaagttatgttacctaaaacctgttcagaatatctttccactcaggtgcaaggaatggttggatatgtgtcactcgtacatgctaccacgtcatagtgcaaaaaatgggatagcatgtccctcaaaaatagggaagttactgatattttctttctatttttatgggctgtcaaggcccatttcgctatttgactagctatccacgaatgaaagttgcagaccaaaatcctataaggtaaaagctggccggccatgcacctgccagggtgcatgctggccgaccacacagtacttggaagttggtgggttggccaggagtggtcggctagcccccttgaggtggttggttcatcatctcgtcgtccctcctaagtactcggacccttcgttgattgaagtgctgagtagatagcttggctttcttgttggtgagttgtactctaacgtgtcattgatgttggccacatggatatgtcacgttaggtgggcaaaattaaggataacaacaattacaaggggagtaagtcattactagctaaacaaagggaccgaacctctataaattgttatatttatagtggtaattgttaatcataaataagactctgctgtcagttgactaaatctgaggacaacaagaatatatataaatatgaatatgtattctaactcttttattatatttcagtcaataatatgacatgtttgcataatattcaggatatatgcataatttatatatattctctatcatgtcatagagacaaattatatcaaatatattgtaaatattataaataataaaaacacataatacatatttatacatatatatgaatttacaaataaatatatcagaataagaatatatacacatatatgatgtatatataacaaagaacaaaaaaactaaaatgagttcttgaaattaagataagtatatagacaaatatatatttaatgtattatgacttcgaaacaattcaaaaactttaacaaacaatatttatcttcgacagagattcgtggtgataacgtgttataaaataatatagaatagagaaagaaataagagaagataaggaaaataagaaaatgataaagtaaatgaaaatttctactattttatttcaatgatgtgaactcctatttatataataataagactaaaagaataaaaaattaaatccaattaataaagaaaaatacaataataattttcatcttcaagtaactaattgattctctattattatggtcacctataaacagggccggccctgaaaaaatatgggcctaagacgatataaaattttgggccccttaataaataataaattaacctaaaaaaattaaatgctacattccatgacatataaaaaaaaaaaaatattaaaaatgtgaaataacagatttgtatttttaaatttgttttatcatccataataatatttttatcttgtcaaaatttcaaccatacaataaatcaaattcataaaaagaaaaataaaagaaaaaactatgaagtctatatttacctatagctaaaataatttctaacaactacattagattatagtcaataattataataagatatttaaaaagatataaattaaaatcacttcaaataatattcaagaaaaaaattatttattattattattattattgaaattaaatattatatcttgattaatgattttgttttcataatattaaaaatgtaattttgattgaagcaaaataaataggaaaataataacataataagaaaagtaggaaaaaagacaataaagaaataaaaaaaaatagataaacttataaaatgtta

SEQ ID NO: 244597 - DNA, 776 bp, Cannabis indica
ataatattaatctattctattctattctaacactacaaacacacagaaagaacctctttacttcacttgacttttgtatattatcttaataatagtactgcggctgcttggcaaattggcaatggcgtctctgagattttactagtagtagtatagtactacacctcattctcatttgctgagttgtttttactactacttggattggtttgtctttgtgacttgtgactgttaccctgcacgtggctgttttattattggtgttgctagtgagctttgaactggtcattaaataaaaacaaaacaaaacaaaacaaaacaaaacaaataattgcatccctcctcaatccaaattccaaaccacacttcgcccagtcacaatccagtcccctccacaacaactacctataccctacattcctaaacaaaaactacaatctcttctcttctcttcttttctttttctaattatatactctaatcattcattgtaaaaatagtctacaaatttgagcacaacatgacccatatatatttatgatacgacaagtatttacacagctctaccaaaagtataaccatacaaataaacttaccaacaacccataaataaacattcacccattcaattcaattcatttttaattcactcttaaagaatattggtgatcaccaccattcattcttgttgacatgacattcaatttaggcctaattactcttccaacaccatatataatcatatcccttacatgttggagtttcacaaaaatccc

SEQ ID NO: 244598 - DNA, 1139 bp, Cannabis indica
gccagtaataccaaataccgacggattttgctataataccggcggactcttccgccactgtttcttggtattgttgtagtgtcaagcacttccaagctacgccatgagcgtctttcttaggaaatgatgtcgaagttttggtaaaagtcccaatctaattcgataagtaattacttttgctggatgagttggatgagttggaagagactttgtcgtcacaaggatattggaggaattggtttctgtgaccttcgtgattataatctctcctttattggaaaataaggttggcgattaatgactaagggaagtactttggcggtcaaaatttataaagttaggtactatcctaattgttaatttttttatctgcaatagtttaggtaggggccaagaaatctattggttgtggtagggatgttaatgtacttcttgtccatggttccctgatgtgctaaattcgtatgttacttcccttcatcctggtcttataggccaaaattttgcaagcttaatgtgtgttgatgctaataattgggatgtggaggttgtttcaaatatgttcaatgtaagagacaagaaacttattctctccattcctttaagtggcttgatagatatggatgcttgggattcagataaggaggtatctgggctctgttcaataaagagtgcttataaatttttgcaataccaaaagggtgaatggcattactagagaaggaaatagctggaaaaaattatggcaaattacagtacctacaaaggttcttcatttcctatggagagctatttcaggttgtcttccaactaaggtaaaattttccacaaaatatgttaatgtcaatctcatgtgtccattttgccacacggctatggagacaatttttcatgtcttagttgaatgtggttttgctggctcttgttggaatctttctgtgttgtcttctggacaaatgtgactgagtttagtacctggtttttccagcatctcagcaatatcatctcacaacaggtggaggaggcggctttggttagttggagaatttggcaagcttaaaatgacatgttttggaacaataaatcatgctctgctttcagtggcgcttgatcggctaggactgttcttgatcaatgga

SEQ ID NO: 244599 - DNA, 1189 bp, Cannabis indica
ccttttcttgtagtgtgtacaagagcatcagaaagtaaaaatgcctataaacttgctagagatgtccttaaaaagctttcggatgatgttgacgcgtgtttgaaagaagaaagagttgaaagtaaagaggaaagtcatgcagccagtgaaattgatacaacaataaaaggtgtgaagacaaataataagaaaattcgtggtggttcttctcgtccaaaaagtgctcttgagaagatgcgtaaaaaaactcaaagtttctaaaaaaaattatctacaaaagaggtactcactcttatttatttatttatttattttattttatgtttcaattgtataatttcgtacattattaaaggttaaatattctatcttgtaggtttcatatgacgtaaagagtaatgatcaaatccataattatatatcactttctcaaccaaattattatttctcctcaaaatcatctactctaaatcatgtaatatattttcttatatttttttattaaattattttacaaacaactatgtttatagatggatgatactatattattatttctacaggttggtaacacatgacaatccaaatataagaacaagtatgactgaattactcttgcaggtatattaatttttattaaaaatttaaatgatataatttattttaactattacttataagattataattatacatgtacaggctaatcaatctacatttaccggatttagagggagtcaaatttacaagaatacatagggatttgacttggtatattttcctattttataatgatcactaagatttttttttttatctcaaaatatcactaagagattgggttgatatgtttgaagtttaattatataattggaattatataatgtctattatttttttaaatatacaaatgtggtaattattataacaattcgtaatttatctaaattatttggtgagttaaagaatggaaaaaaaaaatcagtttaaaatattattataactaaaataagttttttttttaaaaaaaaatacatattttttaaatagaaatataagttgaaataattaatattataatggtgcaaaaaaaaattcctatagcattattagggaaatttgatattatatgcttaaaattaagggattttttctataataaactgaaaatggaaaaaatttacattta

SEQ ID NO: 244600 - DNA, 1439 bp, Cannabis indica
accgtacaacaggcgatctcttttagatcctcacaacatggaatgttatttccgtttcctctgggctatgaaatggaagaatcggtttagcatcaacctcgggattctttccccgactacgaaaatagaaagtcttgcctgcttctaatttgctttggcattctaagtgttaaaaattagataaattaaaatatattacaactcaattgtaaaataattcaagaactaaaagattggttaaatagatgttacaacaacatatactacactatatatacatatacatataagaaaggtagaaaagatgaagattgcaacacatgtaatataacacatatatgtaatatcacctttgtccaaaaacttatctcctttatctctaagcattaatagaactctctaggaaataactttaggaattatccaaccttagggttttctaataaagtgttatttttgatagaaaataagttatacaaatgagcacattacactcctttatattgtgttttaggtgaccgcacttaaaattcacacacataacacctcatggttgttataggcacaataataggtgtaaaatagattaataatgaagattaggtggttacgcaatagatggagctgatccccaacattccatgaacatttcataaatttgcacctccaagcgacatgcctcctggctctaggcgacatgtcacctattacaattttaaaataccaattttcaagttttagaactccgttaaaccaaattaaacccaagcattttctaactcatttctctcattaaaaatgaatattaatccactttgcaacaactatattatcataactttgaattaaatttgtgcactatctcttcattacactaattatgtgtgatcaataaaagagttacacgtgataacaaactgtaacttctctaagttgcaattatgttacaaagtgtagattaaataaactatatgttacacaatttatttactatacacttaatatatattattctcataatagtatatattgtcacattttaacctatacataatatatattatcaaataatataacaatcccccactaaattaaaatacgtgacacacttgtaatatttatttgatcaatcaaaatattatatctaagaagacttgtttgaataaatatacacatttaagaagacttgtttatgtgcattaggtaaaatatctttcaacttaaattttatcttactgtagttaccacaaagtttgataaaagtttagttgtcgtagcattgaactactattcctttaccacaaactaatgataacacacacacacccttgttaatgctcactcgagatcgcatgtctctcacttgcaccgttaatggccatgtgcaaaattctaaatcatgaactctctagagaatactctcaattctcataaaaggc

SEQ ID NO: 244601 - DNA, 876 bp, Cannabis indica
agaaacaaagttaataataaaattaacacaataaaaaataagaatagctacaaactagtatctaacacaaacatttataaaacactactcatattttcaccttgtgtcagatataacattttgaacaataatataaatattgtgccaaccaaaaaccaaggtgatatacaagaatacgaaaacttaacaaaatgattaaatatcgattattatacctctgtgtcaagcatagaagaaatcttgtctttattgcaactaacactgactttgagaaaaatgtctttaatatcagcaagatacttcaagcaactatcaacctttttatcaactccattgatactctcctctattttttccaactttgtttgaaaatgagatttcaacatatcaaccttatactccagcttttcctgcttgatcaaaacaccttgaataccatcactcaattctccgatatcaggatcttgcttgggtgttgacatagttggtggattacatgattgacctgtaaaatgactcatccttcctctagtattaaggtgttagaaatcatcttccgtgtcagattcggatacataaccgaagttgagttctttgagatccattgtttctaactcagcttccgccgggataatgcggttagtcttaaactaaacccaaaaaaaataaaagacacataattataaaagaaatataattaaaatatactaagtagtacatacggtagtaaatttataatttgaatttatcacctttgatgaagtaaaaactttcttttggtaatcaatatatttagcatttctagcgctactccatgaagaaattttgtaaggttgttttggataaaattgataatatcctgcatccttcaatgtt

SEQ ID NO: 244602 - DNA, 1223 bp, Cannabis indica
aaaaaaaaaaaaaagagtatatatttatagctgttgatgacaaggtccaacaaaaacctgcaaactatagctaatataagtggtcctatttttccttttctcttttctagtagaagaagctaatctagctattataataattttattaataatcttattaatatttggaaagttctttggtacagaattttaatagacaagggatgcagataattaataatatattgtccgtacatattaacttatgtgtgtataatatatataagacatgcatgcattgcatgcagctttatttttaattaattttctaattttaattaaatatattcttggctggttggttcccaacataataatatataaactctaaaacacacgtaacatatttataattttgttttgttctttttactgacgaaattaaaattaaaatttaaaagaaagaaaatggaagtagagaaaatgggttctaatttaagcgtcttagctgtaaatttatgccaatgtcggtttttactttatgctcaaattaagcatatatatagtaataataatgacacgttgctttctttggagatacacactgtcagtactacattcatttctaaagaagttcatgcaccaccaatcatgcgccacgtgtgatcttatacctaaatacacaatatatatgagctagcattggtattaggtattggtgcctagtaccttatcgacatgtcgcgttgcgattgactagcgatactctttaaaagttattatattaaattatgtgggacccgatacgtacgtacttagttctaaacaccactagtgtcctttagcatttctctatatatatattagagaattgttagaaggtactctagtgcctagtactttcatggtataatatcgttattggtgtaattaagtagcatgttctatataatttaataaaataattttttgggaatattactaactaatcgtaaggtgacatttataaaaggtactgagtattactggtgtctaatagcaatgcactctatattaagagcattgttattggacaccagtagtgcctagtatcttttatccatagtatttcataattagttagtggtattttttaaaagctattttcttaaattatataatacttactatttaattatactaataatataatatccaagagagtgctaatgtactttttagcaattctcctatatcaatttgtc

SEQ ID NO: 244603 - DNA, 2024 bp, Cannabis indica
ttatgacgtcaacctggatgctgagtaagtgaaaaaaatatcctagacttgtaatttttgaaggttatgttaacatcacttagtcaaattctttgttatagtaaagttgttcatcagttctcgaaaatatcgtgtttttggtgaaattgggtagactcgaaacttctcaattttgccgatatcccaccttgttgaaagggtgaaatataaaagtgggaattcgacatgtcacaagtcataactttcgtttactacgaaaaaatagtcggatggtcgagatggaatcatattttgataagcacaatccagcgcactaggtcacacgtcaacttaggcgttgggtgcttcccggggctcgttttgacacttctaacccattcgaattgtaggtctcctaccctatttttgacaaaaattaagaaaaatgctcagagcaaaatttgcgtttgaggagtggaaacatgcaaactataggttgcatgtcaacctgggtgcagggcccaatgtccctgttctaaccccctattaattttgtttgctccttgagatcacttatatcttcattatttcgtactaggcccaacacctaggacaacttgggtttcaagtcgatccgtttctttcccgaaagcacttgttttctcattttggatggagaaaaataaaatgctcgagatactttttcaatattgtgaattgaagcgcactaggttgacaatatgtcaaccccagattgacaatatgtcaaactaggcgctgggtgccctaggcacttggtgccacgggtgctcaaaaataaaagtgatctaattttgattatgatgcctaaaatatatttgtgataggtcttattcatgtcgaagtataaattttgagccatttacactaagacagatccaaaaatcgaaaccctagttgggatgtcaacttgggcattggttgaaaaccttaggcgcctgggttgacttctaggatgctttttcgtctcttttcagtttccaagtcttggacttaattcctttagtcttcttgattcaaaatactgaaagatgctgagttggaaacaacttggcaggatccaaacatccattccggaatcaacctggacgcagggctaaggaacccttctaggtcgactgctatgatcactcgggactactcaactccaggatattttctttcttaccacgtgtcaaacagtaatgtccacatcaccatagtcagttttcagataaataataaaagcttatgttaccactaaaaagtttatgcctatatacatacctgccagtgtagctctcattcaccttaggaaaatctacatgtgatggtgaaagtcttttttgagaagatacacctgttttcatgttgaatctcatctcatacctaaacaattattagagaaaataataaatatcactatagataaaaaaaaattggtgacaacatactgtaagggtattttctgtttttgttggttcactgagaaattataaattattttttatgatagtgtacattatagttatactaagcatatcttgcttgttttcaagaattttttatagtgaagaaaataagattcaaacattcaactttactcgggcaatagactacaacatacaacgtcatattaacaaaattagaatataataacttctcaaagtaggaaaataaaaagtgacaatatatataaacttaattacttttgcccataaaatgtgaaaaaattcttacaaagaagcgtttatgttaagcttttgtttgatatccccaccgtacatgctcaaatcaagattctcaatacgacaagtgatcataacaacttcatcatcttcttcctcccaagcatttgctatatatatataattaatattacacaacaaatacaaaattagaataaacaccaacataggcatatgacaatatggttaagaaattaataattaggaaacagaaaaatgagcaccaatatgggatatgaagcaatttggaagctcaaaccatttgatcaaaagctcatc

SEQ ID NO: 244604 - DNA, 1649 bp, Cannabis indica
ttgtattagtattatttcatacaatacaatgtttggtatttacttgtattaatagattatgtaaaattataatatattttcaatacactcgaccccaacactgactacgggtcgggtcttgggactgggtctcgagtttaggtctggatcccatgttcgagtcctagtcctggtccaggtcctgggtcccaggtctaggtccaagtcttggctccgggtccaggtctgggtttgggtcctaggtcgaggtctggggttcgggtccgaatctaggtccaagtttgggtccggatcccgagtccagttttgggtctagtttcgggtccaaatttaggtctgggtctcaggtccaagtccaagtcccaggtccgggtctgggtccagggtctcaggtccggagtcgggtcccaggtcctaggtctcgagtcccaatcatgggttcgggtccaggtctgggtctgagtccaatccgggtttaggactgggttctgggtccgggtcgaagattgaagttaacccaaattttttgtaaatattataatacaatctaatacggaccatttgttatgtgttaattaataccacatgcattgggtaataacaatacaactcttatacaacgtaccaaatgagcccttaaagaatgtttaactcaaattttactatatttttttgacaagaaaatagaaaatatccattaatagtcaaatcgaacaaaattcattatatgaaaataccacagaaatagcaaaattaacaataatatgccaaccaacactaccaacatcttcaacaaaaatactactaagatgccatataaagtgtcaaaaaagtgtaaagaatactaagtttgcacgaatcaattttataaataactatccgtcaaaaccttcaaaaaagatatttgagtaaatgataactctattattaaaacaagaattaatagaaaaaaaataaaacgagcaaccatgtaattgacgatctacatgaaagattgaataccaaaatatagggctaataacaatgtggagatctcttagacttgactacagaaagagggagtcatgccagccatgcaaaagtgacatgagctaatcgatgtagcaccgccgatccaccaatttacaaggctaaaatctcttactgtaaataaaacaagctctactacactaaccatagcaaagcagtgtaacaattattcaaagtaaaaacaacaaacataatactataaaaataaatagaacaagaacagtaatcaaaacccatgcgatagaatgaatattgaatactacaaccccaacatattttatatttaaaaagaatttaaatggaagaatgaatgttttatttatagatttattataatcaaagttttattaattaaaattagtgaaaatatataatattgagttattagatagattattacaattttaaaatgatgtgaaccttctaataaatatatagtgctatatagtatacttccttaaattaatacaaaaatatacttatgtcaaaattttagtatagtattatttgtattaaattaataaaatagtgaagttaaaatattaaaatattacttgacatacatatctctctattattaaaatatatttatttcattatttttgttttttattatatta

SEQ ID NO: 244605 - DNA, 1261 bp, Cannabis indica
gtatatttttaagaaaagatgacaaatgttatgtagatagaaagaagtaaaaataaaaaaaatatatttattttaaaatgatgtgtatattttgacaactataaatatggttctcagtgaatatgcttaataccaaaatgttattgataagttgcaataaaataatgaatgattattattgtttttacaaaaaaaatgatttagttatttttttgtattttcaattattgatatatttcttatattcaatttttaattaagaaataacataaattaatgtaaatttttgaataatttaaattagagaataaattttaaataaatatgtcattaactattacaactaattttaaataaatatgtgattaactattacaactaattttatttcgatttattctaaaataaggcagtatatgttatatatttcctatatacttacttttcaacggatattacccattgatgatggttactaaataaatttaactataaatattaatttttaaaatattaaattattagattttgatctaaagacgaataataaaagataaattttaatatttatgcttagtttagctacataattaaaaaaaataaaaaaatatctctttttacactatatcaaaaatgtgtttagatacaaaatattaaatcaaactttatttttttttatctttcttttgtcgaaaaactttttttcttaattttttttccaacctatagaacaactccaattcctataatgtgaaaataagagatcaaactgattagatagaaaaattaagctcaaaaactaacattaatccattcatgagtaatacccattaagagtgcacccatacattattatatataaaaaaaatgatgtaaatgtcaaaaatatataattttttttggtgtattttcaaaagcatgtataactatatataaaaagttcacttaaaaaaataaattaaaaaaaaactactattttaaatttagtattttataaaaattattaatatgattttttttttagtaaaatgacacaaaatattttatttatctaattattaaaacttaatataattaatttagaattaacttttagtatgaacaaatataaaaaatataactaatttttttcataatacatataattagttttattttaatgaaaattaaatttaaagtattaatttgtaccttttagaaaatataaggccattttttttttaaaaaaaggaattatttcataaatacataaaaataataa

SEQ ID NO: 244606 - DNA, 1129 bp, Cannabis indica
cggccaaagttggagtgattactcatggaataatctttgaaaagccatgaagcaaaagactattgtctcgggctaaccaaccaacctcaaaagaactctgagaatcaatcacggaagcatctacattgactttaatctttttactttcgggagctagctaaaaacatgttttgttgtgtaaaaaaaagtaatttattgtttattttgtatgctcttaatacttaaccgttgcttttgaagagccaaagagaaacagccacaagtgaactatattgtgagattcatcataattttgatttattaaaaaagaaaaccattatatgtaaatatatataagttatatatatatatatagttaaaagaacgattatttaactatacacttagaccaaaaatttaaattttaattagaagaggttataattaaatgataatagtgatataagtacctaaaattgtgtttgtaatcagtataaatttaataattctttttagcaacataagtatttaatattagtcaaattgtatttttcatcaagttcagttagtacacaatttgattttgaattttattaaaagaatatttaaaagtaattgatattacatggttctgtccaaacctgataagaatgagtcttacatgtatccttttttaagatactaacagagtctctattgacgaaactgaacgaaaattacagttttacaaacactgggtacttgtaccgccaaaattactaggtttattctgattacaaacacaaaattttgagtacttatgctgttattttttccatatatttttgtaaacaatccaattatatataaggttaatactattttgaaccgtgtgttcggcaaaagttactgatcggactcccagttttgttaaataataaattggactatgtatttctaaaataatacaaaatagtaccatgagttcaattttttattttttatacaactaacttgaagataatttgtagcatgaatagttacagaaaatataaacagtcttgttataaaacatctagatcgagttattattaagtttattttgataaaagatcaacttatattttgtattattttaaaaaatagatggtctaatttatcatttaataaa

SEQ ID NO: 244607 - DNA, 1897 bp, Cannabis indica
aaaaaaaaaaaacaacattaataataagttgaaaagaaaatgaactaataatatgtaattaatttgataagaaaatactcggtctacctttcacacccaaactaactttagaattatgacaaagagaaaagcaatacaagcgccagtgacatagttggtaccaaaatcagttttttttccaaccgaaaggatgaatgattgctttctaaagttacccgttttgaatcgcaatttgcttggcggtcttaagacccacaacaagatgattttggcgcggcttgggcagaaccccctgcctggtccggttggttaattttgattgtctgtggctgcaaccgttcaataacagtacgtaaataaggctctccctccctatgatgctaacaactaatacatacatgttcatctgaaagttgaaaagcattccaatggcacatacctcgactctcgaatcggtatctgcaagtctttgcttgatatccctagctattgaaaagaaaacctcctccacgttcaaatttgtttttgcactctgcaaccgatgagtacgtttcagcaaatttaataaagtaaaaaataaatctgatcaccagttccaccattagtagcaaaaagtaacaactcactgtctcaaaaaatttaatgccatattcgtcagcaagagcttgacccttcgaggtggggacagcctgaaaaaaggggtatgaatcaagacaacattcacaatcaccatatcacatagcgtatagatattgagagaggagagcaaacccttttgctttcatccatatcagctttgttgcccacaagaatcttattaacattgtctgaagcatgttgttcaatattacgaatccaattcctgatatctaaaaacaagaagaaataagattagttacaattcatcgacaaatagaagcacagcaaaacacacagcttactgttgcaatgaataaaagcatgaaatagtatcttactgttaaaagatgactcatcagtgacgtcgtacacgagcaaaatacccatagctcctcggtaataagctgcaaatgagggcagaatacagaatactcttgagtataaagccaacagaaatctatcaagctctaacattttcaatgatgagtaaattactaaccagttgtaatagttcgaaaccgctcttgaccagcagtatcccaaatttgcaatttaatacgttttccatcaagctcaatggtccttatcttgaaatcaatgctgttaaaacagaaaaagtccatattggtgaaaactgactttaagtttaaacaagaacaatgaaaaggagagcggaaaaacaggactacaaatgttaaaaacaccttacccaatggttgtaataaagctggttgtgaaggacccatcagagaaacgcaaaagaaggcaactcttacccacacctgcaatgtcattcacccccaaaatccccaatgtagataacaacacaacacaacaaaacaaaacagagctgattcagaacccacaacaaacatgtatggtacttcatatctcatctcattctggggctgattgtatacacattaggttataagaaaagtgaaaagtaccatcaaacaacaccaaaattatccaaataataccattttcaacaaacattgtgactcagtcagttgaaaaagttcaaagttttatcaagacaaaagcaaggattggttcataaattgaagagtaataatccaatgagtattagcatatcattgagcattagcatatcatccaatgagtaataatctctaaaactacattacattccttaaaaaatacatcaaatctaatttaattcaatacaataaattttaaccccaaatttaataaactgaaacaaaaacaagaaattggtaccgctgtcgccgat

SEQ ID NO: 244608 - DNA, 2521 bp, Cannabis indica
actgtaaggttttttatactttatatgtgtttttttcatatcgttttagaagttcatatttaggatgttaaataacatacttgttaataaatctaagatcctggtaaaataattccaacaaaaagtgcttaacaaagtctaaacacatagacattaagtttctagctattaatagagagagttcagactaagatagtgttattgagtataaaagaacaaacttatttttagcaggcccactaattaaaggtttgacacccaaggtcttccatgagtgaaatactcatatgggtgttgttttacttgaagatgtgcagttttcgtgggagttttttttttctatattagttactttatagattgacattattacactactttaagtaggtttagctttctgtaggttttattatctttattgctctgaatgtattacctttcaattgtgatttgacataaaatttgaaagactgaggattgatctcactaaggaataaatgaccaattgaaaataggcatgattaagatcacattgcatgtaatttccagttacatatacatacttgatctatgtcattaaatatatttgatatggtgatcattgatgggtctagttacgataaatataaagcctgctttgatctcatattggtataggaaatggaccagattgtttaaaggagatgtttggagaataattagcaagtttatgtgcacataaggttatcaaatataatttttattggaattaatttgcagcccaagggggagattgttaggttatttttaataatctaataagtaggcttacaaattaagataatttatttgaggtaatattctaaattggactaaataagtgatctaattaaatgagcccagtaaatattatattcggtatgggctttgcaatgtgtaatacccaatagttaacctaattagggtttatggggctctaattagttttctatataaaaaacattagggtttgatccccaaggctaatctcaactactcttttcctctatctttatcaattgagtgagaactcataaagagaacattagtctgtagaagaccatatacctaccgtctcatctcgtatctaatatcatgaatcaggtatgtcttccatctattgattcagagtaatcttgataatctgtcgtgagtttaagatccatatgtattttagatctaattactaacaaagtagccaaaatattgtatacaaagaagccaactggaaaaaaaaaataatgtcagtaatttatatttggcaaaacataattaatttataaatattataaattatgaaaagaaaattacaaacttaatctatagtgcatgcattcatgaatgctctcaaaatcaaagaaaaataatacatcactaaacattatataatagtacaatagaaatatatataaataaatttaaatatggatggatcaatatataccaatgtatactattgatcattcttttttttttgattgaataagaaatcttattgctccaaccaaacttttacatcaataatctttacaatttactaacaatacaattacattttgattctatacaaatcaagtcattagtatccatgctttatcttcatccttagctttcttaggaatcagccctttgattcgaaatttattcatgtgctgagctttcttgaccgtggtgctgatgagtcattgttgttgattccataacacctcattccttgctttccacacataatacaccaaacttgcaagtacagtctttaccatactcttcctagctgctgagaattttttcgtgttgtggcaagcttgaagtagctgctgaatgttgtttgctggtgttccattgcaggaactttttcatttcttgaaggcaactctggctataatcacactcaaaaaaacgagcgcgtaatagtttcctcttctttgtggcatagtaagcactttgtatccatggtgtgcacgaacttgcttagtctctcttttgtattcaacctttcccaaaacacccaaccaaagaataaacctatgctttggaacaataagtctatcccaaactaagttactccaagacagtttttcatattcagcaaatagcagatgatatccctactgtatgttatatttctgcataacaaaacctgttagtgaaatcatttgctaaaatttactcttgacaaccactattttttccatgcccagctacaatccaatggagcaacatagctccaccaatcttgctccttgatatacacattgtgtatccatttgacaaaaagacaatcttttttactagctatatcccacacatacctccccaaggctgcaatgttccaatgatgcacatttcgaaatcctaaaccccctgctgccttgggtctgcaaactgagtcccatgccactaatccaagactagccccttcttgtgtgcctttccagagaaatgatctgcaagtagcttcaatgtccttcaacagtttatttggtaggataaagatttgagc

SEQ ID NO: 244609 - DNA, 1764 bp, Cannabis indica
cttaggtaaaggttcaaccgtcttccaaaaatttgattccattaaattctccccctgaattaaattttgtaaaaaaaaaaatgagggatattttccacaaaaacacatccatagttatataaacacgtttattaataggattaaagcatttatatcccttttcattcggaggataccccaaaaaaatacattttcagctctaggatctaacttagacctagaccttttaggaatgtggacataagaagtacaataaaaaaatttcaaaggtaaatcagagtgaatcctagaatctggaaagaatttttgaaactttgcaatggagtaagataattcaaaatttttgtaggcatcctatatcaaataagatgcaataagaataacatcatcccataaatatttaggaattctcatataaaacatcatagcacgagctatttctaataaatgtctattttttcgttcagctatacaattttgttcatgtgtatctggacaagtagactgatgcaaaatacctttttcggtcaaaaaatttccaagaattttattaaagtattcaattccataatcagttcgtaagatgctgatttttgtttaaaactaagtttcaactattttgtaaaaagctaaaaaaatctactccacttcattttttttctttcatcaaatagacccaacaaagacgagtatggtcgtctataaaagttacaaaaccatttttttctagaattagtggtgactttagattgtccccaaacatcactatgaaaaagataaaaaggtttggaagaatgatacatagttttaatataagatttacgttggcttttggccaataaatagctttcacattaaaaagacaaaggattcaacttttaaacaaagtgggaaacaagtgttttaaatataaaaaactatgatgacctagcctataatgccaaatcattatttgatcataaacagaagaagaattgatgttactaaccccttaagaaatttattcttagaaatattatcttcaaaataatacagaccatttatcatcctagcactgccaatcgtctttcccgaactctggtcctgaaaaagacaataagattcatggaagattacacaacaattagaatcccttgataatttactcacaaatagaagattacaggttagattaggaacatgaagaacaaatttaagatctattctttcagataatcttataagaaattttcctacaataggtgagaaattaccatctgcaatcctaactttttttatcacatgaacaaggtatataggagtcaaacaaattagaagaatttgtcatatgatcaaaagctccagaatcaattacccaatgagaataatttggaaagaaacaatttaaagcatttatttctttacttgattgtgcaacagaaacattaagaatacccgatgaggacaaagtggattttagcaatgcatgaagttgagccatctgctccttaatgaaaggactagcctcgacttcatttctagtagggttgcgactatttctttctgcttgctcttccaatttgctagttttccataaattctccaacagttttctcgagtatggcgaggtttattatagaaattacaccaaacatggggtttctaatcaggttttggcagatgtggagtgttcttactgtagcctcctccaacagcaaaggatgatccttcaatagtagtgccaccaatccttttatcgagtataacactcctcctactctcctc

SEQ ID NO: 244610 - DNA, 1145 bp, Cannabis indica
aaaaaaaaagttctttgttggctatgatggtctccaaaatttccttgacatctttatgttgtaatgatatcaaagaacgaataatttataagtgttttacccattattccctttcaattcaatgttttttttctcacttttttgataaaaaaattaataagaaacaacccaatatgatgtcgttttctgaaaactaagaagctaaacaaaagaaaacctctcctcccgccgatcaaaaatgccggcgacgaagcccaaagcgcggtcaccgggctcggaaagtatgggcacaagggtttggctctactcaatcttgctcactttgcagtacggcgctcaaccgattatctccaagagttgtataaggtacttcgacgcctttctcaattttttttgacaattttaatcacttcgttatttaacattacgttgttcctgttttcaattttcgtgtttttgttatttcggattgtttgaattaattatacctagattctgatattcggccactcaattgggatccaagctgagctgggttttcagttttatgtatgtctttccaaaaaaaaaatggcttctgatttcggattgaaatgagagattgcaaaccttacgctgtgcaaaaattagaattagattttagaatcttattattattcttagttgggtagattgttttaaaagtccagttaattaaagattttgtttgtgtgtttgtatatattagtctatataaagaatgtgaatgttgttagaaacccatttgaataataagtgaagagaagaatgttgtagtaagttttattgttgtcatcatattcataacatttatgatcatgccaagatatttgcaggctttgtccgtttatttttaagtagaatacactcatggtttatatgatactgtatatgcaaatcattaaatagctatataattcattgcagacgagatgttattgtgacttcatctgttctaacatgtgagattgcaaaggtaattcttctagtgagcagtaattttgaatggatttgtgttctagacataattgattatgttataagtttcatgttcgaattctttattaggttattagtgccttatttgtcatggcaaaagacgacactttgaagaaagtatacaagga

SEQ ID NO: 244611 - DNA, 1182 bp, Cannabis indica
gataaatcccccagggcgacgatctccaaaggtgaaatccaaagttacacgaaaggaacaaatgctctgcagattcctctccccccataaagggcagatcacgtcctcaatatagaatcttttcttaatgatggctctaagtgggaggcattcgacagaatacaccaccaaaggacttttttattttattttattttcttcaagtcagcttgtttcttttttttttctcctttctccgtttcattttattttattgtttctatttcttaatttcttcctgattagaaacttcttattttttattttatattgattaagatcttattgtttttttattattattttcttattctttattgtttccttttacttctctcctctattttcatttgtttgtgcagtataatttttctaaatgtaaagatctccaaaaattattgtggttatgtaaagttagatgtcttccagaaaagcgttcctggaagtttaaccttaccatttggaagaaatcttatggaatgatggatgtaatccagaaggaagttcccgaatgtctatcatgaccactcggatgaagtcttcaggagagctacccttccttcggaaaggagttctgaatggccaattgttcccttctagaagggagtcccaaatagtcgactctagttgtgtctgtcctattcgggaagtccctttagcctacactttggtctgtgttaaccccaaaaatcaacagagttgattttcgagatcagtcaacaatcagcctcagcagtcgagagacatcaactgtaagagtcagttgaagaatgactgagtcaatgcatatggattaaggatcgttaatcttggaaatctatgcttacaagtctcggggtatatccgtgcaactcggaggtcaaccccgtaacaactcatgagtagagttagtaagatcaacttactagattacaattgttggaggattttcgtagtaatatgctcagaattggatcttgcaacaaacataagattcaaagatctcttctttatctttttaacgcatcttgaatcgtccaattctgatatatatcgagagagttatggttgaaacactaaagactgttgaaatgtgacagcttggtatgcatgctgacagctcccatgtgagctaacgagttgttgtgcgaccccttggctatt

SEQ ID NO: 244612 - DNA, 2128 bp, Cannabis indica
attttattcaacccaacataaagatgggtcacaaaaatctaagtctatcccactcaattaagaaaatataaaatttcaacctactcaataaattagtcagtttggataatttagtacatgaacaatcataaaattagtaaaatagaataaaactcgacaaatatcctgaaattcaacaatttcaatagtttaagacaaaattttaacgaccaaaaagatttaggaacatgattaggtagatgttaaagttcaaaggtcaaaactcctaagagttttttttttatattattttttttttttgtatttttacgaaaattcacataacaactaacggaacaccattctaaattacaatctaaatttatacaacagctcatataaaaattatcaaagtaaccaccaaactaacttaaatcataaaaataaaaaaaaaataaaattaaaaataatttctcaaaactttaattaacttaaaatagtagagaatatgtatagaatattctaactggtcgacctagagtatttttcttggatatttttgtatgtatattttataatattggattggatattttgtataaagaaaaaatagaaaatagaaaatgatgattacaaggcaaaggtggcgtcgtagcggattccgtgagatgattggagaatgggggctgaagcggtggagtagagtacggctgtctgacgttgacggtggggcagtttggtcaatctgtctccctctcgtgctgtggcccacacctcacatttcacatacacaaatcattataccacatctccttacatactctctcccttcctcacatgatatgtttcattacctttctctattttcaatatttcttacaaataatttcatgttgtaatggaaataatactactattttttttagttaatattttttaaaagttattatattaaattatatgagtcttgatatttaattagactaataacaatattgatgcataaaattgtactagacaccactaacaccgttcaatatttttttataactaaaataaaagctattattattattttttttttatttttatttaaagtaattttttttttatatttttttaacagaaattcacatatcaactcacataataactaataaagcaacctaaatcgtaattaaaatttacataacaagccacgcagaaatcactagagcaaccaaactgtaaatttttttaaaaaattaaaaaaaaaacatatgaggtaattttcttttttattattgttactccaatcatgctttatactttaattagtatttaattattttaataatattttataatttaaatttttaaaaaatacattaattttataaaataatagtattattaaatacaattaattattttaaaataagcttaacaaaaaataaagaattctctatctatttttttattatagaaagtcattttttgtatggttagaactcattcactcaagtttcactcttcattttagctaaagagtgtgtttagagagcatgattggagtggagatgttgtacctttatcttaaattctagcatggtatcaaagaaaaaaaaaattctactatctctgaactatttgggatctttcagtcaatatgtgacaatcttgtattgggattttaacctgtttcaaaaaatctacaaaattttcgacgtgtacactcataaattatttggcctagtaaaatcctttcaaatatagaactttggttatctagtctcttaaaactcgttcattatactcacacttctaaacccaaatttaagagagtagtgtattagaaataggcccacattagtaatacatggaaagattatactttatataaaatgaatgagctactcatttcattgccaattaattttgagatagaacctcatgcacatttaatcctaaattctaacattttttttaatagaaacctaattaaatatatgaaaactaattatgcctcttgaccattacaaacaaagtactctggtatagaggaagcctcaatcatatcaattatatttttaattaaaatgtcccacttagccaaaattgtgagctacacaattaaaaaggcccagacacattcgagaaagtacatctc

SEQ ID NO: 244613 - DNA, 1739 bp, Cannabis indica
ttaattatttaataataaatagaaatatatcttttttaaattaaaaaaaacaaaaaaaataaaataaaatgtacgctggttggtttcggttacaagtatggcctcagattcctgtcaatttacaatattgcccctactacgtatctacaatgtatatttactattttaaccttcttcttcttaaaagaaaaaattcaactcaatcaaagggtggtatactgtggtcttgtttagttgggttttttcttctcattttagattctctaagaagcattttttgaaaaagctactatagctaaattatgctaagttctgaactcatcaagaagatttacattgttgagtttaggagtgttaattgggtcacattcaatgtttttaggtctatccagatatcatccaatcatatattggatgttagattttaccattcgatccgatccaattagtttcggtcatccaatcgatccaacatccattagatattagattagattgattctatccatttaatgtatttcatatatatttattggtgtaatttgagtttatccagtattttagacttagtattttttggattggatcggatccattcaatattttaagtctagtgtgtattggattggactggatccatccaatccaagaaaaaaagagtaaaattttaatattaattttcatatatacagatttgacgtattacaatataaaatataattacaaaaatactaattagttcgattagatgttggatgtatttaatttttagacacaccccatccaccatccgattcggtctaattagatatttaaaaatagcatccaatccgatccgatcacaattggatatccaatattggcagtcggttgtaattggatcagtcagttctcattggattaaatcgatttatacacacccctagttaagttcaatcaacaaacctcaactagaaatgttagaacaaaatcaaaagcaagaaaccaaaaatagaaacttaagaatacacaaaagaaatgaacacacaaaattttagagaggttcatacttcctccaatgtggagagcctattcctctttcaattccttccaatgaattcttcttcactaatcaatggcaaaagtttgatacaatatgatatgagtaaccttcaaacttcaaaaacaatagagacccttaggaaatcatcttgatcaagatcatcatcttccttttgatttctcttctccctttctcactagaatatcttagacacacactctctcttagttacaagtttacattaatattggttaacattttacactccttacaaacctatatatatatagagagcgagagagttagataaactaacttaactaatgaactaactgaaaaaactgtcttgagtattccttattccttattaaacttgtcaaataaaagtgtgtcatgtcatcaatccaatgggagttaagtgagggctgattccaatataaattgtgtgcaatttgtctttagaagccaaaaacaacttttaaaagcacaaccaatcaagaccataatattttttgtgaatttaaacttatttaaacattttagttttattttgtaagtgatcaaaatatgttttccacttaattttttagtgagtcatgaatctcttctgttgttttgtgtactccttcaattttctaatactaaaagagaaatgttaaatgatacttatggtacctactcctaacactcttgtaag

SEQ ID NO: 244614 - DNA, 1075 bp, Cannabis indica
tcactcaacctttatatatgaattagagtaggcattagtggtgtctagtgtggtgtagtgtctcgtggtacatccatatggggttattttgcaatatgaacatgtattagtgcttcaccacttatcaaatcttgcaccaaacaccttattattgggagctaatatcatattttttcactaaaaattccttaaaatcccattaagctcttttaagagaggtaatctggtaatttatgaaacaccttatcaccagtatgatagaaacccaactatgtactctcttattctatgaaggcaatataataaataatatttattcatactttcttgtgtatgcttctatgttgtctatgtgctacatgtttattgcctttgttagtccatttgtatgccattttcctatatgtttacctgtgcattttgtgggattaatccttggaatgacttcggttatgtttgctcatacttcgtgatttcactcgtacatgtgcaagacatgtatcgtatctaaccattcagtttgtttgcatgcaagcgtgtttaggctgacttgctagctcggtgtgctagcaagtgtcacatgtcccatctacttaggagtgttcaaatagccagtccatgacagttgatatcatagccaagtgaaagggaaacttggtaacattttcgtgatggtgagcaacacttagagaatcgaggctctatagaagcacatgagggaactagatggcctagacgagagggtcaagaatctatcctctgaaagtcatgactcgaaggcaacggggacacaacaatagtttgccaccttagctcaagattatgtcaacttgtaagtaagggtagtcgcgatcaagcgaaaagatgtcactaccaaaacatcacatgtgccttagaaggagggtcgcatcagggcattagaataagcaataagagacatgcaaactgccattattgggtgtcaaaatgggcaaaccaatttttaagtcaacttgaatggcacaatagaatattgtcgagcgtctattgttgcactttggcaagagttagcagaggtgtcaatcaagataaatct

SEQ ID NO: 244615 - DNA, 2116 bp, Cannabis indica
tcaaagtttttcaaaaatagataggacgtactctagtaatagctataatttataattccataaaataaaatttctctgatactaaaaattacctctatgataagagcaaaactgatggtactcttactaaagaagtttccctatagtatacatgtaactatagtaatgtgtataattaatctttgctattgtactttatagaactatgatgcagtggtggcagacataacaattagagcaaatcggtcgcaatatgtagatttcacattgccatacacagattcaggtgtagtaatggtggttccaatgaaagatcataagaggaaaagtccttggattttcttgaaacctttgacttgggatttatgggttacaacctttggtttcttcctcttcactggtttcgtcgtttgggttttagagcaccaaataaatgaagaatttcgcggaccaccttctcatcaaattggcacaagtttttggttctccttttccaccatggtttttgcacatagtaagtatttccatttattaccattatacatatataggaaaattttaaagtagggcattgttttatctcaatcggtaaggatatgtcatttactttagcatttagagaaaatattatttaaattttaatatatgattaatgtgtgcattgtatttatattatacatttcacttatttttaaaaaatttaaaataatttacattgtcgaaggaaaagtttaaatattcaattggcactagtgcaattgactatttcaaactcaattttcgatacagtaatataaattgaaattatataaaagaaaaaatagatgataacttccttaaataccaaatattttttccgataggaaccaaaatgatacctctactatagttactctatatatggacatatatagatattattatagtttgattgttcttttttattaaaatataatttatgtacaggggagaatgtggtgagtaacttgggtagattcgtggtgattatatgggtgtttgtggtgttagtattgactcaaagttacacagcaagtttaacatcacttttaactgtggaacaacttgaaccaacaatcactaatttaaaccaagtgttgaagagtggagaaagagttgggtatttaagagagtcctttgtgtatggattgttgagacaaacaggttttccagattcacaaattgtagcttatgattctatcgaacattgtgatcaactcttgtccatggaaaatgcaaaaggtggcattgctgctgttgtggatgaaaccccttatatgaaggtttttcttgcacaatattgctcgaaatataccatgattggccctatattcataactactggctttggttttgtaagtatactcactttctcatcttcattaataaattacgagtaatgattattttaaacgatgcgttttgcaaaaggtactaactggactttttgttttgttaaatgacactttagatctttatttttcaaaatgatacttcatagacattatattcataatttctttatttaatcactgttattaattatgttctttccttaattatattaattgctaaatgacgtgtttcattttttttgaaggcgttcccaaaagggtctccacttgtaggtgatatttcaacagctattcttaatgtgacagaaagagacgacatgaagaacattgaaaacaaatggtttgagccgatggacaagagttgtttagactctaaccctaaaatctcatcaaacaggcttagtcttggtagcttttggggcctattcataatagccggagtctcttcattatttgcactcataatctttatcgttatgttccttcataagaacagacaagtcttgttagattctaatgattcgatcgagaaaagaattaaggtttttttaaaaatttttgaccaaaaagacctcaacttccatcattttagaaagagtaatagcaacaacaacaacaacattaatattaatcaacttaacaatgatggatatggtggtacaaacatggtggagttatcaaaataaataatgctgagtgtccttcgagcccgatcagacgtcaaactcgtcgacagactcaat

SEQ ID NO: 244616 - DNA, 1288 bp, Cannabis indica
aaaaattctattccattctattcctattcctattaccattctgattcttattccatttttatttggtaaccaaacgccaccatagtgttagtctacgttgatactttacataataaagtggataaaaaagtcaaaaccaaagcagaattgaagtttagataatttagccccaaaaattcaatctagaggttgattataccaaattttaaagtacagttaatttagccgcaaattaacttttaaagtgagactaactaaactaaaagtttgatttgagatttaaatgcatgtcgaattgtagctgctttgatattatcaatgaaaaatcttcactttttgagttttaaatgctttgcttgaatccactaaattttacgagtgcatgaatgatgcctcatgaaaaattcaaggaaaaaggacatagcagttgattggttttgagtcaggcaaagtcaagatcaaaatattaattagttgactttagtataaaattcccacaggaacaaagtgtattatgcacctaatttatctaagcagacttaatgaatcttttgctagaaattttgtagattgacatgcccaagtatttttcatttcagtttgaccagcagacctcttagtagccctaatatttttagtctaggggaatctgaacattggaatagcgcctatccacgcattccattgttagtcctttcagctataccacctcttgcggttgagagatgcttagttgttgatccataaacaaatgtttagagatgaattgatatgggaaattccatcataaaacttgtcacacactaggcacgcctttacgtacttctcttttcgtgagaatcacacgaattacccaaatgtcacctcacttggttccaaagcaagaaatgaactaccttggagagcctggagcgaggaatcatcatgaagtcccaagaaaaggactttaccaataacctactatcggcaaagaactcctccccctcctccctgataattcgtcaagacatgaaggcccatgccacatctaaacctagaaattttgaactagtagcatgacatgcagaaatcagagatgttttcatgcagtgtatggaggacacttgcccaaatttacttttctcatgaaagaggttcagggcattattgtgcttgatgtatatctgtggcccaataaaagaagacagaaagaaccttgaaggagtttgaacattgagctactcatttactgtcccttctctttatcccaagagtgaattttagttatttactagagtggttgagccat

SEQ ID NO: 244617 - DNA, 2096 bp, Cannabis indica
ctttacatcatttacaatatcaacaatagttctagaataaccattgaaaatatatttttcctgttgatccaaatgttataacaacagctgccaaaattgagatgttaaatcttttgaatccaagagttacttgccatgcaaatccagttaatccaacctttatagtcaatcggccaaccattgtgattcatccaaataaacgttctatcaaggattctcctagacacaacacacacgaagaaagtatgttcatgagtctcaacaacctcctcacacatgggacagttcgtcgaatccaactcaatatggaaacgaagaaggttgtctttagtgagcagatgagagtttaagacttgccaaagaataaaaatgtgcttcgggatagtgatcgaactccaaactgctttattgtacttgatgggattttgagtcaacttactgttgtataagaaggtggtcttgaatttgtaagttgaacccgcccttagtaacttccccctataaaatttcttccttaagtgacaaagtttccgccaataccaactgacatcaggtttaaggttgtattcccaaatgctcttgatctttaaatagatgttgtccacccatttgacccagagaaggtcctgtttagtggatacagcccaaatgtacttagcaagaagagcttgattccatttaatcccatctttgaaaccaagacctccatacgatttcgggaggcataccttctcccaaggagcaatatgaatcttacacctgtttccattcaaaccccaaagaaaacctctgcatagcttttcaatctccttagttatactatgaggaagaacaaaaatgctcatccaatagttacgcaaaccaagcaaaatagaatggatcaattgcactttacctgcaaacgataagtgccgacttgaccagtgtgcaacctttgctttatcttcttaataatgatcccacaatcctctgctctccatttggttggccttaaagggacaccgaggtatttgagaggaaaacatccttcaactagatggaagtccataagaacagcctgcttatcctctgaattcatcccaccaaaataaacaagagatttgttggtgtttaattgtaaacctgaactcaaaccaaactcatccagaatgtgtttgataaccataatcgaggctcttgaacctttgctaaataaaatgagatcgtcagcaaaacaaaggttaataatcttcaagttcttgcacatcgaatggtatctaaatggggaattatcagcagccaaaaggagccttctcgttagatattccataatgagaacaaataacagaggggagattgggtccccttgtcttaaccctttctctcctttgaatttgccttgaatcctaccattcattacaattgagtaggaagtagccctaaggcactccatcatcgaactgataaatctctggggaaacctgaaggcggccagaaggttctccaggaagtcccaactaacattgtcataagctttgcttatatctattttaatcgtgcatctaggagaaatattttttcgattataattcttcaagagatcttgaaggatcatgacattatgagcaatcgatcttccttgaataaacgccccctgattttgattgataagcttagggagcaccttggcaagtctagaacaaagcagtttagagatgcatttatatatcgtagagcaacaggatattggtctatagtccccaactgtagaaggtatctctgtctttggtataagagatataagagctgagtttagctcagttcttacaactcttgttacaaaataagtttgcaataacaataataataataattttttattttattttttatttatgaacctttagcttcccttttttcaacctattttattaaaagggaagctaaagggtgtgaaaatatctggattgacatttagaggcagttttttggtaaaaaccgtaggtatagaatatatatatctatgtcgtcggttgggagttgggaaaaatcaggatttttttaataagcctatggcgtcggttgttaggttatttttagtattaattttagattaa

SEQ ID NO: 244618 - DNA, 1147 bp, Cannabis indica
atatatatatagatagatataaatgttagttgttataatcaacttaatacaaatttatcctcaggctattaatggtatcaattagctccgtttgatcatatcactgggcgtaatctttttttctcatcaacatgaatttggagtccaaccgctcttctctcctctttcaaattttcatagaaaaaactatcatttttagtccatccaaagtaggacctatttttcagttacaaaatttatctctattcattacatatctcttctggaagatcaaaagaaggcactagtgaaataatcaataaaagaattctcatgcattatactgcttgcagcaagctatggcaaacaaactttttccacgaattatgggcgcaacaatggcaaaagaaacatggggcacgttgtaggaggagttctaaggaacagtcaaagtacgcacagttagattacaaaaacttagaaaagattttaaaaatcttaaaataaaagataatgagactacaaaaaaaaatactattttagaattaaagagaaagtaaatcaaatgggagcttatagagatataatttctgacaagaatgtagtccaaaagatactaatttcttgtacagaaaaatatgattcaatagtttctgtgatagagaaaataaaagatttggagactctatcaccaactgaactaatgggctctcttgaagcacatgaaagtagaagagaaaggcataaggaaagtgaagcagaaaatgcctttcaacctaaaatcaattttcaggctcaaaaatcaaaagctgatgggaaaaagacacaagaaaaataaaaagaaaataacgataagtatcctccatgtggcatttgtaaaagaaaaagtcacttggagaaagactactggtttaaaaaaaaaaaccacagtgccaaaattgtaaaaaaattgggcatactggaaaaacttgtcgtttaaagaaatctcatcaagctaatttttttgacgagaaaaatgataaaagtaatttcttctatgtttgccaagctgcaaaagaagaaggaaaagatacttagtatcttgacagtggttgcagtaaccacatgacaaaaaatgaaaacattttttgtagtcttgaaagtgttgggaattattttaccaggatct

SEQ ID NO: 244619 - DNA, 938 bp, Cannabis indica
atatttatagacataatagtaaccttggtgtaatggttaaggtagttggtaaataggttagagggtaaaggttcaaatcctactaactacactttataattctgggtccgctaacaactggtaaattggtttggataagttgaagaatatctagttttttatccattaattaaaatacactcatattatattttattaaaatataacttttgtgaatgagttacccaatatattttcatcatccacttaaatttagcacataatttacgttaaactaaaaaatataatgagaacatcatctataaatataagtatgaaaataaaaataaaaataaataaaataaagtgggtatacaatataatttttaattttattggttttggttactgacttttggaccatttgaatccaagtccacatattacgttaagtaaattcaagaagacctagttattattgtatattgatcagttacatgttttgaagaatcagagattgttgttttcatctttgatttaacttctcttgttttgtcaataacatacaaacctaactcgtggaagaaaacgagtattatttcaactatatatatttccacatatatatatatatatatatctagatattaattgtagtaacgtataatatatacatatcggactcattttacaactttttgacttattccttcgtttcaccgcctaaacgatcacaattaattatataatatataatatataatgtaatgtaagagtcattgtttacaaatcaaaataatccatgccatttctccatctctcttttatctcttatctatccaatattattgtccatttttaatttcttttaattaatagatataataacacattaattatcaagcagtactaccacaactttgtcgaatcaaagaagcgcaggaaactaaaaatgggaa

SEQ ID NO: 244620 - DNA, 1086 bp, Cannabis indica
ggacggggatcacactccccgtctcgacggcgacccgtttagtattttatcttatatttttagtaatattttatattttataatttatgtttgtatttttttagtatattagtatcttttttataaattttaagttatgttttggataataattagtttattgaataataattaatgtataatattttattttatgtatttttatttttacatatattttttattataaactatattttttttttattaggggattctccgtcttgtccccgcccccatcaggggattccccgccccatccccgatggggaataaacggggatgcggattaagatccttaacggggatggggacgggggagcactccccaccccgtgtgcatccctggtagaaaagctaacaaaagtgctctaaaattgtaaatgctttttctaagtgaggttaatgacctaagttttttattagatgatattacaagtttgatatttagtttttcgagtgtgtataatctatactcatcctttaacaaatatgatcgcacataaatagattattgagggtaaaattttcttatattttgattttatacatttaattcatttaattttatttttcgtattaaattttttttttatgaatttgagaagctggttagatataactattaaatactaaatgaattatcattgttttagtttctaggttgtattatcacgtatagatagatgtacacaatgattacctagttgatatttgatagtaatattaactgatgctttaaatttataaagaaaagtaaacttaaggagttttcgttacaaaaaataaaaataaaaattaagtgtataaaaattaaaacataaaagagtttcaccgtcatttactccacataaattagcctcaattagacacaaagtttgcctaatcttttatttgttatgaattatttaaattgtatgcagggccgacacaagcaataaactcaatttttctaaaacctatttttttcaataaagataagaaaaagcctatttttttaaagggtcaaattttaaacttctgcacaacaccccaaaatacttgagc

SEQ ID NO: 244621 - DNA, 745 bp, Cannabis indica
tttacagagttttcatatgatattattaatgatgtaccagaattattccaaaatggtagtcgctagcttattggtggtgcttctctgtcagtgtacaatgattatgggcttccctcaatgagtggcaataaaatctcttatgctcctatgttctctttggatgcctaggttaattgtttaatggatgacaatagaaattgaaataattaggtgattgtttcattttttttaaaaaaaaatggattctcattttatcatgtttatcccgcagtataatagacccttatttgaccagttggtatggtatcatgacatgtctcggttgtacaatgtccatactaggtactggaatagggttcgtttggttggtcttggtcaagcttctagtcttgtggtaactccgaactttaaaataatatttgggaccctcaaaattccgtcaaaagttcaatattttgtttggaaggctgtccataattggttacttgtgttgttaaatttaagtcatcgaagtattaataacagattgtcccttttgtttgccagggccgaaaactgtgttttatggtttgtagcattgtgatcatctcaagtatcttaaaaagcatgtacttaattttgttgatatccctcattaccctagtttagatttttataaatttcttctcttttttaaaaaaattgtcattagttgtgtttgaaaattttggaatgtatgtttcaagaatttggtttagaagaaata

SEQ ID NO: 244622 - DNA, 1287 bp, Cannabis indica
ctgatctctcctcaatcgaaatgcagctgtattgttttgaagagtaggggaaatcgtcgagttgcgctgaggcctgagcttactccttctttagcaagattggtgattcagaagggtaatgtatttcttattctgtaatttggctcttctgttttgttgaaaacaaggcaaagtgttgttgttgttgttgttgttgctttgataatcgcattgttaaacggtatgaaacttgtagtttaaaaatgtatttatttacatatgattttttggattcaggtacagatcgattttgatgtcgatgtttttttctgttcagaaaatctttgtcccttccagtgaaatggtttgcaatagggcaatgctggcggtatgagcgaatgaccagaggccgtcgtcgagagcactaccaatggaatatggacatcataggtgtaccagaggtcatggtgtgtgctgttactgggaattacaaacattagcaactcaattatttgatttaatgtaccttatgcattgttgagcttaagtttacctgtttgtctttaggctgaggcagaacttatttcttcaattgtcacatttttcaagcgaattggaattacagcatcagatgttggatttaaagtctcaagtcggaaggtgggtgtttttcttttttaacttgcgtgaaccttgttttggaagtttcatgacacatcattgttcttaatttgtggagaagttacgtttaccaagttagttggatactgtttcaccgtgttcttggttaactttaagtttaggaatacatgctcttgattttaaatttctctttcaagtgccataaacttctaaaggatttacttttcttatcacaattaatctcaatagcactagatagtagcaaaccaatagcaacaacaatagtaacagtagcagattagtagccaataagtaggaaaattatattgaatgtataagaaaagccaattacaagctattgaagcccttacttaggcccctttgaggcaagagagacttctcaatacattgcacatctcatttctttcctcacttacctatatagagaacctattctcactcacaaacccaccctcaatccaatgactctaatattctctttatttactgtatgctagcacaccatactaatcctaggacctaacattatcgacagctcgatattcaccttatcctcaaggtgattgatggcaccaagctctaaacttgaataataatcctttgtcaaactgttatagcagcgtcaacgtatagtcgttggcaaag

SEQ ID NO: 244623 - DNA, 1003 bp, Cannabis indica
atataaatgagagcttagataaaaatttagatattattagaatgaaaagtagagatactctacatcgctattgccattattgcaataacaaagacaaaatgattgttaagtcaaagaatcagtactgaaaaatataacaaaaacaaaacaaaggtttgattataaatagaatgagggttagggttaaattaaggaaagaatgtgtaaagattgtacaggttggagaggagagatacctgcatgctgaacagagcttgagattgattgtgatgacgagaaattgaagagaacgatggatatcgaagagagcgatgaggagaagatgaatatcgaagagcgcgatggagagaagaagaaaattggggtttctctgactttgaaattagaaattgtttttatatttttgttttaattttagtaagtccttaacatttatcaagcttttttgaaagtgttattatttaatgtaattaaatagtaaaattgtagtagttggctgggtcttacctctcgaaccaccgatcaagcattcttgcactaccttctttctcattccacaaaactaccctcttaatttttgaggataggttgagttagtttatttatttacatttaattaatagttcaaaaataataatctttttttgtaaaaaagataacataattcttttaaaaactaattagaaataataagtatattaggaatttgctaattactctatgttataaatataatcaataataagcctacgtatataaatagacaaatctatatattaacagtacgatgaatatggaagaatttcaaaaacaattattaaacttccaatttccatcaacaacatgggataataagaaaaataatgaagttattcctcatgaggatgttggtggtttaattgaagagttatattacgaagatgatttaataagtaataataattcgatgcaattaaactttcaattattgccaataccaaaagatgatgatttaataagtacc

SEQ ID NO: 244624 - DNA, 1286 bp, Cannabis indica
atatatatatatttcttaagtttaaaagagccctagagttcaagtctagcgaagttccatttcatttagattgatgacatttctaagagctaagcctaagaggctaaggcatagggtacaacagtaaagtagtgccattattttataatgttacaaaattcttaacattgctatgaaatctgaatgtttctaacacaacagtaaggtacattctataaatagttagtagttttttataattttttattaaagtaaaataagtgaaatttagtattaaattacacaaataacaatatcataccagcaaaagtactaaacaccatgcttatcttttagtatttctcaaaaatttcagcacaacaataaaaatttcttcttcctttttcacagggtataacctcaaaaatgaaaaaaaaataaataaaataaataaatgtttgatcacataatatatttctcacaaaactacaaaactaaatgtttggtagcattttgttggttgagaagacaacatcctattttgctgctcctaatcctaatcttaatcttatattccaaggtgtgcagccgaaagatgtttatttatttttctcatcttcttattggccttttctttctatcctattatttaattataaaactgtgtaccttccatttccaaattcaatatgatggatatacctccctaatatataatagtatatctacccatttgcctaaactagaattttaaagtcatattacatgatggacacacacccatacttttcccctcaaagttaaacttaacatcattcctttcctacacacatataagtcaccaaaagaggataagagagagagagagagagtccacaagggttgagccgccctaagacaatttcccataatcatcatcaccatcttcatcatcaatgactcatctccatgtgaaagatatgttattttgttgaattaaattacttattggatttcattttctttttctaacgtatgttatctttatatatataaaaagtaccaattatgcatcttgtcaatttaagagcacactcgtcacattttctatttttttcttcaaaatatttatcaaaactttcatttctttgttttacctcacttttactttacaacataggtcgatttttcattttttttttcctatattgtttaaatgttatatttttaaggataattagtaatttttcccctcgaattctgacatgtactaaatcgtgccctctgaacttttttggtcgttagaaatttcccctgaactattgaga

SEQ ID NO: 244625 - DNA, 865 bp, Cannabis indica
ttttaaaactatatgtttattttttttttaataacatttatgttaccttcaattctatttaagaaactaatgtgttgcaataaagtaaaataaatcacataatttattgtaaatttttttagacatctaaactaatgaccaattagttattttaaaatttattatgatatcttaatattacttaaaattttggtaactttagtttattgtagaaaataatttgttattatataataaattttaattatgaataataaagtgtattttagtaactcgtaaatttagtttgcatattaaattttgtttaattgtaaaatataagttactttttggtaactaaatgaaaaagaaaaaaaattagtcttaaatgtagtcattaaaaaaatggagagagaaataataaaacaacatttaataaataaataaaatgttggagtaaataaaccacagaaatgcttctttctatgcactcgataagatacggtaggtgggttattataaacaaatacaaagtaaaaagaaatagatttcaataaataaggtaaaagacaaataataacatttacaaataaatcaatcacgttgttattattattaattaattgtaaaaacggactctacatctaaatttccctattttctttgggtattatatatacaaagcatattattttgtattttgaaatttatttattaaaagatgtctcatattatgtatatgaaatttattgattaaaaaatttctcaaatcagttcatatcatttatattgggtatatacaaattgtttccaaactaattaaattcccaaaactcctcctaatcaataaacatattatcctcaaattacaaaaagtatatattaa

SEQ ID NO: 244626 - DNA, 1342 bp, Cannabis indica
aatattctattaattctgaaaaaattaataaaaaattattaaaaaacttaataaaaatattaaaatatataaaaaaatattaagtttacgtaaaaacataaagtatttctaaaaaaatattttcaaattttattttatttataaacacgtatcttaaaaaataacaccaaaattattgaaaatccaataaataatttaaataaactaagatttttttgaaaaaaaaaatcaattttatttatatttataaactcatatcttagaaaataaagaaaaataattaaaatattaataaaaatataaattattttgaaaaaaagttaaaaattaaactaaaaataataatgtttacttgaacaaatctaaatttttagaatttttttactcaaatttgttcattgcattcttaatggatatcctttctgaattatttcatacacctatattgattaccataatcaatttttattttttattttaataagattaaattgtctcacttattaaagttttatattcaatatcatctttatgtattgaatataattaatgagattattaatgaatgattattgaataatcatatttcgattctagtgttcaaaattagaaagtcttaactttctcattaatttctttctcatcgtgatttgatttttcaaattacaaagtaatcactaatttaaattacttagatattcaaatcaaactaggtatatcatgaatttcaataaatcttatttattgatatctttataatttattggatttaggactattttaaagaatattaattgtcttggtaaagaacaattttaaatttttaattatgacaatgatcatttccaagtctaatagtattttagtgagtagtatactctcactaaaataattaataagacctaatttttactttaagaaaatcgtattctattctatggtcatgactattaaactttttaattttgacattcaaaattaattattttaactgtcactttgattgagattttaattaattgaattagattcacttaatttttctcacttgtatgttcttaacacataatcttttgtgtcatgatttcaaattgaactcttttaattcaaattatttaaatgaatcaggtttctttacatatctttacatagaatttatgattcaattatttatggattgtgaaggttatgaagtgcatttcatctgtcaccttctcctttttgatccatggtgaggtacaaggcaaagttactccacactgggggttacgtcaaggtgatcccttgcctcccttcttgtttcttttttgtccagaggcgttttcaagcttgataaacagag

SEQ ID NO: 244627 - DNA, 981 bp, Cannabis indica
attctattttgctcgagcctctaaaataataataaaaatgaagttttgctcgagctagtgtacatgtgctacatatagattgcttaaagatatattttttattaattttttacttcttttttcttcctctctctatcttattttgtttttccctttatagcttcatgtggaaaggtagacatttcacaattttagctcaaaattatctacatataatgcaaaaaaaaaaaaaaacacattattaaaaaacatttaataataaaattgatgtaagtactctaagataagtctaccttaagttttgttgggccttagagaaattaaaattttctagcccaacaaaaccactcctcatatcatcattcattataataaccatattcaaaacctaaacttctccacttctactcatctatagtagagtagggtatattagggcccgaatttttttttacaaaaatattagattttgagtaaaagtttataattttattgttatacgaatttttttacaaaaatactgtttttttataaatcaaccgtaaaacaacaaaacagaacaattaaaacaacagtggaacaaccgtgaaaacttaacacaatacacaatataaaacttacactatatttttgaaaagattccaccccacagtaccaaagtaaaaaagttataaatttcagtatgtggtgtaaaaaccccacccgaaaacccaactcgcctactgaccctgtctggcccgaacctggtaaacctgataccttaaagaaaaacaaaaattggggttcagatgccacccagacgatatttttaacggataccagattgacatttttcacatattgagtttcggatgaaattcgaacctgatatatatacgtaaaaaataaataaaaatctaacctaagcctaacactcactcacctcaccatccgccacaccgcttcttcttcttcttcttcttcttcttcttcttcttcttc

SEQ ID NO: 244628 - DNA, 727 bp, Cannabis indica
aaaaaataaatatatgtcaatcctaaaattgaaaaatgaaaaataaaccataacattcacaaagggatccttcccatgtatggtaaggttccgagcgatagagaaagctagagatactcgattgtattggctcgattttagaaagaatccttcaactttttttgtaaagcatacagaagatgctagggagagagtcgcgttagagagaagggaattttcaaatgattcagcatcaacactaagaaagaaaaaaatgaaagagaatatggaaggtggcaaattagaggggaataaaatgccatgtctattttgagaactcattgaattttattttatataagaaataaggagaataggtggtgtagtgagagaattacttggtgttatagattctttctctactctttcgataacttaaataattttgaaaacgaaaatatagtaaattattagcatattttaaataagtaaaataatttttgataattatggtgctagtgtagtcatagaaactcaaatttctcaagacaaactacttagattaaggtccaattataattagtgggatggacatggaatattagtgaggacaacaataccatgaatattgggagacatgatcaaattgactttttaaatgaaaagaataaaacatccaattgttaactgtcatgtgtcctacaaattgagctgaacctcaaataagtggtgttgtacgaataattat

SEQ ID NO: 244629 - DNA, 1991 bp, Cannabis indica
aaaataaagagttttgagtctcttatttatgcagaatagcaacatctctgagaactagtgatcagctttgccataacatgaaaacagactaggtggtgttaaaatatcacttaggcatcaaaaattacatccccaagccgttttctcactcacctaccgtccaggttgatgttggatgtcaacttgggtgctgggcgtagaatagtttcagtaaaatggccataactcactcaatatttatccgattgacgtgattcaacttgcgtttcaaaactattttaatgctctatcaagtcatgtctaatacttcaatatcaattctgaagttatcgactcgaaatttccccccaagggacttacaaaaataactcacagcttaccaagagcaggtcctgcagtcgcaacccgggctccaaaaattgacgatcaacctcagaagttaatttttaccgttagatcatcatttacgatcaaaaatagtcaattttttttattcatatttttggattattttattcctattttcaaggacctctttcacctataaaaagagagttcatctaactcattgtttatattcagaaagtacttctaaggttagagcatctctctctagtttctctttctataaattaaagcttaaatacttagccattttactcataattccatcttgtgagaataaaaactcgaagtagacgtagctccattgctatagcgatacagagagtgaactactataaattgttgtctctatttatacttaacaaatattttattctcgctaatctagcaagcggttgtggtttagaaatctttttccagatttctcagtcaacattttgtcttaaaataatgtacttatttaatagtaatattatatttaattaattaattaattaatataattttatcaaataaaactaaatagttaaatcaactttaattactcaattcaaaattgatataattatacaaaataataatttataaaaaaattactattttgccctcaaaaattatttcttatagaaattaattctttctcaattcatctttctcatgtacaatgttgtatggaggtgatatgggaaccatgaacttatatttcgaagctccaataaatacttgattattattgaactctttaataaaataatcaaatttattaattccattattactctgctataaatatggaattacactctttgacaatataaaattatatttacagaatttttacttgtagttcattgatataatcaatataagtagttcatcctccaattattggttcataattagagctagtcaaaaatattattttacccttcttattatttcttgaattccttatgtgccattaatttaatgtgaacaattaatctataatctcattatagatttgaatccaactgttagcactcccgaaattaacatataagaaaactaatattctatcatttcgaaaagcttagattctattattgtatagtatgttcccaaccacttatgctattaagttcccaaaatagaagttgtaagaatcattttctctgagaaactttaacgagtgaatcaaaaaacttaatgaacacaaataggagtttgaatactcaggattaagactgatctactaatgatcattgttgtgatatgaataactcatttatgataaatgacacgttgatagaagatgttagttcatattggtccagtcatgcataatcaaattatacatatagtacttttactaaatgtctatccacatatgtgatctgaatcaaaatcaaacgcactagagtatagtgcttagtaaactgtacttggtgattcatattgaagatttcatactttaatgcactactgacttattttatttatattgtatgatcttaatcttcttgtacttccttacaagagcatacccactctcagggccgaccctaggcataggcaggctaggcccgtgcctagggcccacactt

SEQ ID NO: 244630 - DNA, 1204 bp, Cannabis indica
acaaaacaaagataccaaacattaaaatagaaagaagatcttctaaacgtagattgctaaaaagtaaaattataataaataaaattgatctggtgacaaataaaagatcaataagtctttaaatatatattataactatttattaataaaaaaataaggaatttaaaacaaaagtcaatccaagttaatgagacattaatataaataaagagttaacaaaattatttaaccaaaattagctcaatattaaatacattaaaacctaagattaggaataccataaaaatataatttatttaagacaaaaaagtcagaaaactgccataaaataataaaataaaacctgatttaaacaattaattagtagaaaaaataaatcattatattattaattatcattaaatgaaaattaaaattaattactgaaaattttcaaacagcaatcccgcgcgtgaatctcggctcagtcaaccctcaatgctccacctttcctcgtcaaattcccctgccggccttactcaggcgacaccacccagtctattctacataaccataggagaaccaagatctatttttctccggttgtaatagcaataaacttctgaaagagagattgctcactggattggtatgccataaattgacagacttagagggaaaggcattttcagaaaaaccactacagattcaaactggtacaaacttccccctatttaaaacactctcagatcaaatatgattaaaagttaccgaagctaaattttcaaaatcacaataaacaaaaatagtaaccaaaagggtactcaaaaactaaagcaagagccgagagaagtaatcaaaagggtatgaataagaaacatacttgatgggaagaagtcttagcaccatgattagcaagatcaagagaaatctccataccataattacgatccaacaaccaaaaccttcttctccctaaactctttcccagatttgtacccagtcgagcgaagaatcttcccaggaaaactcctcaaccctttaacttctggcacataaggctccgccgtttcaccactagccacaaccaaaaaccttccgttataatcctcaacaacatcatcaccgtcaccgttaccgttaactctggctttcactttcctcttctttaaatcctgatcatagaaagccgattcgacggtgcgatgataaacgggttggattt

SEQ ID NO: 244631 - DNA, 865 bp, Cannabis indica
atcatgtttgttgtagaaaaaaaaaaatcatgtttcaaaataaatgggtattcagtatttactttcaaatcacacattattttatgggacaaccatgatctctttacatgaatttcatttgtatggttttttttttaaaaaaaaaaaaaaattaatttgatttgtatggttagaaagtcactgtttcattgaaataatgattaataatactaatgtttcagtggcatctttcaaaaataagataaggtgtgcatataatatttggtcaaactatagtaggttggcctatatatcatatatttctatttacctttataaattttaggtcaaatcctcaaactatattatatttactcttcaaatataatattatgtacatatacattctccttctttttctcaagaagaatttagacttttagttgttcataaggagaaaaaatgttgttgaaataatctcctataagagtacaatgtcatgatattttgaactgttaggcaaacttattattagaagaacttaattgtcacatatggttgtttgttttgcaaaaagggtatcattctctaaagaaatttcaaaaataataataatgataatgatgatcaagttggccatgtgatttttctaccatttaacatacaaatgcattcctgtccacgccaccgtggctgtgcgaatgacaagtaacaacaatgtgaatttggtactgtactgcagtctctgtttgggtgcccgtacagttgactaacatacaagaataagaaccaaggttattgcgtgggacttataagttcaaatttaaagtagactttagcaattttaggttaattaggattttcgttactcaaactttgattagta

SEQ ID NO: 244632 - DNA, 1116 bp, Cannabis indica
gtagctagaaatcactttatctttcctagtgatctacctggtattatctcataagtaatacaactaaaatgggactaggtcattacccacacataagagggtcgaacctctataattctatgtgttctttttatttatatattattctaacctcctcattggtgatttatcaatgcttatttgacttcgagttagttggctatttttctagtcgacacttgtatatctgaaagatgtgcatatttgcatttattatactaatcataccataattttgtaataggtgtgtcggtcaacttgagtgaaaaaatattcgacgatcggaggccctaagtcacagtaacgtaaaatttataagtgtctattctagaacactttttaatacttgtatagactttagggttttctaccgaactacatggtgaaattaccctaaaatgaaatacatattttggctctaaatcacataccataatgtagatcttttcacaagctttaaaatagtatataggacgtctaaaacaaacacccgagtaaatagttatagttaaaatacaaaaattgacctttcctggtactgtccatccagatgtcctattggtatagccctatacaaaccagtcttcaggtttagggcagaaaccacctcaaaatttctcaacttagcctctaaactagctctaattttacccaaatgctaccaaactttcaagaatatcaatatacaacataataaatatattccacaacttaaacaaaacaattacactaacaattaaaatttaccattgttaagctaagtgttataaaacttaaactcacttaaaacttgctacaactgctactacttttaaaaacaaaccacaacaaacttaattcaagcttaaaaatagtttttaactcatacagaaaagaattccccaaagtcatataaaatactatgtttttcaacaaattcaaagtggaagaaagaattagagctttaccttgaattgagttccaaatcctctaattctctagatgaattcttgctaataaagtcttgaaaattgcttaggttactttgggttctagctaggtccgagaaagagagagaaattaaagagagagagagag

SEQ ID NO: 244633 - DNA, 581 bp, Cannabis indica
gggctccctgattcgaattgcatgctcaacgagcttgtgctcggtaggaagtttcttccttcttttaagcggagtcacctgtgctcggtaggaagttttttcctcctattaaggaattcactctaccaagtacatatgagggttaccatactgatgtggtacccacattattcatagagaacgatgataccaccactattcagaatgaaaatctttctcattttatcattctttccctacttttggatgaaaaaaaatactatcatacagatgtgatagacaaaatcgttgagaaaattagaaaattatttacatttagtcacttacactctttcctccacgacttagacaatgatcattttctttgtcctgaaaatgtaactaatgcttgtaattttgagacacaggacaaaagaaaattcattcttgatactgcataggcaagaatattgagttggtatcccaacgttagggcacttgtgtccggcttgccaagactaatcaggttctatctttccttgccttcttttatttattttcagtatgttttagcttttgttttgttttgttagtttatttct

SEQ ID NO: 244634 - DNA, 1695 bp, Cannabis indica
ataaacgtttaaagaataaatgaagaacagtttcgtctgtccttgacttaattacaacaatatatgtgacttaataagtctcagcttgtccattcgtattgcaatcatacaagctcgcaagctctacgctgttgtacttgcaagattggcctttgggcctttttcgttgaatgtctatgttcagtcttgatcgcatagttggacattttatgattgacaacttggaacatgcaagtctctgatgagacgtcaaatacattagtcatttggaccaaacctatgtaaagaaacgatctttactcgtgccaggaaagatatacttggtcatcacatataatcggtatatgcgcgatcagtattaacttctctcgttcttgcttatcttttcactatgcaggccatggtatgcgactagaccctatctcggtcgtatcttctcataagttcacatcatgcgatgtgatgcaattattttctctaatcacattagttgatgtgtccacacttcttttttctacagttaacatcacaacactttctgcggttaacaacactttttgcagtcaacaacacagcaatggagacaaacgtactcttgcgacaaatcattttttcttgtgaagactggctccacgtgacaacttttcatgagactgtctcgtatttctaggtaaaaaaattgcactataacataagtaatgcatcgttagatcatataaacaataataacttaataagtacaagagaacgtttggaacagaagagatatgtagatcatttgaggctccttttgtaggtcgtataaagatcgtattgtattaaataacaaataacactatgttttgaataaaatattatattgtattaattattacgataataaattttaatacaatgtgagtcttattatttaatacataacaaattactcatattagatcgtattataatatttacaaaggctctagagtcaaacttcgccctcatcccgaccccaaaccaggacttagacctagacacttgaaccaggacctaaacctcgggtccaagatctgggtccaggtcctagttcgggtccgaggtcgggtcatagtttggatccaggattctgggtctaggtcataatttggatttagggtccgggttcaagtttggggtccgggtctgggttcgatccgagtttagggtccaaatctgggctgaggtcagggtctaggttcgggttcgagtctaagtatagggtttgggttcaagtttattaccaagtttggggtatgggttcgggttcggggctaggtccgtgattcggggtccgagctaggttcgaagtctagggtttgaggtccaggtccaggtctgggttcgactcaggggtctaggtcccaatttgggtcaaagtttgagcttttggtctgagtttagggtccaagccccgattcgggtccagggtttatgtccgagtctggggcatgttccgattccaaggtctaagtctagttccgagcccgtgtccaggccgtagtcggggttagggtggagtttattgtaaataatttataattttatatagcctattggtacaagtcaatatcagacatagtattgtattaaataatactaatataatacaatataatccgatacaatacaatacatcatggtgtaccaaaagagtgttggaattaattttaccag

SEQ ID NO: 244635 - DNA, 1506 bp, Cannabis indica
ccgcaccgcgaacacccctagagggttgaataggaggggagagatggttgttaatgcaaagcttgaaagtgaccgtagaaatgcaattgtggatgagggaaatgaattttgtggggaagcccagatgagtaaggaaaatttcgaggaaatccaactcgaccctgtcaaaagccttcttcatatcaagttgcatttatgagttcgttggcaatgagaatattgtcaaaaatgattctgttatgaagaaaagctccctgattatgagagatgaggtcttcaaggaaagttttcaacttgttggctaaaaatttagaaacaattttgtagactgtggaacagagactaataggtctgaaatcctgaacccttgagacattgctcttcttgggaataaggaacagggtggtctcattgatagggtccaaatttgccccattgttgaggatgtcaaggacaccaatttctaaatctttcccaccaaagaccaattcttttggtagaaaaagaggttaagaccatcagggcccagggctttatctccagctagttggaagagggctcgttttgacctcttgaggctcgaagggtttggcaagataataagaatgagtagtggaaatacgcttggtagttcccctaaggaccaagtctatggcattcgggtacgagccttgagaagtgaaaaggttcgagtagaaatggacaaaactatcagtgatgtccttaagatttgtaacaacagtgttatctccagggtattggcctttttatgattaattcttttcctcatggaggccttattatgaaaatatttagtgtttttataccccgccttaagccaattgactctagctctctgtttccagaacacttcctccttaagtaacaaagtgtcaagggagggttggagtttattagcttgattaatatcggttctggagagggaatggtttgagtagatttggtcaatggcagtttgcaatttctagattcagtgtttgaagttatttttgcccttattccaggatttcattctgtgaatgcaatcctgctattttttttaaggaaaacagacaggggagaacaattactatccagagtgtttgccttgttccagttggctttcatcatgttagagaaattggattcagtgagccagtgattctcaaaacgaaaatgtgtaggggagccggggttagtgggggaagagttaaaattgagtttgatggctctatgatcagaaccatagaaggaaagatgatggaggatggcattagggaataagttaccccaagcattgttgatgattccccaatccaatcgttcaagacggtttccatgtaaaccggttacccgaatggggcaggggaaacatgtcatgcttagagataaagctctgaaagttatgaattgcgtgaggagggggaaaactagtactactacggtcacaatggcctaagtaatcattgaaatcccccaaaacactaaccaaggggaacctcaaaa

SEQ ID NO: 244636 - DNA, 2127 bp, Cannabis indica
gctgcagattaggtttgtttgctttgtaacctacaacctgaaacacactctcatcttttcttttagtgtccaatctctcatctttagttacaaaacatcaagagctggctgcaatggagaactcaaggcaatacacttaccgtgctggtacgttggctgggaaaagcaaataccagtaagtttcgaaaactggtttttgctgctgcactcaccagcctggtgtatcatatttggaagtcgaggaacttaagctactgggaggaaacaactcctgacagtaataaaatttgcaaagaactgaaggctggagtgaagcaaaggattgatttattttggccacaaaaagttcctagagaagacaatgattggtactcaacattgtaattgctggtttttttttttttttctgctctcctgattatttgtttgtatatacagattgtatagattcatatcaaggcctaaaaattccggtgcttctaggttgtaaaagttttgtgagataatacaattacctaattcataaaaaaaaaaatctttaaccatttagggaaagcaaatatggaagcagatactctaagtcggaaaggtccggggcaagtttacgaattgaaggagatctcaccagaattggctaaagatatgactagagtaagaattgaatttgtgatcatgaaattagctaacattatgttacagtctgacttactagaaagaattaagacagcccaacaaagtgatccagtgttaaaagagtaaaaaagagaagtttggatcaacaaaggatttctcaatttcatcaagtggattttgaggtataaagatagagtttgtgttccagtagatgaaggtatcaagaaagagattctggatgaatttcataccacaccatactcgttacacccgtgaataaccaaaatgtatcaagatgtgaaagcattgtactggtggccaagtatgaaaggtgatacagttgaatacatgtgacaatgtctaacttgtcagcaagttaaggcaaagcatcagagaccagtgggattacttcaacctctgaagattcctgagtggaaatgagtggatataaccatggattttgtggttggtctaccaaagaaaacatggttttatgattctatttgggtgatagtagactgatatataaatttagcgcactttttaccattactgattatgtatacagtggattagtacactaatttatatgtcaaggagataattcgatttcatagtgctctaaagttgattgtctcagattgagatccaaagtttacgtccaagttgtgggaaagtttacagtgaggaataggtactaaattaaattttagtatagcttttgatcctcaaactgatggtcaatttgagagggctattcagatactgaaggatatgctacaggcatgtgtattggatttctaaggttcttggaacaagtaccttccgttgattgagttttcgtataacaatagttattagagtactattgatatgacaccatacggatgttgtatggaaggaagtgtcggtcacctattcattgggatgaagtcagtgaacgaagatatcttggatctaaagcagtccaaagaactagtaaggttattgagaagattcgaacttgtatgcttacctcacaaagtaggtagaaaagctatgctaatctgaagcctagggatattgagttccaggatggagactttgtcttccttcaagtgtcaccaatgaaggggatttagagatttagaaagaaaggaaaattaagccttagctttattgctccctttgagatcctagagagggtaggtcaagtagcctatcggctagctttaccccctgctttttctggagctcacaatgtgttccatatttcaaagcttagaaaatatgtgtctggttcgacccatattctgagttatgaggacatcgagcttcagacaatcttatcgtatgaggaacaacctgttcagagcttggatagaaagagaaagtattgtggaacaagactattcccttagttaaagtgttgtggagaaacaacaagattgaagaagtgacttaggagttagagtcgcaaatgtgggagcaatatctcgagttgttcaggtaaat

SEQ ID NO: 244637 - DNA, 878 bp, Cannabis indica
gataggccttgattagcaagaaagctagagttatcagtaaaagccacatggccttgagttccaagaaaaggatcgttaccattcaagaacggagtgggctgtggttgggcctgagccgtggttgtgccaaaaaaaaaagacgccagtgaaggcactgtttgaaccgaagcaggagtggaggaggaaaatggcggaagcatggttgtttgaatttgtgatgctattgaggtcgatgtcagagcggaggaagaacgaaaaggtgcggtggagtgatgttcaaccgatcctgaacttgggagatcagcaaggaaattgaagttgattacaccagtaaaggacatatcaaatatgaaagaagaagcaccgattggatcagagattaagttctcaagagcgggagaagtaaccggcggagcaacgttggaggtggtggtggctgtcgacgatggagcttggccatggatgatggtcggagatggcggcagaggggaaggggattaactgacggaggcagcagcaatggtggagtttctagttcttggagccatgaggaagatttagggttttgtaaggttgaaaaacataactactgataccattttagagagaaaataactctcttattttcattatatgcagccaaaaatgtggtgtagaatatgtaatgtgtaggggttatatgcaatgaaaagtgtatatatatatacacagtaaaagaaaggcccaatgggccggtattgggccaagtaaacaaataaagcaattctaatataccacacaaggaaatatcatttgaatatgtatatgtatgttattttaaaatttagagatatttgtggcataaatacttttatatactaattaaatacgtgattttt

SEQ ID NO: 244638 - DNA, 2212 bp, Cannabis indica
ttattattgtttccaatatatttttactaacatttgtagtttaatttaaactccattatactgtacataaaagtttaatttaaatttattattcaaatctctctaaattaaatattatttatttttgattcatttatttctttctgaactcataatataatacttaatataaaacataacatacgtgcatcgcacgtaacagtatactagtatatatatgtgtgcaatgagaagaatttgttatgcatttgtaattgatagtttgatgtatgttatattgtgtactaaacaacattgtcataaagtaagagttgtaaggagatatcaatccaacccaggaccaaaatatagggtagttgttaaacacgtattgaaatatctcaagagaagaaaagactatatgctagtctattaaggtggtgttctaaaccccttaagctatgctgatttaaatttttagaatgatgttgatgacaggaagtaaaattctggaaggtctttactcttagggtgaagttgtaatttggaaaaacatgcttagttagattgatttaaagttcatgtaaattaatatttaacataaataacatcaatatcataaattgagtacaaaatacttccagagatgtagcataacggaagaaggctcattcgtttagtaaattatttttagacctattatatagtaatttagttaatgtattattaaaaaaaaaatttgaagattaaaatgttatttttctaaaatggttttaataatgataaatacattttaaaatagtgagagggagagggttgttatctgttatgaaactcatgttagagattttataacaatagaagaaaattaagatatattacaactctattataaaataatataaagacaaaaataagagattgattaaatatatgttacacaatatacatatatatactatatatattgcatatatatataaaaagtagatgaagaagattacaacacatgtaatatgttacatatatatgtaataaaagaagaatatatgtatatacactcacttacaaccttgagtgtagattagtagggatcaccatgacttgaacaaggtattacacctttgtccaaaagcttatttcccctatctctaagcactaagggaactctcatggaaatagctttgggaattatcaagccttagggttttctagcaaagtgctttcttgatagaaaacttcttatccaaatgagcacattagactcctttatatagtgtttaggatatcaccatttgaaattcaaattcataagtcataacctccatggatgttatggactcaataaagagatgtaactcatgcacaccataactcctatagagttaagaatttcaaattaagatgtgtaacatctttttacactcttaatgttggtgataatggtggaggttactcatagtaacaagtaactccccaaatgttacaaaaagatgacaactaatatacattgtcatatgttacatattattagtttattacacatatttaatctatatattatattattataaataatataacaactcatggtctccattattagtctaacacccgagggtatgggaagggcctcgagacggctttataaggtgttgaaccatacattgtctaggttggtttccttttaaggataggataaagtgatctattttagtacaataccgacccttaaggtggcgttactaagttagtcgtggaatatgaaataatgcgttacacacaaagtaatgtccccgtctttgacattaggggacataacttgaccaaacaagcggtactttattttataaagaaaataagagttattttagttgcaattaataaagacaagaacaattcttgtttattattcgatattaatttgaccgaccctaaggcggaactttaatcttaggataatcttatcgtagaattttagtccttttgtttctgaagttgtttatatttgtacatatgtttctttcgtttctaaggttgcttttagtttcttagtaacaatgggtgacgatattttgcctaaatagtagatacatgtaataaataagagaagatattttcatatttttatgtacataattcttgatacaatttcatattttttgatcttcttgtagatccttagaatatttttttggttgtaaaaacctaagagaacgatgaccttgggttg

SEQ ID NO: 244639 - DNA, 2444 bp, Cannabis indica
aagctttaattttcgtacttgtcctaattgttggttcaatttatacatggcgaaaaggagcattggaatggtcttaactcttgaatattcatatgacaataaaaaaataagattgagacatttatgaattccattattgagtttcccttagttgatcgaacaacccaaaattcaatcatttcaactacatcaagcgacctttcaaattggtcaagactctccaatttatggccgcttctctacggtaccagttgttgctttattgaaattgcttcattaataggttcacaacacatatttgtggggccacactaaccctaactattattcgaaacaattcatgggcaactcctattgaagttgcccccttacatttcacttctttataaccttattttatatactaaatatagtttccaaatttgaaacaaatgtaattggaaatgaatttatattcaaactagattgtgtatacttattcacatttaaatacaataatttggtaatagttactataaagattcaaaactaataattaaatattaaacaattattgtttgagaagcttaattattttggatataacacacttgaataaaggcactctaattaacattaagttattccatcatcttcatgtctttaaaaggtgttgccataatatgaattgtttttattacgattaaactttattgttatgaatatcattataaaatctttctgaaaattatttttgcattattttttattaaactttactctataaagtctcccacctatctctttctttagtttttttatttatttatttttctccatactcaattgagtctcattcaatacttttatctctttagctagttaagtgcattattattattaattgtttttttaaaagcataatatgtctttgaatatgatgcagtcacaagggattatcaatactaattggtgttttgttttttaattattataatataatgtgtctttgattatgacacacacatgagccaaatattattctatcatatgtactcaacttcattaaattatttatttattttgtaaaataaaaaacatcatattgtatgatcaaataattaccttacaaaaaaaaatggaaaaagtattatttatgattaaattttttaattacttttcctcaatattgtatatgtatatgttacaaatctattagtaaaaaatattacacattttattttgaccctaaaatctgttggtgatttcttccatttataattagaaaaacatgtgaaaaaaaaaccatttttcctcaaaattgtacattgagcaacaattatataatcttttttgagaaattttatgaaaagaacaaaaaatttaaaaaacaaagaaaaatgcaaatcttacaaaaaatattattttatttacaaaacttttatatattttcgtaaacaactattacatgtttgtatatattggttattgtagaaggtgaacttatctatgcaatctaacaggactcaatcaatgatagaaatcacaagacttgcaaaagttgagcaagtctagagaagagatgttatttatatagagaaggagttgttacagagaagaaaaaagaaccagaaacagccaagaaacaagtggcaaagagtttgttacaatagtaaaataaactgtattaacagactgtataactaactttgagtaatgctaacatcccccctcaagcgaaatggtgaagaacacactttgagcttgtctttaaggtagagaaatcgatccgtagacagacttttggtgagaatgtctgctgtttgatccacagatggcacataccgaacctcaagagttttggccaacagttgatcgcggatgaagtgttgatcgatttcaatatgtttggagcgtgcatggaacacagggttagctgcaagagatgcagccccttgattatcaacccaaattatggggcagcagggtaaggacacttgaagttctttgagaagatagcttaaccaattaacttctgcagcagtatttgtgagtgcccgaaactcactttccgtacttgaacgagcaacaacttgttgctttttagccgaccatgatatcaagttatcccctagaaagactgcataaccgccagtggatcttctatcatcggggcaactagcccaatccgcatcggagtaagcttgaagatccattcgaatagctggtttgataaagagaccctcatgaatagtgcccttaagataccgaaataaacgtttacatgcatcccaatgtgtagtggtaggagcatgtataaattggctcagcttattgacaataaatgccacatccggtcgggtaaggattagatactgtagggcccctaatgtacttctgtatagagattgatcatgaaaaggatcaccaaccgagagtgatagtttgtgagcagaacttgttgg

SEQ ID NO: 244640 - DNA, 1072 bp, Cannabis indica
aaataataaactttagaaaagagggtaaaaataaaagaagacaatataaaaaagatatagagtgtaatttcctctatatattgtgttaaattttccagttattctatgattaatatttagttgttttattatgttattttatgattgttttatataaaaaaaaatatttttgtaaaaaaattcgtgtagcaataaaattgtaaatatctagtacatttgtaaaaccctttttttttttcacaaaacccgcaaacccattcaaccttagttcagttcagtgggataattgtggctaaactaattttgtaattttatttgttggtcctcagtatgttaaaaataaaaataaaaaataatgccaaaacttcctacatagttttattacattagtagatactgttgatgtaaaaaattgcaattttttttacataagttaaaaggcaaccaaattcatcacttacatacttttataaccaatattaaattttttacattggtaagcattttcaaaagaataaagggtagttaatcaatgctaatttttgtagtaataattaataatactacaagtcttaaaatacatttgtttcaaaataaataaataaatatatatatgtagtaaaagaaaacaaaaacatatatataaattttgttacgaatatatttgtttgtttctatacaagaccaatcacacattctgctgcatcttgaaaaaaacaaagcaacattctgcatagtgtttaaatctgataattccttttttttttcttctcttttcttttttttttcttcctttaaaaatttcttattttacagcctcccctaaggaaaagaaaaacaaatattaatgatataccttttagacagtttacaattacatacatgcaaactaataaaagaatttaatttgcaccgcaatttcacggaaaattttagaacatgtgagacaccataacattcttccctgtaaaataaaaataaatatatatatgtaagaaaattatttcaaataactaaaaatacatagatataagaagtgttttaggtgagcgttttctattttcgacaatat

SEQ ID NO: 244641 - DNA, 1755 bp, Cannabis indica
gtaaaataatttccaacataccatgctttagaaaagaacaacacttggacaatggttaaacttcctcctaacaaggaacctatcgggtgtaaatgggttcttaaagtgaagtacaataaagatggaagtgttgatagacataaagccagacttgtggctaagggatatcatcaacaaattggttttgattactctcaaacgttcagtcccgtagtaaagccaattacgattagagtggttattacaattgctttcaccaaaggatggaaaatcaggcaattagatgtcaataatgcatttctcaatggagacatgcaagaagagatttatatgacacaaccaccagggtttgtggatccatgtttccctgaccatgtttgcaagttaaacaaggttatatatggtctcaaataagcaccgagggcttggttcataaaactgtccactgctcttactggttttagttttatttcctctcaagtcgatcattctctcttcgctagaatcactttatcatgctgcatttatattctggtatatgttgatgacatacttgtcattggcagtgatgacacagctgtttctaatctgattgcagagctaaattcagcctttgctcttaaagacctcgggtgtgttgactactttcttggcattcaagtgacaaaaacagaacacgttctcttactctctcaaacaaaatatttacaagacttattatgcaaggctgatatgcaaaacgtcaacacacaaaacacaccaatgaatagtggtctcaaattatcaaactatgggagtgaaccggttaaagatgcaaccttatacaggtccatagttggagctcttcaatatgcaacaataacaagacctgagctcgcatttttgtcaacaaagtatgccaattcatgtattcacctctgcaaagtcattggatggctgtgaaatggatccttaggtacatagcaggtaccttagactatggcctccacatcacaccagcaccagattttggtcttgaagttttctgtgataccgattaggcctcagaccctgatgataggaggtctaccacaggctattgcatttactttggaggaaacttagttgcctggaaatcacaaaaacaagtgaccatttctcggtcttcaacagaggcagaattgagaagcatggccaatgttgtatccgagttatcctggcttcaatctctactaaaggatcttcatgtcaaagaaactggtgtgtcttctgtttggtgcgacaatcaaagcacggttttactcacagcaaaccctgtactccatgctcgcactaaacacatcgagatcgatctttacttcgttagggataaggtgctacagcagcaaattcaagtcaaacatctacctgctgcagctcaaattgctgactgcctcaccaaatcaatttctagcagcagctttactgtttcaaggtccaaactcaatgtggtctcaaaggccaccttgagtttgcagggggctgttaaggacaatggttaaagactgttattgtgttagttaggagttagttacttctgtttgttttcggttgtaattatcttctttctctttcatgagtcttgtatataaaccattgtactctattttcaattcaatgaaacagtgattcccttctttcattctgttctctctttgcatcataacagtgactaaaagtaaaaaaattgtgactaattataaattatcattcctatgttgtgactaaaaagtctgt

SEQ ID NO: 244642 - DNA, 1231 bp, Cannabis indica
ttgaaatagtcatgtcttttgacatgtgtgctgtctctctgtgattgggagttttgtatgtttatgagaatttttatctgtaagctttgttcctgagtgttgtgtttgtcttattggagtgtttgtcttattactatggcctcaagcagtagaattatgaatgatgttgagaaacaatgagccaatatctatttagaagaagaagaagagtttgttactgagttagaagaaaatgaatctgatgaggttgagtacgatgacggatgatgtcttattgggagactcctttctgggaaaatctcagactatcaagtgtttcaaaatatcattgctgatttgtggaaaccagggaaaggtatgtatgtaaaaatacttgagcaaaaccgatttctattccaattctaccatgaaattgatattgacagggtcatcactggtagtccttggacttacgatcgcaaacagttgcttcttgagagattaaagccaggtgataatcctcaaaccaaaccgattaaccatcttaacttatgggtccagatacacgatctgcaacctgggttcaaaacagaacatgttgttcgtcaggctggaaaatatattgggtcttttcttgaatccgatcccaataacttcaaaggtgtatggcgagagtttctacgggttcgtgttaggatgaatattgatctccctttgaaaagacgaatgaagtttaaaagattaagaggggaaacattctatgccaattttaagtatgaaagagtacccactttctactttatatgtggtataatgggacattctgaacatttttgcaaaaaactgtatgaactcccaccggatcgcattgagaaaccgtatagcatcgacatgaaagctccctcaaaacgccagaacttcttggttgcatctccatggcttcgttctgcaaaacaagctgctcagcctggtgtcgtcgacggtgaagacagtgatcgtggagttaatacttctccacaattcaaggcggcattcaattcagtatccgatcatggtaaatctgcctattttgataatacagtgctagctgactatatgcatgatgttagggatattgatatcaattcagtcaatgggggtaatggagaaaaaattccatcaattgtaattaatggtaatgattctacctttatgtctgatgatgaacttaccatataggaccttaaaacaaaacgtggggagaaggggtcca

SEQ ID NO: 244643 - DNA, 785 bp, Cannabis indica
tacaaatattcaatacaagaaaaaaggaaaaataaatggtacaatcaactattaattaccatcatcctcagaagaggagtcatctaaactatcattagctattgcctttcccttgcctctagatgtaggcgaggggcgagtaggtcttacagaactctggtctcctctactataccgaccctacccattgttgccggcctggcaatgtgaggatcaaaaggtggtgctctacggtaagattgcttggttctggccatatgtattagtatcaacctcgagatcactcaaaagttgctagagaatagactggatgctagttcgcaaaggcaagactgactggacctatgataatgcagttgtcacctccctagaccgatctcaaaatcacctacatagaagagacaaggggaggtgagaaacttggaaaagtgacaaggtacaaagaaaactctagctaatcgtacccaagggtacttaccagacaaattacatcgtaccaggctgggtataagagaagtaatgtctccagtataacaacttagaggaatggtgagtcttaagttgtgcgttcgaccataatagactcaccattaagtctcatacagagtttctaagaaaactacgtgtgagactaaggttgtacatgcctacaaggcctaaacgaaacccttattgaggttaaaaaagaacaaaaacttagtcgcccgcttggaacctaggccttggccgaccagggttcccaagtagagagagggtcgaccaggattctgttgggttttatgccc

SEQ ID NO: 244644 - DNA, 866 bp, Cannabis indica
attgagataagaaataaaaaaaataagaaatgtattatttttattacaaattaattatactttaaataaatattttcattgaaattaatgtgatatagatttttgttgagaatattatttagatttaatttggttgttatttgaattgagaaaatagtatttgtgaaaagaaaaagaaaagaattaaagatatggtaaaaattggcccaaaacacttgaaatttagtacttttgaaagctaaaatagcccaagaaaaaggtccaattttggcccaaaaactactctagcccaacataaggtgccacgtggcacctccagattttcccacaactcaccgtcagcagctgtagggggcttgtccccccttccatccccacgcgcgcatgacgcacacgaccccctatgggccactcgtgcttctcaccaccccagcccgtgcttggccttctcctccttcgtggtcccatcagcctaatcatactttaaccacttttcacgtggctttctctcctttcgccacgtgtcctcatgcaaccaatcaaaatgtgacacgtgtcactccgattttacctttaagaaacatcgcaaatggaccaagtgcttatccatcttctatgtatcgacaataatactctccacctctatctgatctcactatcttaatttgtttgttgcattatttctctacttcagctttaaatatcttaaagacatataatgtttcatttttattatgaagtaagtaaatatgtagcatgagtaatcgtctatgaatgaaataaaatatttataaccatgtgagtccatgtttagactacatatatcagtttgtatgattttaatattgaaatatttgcaccaataa

SEQ ID NO: 244645 - DNA, 2864 bp, Cannabis indica
agggtgctcttaggttgtataaaattgcttgtttgatctaatacacttgctgatttaccaaaaaaaaaaaattgtgtaatttgaaactaacatttgttagacatacgaaacaatagtggaacaattcaaaaatgacattaaaaaactatgatagccccagtattaatagttttaatgtttctgcttcatctcatcagaattaatggttattttctaattgttcaagtgttactgtggtagttctacctgtgggtgtagaaaatggaggtcttgttttttataggtgggtttagggtttaggtgggggagggaggggaggaggcacgacaatataaatataatttttgtcgtgtgacagtaaaattataaatatttattcaaaatttgatatttttgtaagttcctattataataataataataataataataataataatcccatttgaaaaacatggatatatgaacacgtgcattttatctacttttgtaatttccaattatgttaagaatttttttaacaaaatatttcccattatcataatttctcatttatatattcatgactgtccatttctacaggaaaaggggagtatattatacaccccaaacaatagtgtacccatgtttaaattcatcctaatttattttttagaatattatttttgataaaagcacttttatctttttttttctttttctttttttttgagtgggcactttatatttacaatgatcttcttttagtacaccctactttcctctctatctccatgcatctcttccatcattaaacatcattaccaacatttttttttaagtgactctcaccaataaacacagtaattatttattttttttttgagtggacatggattcattacatggaaaaaaggcctacaactatttttttttttttaataaaaaaggcaacgtcaaattatagttcttctcatttaaaaaaaaataaaaaaaataaagattacagtccccgacaaaatccaatatcaaaacaataatatacaaattcattttttatatcatctataaaatctcaacatgtaacattttattttattgatgaaatttaccattatctttatttattttaataagaaatttatctttgttaaggtttgaagaacagttgtatttgtataaggtcaaattaatcaaaaaagtacactataggcattttaaagcaattttcacacataagtgattttaaataatttcaacatatagtcgagagactctgagttctatggtcgttgggaccctgttacaatgtttgatatgtttcttgtgttgttattgatgatgagtggaactacgaacgatgcagtggaggaaattgtgaatatggcaagccaactggcggtggaaactgaagatgactgggaagtaaatgaggaggaggcgaaggttttcttggagaagacggttgtgggaaaagtgatttccaggaaaccaatgaacggtaagttttttcattctattttctcaaggatgtggaagaatattggggaatggagggttaaagttattgaggaagcaaatatgtctacttatgtccgaatttcctttgattcgaaagaggatgcccggttaattctcgagaaacagccatggttgttcaatgggggaattttgctgcttgaagaatggccattgtctgatcgatggcaagacgcaggattgaacagggtagttgggtgaaaatgaagggctttgttcttaagtcttttacactgaataatgttaaacgcttggcacaactcgctggtgatgttttggaaattaagtggagtgatccgcaacaggcgtttatgaatggttatgttagagtgaagatcggctttccccttaacaaaagtgtgtttgtgggacgctttgtccccacagggacgcctaagagttgggttcagttgaaatttgaacggttgccaatgttatgttttaattgtggattttggggacatgaacaggctgattgtaaggagttaccagctatggaggacattggggaaggacaaaaggtactgaaatatggatattggctcaaagatgaacacccaacacctaattgcattgttgctcataaacaaaatgccattaaggtgatatctgaaactggaaagaacagtggggcggattatggtttgaaggagaaggtggctgccaccgccattcaggcggagatcggacggaccaggggtacgatgatggtgtctcacgaacaggggagtgaggtggggagagttagtggggttgttgctcccgcctttggtgggaaagaagttggaaatttaaatgatggaaagaacacaaatgggtcggatacttcattaggcccaatggaatagtgccatgtgatgctttggaggcccaagcgtcaaaaattaacacacatatgactaatagtggcccaaccacttatggccgaacagctgaagatgaagtgtcacatgagatatctcattctgcatctcgtaaagaagtcagggggaatggtagtgaggatgagggtgaaggggatcagaaaaaacgaaaagggggtgctgggtttgtagtgactgattctaatgaggggaatgggaagaaaaataaaggcaaagaaattcttagttgcccttcaactttgaatttggatgacaaagttccattgttatcttctctcgttaccgaagaacataaaggaaggaagggtgtctctcatgggcagaggaggaaaatttctatcaagaatcgggcacgcgatgttaatagagaaagggctgagatggggcactcttcttcagagcaaatggtggaagggattaatggttttacggtggcgagatgctcccaggatggcacttttg

SEQ ID NO: 244646 - DNA, 1506 bp, Cannabis indica
tacaatggttctaggcataccatctaatctcacaatctctctgacaaaaaaatctgcaacattagaatcatcatcagttttatgacatgggataaaatgagcaatcttagaaaatctatctaccaccacaaaaattaactccctcccacgtttactcctaggtacacccaacacaaaatctattgagatatcaacccatggtgaaccagcagtgttagatctctcattaccatagttttgagtaggatgagcagcatcagtagctctacccctcttcctgactttcttctttgaagtagtagaggcagtaggaatgccttgaaccacttcccttgccgaaggctcagtttcttttggcactagaatcttcctcttcatatttgaacaagtggccatagcatacaagaagttcatattgtctacaaagaataaagaccagcggttagtacaacaaaacaaaaacaagacaacaagttaatgagcacaatgtggagcttcatccacctgctaattccacattgttctctggaaagtaacttctccatcaacgtggtctaagaaaatagacattctccctaaaaattatatgtcatttctaaaagaagtcacttgacaagataacagtagcattctgagcatcttcatcacttttctcgagtggcatggtccaagatttgcagggaaactagtatcagcatacactctcttgcatggcatgatcaaccccaccttctaatgattttcagtattaaagagagtttgaccttctctctcccatgcatcaatttcaagaaacatggcatcgactctcctcttcatgttaataagaggagcaggtctaatgaaagggcttactttttggaaggtaatgtgtcttgacaaaagaacaagagtatagaagtactcttggtaataaaggccacaattacatttggttatgttttctatgaatgggccaaattgatggaagtgataaaatttgtgttccttgtgggttggacttctttttaagttacaaagaaagtttatctcatgaggagtttgaataggccaattcctaaagaagtagaataagaagaaagttgcaagaattctatagccatttaggtttctctggtaagggtagacactaaagaaatcatccatggatatgaaccatggatgcaagggcaagtaagcacccccattcatatggaatcttgactaagcactatagcaagtattctaagaacccttgggagcaccatgtcaaggctttcgaacaacaattttaggaagacagtaatcgtcccaaattgtttgagcttcaagcttagtgagagtcctagacacaagaggcctaagcttagaggctcgatctcttggatcgtcactatcaatggcagttttgagaagctcagttcccatcactttttcaccgcgcgccttgtccaagctcttagacttaggcacatttagcttagctttaatgaactgagtgttggaagttattttaccaggatctta

SEQ ID NO: 244647 - DNA, 3090 bp, Cannabis indica
aaatgcacataggacaaaataccgagctttgtaaaattactaatcttcccctcacaaaatccttaagcctaaaaaaaacctaagggtactttggtaattttaactaatccgtcaaaccgacactctaaaattctagactagcccataatatttccataatattccgtcccttattgtcgtgacatctcagaccactccatccaatttccaggcccgaatatattttattccagaaatggtatccacgatagccacatattccaataaaatctttgtaattaataaattacgctttaattaatcatttactaaagtcacattaatcaaccctagtaagatcataatcttatctcattactagaataatttatatatttaataaaatattcctaattttaatatcataatatttttcgggatactacatgcaatctagccctggtcactggccccaacgtccaagatgatgtgaaaaaggagaactttagggctttagctatttgggtggtggagaaaagttacaacacctatcacagatagaagaaggaggaagacctgatcactcagacatgaagtgccacatagcgtatggaaggggaagaggatgtaggaaagagcctcgaggcttcacacccacaattttctttccctatacctaacaaagggactttgggttccatctcttctggtgtcagtatgtctccattatttttttttacattccatctatcaaagagtattctcatgcatggcctataggctttgacaaaaggctcaataggttgatgatgccccgttctccttggggtgctagagaaaaaattagatatatcattcatagtggacttcctggatttgtctcagatgggatcgattctccctatcccttttttattggatcactttgcatacttagtttaaagttagtttttcccgtcccatagctacctaagggatggcgaccccaataatttggtttatcaatttggtaggatttcctcattcaaaattttcttagcattagtcgagtcattctatgtgaaattgatatgatttctaaggtcccctcgttcagcattgattttttctctctagtctaccgacggatctatcttagtttgaccaccttttatcctttgtccttagtacacaaacatgatgtgatgctccttactatcctagggttatgcttccttcgaggaaacatatttccccagaaacatttcccttgcaggaaatcggaatgaaccttgtgtgggtcgtgatgggttttatttgtccctagtattagcgaagggttgtcctttgaagtaggagggtctttagaagggtatgggataggactaggcattttttcctttcatttttcttaagttcatgagggaccttatccattgtcatgaggcgttaggggaaaagcagtgtgatcaactttgaggcccacctgggccgttgcctgttgcatagcaaccaacgcctcttcaattctcctattcatttctttttgtcatgcaacatcttcataattctttgtgccttgttttcttaacgacacaagctctacatacacatcttctttgccaacttcataggtttctttttcccttaaataatcaggattgttggtatcgcctcctttcacatccaatcaagaaactactccttcttcttgacgtgccgtgttatcgaactattatggatgtcattggttgttccttgttaccaccatgtagacatgggtttgtatatatttctttctaaaagacttatacaactctcaatgaaagcactaaaatattgacagagctttttggaaaccactatagaaatgttgagaaggatgattaagaaaaattagtatatgattttaagtgattctactattaatgaattttagtccacgagtcacttttatttatgattggaatgttctcttgatcagagcatattcaagttacaataccagagctcactttttgtgtgttagtctaaaagtctcctttcctattgtgtttccaggtacttataggaaaatgaaagggcaataggaggtaaaaaggtgtgtgaactatcagtctctagttgttacttaggctccatggtaggagtttagtaagataagatttgtcctatacgcatctaatttgatagtgcatagctatgactttgtctctacctaggtgaatgggtcatgagaatcagtatgattttgtaatgatactaatcttgcgccattgtggtcatgtacataatcttcttttgaatttgtgttaggctgatgatgatctcctagaagacttgttatccgggggctagacacctcctgggcaactaataatttgctttattattttccttggcaacaagagatccacattcagatgtctcttcgctcgtatagtttgggagtctttcctattgtgtttccaggtacttataggaaaaagaaagggcaataagaggtaaaaaggtgtgcgaactattagtctgtatgtgctacttaggctacatggtaggagtttagtaagataagatttgtcctatacgcaactaatgtgatagtgcatagttgtcactttgcctcttcctacgtgaatgggtcgttagaatcaatatgactttgtaatgatactaatcttgtgccattgtggtcatgtacagtaatcttctttggaatttgagttaagctcatgatgatctcgtagaagacttgttatccaggggctagagatctcctgggcaactaataatttgctttattattttccttggcaagaggagatcaactttcaggtgtctctttgctcgtatagtctgggagtggagtaaatcgataagggacgttgatctatctatgaatgggtccctctctgccacatggggcttcatatgtgtgccacatattttgataaaaaaatatgtctaacacctttgcgatatcatctgcatcataaataagtaaaaattaattatttaattaattttaaagataagtgaaatgcaattattcattttactacttaaattaattaattaataaattattttaaataaaattatcacatagttaattaaattaaaaataataaa

SEQ ID NO: 244648 - DNA, 2377 bp, Cannabis indica
ttgaatttccttggccaaaattgctattgttctgtttccctctattactattgttgttctgggtctaggcgatattactggtcccagtcgtggcaggtaagttgttggggttaactgtctttctcttgccaatttgcacctatcgaacaacatcttcaagttttataaaaacatcaacccgatctaaaaaatctttcatatttttggttgatattttccttatgtctctccaatggtcgctcagaggtaggatacctcataatatggttgtataccgcccttcttccgttagaccattgacctttatggctttggtcatgaacctttagatatagtctttcaaaggctcacttggcctttattttatttccactaagtcttgatggtgggactatatttggctagaagacaaaaattgcatgtaaaactcagtagtgaatgcttctcgggaatcaaatcttcctggggacaacttaaactaccactattgtccagtttcaatcaaggttattgggaaaatcctacagctaacgtcatctatcaccccttgtagatctgtttggatcttcaatgtatttgatgtggccaaaggaacttctttcctagtgtatattttccaagttggcatcttaaacttggttggtaagggcaacacattgatgcacacagagaaaggtgaccctcgagccctatcaagttccaagttggaaagtcttgggccagagaggccttgtattaggctcttgagttaatccaattgtgcttgcactgtaggatccactctggtcgttccttttctggccaacccttgtggattgataggaagttatttattccagggcatgatgtttccatcccgattggttcttcttcggttcaaatagttttgaaggtttacttctcccctgggacctattttatcaaagatagaatctttgggcattgggttagaatttttctaagtatttcgaggaggaatgttgttatcacaccctctattgtcattgcgctatctttggttggtgcacccatcaatagggtagctagttgcaccatccccattgagattggggtcaaattccccactgtgagacctactttggccttgcctaggtcggatatcttcatgttgacttagaaatctagactagacttctaagccatacccgctcgctaaattggcgagaatatgaaaagttgcataataattgatgatgatctaacggtaaaaattagcatctagtagtgatggctgattttttattgtctagcggatcccgttgcgagttaattagagcttattttgtaactcccttggaggtgaattttggtgacaatagcttcagaatttggactagtgtgtgaggcaagacttgatagtgggattaaatatcttaaaaatactggttgaattgcatcaattggatgaaaattgagtgacttattgccattttactgaaggaagttcaggtttcagctcccaggttgacattccagcccccatgttgacattccagcacccaggttgagatctgatatcaacctggacattgtaaaagtgtagaaatgtccaagggaagtcttttaagatgcctaagagatggtttgacacccctttgtccttttatatgttttggtgaagctagtcacacattcttggagatgttcctattttgaaaaagtagaagactcgaaacttttagctttcgaatgaaccaaaattaaagttatgaatttagttgatctgacttaatggatcattccacttgtgaaaaacttgacaaacaatcaaaacgacatcagattcacataagtaaaacctagcgaattaggtcaaacgttgacctgggggttagggcctttaaattgagctcccaagattctatttttgatactcaacgtctcagatttattgtcaacctgggcactaggccttattttcagggacttgggattgtggttttatccctgagtttagttgaatctttgttatttttgatgatggtgaatatttttggagcacttttcacagatctgaatcggaaacattccaggtagacaaaatgtcaacctaggcgcaaggcccagtcctaggtgtcaacctgggcgctgcgggtccctcttctacccatttggttcccaaaaatagttgattctcaatattttttgaaaacagaaatgattcttgaaacaattatgggaaaactccattttgtggcccagattgattaattgtcaacctcggcgctgggccctgttatttgtgcccaaaacttgttgttttttctccaaaaggacctaatttcctatttttaatgaagacaaattcaatgaaaaagttgtatctgttgggttttgtgccctaaataaaacccat

SEQ ID NO: 244649 - DNA, 6942 bp, Cannabis indica
ggtctaggtctaggtctgggttacgaatttgggtccagaggtcttggattcaaacactaactacgggtcaggtcaaagcctcaggtcaaaattcagatctcggtcttgtttccagttccgatcccgagtcttgtgtcgtgtcctaagattgggtttgggttcgggttcggggttgtgccccgctagtaaggtccttggttctaggtccagggtcaggtctcgtgtctcgagtctggagttgaattttgggtctcggtcccagtttcgggtccaagtcccccatccaggtatgcatccttggtccaggtctgggtctcgatttgggtttggggcccgaatccatcatctaggtccggatcctagatcccagtctaggtgcaagttcggcttcgggttcggatcccgagtttgggtccaagtctaggtcccagtacgagtttaggtttgtgtctgggtccgggtcctagtctgattccaagtccctgttcgggtctgggtcgtggtcacgatccgagtcccagcaaaggtctaggtgttggacgaggttctggtctgggtttcggtccatgttcaggtcctgagtctgggtccaggtttgggtctagatccaggtccaggtctttgtcctaggttctgatctcggtatgagtatgggttctggcccgtgtcaaggttaaggttttggggtttatagttttgattttagtatttagggattcagggtttagggtttagggcttagggtttaggggtaagtgtaaagagtttaggatttagggtttaagggtccgcttttttgggtcacagggtacgatttaaggttcgggtgtgggtctgggtccaagtcctggtctaggtataggtccttgtttgggttcaagtctgattcagatcttgggtcccggtccatgttcgtgtccgtgtctgggttcatgtcaaggaccgagaccatggtcgagtcttgagtcccagtcctagtcttgggtcctgattctagttcaaattttgggtttgggtccccaatcgaggtcagggacctaggtctaggtctgagtctccaatctcgatcttggtcctgcatttgggtctgggtccaagtttgtgtctgggtttgggttcgtgtcttgagtcccgatccgagtttttattcgggtccgcatcccggtctgggtgtgggtctggttccaagtcagattcaagttctgggaccgagatcgggtactagtcccttggtcttgttactgggtcctggttcgcttcatgttctgcttccagtttcgggtcacatagtacaggtttgggcctgggtccgggtttgggtccgagtccgggtctgggtttgactccgggtatgggtcccagatccaaacatcgattatgggtcgagtccaaacccggggtccagattagggtcctagtctcgcgtcccactctagttccactttgggtcccaagtcctagtctgggtccttgtttagggcccgtgttcgaggtcaggtcctaggtctcggtgcctgttctgaagcctgggtctcgggtccaggttctccatccaggtctgggtcctaggtccttgtctgggtctaggccccagtcggggttcaagtcgtagtccgagtttgggttcgagttttcgatctcggtctgggtcttgatttgggttcgagtctagagttcgagtccagatccaggtcctaggtccggaggcccgagtccatgtcccccatctaggtccgggtccatgtttgggtcgggtcatagtcgcagttccaatatcgaattcgtgtccgggttttttttcacgtttgggtctgcttcgttgtctgaatcttggtccgagtccaaagttgggtctgggtccaattatggaaccggtctgggtcttggtttgggtccgagtacgggtgtaggtttgggtctgggtctcggtccggatccgggtcccaagtttcgatcttggtctgggtatcgatccaggtttgggttcgagtccaggttcgtatccagatccatgtctaggtttaagtctaggtttgagatcgtgtccaaggttcagggccaacccgatccaagacccgaaaccggaatcgaacaaggactgggactagaacctagacattggactataacaggacccaaacctaaacccaaactcaaaccaaaacccataccgggacttggacccagaccggtgacctgtgactgggacctaaaccaagactgggcctggacccagacccagacccaaaaactgaggccaaacccaggacccaagaactagactacgacctttgacataaactgggactaggaccccaactcgtacccgacccctaactaggacctggactaggactggacccgaacctgaactggaacacgaactttgacccagaccgggacctaagacctgaacatagatgggggacccagacctaggaattgggccccgaactaggaccaaaaattgggcctcaatactaggatcgggatctgggacccgaccccagacccaaacctggacctaggacccacctcgggaccggggatctgggatctgggacctgtagtcggtgtctggatctaggacttaaacctgaacccgaatccaaactcaaactcaaactaagacccacacacataccatgacccagacccgcactcgggaaccaaaaccgaaacttgaactggaatcggaccgagatctcggaacaggaacaggactgggaccttgacttgaacctcgctctagacccaaataaggaacaaacccagactcggacccaaactcgaatcgaacctgtaccctgtgacttgaaactagaaccgaaactagaatataatcgggacccaaatacaggaccagaaccaagacctagacccagacccaaaattggaacagaaccaggatccaaactcggacatagacccactatgggattgggtccagcacctgaatccaaacacgaaccgggactgaagacccgaatctataccggaactctgacacgaacattgaacgagactcgggacccaaaacttggatcgagaccaagaactggaacctagtctcggtctagaaccttgacccaaacccagatcgggacatgggacatgaaccgaaaccagacagggacccgtgattgggatccagatcttgtctcgcgataagagaaccggggcttggacaagaccaatactcgatgtcttgatttggaacttagacaaggagctgaagctagaccaggacctggacctagacctagacctgggacctgaaaccgaaacttgaacgagaacgtgaccaagaccctagaataggactgggactgtgagcaggacctagacctgcactgggaccgagaactagaccagaatccagccctagaactcgggactcgatctcggactaaaacgatgatcctgacctaaactgggattcagaccttgatatggacacgaactgagacccagaccagaataccgacccagacccaaacacaaatcgggatcgaaacatgggaccttgacccagacccagacatagaacaaaacccgaatctgggacccagaccaaggacccgaacctggaccccaactcagaccttaacccaaaccgagatccgaaaaacccgtacccggactcagactaagagtcggaccccgaccccaacttggatccagatccagacccaaaactgaacccggactcggaatcagaactagaactttgacaaggaccaagacttgagaccagtatcgaacccaaacgacaacacaaacttggccagaacctggaccgagaccttgataaggattgggacttgagacttgggacccaaacttggaccacgacctagactgggactttgacctaacctggtcctaaaccctagttgggacctgagactcgcgacccagaccaggatccagaccctgacaaagacccgaacctgaaccagactgggatctggactaaaaccatgactttggacccgaaccccaaccaggacccagacaagcacctaggaaccagtctgtgatgggggaccaagacaactgacctaggcccaacactcagacccagatctaaatccgagactcgaacccaaaccatgacctgcctggacccaggaaactgaagtcggacctagacccagacccgaaacctcccccggacccaaacaaggataggaacctagacacgaacccatagcaggacaaaacccgaacccggaccctaatccaaaattagacccaaacctgggactcaaactcagagccagacctagaatctgacccaaacctagacctgcacctagactcgaactcgaacccagaccgggatcagaacctaggacatagacccagaactaaaccccgacacagacaaagatcaaaacctaggactcggagctgaagttggacccaaacccaagaccctatcccacacctaaagcctgatccggaccttgaccgaaatctggaccagaatccaaactcagactaatactcgaaccccaaaccaaactcaaacccaaactcgatctcagaatcgcaactggaactagaatcaacctaggactaggaccaggaccaggaccctgacccgaacctaaacaaatataaaaatccaaatcgagacctgaacctgaaccgcgactaggatccaaacctgaacctatactgggaccaaaacccataccagaacctagaccttgacccagaattaggataagaacctgggcaacagaattggaactagacctagtacacgaattgaaaccaaaccgcgatcctagttcgggatccgcatctggactcgaggattggacaaaacccgtactcggtgtctccatttgatacccagcccagaccctaacccagattaggacctgaatcagagccaaacccgaacccagtcccagacccaaaccttgacccaaacccgtaccctgtgccacaaaatttgaacaaaaactagaagtagaccgagacccagaaacaggaccggaattaaggtttggacctggacctggaatcgtaattggacctggacctagacatggaactgtaattgggccaagaacttgactcaaacccagacctagacctaaattgggacttggacccagatcccaacccagacctcgattcggttctgaacctggacccaaactcaaacgtaaacatggaaccagacgacacaaaactggggtcaagacctagaaccgctcccaactctcggtcccgaaccgaaactctaacctaagacccaggaccttaaccagaaccagaccgagacacgtgatagggatccagattagggactctgactaggacccgaaccaagaccaggacccaaactcgaaacctgagctagacttgggacccaacactggaacccgaataaaaatcgccagactaggacccttgaacaagacggaccgtgaccaggacctagaattgaactcgaacctagccactgacgcaaatcaagactttaacatgggcccagacacagtagtgtacccagactgggatcgagacccggagcaaaaatcaaaccgagacctagattgggactcgatacaagacccaaactcagacctgattgggacccgataccagacctagactcagacctagatagggatccagatacgaacctggactcgaagccagacccagacccgaatcgggatcaaaactcaggacctggatccggactgagaccctggccatgacccagaccttgacccgcacccgggacgcgaacccaaacgcaggacccggacctggacccagactcggaccaagactcagaccccgaccgagacttagacccaaacccaaacctagacattgaatcgaaataaaagctaggacaaggacctaaacccgaacatggacaaggggtaggacctaggacccggacctggattggatacttagactcgggcctcaaaatccaaacccagatcagaactctggactcggacccaaaccttgacctagactcaaaccaagatctagaaccagaccaagatcagaacccaaaccaagactcgggccaacacttgaaccccgaacgggtcctggactcggactgagacctaggactcgaacctgtatgggggacctggacccgagacacgggcatgagaactgggaccgagaaccaagacctgaccccaaacctagaccgggacctaggacccaaagtggaactagactgggacccgagaccgtgatccacatttggacccatggcttggaccttacctgtagttagtgtttggatgtgggacccattcccggactcaaacccagacccagaccctaactttgaccatgtagttacttgggtcctagttcgagtttgggtttgagtctgggaactagaatctgacgaggacccagacccagacccggactgggacgcggaccccaattaaaactcaactcgggactcgggacacgaactcgaacccgaacccagacacggacttggacccagagctggatcgggattggagacttagacctggacccaggacccaaacctacattggggacccaaactcaaaattagagcaagaatcgggacccaggacttggactgggacccaaaccgcgagcccaatctcaatcccaaacccgaacccagacatggacacagcccgtgactcaagatccgaatcgaaacgagactgggacccaagattgggatcttgatcttcacccacgacccaaacctagagttagacccgagacccaaaataagaacaagaaccagaatcaggaccctagaacaggaattggacctggacccaaaaccggatctagacatggaaccgaacacggacccggacctagaccgggatcgatacccaaacctagacccaaacacggatcaagacttgcgccaggacctaggac

SEQ ID NO: 244650 - DNA, 1543 bp, Cannabis indica
gttgtattggtgtttctttgatttgatcaaatttgagcttttaagctcaagttttagactttaatggtagattttgtttttgatgcttgatgatgaaattttctattggaatatgttgtttatgtaggtgttctggagatttgaagaagttttggggtagttttgagttgagaatgagatttttgaaaaatttatagtagaaagcgacagactatttttgcagaaagagtataccattttcagcaagcagggacccaataaaatggtttgtcatttttttagaaatgacctatcactttttagggtattttcctaaagcctcatttttctattttttttccgatatttagggtattgacatgttatttatcaatggggaaactattagttttaagtctatgtccctaaaaagtgatttaacgaatcacttactagtttatgtatgttgtgatttaagggtttttaaaatgtcaagcagtagtttctactctggttgaccgatacacctacatttagaattgagataaaattagtataataattacatatatgtatacatgtttaatgtgcatgtcagtttccattagaataacatattagggtatcggtgaggtgtacatagatacaccgagataccaacagatatatgttaggcaaattagtagccatcagattagcatattatgatattagtaaagtgtacatagagttgcagtgagatatcaatagatatatgttaggctttgtcatacggacgttccagatcttgtacgcatagaaggcgggataagactgtaattaggtgaatgggtgtctgattataatctgttttatgtttatacttttcttactgagtctgtcgactcacatatattgtttaaatgtgtaggtaaacgcaaagtaaaggctaaacaatagtgagctcgggatagatgaagattgtacatatcgaggcaattagacttagagtgtgcagatcttcaggacaattgggctttattttgatagttgctaggtgacgaatcttgtagtacaagtatttgtaaatttttgtaacttttaaaataggatcctagaatatgtattacatgtatttatgtaagtttaagttcatttatgaaaattttactatcacatttttttagtaaaccctttgagtagtaaaggaatgcacagtaatttgaaatcacgataacatgcataatttggtagggtgttatagtattaatgtctatttcaagtcttacgaaaagtttatacattgtgaggatttgatacaccacaatttgttggctttgatgtatttcaagtagggatgcacatttcttccatggggatgggggcccgcgggacccatccttgatggggcggagattctcgaactaaatggggaacgggtggggacagggattattttttatccccgaatattaaacgaggtagggatggggatcacactctgcaccccgacgggaatccgtttagtattttattttatatttctaataacattttataagttgtaatttatgtttgcattttt

SEQ ID NO: 244651 - DNA, 1634 bp, Cannabis indica
gtaatttgtaaattacggagatttatatagtatgtatgaatataatatgagctatttgtggaataaaaatattttgaagttttgcgaccttggagactcgatcggtggccaaaaatgtcataacaagtttaattattagatttgatgagaatattatcataagttgatggtataagtattggagttattagaagtatttaagatttggcctaattccttaggattagagatttcttaatgattcagaaatactaaataatttttattaataaaattttattactattattattattattattattattaaatttaaagtatctgtatatgttaacattttgaaaaaaagaaaaacataacctaacatatttctttttccctcttcgtgccataaaaaccaccaccaccatcaccttttttcttcaattttttagcctaaaacctgctctagtaacagctgtgagcatagacaagttcaagggaataaaaaacttgaggtaaggttttacttttccttaagtttcaagcttgagttatagttttaagggttgaaattttgttctgtgattgatggggtttaactggaccttgggttttgtttttatgatgttttaggactgtttgtgatgcttatttggtagttttgatggctgtgaggtggaaaagcaccaagcttgagttttaagctcaaagcttgagctttaatggcacttttcatttaaggacatggttttgatttctgttacattgggatagttatatgtgtaatatatatgtgttttgtgaagtttggaatgatttggttaagtttggagctagtttggagggtttaaagttaaggaaaaatcgtgttctggttgttcagaactggaattccggatgataccaaccggaattccgtttggtcaattttcggaaaagctgaatttcgtattttggccataatttttcactcaggtgttcgttttagacgttctatatacagtttcgaagcttgcaacaagctctacaatatggtgtatgttttagggccaaaatataagttttattttagtgtatttgaactacgatgtttggtagaaaaccctaggttgtcctttgcaactgttaagtagtgttttggggtaaacacttattggtttatcattgttatgacatagggctcaggatcatcgatcgctctccaagcaagtcggccaacatacctaaaccggaacttgaggtaagaaaagtatgatgtaccacatggcatgataggttctggaattatcgattgtctgattaggcaatgataatgtgatgatactatggacataatatgtaggctcacctgattaggtgatgcgatatacctggcgacgtactaggcataagtacgggcatcagtgacatatgacgagtatcaagcgtaggtacgggctcacctgattaggtgatgcaatattcctgacgacgtatcaagcgtaggtacgggcgtcagtgatatgaaattgcttggttatagcatagattgaaaccattgttggttcttcctggcgatgtatcgggcgtaagtaggggcgtcagtgacatatgataagtaccaagcgtaggtacggactcatctgattagacgatgcgatatattagtgcca

SEQ ID NO: 244652 - DNA, 2290 bp, Cannabis indica
gtttcctcaatatcaatcaaccctttctctgttttgccatctacatcactcttttctgtttccattacattgcccaagttcccaactggtttttcctcatttgatagaaagccaatgatactaagaccatggtcggaggatatggacacagcccgaatggtcaaatcggtccctgtgtgggtaacggtttagggctccaatactgggggaagaagaatttgagtgctcttgttagcactattagaaagcctatgatggctgataaaataactcttgagagatccatgatcaagtatgctagagtgttggtggatgttgagattaaggatgaacctccgagaacaattgcctttgttaatgataagaagcaactgattgaacaaccggtttaatatgagtggctgccaaccaaatgtgcggcttgtgacttgcttggtcattcggtttcaaattgcaacaaagggaaacctgtagcctggaggaaaaaacagcaaggggacaagcctaaagctgttgaaaaagctactgaaaattcactctcattctagattcaacgtttaatgcatattttaaaaatatcaatataattaattctttatggactatttaattatagtttttttaatgataaataagatattataaaaatgttaatttaatataaaataaataaggcattagatgatttcgttagaaaatttgatatggggttactgatggctttactcttataattaatgtgactattctcttatatacacagtttaaagtataattattgtttaggaaagaatttagatggtggaaaattaaaagaatatatttatgctagtgttctttatgtgttgaataagagttgcatcgtggtcctattccggtgtaagatgtttaatttattttaactttatttgagattacaattattgtgtgtcttgataggaagacgagatggaattcatatagcttatatatatatatatataaatgtatagattctgttaggtagatgtgaaggaattcttatttggcacctattaaatatatgttgattcacatgttatgtgtactatgtagtcttcttgttagtcatttttttttattttttattttacgattcaaaatagtgttatatggtggttttaatttattttcactttattttagattacaattattgtgtgtcttgataggaagatgagatggaatccatatagcttatatatatagattcctttaggtagatgtgaagaatttcttatttggcacttattaaatatttgttgattcacatattatgtgtcctgtgtagtttttttttttttttttaagattcaaaatagtgttatatggtggttttggatctgtatgattatagaaagtaagtttggtatactctttcatttgcctttttctagatttaactgattgtctgtaaattgatggtatatttttactagtaatatttggtcttaattttttgctaggaaaaatattttattttatttgatcaagggtgttcattgtttattaacaatctgataaaatcctataaacttgtaatttgttatttaaagttgcccactgaaggaaggactcgtgggccacaacccttgggaacaacaaccggatcttgtcttcagtattacgctagagaaataggactaggagttggcaagcccgcgattggtgagcctcatgtggacttaggagaggatctcgagttggccagactcagagaagccctaagccaagtaagcctagtttaagaaccacatgctgctgattgtgatggattcgctcagcagagacgcgaattcctgagatagatggatgaccaagagtacatcatttgatctcacaagcaaaattggaccgctgcaactgagaggccaacaatatgatcaagcgattcaatgacagaaccgatgggagaggacaggatctcatcaaagatccactttaaggaagactcgttgatagatcaaggagggtctatcgataagctgaccaacctagtttctcaagaactgggacacatcttccctttccagagggaggacagacctttcctcaaaggcctaatgacgagaatagccaaatcctagcgaccaacgacatagggggttagctagggatctctagcacagcaacacccctcattgtatagcctatggttggtgagcgaccagcaaaagcgcccttggccagccaaaagacaacacttcctaccaaggggagcaaggtgcccagaggtcaatcttcaactgacaaggaccgagagtgggtggaa

SEQ ID NO: 244653 - DNA, 1214 bp, Cannabis indica
tttttcaagtgtaattctatttagttataacctctcaattagaatattattttcttggtcccaagtgtattcttagatagagtttctactgtaatatatatatatatatatatattttacatacatatatatatcattatttaattaatattttttattgattgttttttcgccttattttcaagttccttttttattgacagcaatgtattgggttgccacatgaggagaatctgagaacttccttagcacatcctgcacttgttgagcagaaagtcaaggctagaatggtgcctaaacatatggaatgggatgttgatttgattcgtgatctaatgaatggtagaggtgcggagttaattcttagtattcctctaagttatagtacataatgctgcaagagaacaaagatgctaaactgcaatcggttactgctagtttttggagaaaactgtggaaagttagggtgcctccgaaagttaaagatctcttatagcgtgctgcagcaaattatttgctaattgcttcacagctgcgatctaagcatgtagaagttgaagaaaagtgcccactgtgtcatatagcgagaaaaacaacttttcattgcttagtcgaatgctcctttgcaaaagcatgttgggaacaaacgtgtatcgatgtgattaatgcaaatgtggtgactttctctggctggttagataacatgttgcaggtcttggatggagagaagcaaagaacaattgcaatgacctgctaggctttatcgaagatgagaaatgaagtggtttgggacaaaaaataacctacggtggcaggggtatctattttggctcaattttatttggagcagtgggttcgggcacaagatagaaaccaggttccccgtgcttcattcttgactgatgcagatgcaggtgttcaatggcaaaaaccagcaacaaggggtctaaaagtgaatgtcgatgcagccctttttcctacctcaaatgtgtacaactatgtctgtgatgcaacagattcaacagggtcttctttgaagctatttcttgctgtcggccaggtcaagttaatcctgaaatggctaatgcttttggagtaagagaagctttaagttagataaaaaggaaatcttggcaaggagtgattgtagaaaccgacagtctcattgtggtgcaagcattacgtagtccattatctatgtcatcttattttgg

SEQ ID NO: 244654 - DNA, 691 bp, Cannabis indica
attggtaagcacgtacgtacgtacgatctctaacattattagtgggttcgtatatatataaaaataataatacttaatttggataagaaaatgaaatattaattgattacacaagaagctagctagctaatagctatatgcagtcataagtcatgtgaagtgtgaaaacgtattctaaaatacagtcgaaattaattattattccaaataattaggattaattaattaattagctaatatttgacctatatattctaaacgtacgtcatgtgcttgaaccataagttacgcactgctacatgaatatatattgggtaaatgcatatgcatgcatgcatacatacatatatacaaattaattaaaatacaatattacataattgaactagccatatataatgtataattaataaattaattatcataatattatatacatttatatattttaatttactatattattataacatcgattttatatatagtcaattgtttttacgaattaatatatcaaaaaatatacaataatatatcatgatcatggaatcaagatgatcttctgttaaaatattgtgttttataatgtactaactattattattgtaacacatcaattaatttgagcattataagaaaaaaaaacctagtatagatgattaattttttaaattaaatgaaaaaattaatt

SEQ ID NO: 244655 - DNA, 2035 bp, Cannabis indica
aaatcattaaaccatgtaacataaaagcgatttctgatcttttattaattagtaaatctgattatattaaggttttatttagggcacaaaacccaacagtgttcacaatcctttaggagccttctaataataccaatcttatcacccaatgcccttccaaagacctcatgcaacatttccaaatttcacccattaccattgagtgataaatcaaccactaatttaaggtgagggaaccgtgaccttacccttttcataagatcacgaaattccaaatattaatcttatctccattcttgggtatatttacacttccagatcttagaatccatctagtggataagatccctttccataaggtagagtcgctcccttgagtatcaatgtcccaaaaggacttcttgcaacaatacttagtagtcaagcatttcactcataatttttcactatcactagccatatgccacactagctttaacagaagagccttgttaggtggtgtttggttggaggtaataaaattgaatggaatggaaagaaaataatttttattccattcctttgtttggttgcattttaaagtattggattgacattcaaatagaatgctctttctaccattttggtggaatgactattccattttaaaaaagaaagaaagaacattccaatgtaacaagacaaaaaatttaatgatttttttatcaatttattttatgcattttaaattttattccattccattcatattcctattcccattcccattcctatattttcattcctcccaaccaaacgccaccttagtgtcttccaattgtctatatcccaatcctccaagactcttaggcctaccaattttatcccaactcaaagtttccttgcacctctcttttcccatatcacttgcccaccaaaaatttctgaccataacatcaagctctctacaagtagagaggggaaccttacaagttgtcatagtaaagaacggaaggttcaaggtaaccaattggattaatgtagcttgacctgcaaacgagaggagcttgactttccaaccctccaatttattcaacatattttccttaagtctatgatcctcttctcctttcctcctcttaaagacaaagggatttcccaaatgcatttccctgcctgagcactcttggacaacaagggcatacataatctcatatttttgcctatgatccatattcagggaaaacaaaatgctggatttcaacttgttgtattgctgacccgactaatattcataggtgtcaaggcacctatttatcacccttgcattttccacattggcacgcgcaaagagtatcgtgtcatccgcaaacattaaatggctgatcataggactaaatcttaaaatttcaattccatgaagatttccttcttcttgttacttagctaatgacttagcaaggatttcaggacaaagtaagaaaaggaactgggacagaggatctccctactaagaccacattttgggaatattttcttttggggatttttgttgatcaaaacagagtagggaactgtagagacacatttcatgaggaggttgcacacttggtcatcaaagccattagcccaataaatgagacttagagtgacttagggttttagggttgagttaattctctttatatataggagagcttaaaccctaattagcaaataaaataagagatatttacatattaaattaatgccccttaaacatatgtattttctatctaatttattgggctattaaggcccaattcgtagtctagcttgcagtccacgtgtaaggttgtgcaccaaattcctgtcaggtccaatcctggccgaccatgcacctacaggaagcaggctagccagccttgtgccatctagaagctggttgaccataaggtcagccaagggtggctggctagccctcttaaggtggctggtctgtcgctcgttgtcccgtttgagagtcgagacttcttgttggttaagatgctgacttgacctccttgttggtgagttg

SEQ ID NO: 244656 - DNA, 2150 bp, Cannabis indica
gtttagccttgaagttcttggaaattgtagtggatgataatttagtagagcgaattgaagtggtaaatcttgaatctttgagactatcttgtgtttcttttgacaaaataaatctttctgtgtgcaagagaattagaatcttcaggttagattgtgattatgatatgaaagatttgtcatctttggaatatctcatttcaaatcttcctcttcttgaggatttgactttgagtaatgatgaatgcttggccttgaagctcatttacatctcgagtgaaagcttgaaaagtttcagtgtagaaaactcgcgtgataatgaaatgaatgttattgttaaatcagctccgaaactagaatcatttcgttataaaggtaatcacaaatttagtataacaatggagtcatccaaatccaatttgttgaatggaacattcataattgttgtgtggccgtggcgtgaggactttgatggagattggtttatcgatttgttgaattttcttttgaatctcgattgttcttggaataaggtaaccctacatgttgacacacttcaggtatgtttatttctcattttatttgattttatggtgttattttaagtgcatattgttattctttgtacctacatttaagatttaattccttttttttgtaaggctcttatatttccagaaaatttgaggagggcatgtcgttcttctttgcttaattgggagcatcttcgagtttttgctacacgcaaactagagagaaaatcagaactgagagatgctttgttgtggatgtctccttctataaaaacattatctataacgaaacgatcatctcttgcatgcttttgtgatcaattattataggtaggagtattagattagttgactctgtatgcaaatcttaaacttcacaagaattttttgtgaattactcttggatatgcatttaatctttatcacatggatctctcatctcgcctttaaaacttcaaaacgataagtcgttatgttcttatggttttgataacttgagagattccttgtctaaaggattttaagcttggtagagatactttctatgcttgtgttgttagtaatgcatttcatccctttttatcattacaatgaccgtatgatttgacttgttcagctcaatcaaaacatacaatagaaaattgcttagtaaccctgagaatcaagattgattagggtatcccattgttaaaggctaatggtggtttcaaaatgttctgctgtgtatttttccaagccctttcagtatatttcaaatttcttgtatgggccttgcatctaaattctctgtttcttctataaatttttggtgatttcagtttaacatttactcaaattcctcatggccgatttgtaacaagttaatgatggttttcaagatgttctgttatgtactcgtctaagtccaatagcaaaatatcagtaaatttgtattgatagctcatttcatctattttaagaagtaatagctcatatacggtatacccataaatgggtaaacttaggaggccgcctctcacgaggtcgttaccgacaaccggtgtaatctcttctcggagcagttttgagctaattttacactgtaaactaactcaaaaccacgacacgttaagaagcccatgcatcttatatatagttttatatttccacacccaatatgggactctaacatctcagatggtggctagtttttgctcaccaatctttagtgattcttttagctcatagcggctctttttggtttatttttttggaccggcagtattttgggttcacaacatatcacatgtaactcttttatgactcactatctccaaatcacatggatttctcatcttgtattataaaaattcaaaatgataagttgttagcttctcaatctcatggtttagacaacttagagattccatatctcaaggtttttattcttgttccaaaaatatatccccatcttttttccttttagaaaagttttcatagtataatgccaatgcgaataattttttccatcttcttgttctaagatcgatcgatgatgagtttgtcttgggagagctgccctgtctgtggtagcaagtttctagtttaatcttatgaaagtttacttggcaaaaataaaat

SEQ ID NO: 244657 - DNA, 1087 bp, Cannabis indica
agcaaacaatctgatattaactttgtcaatccatataaagacgcgcttggaaagttatattgtaattgaatttatatgtaattagagataattatatgttttgacatgtttgtctgactatgtaattacattataattgtgtaattgtaggtaattaaggggttccaattacactctctaactctcatggcttcccatgagaattgagtgtaattatagtgtgtaattactataaattttctattttaaatattaattattaaaaaataatatttttgtgtgtaattactatttattttgccaaataaaatattaagaattgataaataattatcactttatatctaaacatatcttatattttaaaatatgatgtatatatatgtatattgttacaaaatttaatatttttagtaggaacaaataagtttaagactaacatagtgaatttctcccaacatttttttttcattttttctaaataacttcattagtgcacttggtgtgacttttagcatagcattgtcataacgagaggcatggtgcccaacaccactaaacatataaattggtgtgatttggtactgtgtctaatacagtttatttaaattcaaaaatacagagaatctgatatattaaattacaataatagtaatattccttttagcaatgtttttgagcttagcttacaatgtgatatttgagcaccttgagctaagtaaaatgaacatccaatatgacgacggagctaagggacccttttcttttttaaaacatttaactatattttattttttaaataaaaaaataatatctatgtataaatctatatattagccttctctaatttttttaacttcatttttccagccaaaaaaaactgtcaaacttcattactagaccttacacataagcacttgttaattatttacttcacacgcatttttagggagacaaacaaaacacgatctaacaaataatgccaaaatttattattattattattctatagcatagaacaattatagttcatttgtaccaaaatttgaaatataaaatataattaatcaccttagattccttcaaa

SEQ ID NO: 244658 - DNA, 985 bp, Cannabis indica
aactaaaaccccactagtctctggctctttgtacaagtattcttcttcatttcaaacatcatacaaacctccacaaagatgtcaatattatccgttgtttatctatgtaaccatcatctcactctggacttttcctctctaaaatcaacatgggtgaaaaacgataagtaaaatcaacatgggtgaaacttggtattttgatccccacagacggttcagcacagccccaaaacttgagtacgcgtgaaaaagctaatagcgcctaaaggggttcaaaggtgaaaaagcatacacaaatgaaaatatagacataagaaagtgtgaaaagtataaatatacgtactaatattaccattgttataagaatttattttcttttcctaaatcctacttttccatggaaaaacaaaaggttttcaatgtcatcaagcactcatccaaagtagtattctcttcatctttattcttttggccttttcgacaattaagcatccacttggagaaatctaaagacccactaatttctaaagccaaaattcctcatcatctcaatcataactgtgtcactgtcaagttcatgctttgaaattcaatgtctttgcaagttgcaacaaaaaataatatgaactaatgtgtattagtatgaataataacacgttaacagaacccgggaagcatacaaatttacagtaaactcatataaataatatcaccaaacttgttaaggtataacttataaggaagaatcacatacacccaaatggtacttttcaaggtaaggttacataaagatgacaagcatagttaatgaaaagaaaaaaaaaatgaattaagtgtatataagagaacagattaagattatgaatatgaatattaacaagggatttgagaagtgaaccactccatgacatgaattggggccttcacagctccaaagccaactccactattacagtcacacagaaacaacaggggcatatgcacg

SEQ ID NO: 244659 - DNA, 1674 bp, Cannabis indica
aatttttcataaatatatttgaagaaaaagtagtttacgacataaatacctaaatttaatttttggcggtaagaatacttaagttatatttctagaacttcgtaggtgtacctcgtcgttaaatgtcaaattattatccacgtgtcattttattattggtatatttaaactatttttttttaaaaaaaaaaaaacgtagggactaatcagtcattgccacgtggcaatttacttaatacttaacagtcaggtacttataaaagttttcactacaaaaaatgtcacttttaccagcgcatttcgcaaactgcactagcaaaaaggtcaaagtcttaccagcgcacatttgcagtggctaaaatctaacttttactagcgcatttacgccctgggaaaagttatttttgccagcgcttttcattttgtgctagcaaaagttctaataccaacgttgatttgttaatcccttttgccaacacatcagaagtaaattctattttaccagcgtaattagtgtttaatgttgttatgaatatcaaacttttgacatcacaaatgtgctggtaaaagtgatatttcttgtagtgtttcaaaatataacttaagtattattaccgtcaaaaattaaacttaagtatttatttgtaactagacgttaaatttagatatttataccataaattactgaaactatctaaaatatatttatatatactcacatttggtttttaatgatgaaataagttatgtataaattgtacaatttttgaaataattgttcaattattatatatttaaacatataatgtgtttttaattaactaaatttcaagtaattatctatatacgttaaaaaaagttgtaattatatattaaattgacttatttatatttgtataaatactttttgtatttgtataaatgaataaaaagtgaatattataaaatataaataaaaaacctttaaatttattataaaaaatattgtataaataattcatatttaaaattgacactaagattacgtacagtttttactgacagattaatatgaaaattgatgcacctcaattatattcgtttaacaataaatattataagaccattctctgctgtaattttatagaaatttagctcaaaaaatgactaagtagtgttatatttggtctaaattatgtagttgtactgtaatatatatatatatatatatatgtatatatatataagatacaaattaaattccaaagtcaataattttattcaaattatataaaaaaaaattatttaaatgaataaataaaatgttaaaaagttttaattaattaataaaaatcattaattaatggtaaataaataaataaataagtagatttattttagtataaatttagcttaattatactatattttgtgtaaaattttgttcaatttttagcatatgtgttaaattggacacacattttacactattaatatatattggagcttcattatttttcttttttgtaaaaaacacgagctaaaatgtacaccactatttttcttttttggaaaaacacgagctaaaatgtacaccactttatagccgtctatgaagatgctctaaagaggtgttagataatactttttgaattaatttttttaaaagtgataatatttagaaaaaaaaaaaaa

SEQ ID NO: 244660 - DNA, 2090 bp, Cannabis indica
tcaatttttttattcctaataattcaaccctaatcctagttgaaattagtataaaaggaagctatggtctcattatccaactaatgcctcttatgctaaaaaaatgagttttctttctaggtttgatgagacctcttccttcttcttcttcttcctctatttgaaacactatagcctctcttcacaaataatttctagccttagtgattgagtgcatgcccacacatatcaagcaagtcctcaatcatagtgtgtaagactatgaagaatccacacacaaggaaggagtttcgggctcagatcttggtgatactgtgttacagaaaggatacaagggttagatatctgagcgaaatgagtcatttaattctgctgcaaccactgtaaggtttctcataccttttatgtgtttattttatatcgttttagaagttcatgtttaggatgttaaaaacatacttgttagtaaatctagatcctggtaaaatatattccaatagttgcagttgtcagcaatcgggcgtaccataccccgtaaaggagctgggaattttggtctcaaattctcgttcattagcttcggatctaactcgtgttcttttccagtttctgaggaggatgtttgagtgtggttctgccttgctctgggaagcatactattcttctaggccatgtatttcctctccgtgactacttagaggggagttttcttgaaagtgcagtagtaatttctcagcttttgtgagaaaaagccatggggtcaatggtgaaaacccagttgaattgctggccccaaatgatccgtcaatgatatacccagtaagggaaagtataggctcttatggcacgacagacttttggtttcccagagggaaagttgggtctgcatccttgcgcagacaattttcctacactatggtctatttaaataatcgagagtcatgctgaattttgtaatggcaaatttttggctttcactaggaaaggctaaaggtgcacaaaaaatttagacactgactttgcttgcaaaagccggagggtgaaacactacagggcacgcaagagtcatgttcaattttcatggagcaagctttggcttcggcaaaggaagactaaagtagattaaaaattcaagtgatgacttcgtttgaaaagatcaaagggagaaagcttcataggaaggaagacaaacatcaagcaatccttccattctaggaaagagggttgaagacgtgcaatagttccagtgatctttcttgcacaaaaacaacgtgcatgcgagagtcatggtaaatgtttacgaagcaagcttcagctttcgcaaaggaaggctaaagttgcttaaaaattcaagcgacaacttcgcttgaaaagattaaagggtgagagcatcacttggaataagacagacttcaagcaatccttccgttccaggaaagagggttgaagacgtgccatacccccagtgatctttcttggacaaaaaacaacgtgcatgcgagcgtcatgttgaatttttttgaagcaagctttgacttccccgaaggaagactaaagttgcttaaaaattcaagctatgacttctcttgaaaagattaaaaggtgaaagcatcataggaaataagacagacttcaagcagtccttccattttgagaaagagggttgaagacgtgccatacccccagtgatctttcttgcatgaaaaacaacgtgcatgcgagagtcatgttgaatttttatgacgtaagcttcaactttcgcgaaggaaggctaaagttgcttaaaattcaagcgatgactttgcttgaaaagatcaaacggtaaaagcatcatggggaataggatagacttcaagcagtcctaccattccgagaaggagggtagaagacgtatcgtaccccaagtgatctttcttgcacaaaaaataatgtgcatgcaagtgtaaagaccgcttagtttaatttggaaattagcaggtaatcacgtttaattatgaaattatttatagctatttaaataatttatttatactgttattaattgaattctgagatgcatttttatgtcatgtagtagtttgcataatttt

SEQ ID NO: 244661 - DNA, 943 bp, Cannabis indica
tcacagattaatccgaattaataagtgcatgttgagctgtgtaataaagttgtttattacactttttatgcaatgttagctgtaaaagaaatgattgttcgtaattcctatatttcatacatttttcttctttctcatcaacttaccatagcctacatagttcttctccacttggttttcccaccaaatcaacaatgccttacaaggtagtcaccctttacaacctcttcaacaacttcagcattttattttaagaaaaatgtgaggggactagtattagtaccagtaatgactcagaattaaagttgtgggaggcatactctgtttttttgttaatgagacaaaagataaactttaaatattaaaaataaaaatgattttgatagaatttgaatttttattgattaactatggaagctattacttgcttatttttttttatttgcccttagaattatattttttacaatttacccctccctattttacagttttttccttttgtcattcgcaggtagaacattcacattcaagaccacttctttttagaacccatgacctccaactttccagcatgggattactacatcaattgtccaggtggttctaaaaatatatggtatttttgaaaattatgaaaaaaaattatgtactttttcaaaataatttttaatttttggccgggacaggccaaaataatttaaactttgtagaattatttccttcatctaattccttctctatcggtttgtcctcttctttttctttcttcaacttagcttcttcattttcctttctcttcactttgagaaattcaataacaccttctaaagcaactccagggttattgtcactcttcataagcacctctgctacttcagcaggggtaacttcagtgggtttaagttgctgttcgatcgcctcaaacaacacatggtgttta

SEQ ID NO: 244662 - DNA, 1671 bp, Cannabis indica
tctcaattttctctcttcggcaaataatatggtattggagcaagttctctgagtaaattccaatacttcttttttcttttcttcaccatggctggaggtgatggtgtccaatcgattctctgttttggactccaatgttcgatcctactctaatgaagctcgaaatccttgttttttgtccaacaattatcatcctggagctagtttagttccaaaaattctcataggttgtgagaattatagctcatggcgtcgagctatgatagtggctcttgttttgagaaacaagctcaagttcttcagtggaaagcttcgtactctttatgaagatgatctcaactttgagttgttgaatcgttataacaatagtgtgatctcatggattttctataccatttctagtgatattgctgaaagtatcatgtatatggacaatgctacacatattttgtctaatcttgaggaaagattcaaccagaagaatgctcctggtgtttttgaagccatacgaacaaaaaaatctatggctcaaggatcaaatactattacaaattactttactcgactcaaggccttttgggatctgatccaagaatatcgtccacaacctacgtgtacttgtggtggtacgaagacgattcaagaatatcacgaagtagatcgtgttctagagtttctggttgggttgaatgagtcatatagtggtactcaatctcagatcatgatgcaagatcctcttcttacatcaacaaggcttatgcctctgctattcaagaggacaaccaaaggtgtttgtcgaatgttcctacaaacaatgataaagaaggatttagattaggtttaaactttggcaatttactggaagtgtctaaccacatcacccaaaaatggtatgctctcagtttccttttcctttcttttttttttcctatcggtttcctttccttttctttcatttttttcaagacaacaaattagcaagttcgaaattctagctccttaatgcacaaggaaagcaaaaggaaacccaattaaacaagctttgtgaaacaatttgggaaaaaaaaagaaacaaaaaaaaaaggaaacaatttgtgcacaaatagggaaacaaagaattcagcaataacaaattagagtttttttttttaaaaaaaaattgaattttaataaacaaaagcgaaactaatgacaaagtaaaattcaaatacaagaaatcagcaaaaatcaaattatggctctagaattttaatttcagaattagttttttttgtttaaattttggatttttaagaagaaaaaaaaggaagaaaaaattaagggaaactgacacaccaaagagacgattttgacacaagagaattatcaaaatcaattggtggttctaacaatttcggatttcacaaagagaaacagagaatttgaacacgaattgacaggaatatagaacacaaagttaaacaagattatagaacatgaattgaatagaaaaacacaaaagaagattaggccaaacccaatgatcctatgctctgataccaaatgatacgaaccacaccaacaattgtgatgaaacccgacaccaaatatggtagcctccaagaattcacgaatttgggatgtggaaccacaacccaatgcttagttaagcatgaaccttggtataaagga

SEQ ID NO: 244663 - DNA, 2563 bp, Cannabis indica
ttcacggacctaggttccagcttctctatagattggtgtacatatgatgtacaaccaaatattcttaaatgcgttaggttggggattttgttgtaccacatttcataaggtgtcttaaggtctataactctatttgggctcctgtttataaggtaggttgcggttgctaaaacttccctccaaaatggttttttgatccgaaactaaagagtaaacatttaatttgctcaacaaggttcaattaatgatttcagaaacaccattttactctggggtcttaactacggttctatgcctagtgatcccaaactcttgacacatcttgtcaaattcagagttaaccaactccaatccattatcagtcctaaggttcttaattttaagatcagtttggttttacacctgagttttccaaattctaaactgttccagacactcatttttggtagttaacaagtaggtccaaacacaccgactataattatcaactattaaaagaaaatattgcttagctgagtgagtaggcaccttgtatggcccccaaaggtcagcgtgcacatattctagtatcatttttggttttcttccttgccagagtgaatttcagcttatgttgtttccctaaaacacaagcttcacaaaatggtaaggcacaagaatttaaattttcaattgtaccttgtttgtgtggttctttgaggccttgttcactaatatgtccatgtctatgatgccataacttcatattcgagattatagtagccctttcaccatacttgcctctctaactgggacattctttccttggagaacatatagatcattgatcatttcacctttcatcactaccaaagaacctttgctgatcctcaagctttcgtgcatggacttgtatccgtatccttcatcctcaagagcacctagggatatgaggttttgtctaaggcctggggtgtgccttacgtttatcagcaccttaattttgccatcatactgtttgatggccaccttttcggttccaatgaccctgtattaatgatcattacccactagaactttaactccatcaactaatttgtaatcaaaaaatgactctcgattaggacacatgtgataagtgcatccagaatcgagaatctactcactgttcattgaagactctaagataaagaacagctctccgtccgtggagcagtcgtcactatcttcagcgattgcaacaaaatccttcccgtggtgatggtgccgaaagtacttcctatctcctttgtgagatttgttaaagccttgttgctccttgtacttcttgcaaaatctttgcaagtgtccagaccttccacagaagtgacacttccttgtttccttctctctggatttcgatctcgattgagagtgatggtgtttattcttcaaactcactttcttgagtgatcttcctcttccaaaatacacttctttcttggattcattctctaactgtaatccgagatctttcgagttaagtgcggcaagaacatcttccaaggcaataacatttatgccatactttatggttgcatcgacttcttgatatgcgatttgaagtgatctcaacagaatgatggcttgactttcttcatcaaccttgtgatttatattagccaaatctacaataatctcattaaatctatcaatattctcatctaaaaaaagggaagaaatcagtttaaaactgcataacatttttagcaaattaatcttgctagcaattgatggctttaagtgcaattcttcctatttatcccaaactccttttgctgtcttttctgcaatgagtttccttcgaatactattttatagataaatgatgatcgtgtagtatgccatctcctttcattttttgctttttccctttggtttctttttttggtgtactaggattccttttagactttctctttatagggaaaagtccctagttccatcgaatctctccaattcgaatcttgccattgatgatatttaaagttcctttaagattgcagcggaaagaatcttgattctgcgatcttgatcgattaccaagctctaatttgtggaaaaattacgactaaatgtgaaaaattaaatcaataaaattctaaacaatcaaacaattagcaatgacgagattattaaatcaagaacaacgatcgtatgaaaacagggcaaacagagtaatgaaaaaccagataataataaatggagaaaataaagaaagcaacaccatgaaatatactggttcaagtcctatagatcgatgtgatctatggctctactccaattctggaacaccaccaaaatctttctttattgattgagcaataataggtacaatacagtcgaggtgagattctctgtagagttatcacaaagtgtttcaactttcatacttacacctaagaattttcatctatagaagattcttcttacaaaactcaatcccaatctatctcttttctctgcacctctctctctccctctcaatctttcgtgtcttcaaataactggacaatgtggtatttaaaggcttaggatcaagttc

SEQ ID NO: 244664 - DNA, 1521 bp, Cannabis indica
  modified_base (626)..(626): a, c, t, g, unknown or other
tctgggattttactgttccacaactttatccaaatggaaggagcggcctcacaatgagtcgctctttctaaagactaggtccaacaagtcgatttgcaagagaatcgaccattactttccaaagtccaaaacccatctatcctttccttggccagtcgggttgcccccttttaagattgccgaagtagtctcatgatcgaacatactgttaagtttttgaatattccactctccattatctatcagcagctctgccactttgctcgctttataagtagaggatcctctagaatgagggaggaaatatttcttatgcgctatccatggatcatcccaaatattggtatcctaaccattcgccaccaatttgcaagtgcctttacgaaggatggcgctggttttaaccacgttctttcaaaaccacgaatttcctttaagatatttagcttcaaggattcgagagcataataattggttacctgttagaaggttccacccccatttcgccaggaaggcctgattcatctctctagttttttggaagcctagaccccctaaagacttagtttggcaaagtttgtcccaggcttttaggtgtagcccgttattacccttctctaaccccnccaaaagtcacaaacataccatcaatctttacaactaggcgactagagagaatagtgtttgcatagtatacataggtaaaactttataagggtagcacgacccactttagatagccttttagctttccagccttgtaatttagatttcatgttatccaaaataaaattaaagtctccatctttttatctagatttgaataagggtagccccaaatatttgacgttaccttcaggggagtcgattcccaatagagccttgataccttatttcatgctattgggagtatttttgctaaagaaaatcgaagtcttaagtttattgacttgctggcccgaccaagcacaaaacctctcaagacaatcccagtaacctttgacttcttccaaattagtctttccaaccaaaatgagatcgtccgcaaagaatatatgagagattataaggccacccctactgagcccgattacactaatagtgcccttacatttggcatcctccaatagtcttgacaaaacttctgcagcccaaacaaagaggtagggtgacagaaggttgccttgttgaaggccacaagaaagaatgatcctaccaaattgtcctccattgaggcaaacattgagggaggtggtagtagtacaccgggtaactcaacttcgaaatttatgaggtgccccaaaacaagaaagcacatgaacaatgaatctccaacacaaccattcttaaactaaataaccttttcactcagtccacttaaaatgtatggaaattttactaaccattcttaaaaatatatcttatattaaaatttagaccccaatttaatttatactaaatgatgtctataatttcataaaatacccaaaatgctttttaatgaaaaatctctctctctct

SEQ ID NO: 244665 - DNA, 1962 bp, Cannabis indica
cacatttaatatttctagttacattatttaagttgcatgttagttaaataataattttgctactacattaatgtaagagtattatataaaataagaatcgaaattatcaaatactcgacctgaatagataaaacatgattaatatttgtttgtattaaatatgtggaattattagttattttgtagatttatgttagtttgctcgcaacagatataactgttgcattatagtttcatcacaattgtcttgaagttgacttactatactcaaacttttatactcttaggaaaaagatgcaattctatttcccatattttgcaacacacagtttgatgaagaaatcaattaagcaaattacaaaactagtgggtaattcatctcaattgattgcaaatatgatgaactaatacataagctaatacaattgctggaatgcaaccaaaaaatactcaaatgtaattgaaataccaaggaaaagaagatttttaggtgcatgggacaaaaaaaaaaaaaaaaaagaaaaagcgcagcaaatgtggccaaaaaggtcataaccaaaagacatgccataaccaagcaattagatattgagaaaatattaatttgaattatttaattttttttgtgaatatttacaggcaaaaatattactttaatacattgctattacatttaatacattattagttcttaaaaagttgcataatagtagttttgtagttgaaagccagatcaaacatatcatcaatatcataaagcattaataacaccatatttgaaatattagttagaatttcagaaaacttttctcattacgttgactagtatgttggttattcaacagttcacaaaccgttgaatgatagttgtatagcgggtgttacacataacacattgattcaaaagaatcaagcaatttctcccatgactttcatagatataataatatttagacatgttgaatattgaatcaaatatgttccatgtataataaccaagtcttagatctaagattaaaataaccaagtctcagacttctcattgtcactatcaatattttcatcatttttccttttacagaaaatctcatgcgataagtttgatatcaaaatctagtggaacatatgttccatgtatatagaaattagcaaatgcaacaacaaaagcatcgtacgtagtcactatttaataaaacagaaatcaaaatagttaaaataactctaatgaaacacatcaataattaaaatgcaacagcataaataaaaataacttgacttaaaatgatcaaaaatagggaatttgcattcccattcctaaaaataaaaataataaaaaacttaaatgataagagggaaataagaaaatatttccaaacaacaatgggaatgcaactattacgaaactacaaacaaactactaaatatcaaaccatacacatttgttaaaaatcaggcctaatacaaaatatggacataaaaatacaaaataataataataataataaaaaaaaaaaaaaaaaaaaaaaaaaaaaaaaaaaaaaaaaaaataataataataaatagtgaacaaatttacaataaaataaaatttttaaaaataagtaactgttgaccgaggttttcgtacaatcaatttaataatatatgtaagaaagttgtagaaagtttaatagcatgagatttttacgtggttggggcattaatgagccttagtcctctgcttcgcactgctcttacccagcttttcctctagcatgccaaggttttctccacttatgacagaaatggtcttaaggtgggggacttggtcacaacggagaactactggaaggccaagctcatctcacggagtcaatcagtggatgacttcaacctcttcaaggttctctgcccaaacattcgtaccccggacactgaaaaggtactccgggcggacattatagcctcagcggaggaccggta

SEQ ID NO: 244666 - DNA, 1168 bp, Cannabis indica
aatgtatgtaaaaaattgagtattaaaaatagtatctttgttttatcagatgcataatcaaatcaagtattgattaatttataatggaagaagatgaggaacaacattgtagccctaactttattgaaccataccccaagaagagaaagtctattacttcaacaatggtggtacaggacaaatccccttttagtctttctaaaggagctattttgtctcttactaaaccctcatatgttcttggtttgggttccaagaccttgaggaaagacaacaggagtaggttgagttatctttttactaagcttatgagttaccatcaatggagtgaagctactggtgttcttagtgttttgttgaaagggacttgcaaagataggtctatgcccaataaccgcttgaagtacactgtatgatgaatctccctactgtttctttctttttcttttttgtttttctattgattaaaatctgagggtgtgtttggaggggttttaattatactctccaattcggatggctcaattacactgtgtaatcattaaaaactccctatgataattcctatgtaattatcatttcttatccaaactcaccttgaatttcaaagtattgtgtaattactaggggactttcaaacacacactaaatgtagggtttttcttttcgtttctctttgcaggcgttaatggagattgttgaacttttaggaactgattctaataatgggacaaggctcaagaacatttatgacatttggataagaaaaaccaccaccttgaaaggaaagccagttgaagtatgtacacattttctctcatggaatgtttgcattttgttatattcttttcaagttgtatgaagggttttaattcttaacagttctatgtgcattcttgtatgattttttgtggtgtttagtgttcttaaccattgcaaatattatcttttgagcagaatcgatacttggttcatacagagttcatcgttttttgtcttacacaagggaatattgaagatgcttaccaggctgctttatggtatgattttcgttcagtcttgtagtttgtagctctcctcaatgttgaagcaactagcattgcatgttagagtatcttacacataatgttaatatctactcaacaagatagacttgaacaactcatgt

SEQ ID NO: 244667 - DNA, 734 bp, Cannabis indica
tgtaaaactgtaattttcttttaatttcgtcaatacagactctgttttgaatttattaaaaaatatttggaagtaactgatgctacatatttctatctagacccaatgatcaagaatttaggccttatatgtgccctatttaatacaataacagagtctgtacggacaaaattagagaaaaattataattttacaaacattgggtacttatgccgctaaaaataaacattgagtttatagcgcttacaaacatataaaactttgggtacttatgccgctatttaccctaaatttgcgattttctaaatatttttacagatttggatttttttacgaaagtacatactattattttttacattgtttcacaacaatattataatatattattttgatgttgtttaatatatgtattatgtttctcacacgttttcataatcctttcatgaggctccataaaaatatatttaaaaaattcgtaaaaaattaaaacataattttgtataaaaatgcatacattattttcatgataatttaagaccttttaatactcataatataattggttacttaattttgtatcacactttataataacttatatattatagatatgtgcacagaaaaaagattttaatccaacaaacaaagccctcattaaaaaatcgaagaaactagggtctagggaaaagaaatgaaactctaaggtagagtttgattggcaagaatgaaaa

SEQ ID NO: 244668 - DNA, 2268 bp, Cannabis indica
ggggtgcctcgcccaaggttaatccgatttcgattatgcctagactggcaatgctgtctccagtgaagtcgcaaagatttaccagacatggcctcaatttggccttttcgagccccatcttccttagcgtttccttataaaggatgtttagtgagcttccattgtctattaataccctctttatccttttactgacgagttgaatggtaatcaccaattgatcgacgtgaggatatctcacgtttttctcgtcttcctccatgaatatgattgaaggttccttaattttcaccttcttggaaggttctggggcgaatgccgaccgctcgttctttatttctttcacatatctcttttgagcgttattgctctcccatgcgatatgtggccctctcgaaataaccaggatgtcctctccttcaacaggaagaggttgtaacccctagttgtttgggttattaggcagactgggcttgttgtgtccatggctctgtctcttcacctactatttaaagtgccctagagcgatgagactttctatctcatccttactctggcaacattcctcggtcgtgtgcttaatatccttatggaatttacaatacctgttaggatctcgtttgttcctcgcatgcctcatgggctcgggcttgccgaaggcagcctttgtctcatgagcgaggtatatattctcccaaatttcattaagctcagtataaatagtatacattggcacgtacttatcgtgcttcttctgtttctttttatcctttaatggttccttagaatcgtcctttctcttcgagccaaaaagccccgagttatcgattcttgttgagacagtacttgttgaaacgttgtcgagtttgcctcccaagcctatcttcaacaaattcatttctttttgggcttcttcttttccaacaaatacctgagccctttcattgaactccgtgatgttccttattggacgaccttgtaagtcgtcccacagctcgccctcagtagttgatggatcagtagagattcccgcttgaagggctgtaagttgtgtactatcatccaaatttctaaccctagtagtagtcatgctaaaatgacttaaatttgccttaagtttctcgccgggctgttgctttatattggttagcgaggccgcttcaggtcgtctatccctagcagcctggaactgtttcttgaaatccctagacagttgttcccaggaagttattgaatggtgagtaaacttgttaaaccagctgcttgctgctccaacaagcgaggtggggaacaagatacagtgtaaattgtttgccacattacttgctcgcattatttctctttacacaaaaatagtttgcgttgataccatttctatctcactaaaatacccatttacacacaactgagaacattgttgagaataatttctcaaaaaatttgtagatctctattttgttaataaaacctaatcatagcttaaatgctaccgtagacgtaggcaaatgatattctgtcgaactacttaaatttatgtgttacatattctatacatatatttatacttatatgcgtaattagcaatatatacatatagttttgcttggcaaccgattttgtgcccagaagtggaaaacacggattgcaatccgttgtacggctggtgcgtcccacgttacatgaaaatgttttttaatttttttaatttagttgatgaccggttgttgtaggtttgttaacgagttgtaaatttgtttttttaattaaaaaatgaaaaggtacaatcaatttactataggtgttagttatagtatgataaggtataacaaacttactgttcgtggcagttaatagtgcaaaaatactgtagacagtgggtccatgttgtcggagtgagattattttgctattttcattccttcatatcatatatgtatttgtcggatgctatttgagtacatgatatcacgtaccgtgtacattaatttattctgaatgatgtttagtaaacttagtgtacaaaatatcacgtaccgagtacaaaatatgacgtaccgagtgcgttcatttatttttcgtagtatattgttaagaaaaatttgttataactcatgaaattatgtgtttttatacattgagttttacgttggtgtattttttatatgttaattattttgtatattaaaaattaccacaaaaatatattttttgaccttgtaagattgattttttttgcttaaaatactttagttgttcgtcaataataat

SEQ ID NO: 244669 - DNA, 643 bp, Cannabis indica
aaaaataaataaataaaaaggttactaagtgtactatattagatgtatcttatatattatcaaaatgttactctcatcattaatcatgataagacaattaaaaaaacaaaattgatgtgttagcaagcaactatttatgtttctgtgtattgaaagaataatcattgatttatttaaagtaaatataaataattgagatatcaattaaaaaacattaaaaataatctcaaactttaattttaaaaaataattgcaagctgtgtatttagataaaaaaaaataaaacaatttatttttatttttgatagaaattaaagttgtacatttgggttggactttttgacacgatagaaatcggcacgagcacaggcgatacgagtacgacacaacatgaaagaagacacgaataaatataggcctaggcacgacacaaataatatgggcttaaacacgacgcgacacgaaaagtacgaaaacaagacgaaaacataaatttcttagcacaaaagcacgacataaaatacaaattcaaatccataaaataatattttattttgtaattcatttactcttttatataaaaatactttatttaaatgtatttttatttagtaattcataacataatttttcttattgagat

SEQ ID NO: 244670 - DNA, 945 bp, Cannabis indica
ttccatttgaggaaggattcaaaatggtgggcccaaatggattgtaaatcattctacctctcctctccctcgcacaatcctttatgccaaacaaatgaattttcatctcccaccacccttcgccctccttccctctccatccaccatgtcttcctccttccaaacacatccttagtctagtcattaagcaaggaaccataagagtcattttaacaattgtcttatctaatggatgtcaataagggaattagatgtaaacaatgtatttttaaatagagaactaactaaagaggtctatatgactcaacctctaaaattcattaatcaagactctcctagtttggtatgcaaattaaccaaggccatatatggactgaaacaagctccaagggcctgatttgacaagcttagacgtgctctgtaatcttttagattcacttatgcgggagctgatcagttccttttcatgtatatgtggatgagattctgataacatgaagtttagtgggaattctaacactcttatcaaagatcttaaagcaacttttgcattgaaagaccattaattacttccttggtatattcaagttcattatcttgacactggtctgcatgtgtgtcaaaagaagtatattgtggatctgttatgtcgtgcaaagatggactgtacaaattctaattatcggggtatgacagtgactatgttgttgatcctcatcaataccgcagctgttaggagagtgagtctgttatgtctgttagcagagttagttatttctgttattttgcattccctttcagttataactaattctgttaattgttgctatatttttaaacactacgcaagtatacgcaatcaagtagtaaatctcacacaggtgagatcgatcccacagggaattggattaagtaccactaaattatacttatgattctattcgg

SEQ ID NO: 244671 - DNA, 2213 bp, Cannabis indica
tagaatagatatatatatattcttcaattggttgctagactttaaataaactcagaccaaaagaatcatttaaaatgctaaactttttcatcagtcataacaccttaatggggtgattataacctgcatttacttattacataatatgcagattttggcaatttgacaaacactgtaatttttgtattgactcttttttcagtttaaagttcaactttcatgtacctaatcatttttgtagtatacttttaattgtaaattacaatcccacaactcttttgttgatcagctaattgtggttatagtcatgtttgttttaataaatgataacaccacattgaggtgttatgactaatgaaaaagttaacattttaaatgatttttggtctgaatttgttgtaagtctaacaagtaaaagttatatagcacggaatatattcacatcttaaaaacaaaaaattcaggttctgtgaaaagaataacttctattgatattttgaaatccaaaaagagatggtccgattatggtcagcccagtgaaccatgatgggcccaggtagcaccggcccgttatccttccactgccgagagcgggaagtgttcgctgctctgtgaagccagcctcacgcattaccctccactctaggagcccagtgggccagactttcgtccaaaccacagagcccaactcccagcttggaacgggcaggccagtaagtagctaacactggatccggcccaatgggctaaccaaatgtcccatctcccacatgccctcacttgagttacaggctcacgttactaggcccggcgagaagttttcttttctaagctataatatatcacttaaatgttgtttatatttcccatgtgggacttttagcatctattttattaaaatgaaattgtgcttattttgtttgttcttcgagcttcttccaatggagagagactgatataatttcataaaagacactatactaataccatcttaaaagtgatcaaactgtacaagacttgattttacagatattttatatggcggggttgctgcttgttgtttggcgttggaaaaggcagtggaaaacgggtgcaattttgttattgtagaaagtgattcgcaagtgatgatgaagtttcttaatggagtgaagtccagatgagaaattgaaaactattctgatcactgtttaagcacttcttctttatttgtgagttgtgtcttttctaatgtagttcaatcttgtcattttttggtttataatataaaccagtaaacttttacccacaattaatatgattagttagatgtcaaaaccatacctttagactttttttgtaatgaccgaagtctaactttttttaatattaacgccttttcttaaaaaaaacaatcttctcaattcattgaaatatgtcaaggctccatatatatactttggtaaaacaaatgagagctaaatggtatagaaagaagcactaactactaatttagaagaactaatatgaagttaataacactatgaagatgtgtttgtttttggtatttcctcctctaatggcatactaatctcttcttttgaaactcccaacagaaatctgacacatcaaaacaatttaattatcattacttaaaacaaaaattacatgaacaaaaaagttgataatgttacctattaccttaataggtgtagcagcaattaattgttctgcaattccaccaaaagctttgcctgtatctaaattgttcaataaaactttcaatgatgttgacataccataattctcaggactatgatttgaatcaagttcaactgtccaagacacagaaataattctaaaaacaccctacaacaaatcaaaaatcaattgtgattaaaatcaacaaaataaaaaattgtgattttctttaataaagaaaggaaatattaatgtacctcatatctgttgatttggttatagtcaccacaattaataatgtctactaaagatgttgagccattagcagaaaaaacagtcaataatgaatttggttcataattcgtagcaaaatctttcattatgctcacaatgtcctaaaaattacacaaaaaattcaataattaagttatattttttcaattagaacaaaaattaatcattattattattattattagggtgaataccattttggatcttgtgttttgcaaaagttacagattggaccctgt

SEQ ID NO: 244672 - DNA, 814 bp, Cannabis indica
  modified_base (26)..(26): a, c, t, g, unknown or other
ggaatttcagcagtgattacagaganagttgatcttatagcatatggttgcgaagctagtagaacttttctctaccttagcttacaaggaatttaaaaaagttcgtctaggagtaatttggatagaaaataaaatgtcattttttaattctgaagtctttttgggagaagctaggatttataacttttcccaaaagaacttttgtgaagttattttaaaaatttgaataatttacccacaaaatatagttttttttttgatgatagccaaacatttgaaaagaactttcaaataaaaaaaaatctttatataatagttatctattgttaaaataagacaacttttacttagtttatacttttagttataaacaaaagtaaaagcttagctaaacggggccttaattttgttgttaatacatgctttgaattagttggttatgctcctgagtttgttgttgaattgccactacttgttatcaaattgctaatcttgtattgctgtgatttgcattccacattgcttggcaacagattttattcaagatggatcgatatggcaatggagaagaaatactactagataatgttttcaattctaagaagggttgtacaccttccttccaaaattttgataaggagttgttaactggttagtttggatcttctttgtacttgtatcagttgagaaaagtttcaaattcattgttaatgatattgttgtgaaacagcaagaatatgtcaaaaactaaagtatgttaaagaaaattctgttttgattttgcaagaataagagcatagctcactggtctttc

SEQ ID NO: 244673 - DNA, 1095 bp, Cannabis indica
acattagagcataagcagaaaaattatttattgtccataacacagccaaacacattgaaatacaattctgttgtaggtatctcgggcttgaacacccatctctcccaactgtttcagctcatcaattaatagtctcatgaacacatctatatcttttccatgagataatggacctagaatcaacaaggtcaacaacaacgattttgagctcatgtacttcaaaggtagaaaattatatgggacacaaataactggtcataggctataagagttgctcatgttcccaaatggattaaaaccgtcagtagtcaatctcactctaacgtttctaggttcgatggagaaagatggatgtgcttccattcttcagcatccgcaagatgcctaagcacattgtcttctttcagtctctgtgagtaatgccactgcatgtcctcagcggtgtgtcttaaggtataaagttattttagtctcaatgtgagtgggaagtacatcataactttgtgaggcacttcttttcctttaccctttttttcactcatcgtgatttgccacatacgggaaaaaatctttcttctcattctccctccagatgatgacataattatacttgcgcgaatctattaagtcgtaacctaaacctagactacgcaatcacatctttaactcatagtgcgactttggtaattttgcctcctcaagaaatagctcagtcaagataaagagtaacatatcaaaagagtggttaccttacctattcaaaacattatagtgcataagttttactagcgcattgagtgccaatttgttacaaccaagatacaacacagactctgtctccttaaacaaatcatcatacttattgttgtcattgatcaggggttcattgaaagaatcagtagttctagtagagtcgtcaaactcaggatcccctcttaacatgtctgtcaacacatatactatttcttcttcgttgttttctagaagttgaatatcgggctgagaaaaagtctccccgtagaaatactaagggttgtacgaaggttagatcctcctgagaaacagatgagctcttatagttttaagtgtgtggaa

SEQ ID NO: 244674 - DNA, 1138 bp, Cannabis indica
tcaatctagttatagtacgggcacggtaggtaagggccaattaagaaatactttgtacggaaactcaagttcaattaaagtaacaaacctggaaagcttagtagttatatattatataataaaaataaataaaaatcgaaatgcagtatgtgtgtttgttagtgcaataattttataaaataaaaacaaaaactcagaatatgtaatattatgtattgtggatgatatgaatatgagatagctagtgtcatgtgacaacatagattgacaaaacatggtgccggtggaacttaaagaccaaagattttgcacttgttggtttcgattcgccaggcctcgtgcccaccacctacccataaccccaactattattaaagaaaatcttccactttaattaattggttcaatacattattgcgtatggtttatgcataataaccgacaaatttatcactagaatctctacattattatattacaaaaaagttcagagtttacgaaatatatacatacttatatatagaaaaaaataagttatagtatagtgactttatatctctctttatagttatttgcttgtttctttttattcgcagctggaagtaccatttgctcgtttgcaattgattaactatcaaataggtgtggatcgaaagtctaattgggatatggctaataccatattgagaatcatggaattctatctcaaaatcaattagtggtgagtagaatagctcatcttcttatatatgactcaataattttacatttgatctacatgtaagataatgttgtccaatagctccaataaataattataaataaatatgattcaaatttaatgtttttattaaaaaaaatatgtatttatcattaattttattaatattttattatgtaaaataattaaaaaaatatatagattgctcataatttaatgttataaataaatatatttataaaataatataaatgatgtaaaagtaaataaaaaaattaataaatttatggtgatataaattttatataataattaatattgtattaaatttaatataaaatttattatggctcaaatctgtattaatttttaacacattggagctgtttttctttttgtggtcaatactgaggaact

SEQ ID NO: 244675 - DNA, 858 bp, Cannabis indica
tatgaaattaatataaaaaataagattaatattaatgaaaaagttaatttttctaaaaaataaaatttctgtaaattttgataaaattaataattttgtcaaaatggtataatttaatttttgcataaggcttcgttcaagcttctctttaaggctttgacaatatatatatactagattcatatttatgtagtgcaacttttaatattatttaggaggattgttattgaatattagtgatgcttaatattatttgtgagtggtgtcttctgattgttagcaatatttcataattattaaattaaattatatgaaatacaatacttaattccttcaataaagatattacagttaagagagaaaatgggcgataatttattgctatgagtacaaagataggtgtctcaatcgatccctaatcaattaacatttttatataaattattatataatgaaataattgaggtgatccaataattaaatctaataataatatttttttatatatatggctagtaagctactagcttaatttctcctataaatacacttgtctaaatacatatatcatcaagaaaaaaaaaaaaatagaaacacagacatatatagctataaaatgaagatgttgaagagtataataattatactatttgtggttaataatatggggtggtgctatgggagtagagtagcacatagtgttactattattccaagtaatcgttgttatatagaaggtgaatattgtagtgccttaccttggcaacagaaatattgttgtgaagggcttatttgccaaggagttctgagtactgaaaacagatgtgttaaggattcaagctgtcacccaaatgttgg

SEQ ID NO: 244676 - DNA, 991 bp, Cannabis indica
ttggtggtggatctgagatatattttagatctataattcttttttttggtttttggatatgtcgtttaaaactgatggctaaattgttagtgactatttagaatagtcgcctattccttcccctcttttttttgtcagttataaacagtcaattatgctaaatatcgactgttaataacatgatacccctaccgtatcatttttaattggtggtataggcatcaattttaagaactgacaggaaatattatatctgactgttttgaacagtcgcatgtggcctttttttagtagtgtcttttaataaaagaattgataaatgcaaagaaaatattagaagttaaaatctaatcgtgatgagggttcagttagattgtatgaggatagagatacttgtttgagttgctaactcagaaagaggtttattgaaagtagagatcgaagcaagtttggctccaagaaggggattaattgtaactcgcttgaaaaatgataatggtgtttgagtgggttaattgggacagtggcctctcaaaagttatggtaaactatttcagaatttacttactacttttgaagttgtgggtgatgggatgatttcttgggtggaggaaaaaggttttactattcaaaatgggttcttactttctcctatgacagctgaggtcaaacaagcatttttctatgtttatagatgcattccaaatttacactcaacttaaataaaatcaaaaaataaaaataaaaataaaaataaaaataaaaataaatttgatagaacacttttatttttacttttaaagttaaaacaaaactcttattgtatttcaaaacaaaatttattttatgattaaaaattaaaaacaaaatataacaaaagcactttaatttaataacattatttgcaaaataccgcttatcggaaaatctagacaccggatctgaatttcattcatatatcattttctaattaagtcctaatgaatacttt

SEQ ID NO: 244677 - DNA, 1757 bp, Cannabis indica
ttcttggtgttgtgaaattctagtaacaacaaaatataatacataatgagatattagagatttacatgagcatgaagataactattaatatggatccactcataacgtagcacaaagactaagtctctggctcacatcaacaggtgtgcatatacaaaattaaagagtgatctagaatatgcatgtactcaacaaacaattgtaatcttcaacatgtctagcatacataaaattagaactatcctaccgaccaaatacatcattggcacctaactatctaattaaaaatatcttcttagtacacaattttaggtaagttgtgtcagcctaatcattgacatgttatatgtaagtgctagttatgatactaatagaggactccataactttctgattacatatgagacgtaatcattatcaatggatcaacaagactcttaaagttccaagagaaagatataatttctatattcatcacataggttcagtaaattcacattagagttgactactcttgacattgaaacgaaatatcacaattatgatatacaatcaatgtcctcgtaatacgccacacattatacctttacaaatgaggatgttgtaaatgtccatacaatacctaatcacatataattccccttactaaatactcgctttttatgagagagaaagtcgtaagtgttcatatgacacttaatttacaaaatagcttctcctagaatcattaatgtttataagtaaatttatcatccatgcaacattttcaatcgatatcactaaaaccaactactatgttataatattggtttgtcgatgactaacacatccttggtaccataagggtgacaattcaagtacaaatccagcatgcatgcaacaaatatcatgataatttgcatatatgtgagataattttaatattaacctctcgtctttactaatgtacatagactttaggtcgttcacaacacatcacactttagacttaaagactcttaaagaaaacaaaacattactcacaaaagtggttagtcaatgcaaactatgagacaatttagtctactgttgatctcatcataaagcatttaaatattcaaccatgtaaggttcatcaagtattcttcatctgacatattatcaaataacgatttaattcatttccaaaatagatcaaaatcataaaatatgagcaatgtactatatcaagtgacagtataaacatgtcattgctccaactgatctctcatatagtgttgactaattaacgataatatttcgaattgactatttttataattacagtaattattatcttgatgctcttcctcaaaatggatttaatctactgaactcgggtgtccttgtcagttacattctctaggcttaatcgagccatataataagatatggtctttaaagaagagtttatttctcacatccttatgtaatgatttctaaatagtcaccactttacaactcaataacaataatgaacaaatccatgttgagaatcatggggttctatctcaaaatcaattggcaatgagtgaagtagttcatgttcttatatatggctcaattctctaccatttattctatgtgggacaatgtccacaacattccccctcaagatgatggctattttttgctcatcaatcttgaaccgtattagagtggacatgatcactatctgtataggtgcggatcagatagaatcacttgcccgcaagggatatggctttgataccatgttg

SEQ ID NO: 244678 - DNA, 2522 bp, Cannabis indica
aaaaaaaaaaaaaagtaagctctctctcaacaaccattagtgaccaaaaaaatgagaggaaggattaccactatgaaaacacaggaattactaatatcatacaagcacctatcattatttttaataattgaaattcaattgaaaagttgaaaaccaaaaagaaaatgctcacttagggcgtgatgagttcatgcatttcgaattcttctatatatattacatagagatttggaacaatatttaatttttttaaaaagaaaaataatatttaacgataaacccattcaaacatgtttgtttagggaaaaaacatgtatagcgttgcttaatcaaatggtgcgatgaaaatttaatttttaagaagaaaaaacattattaaccatggattttaaaatgattcgcgatgaaatttggtgaggcatttcgcgagattatcaattttaggtttttttttaaaaaaaataattgttttgttttctacatttagaatatgcggaatattataattgttgtgtagatcaacaaattttgattcttttgagcatgagtcattatgaatatttattaaattttatcgtaaactatcgttaagcatctatctacttacattcttccttaaaagttcaaattttcatgacattattgttaaagtatcgtttcttttggcctaaacatcaagttttcatgagaccttcgtagttggaatatttaaaatcttatagataaaattttatgatttcgattctctgttttgaaagattatgaattttaaagttaatatttttatctaagtttctacacatttaaaactaatttttcaaaagagacaattgattcttggtcaggagacaagtttctaataatctaagttgggatatttaaaaataggagttattttttttttttttttgataatgggagtattagaatgcttaaagtcaaatttccctatctatattttgaaacattataaaaactaatcaaaaaaaaaaaatagcaagaaagaagttgattgcattgcaagaagtacataattgcttcttctttttcatttcattttttttttcttcctttataatttcaaggtaaatcaaaagatttgctaaaattctgtcaaaggcatcttcctaacattaaataaaactagatttaaattactgtcataattttataaatgatgtccataaataaacaaactcaatctccacaaaatttcaacaaaccaaaacgtgtcgtacaatgatgaactaatatgtgcaattcttaggaagattcctaatgacattactcttcattcccatcttacttcgcatggcctcaactcctgttctattcatttccttcatcactttcatcctcaccatacgttctcttgattgcacagtcgctagtcccatgctcttgtacctgaaactcaacattcaagaaatcttctattagttttcggttcacacaaggaaggccatagatcggcaaggtagaagaaaaaggaagcaaaccttgaggccagagcggctgagatggccttgtcatgaattggtgatgggcgaggtttctggcgataataacgcaagaaatcccgggaaccaagtgttttggttgaaactccattgttagatctccttgttataaggagctcaggtccagcaagttccacagcgttggtatgacctgacacaaccatctgtttaccatcctcatccacatagctgtatcaaaagataaaaagagtatcttgattagatacatttttacaaatcacataaacataagattccacagatacataagcagaaccggagttatgagaaaggaggaaaaaacctgctgctgtaatcatagaactcttctagctcaacttcctcatcatcaccgccatcaccatagtgtactttgcaatggcttttcgcaatcatatgcttccgaactgcttccaaactgctaaaggggtggcatctatcattacagtacaagcacatgaaatcccttctcacctgaaaatataaaaggaattaaagttagagcaaatccctatgaagagcaacaaaataatcagtatagaaggaaagagcttttttaaggatgtaccataaggccaagataagtaagaaagcctttaggatccttcaagtactcaacatcaggaatgaagaatccatgatgtttgtgcatgtgaacaatgcagctctctaggttatcatgctctaaatcacacataaagcagcaagacggatccaagtcatcaaagtcttcaacatcatccttttcatccatgtcttcatcagaagcatgctcatcaacgttcaagccagtcaaagattttgcagcttcaccaatcaattcttcttcaggatcaacttcctcccactcaccttcactctcttcactttcttcactttcttcattaggagcatcattctgcagaggagccttattcacaacgcggcgtggcagcggcttgatgatcgccatgtcctcatcttgattattgaccccttgagaagccttcaggatgtgatttc

SEQ ID NO: 244679 - DNA, 661 bp, Cannabis indica
aaaactagagcaatttagccaatattgacttgagtttcttcagcatgatctcactcaaattctctctcactgtttctgtctctctttctatcttttcttgcctctttctgattacaaacaagagattaatatatagttgttagtagctgacatgtccagcacttaacaacttgagacaagttagttatttaactaactaaccaactttccaaataggaatgaatataactgaaattaacaaattttccaactgatttagatatcaaaataggtttagtttagagtggattatttaccacatcacttttattatgatttattaatgtctttaaactaaaagtcaccgaaattattgaaaaaatgcacatttcataaagtaaagtaactaagaatgagtcgcattttaaatactgaccaaaataatatgttaccaaaaataaatatattactattattgataaattatgttatatatgaaatgaaagtcgacccaacctgaccttatgtttcctctgccttattcttttcaaattaatatagatcaagtgcataatttaggtttaggtttcatctaaaaaatatgaaaatatttttgaaaaagattttggtcaactaataaagtattgatcattgaagaaataggaattttttttttaactat

SEQ ID NO: 244680 - DNA, 884 bp, Cannabis indica
atttattattatcattaatgatattttacatcagataattggggttgggagagacctataaataaaattctctccaatttttttcagattactctaatatcgttaatgattaagaattctttaaaaatagaaaagggtacggcgtcactaatttgggaggtagataacacgcgctgagatataattgagatttatggaaatatacagtcatgtgtgtgagtgaactatcaattgatgaaccattggatctctacaatctacatcgtgagtgagtgggttccattgccattaaagacctctttttctttctttcttttcaatttttatatttattaatttttgttaaatagataagtagagaaatgacaaaatggagcaagataaagtagtttttaaacagttttacattgttttttggctcataaagatttaagaaatggagacaagattagaccaaagttaagtagagttgttggtgaagtttatataaaccatttattgtaaacaaaaagcatcaaatattggtacatataaacataataattttcatgtgaaagttaattttttctttgctaatttttggactcacaccaatatctatgcttatctcagtttcttataatttccaacatgtgatacacggtgtactgctcaaacctacattaatatttaagtatataacctacactaatatgctgctattgatataaagaagaggaaagtagaaaatggggcggttcccaaaaataggaaaattgatgttattgctggatgctcatctccaatttatggtaatatattattttcgtagaagctgtagctttgcagcaaattttatcccctaatgctctggggtcgattttccagttgctttagtggaatcc

SEQ ID NO: 244681 - DNA, 3796 bp, Cannabis indica
ctgttttacttttcaaataaacacatgtccacattgtaacatggcaaattttaatgagtacccaatccaaattaaaaatagttcaaaaaaggagagttagaaaaactatcaggtatcatttgataagagataatgaagtagaatagaattaaaatgaaataatttttatttcatttttttgtttggttgcattttaagatttataaaataattattccattttaaaatagagggaaagataactccaatacaagatttgaaaaaaattaataattttttcattcatttttttttgttgcattttaaattttatttattccatttctgttcacatcctcattctcattcatgtacttatattttcattttttcgaactaaaggccactttagtgactcgagaatagtgaaccaaaaagaatcatttgtagtaataaaaccattcaagattagtgagaaaaaataactaccattttgaaaaaatctgagagtattacattattgattgtgtatgagagcgcaataccatttataaaagtatgggttactccattcatcactaattagatttgataaatttaaccaaatacatcttactatacaccatattacttttttaaaaaaacaacattctaacacaaaaatttaagacatgaatgaggtatctatttacctgtaaaaatgtaccccaataatgcgatcttgagagcttgttttgttccctattacttgagggtcaaatgtagaagtattagtagccaatatgcaatgagaagggcaaactttctcaatttcactaaatattgcttgtttaagagtaatgttttcaatgacagtctgcaaattaagaaatcataggaatctatcagactactttctaaaagcatgaaaatcaattactacccattacaaggtatacttcgttatagtttaactaaatactagataatatatatgtcaactttaacaatgatgaactttagttttataggagacctttaataagtaccaacctcaatgaccaaatcaacatccttaaattctatgtaatccaaaacacctttaagtaatgagagtgccttgtctggctttgcccgcgccaactttcctttttctactaagcctcgcatatttgctgcattattaattaatacaaaaaaacaattttccttgttactctccctaagatagtaatctaattaatattacatctaaaaagaaagtacataaaaaattctcaatctttctcaaacttagttaagaaaattatctaattgcttattttatcttcttttctaatttcttttgttaagaaaatatatgtatatacaccttgaatcaattttatccccttgtgaagattttcagcattagttgccttgagaataacattaatattgccttgaagaaaagcagcagcaattccagatcccattaggcctcctccaatgacagcaactttctttatttgccttggtttcagcccaatatcagtaacatttggtacctgtttaggttcaaattaggcagtaaaatcaacagaatatacaatataaaactagcaatgtgtactttaaaaagagttattttaccaactatgtttcaagcaccttggaagttaattgttgactaaaaaaggcatgagcaagagcttttgaggtatctgatacaagaaataagtttcacaaaatgaaaaaaatatatttttatataaatatataaaaaaaaaaaatcaaaagaggaagaaaaaagaaattgtaaaacaaataaataaataataacaataataataattaaaaagatgaagctaacgaagaagagtcacgacctaaactaatagttgaggttttagaaaggaaaaaaaaatttatagtgaaaaaatttgtaatacacagaattaattagccttcaaatataatgtaaggtgagtaataattaatctatataatatgggataagcaaacaatatatatctcacgagtagtcaaaattacaggttttacatcatttcttgcagtgggctcatccagcttctcctttgatccttccattactgttagcgaggcccaagcactaggcccaatccaattggatgttgaggcggcccaggaacaaagaaaagaagtggcccaacttgaggaagagagagcagctcatgaagatagcagcaagccgaacgaaggggcaatcggcgttcaggaaccagcagcaacagaggcaaaacagaggaaaagagaaagcgtgaaacccggctggctgaaggattacatcctgaagctgagttattaagagtgagccattgttgtaactcaagtagtgttgagacttgagaaattagaactgctatataagctaaataattgtaattactctttttatcatctgaatagttatgcagtagcattttgggaagattgaccttgtctcgatgaaggcttgttttgtatcattggtgctttcattgacctccattttttcaggatgaagaacgaggagattgctcaattattccagaatatgagcaaggaattggacctcaagctggaacaacaagccaacctccaaatggaggaattacgtgccctcttagatgaacgactgtcacaggtttcacctccactgtcgccgggccagggggttgataatggcagttctattctgctgccacaccgttctgggggaagacgttcggatgccgaagacgagtgccgtgaagtgaattccatcctcaaatcattgcgggttaaggtacctagatttgacgggaccaaagtggatgactggatatataagatcaacaaattctttgatcttcaccggattgacaatgtattgagattgtcggtggttgcttttcacttagacggagcaccatcaacttggtttcaatggatggagaaggggggcggttttaccgattgggatgcattcattcgagctctacggcttcgatttggagcatcgatttatgatgacccgttgggaaggattgccaaactcacccaaagaggtcgagtttcccaattccgtgaagaatttgaagagttgatgacgaagatcacgggagttccagatcagatgttcttgaatttttttgtgtggggattgaagctggagattcgccgcgaattactgatttcacggccgtgtgatctagccgatgcgatggccaaagcacagctgttcgaagatcggaatgatgatatgcttattccatctcgcaccagcaacacgagatccggatgggtaccgaagacatcattgccatcggggccaccaagctcgggaccgagttctccaccatcatctaccaataattcacgtccacattcagttgttggcaacaagagcaccgaaataattctgcctgttaaatggcttacgccgtccgagttgagagataaacgggagtgtggtctgtgtttcacgtgcgatgaaaagtacagtgtcggccataagtgcaagaatcgggtcatggttctttgtggtacagaggacaaacacgggacattgaatttacaggaagcagaggagatcgtagaagctgatgataaccaggttgatgaggttagcttgaatgctttatctaattcttctaatcctcgaatttttcggattcaagccaaacaaggggatgagaagctcgaagtattgattgacaccggcagcaataacaatttcattcaggagtcgttggctgcacagttacgactaccttgggaggaaacaaaacggttcaaagtctacatgggtaacggtaattttctcatctgctcaaagttatgtagagatgtggag

SEQ ID NO: 244682 - DNA, 1293 bp, Cannabis indica
gaaatctcactataacaataagaaccaaagagaaaaaaactaccaagaacattctctgtaataaatactctcataaatactaaagactcgtggactaaggctcattaatgccccaaccacgtaaaaatctcatgcactaaacttcctacaactttcttacatattattaaattggttgccgaaaacctcggtcaacaaaacccatgacattgtataatatgtcatacaccttaaccaactaaactatgaatatttgttgtttatagtacacttaattttacttaaataaaagtctaatattttatttttttatattttatgttgggctcccgaaaggtgtgggccctataggcataggcctagtttgcttatgcctagggtcgaccctgtctataggtttaatagacactgtagatatttttataataaaataaaaagaaaataataataatttttaagtttaattaattagacttgtgattaataatgtaatttttttttatgcaaaatattttttaacaaaaagaaacaattcaaaaatatgtgttatttatgaaagttacattttgttttgtgttgttggaatgcatgtcttcttcttcacatataagtgtgtgtaggatgacaaatataagggtctcataacattatttatttttcatgagagattatataaatatgttagaggtaaaaatatttcaatatctaaataaaatgattaatttaaataaattatgtggatgttaaatttgtactttagtttataatgatgaaaagacatgtcgtaatgaatttataagattaatttaccttatagtcaaatgttcaaatatgtttatctattgatttagtgaaatatataattaaaatgagaagtataataataaagtggttgtgcattttttattaaaaatatcaatttttattttggggatgataagagaatattttaaatttttttttttttttgcatattggatcttacagctcatcatcattgattttatctttttcctagaaagtgattatctatcttttttttaatatagataatatacttaccataattaattaattattattattttttattaataagagtaaatgagaaaaaaagagttccttattttattgatacagaatatttttaattacttgtttatggttttaaatagaatcatttcttttattagtaacttgtaaattaagtcgcgcatggtgtcgtcaaatttttgtaatttttcaaacttttttttttttttttgtactgactgaaaaattatataaataaat

SEQ ID NO: 244683 - DNA, 1438 bp, Cannabis indica
atttctcagtaaaatcagtatataagttccttcaattgaggaaagagttgggtgcacaggatgataattccatctcttggaacactctttggaagcttagtgtccctccgaaagtgaaagatttgttatggcgtactgccactaactgttttcctacaaaaactagacttcgatctagacatgtgcccgtcgatgtcaccttccctgtgtgcaaagttactaacgaaactatctatcattatttggtggaactttcttttgtaaaggcgtgttggcagcagcttgctactggtgtaaatttgacagtagtaggctcttttgccaactggtttgcttcgactttaactcagttggatggggagaaaagaagcttggttgcaatgacatgttgggcaatatggaagcataggaatgaattagtttggtcaaacaaatctcctactgtctcaagtgttgcttatttagctattatcatattatatgtatatgatttaatatgtaatatatattatggtgattaaattacatattatatgacttaatatgtcgaaagtaacataaaagtaggagttataatctattaactaattttgtaactcttttattataatttcaagtgtgtaattaagtgagatattacaaaaattaatataaaatcaaagctatatattatcatatagttgttagagggagttactacacacatttgagttattaaaatgagtaggaaaacattgaaaattgattggggttaaaaatgagttccaaaacttgataaacaagtgttttaaaatagaattttcataaaatgttgcaaaagattttggactcaatgggttttaatcctagctttgttcccacatccataacacataaaacactcatttatgtgctgataacagcatggagtgatgggagtgttagatttaaaattctgattaccaaaacactggagacttatgggattcatttttgtaaaaactagtttttatcaagagtgtgcattgttagaaactctctttaagcttgataaatccagaaaattattttattatttttttttctctaagtgcttgtggtaaaagaaataaatttttggacaaatatgtaaaacattgtgtaagtgtcatgttttgtatggcaaattatgtaaatactttgtgtttgttttatctgtcttagtatttgtctttcgtcatctttgttgtggttagttgcatctgatctcgctaaatctattttagtgccatgtcagctttctgcgtgttagttagtaagtgtcagctatccttagctggtttgttagttagtcgatttcgttatcttcaggatataatttctgttgtgtctgtttttctatctaattctctttggttagaatcatcttcttgattcttgctctgctagggcacaatatacctttgttttgttttgttgt

SEQ ID NO: 244684 - DNA, 1237 bp, Cannabis indica
tcatcacaagattcacccaactgatatggaagcccatcttaatcattacctcatatagaaagtgccatgccactcggtcaaaggctttgctcatgtctagctttaatgctgcataccccatacggcctctttttttgttcttgaggcagtgaacaagttcaaaagcgagaagcacattatcagtcataagacaattcagaagaaatgcactttgattctgagaaataacatggggtaaagcctctttaaatcttgctgcaatggccttcgaaaccaacttgtataacactgtacataaaccaatagggcgaaaatcgctcacaaagtttggttgatcaatctttggaataagagtgataagagcagtgttaatagaatccatgtcatcaccatcattcaaaattctgagcagactttgagtaacaagagatcccacaatatcccaatggtgctggaaaaacattgcagacataccatcaatgtcgggagacttgtcaggtgccattgatttgagtgcttcttcaatgtccgaggctgtgaaaggcattaacagcttctgatttatatctggtgtgatggctatgtgaatggtagaaaggacataatgcagagcttcctcatcgacaccatttgtggtgaacaaatgtgagaaataattaacaatttcaatacttatttcctcctcagtatgaacaataccaccattaccagcttgcagctttttgatcttatttgtcgcgtttttggtctttgcatgggagtggaataatttggtgttcgaatccccactttgaagccaatcaacccttgcacgatgatgccaataaacctctttttcaagtaattcatcaaggattttatcagcattttccactctgtgaatatggtcagcggaagtagctctactgttatgtagttgtgttgaggtcttgtgtgcttcagcaatatcacgtcccatttgaccatatttcttaaagtgccaagcttgaagagcatcgaaacttgctgcaatattttgcaacaataaattagtaggattaccacttgctgcatagtgccaagaatcctgaataatatttctgcaatcaatatctctgagccaaaattgctcaaaacaaaaccgtgaatgcctcttatgtgaagttgcaggagaatccaatgtgatacaacataagcaatacctcgatgatctaagtggtaaaagtcaaggtgagattgagtatcttcaatgaaaaaa

SEQ ID NO: 244685 - DNA, 1544 bp, Cannabis indica
ggtaagttgcaatacttaaccataataagactagacttggcttattctattaataagctcagtcagtttctagcttcacataaagccaaacacttaaatgcagctcaaagagatctccaatatgtgaaaggaacgccaagacaggggttattctactctgtcaaatctgaaattaagattgaagcttacacagatgcagattgggcatcttgcattgacactagaagatccactggtggtttttgtgtgtttcttgaaaatttgttttgtcctggaagagcaagaagcaacacattgtgtttcgatcctctgctgaggcagagtatagagccatggctaataccacatgtgaagtttgcttattgtccttactggatgaattgggaattgagcatcatggacctgctattttgcattgtgataacaaggcagctcaacaatagctgctaatccaatcttccacgaacggaccaaacacgtaaaaattgattgccatcttgttagacaaaaaagttcaagaagggacaattaaatcatctcacattttgagcaatgagcagattgtagacatctgcactaaagctctactaccaacacaattttaagctctacaaaatgagattatacaatatatactctctatcttaagggggtattagattgtaagatgttgtgtatttgagttagttagtgtgtgttgtgtcagctgagttagttattgtcccaataattaactttattttatttttcctttgctgtcagtgtctttatataagcattcatgtaacagttttgtaatctaatgagaattcaacactttctttcttcctctccttgatattaaaatgggagagaaggagttggggaaaaaattattttgaattttttaattttcaaagtattttttttattattaataaaatgtttaattttgaaattatttatttgtgttttttaaataattatatcacgtgtatcaatatatgtgtgctacgtgtataagagtgtacacataaacagtctatgttatcaaactgagataaatggatgacacattaaatttgttaacggttcaatagtttgaagggttttaccacacttggagggttaagtgcaagtaatgttatacttgggaggctttagccgctaaaaactcttacttaacacttaacaatacaaaagttttacttttaataatttatcaaacactctactcagttgtttcttttttttctttttttcataatacaactataattgtttttctccacaacacagttgtgccaaattgatcctaaaacttattggtttgtgagacattatggtgaacaattttaggaatttcgcactcgtaaatttttttattcaaaaataaattaataaatctattcgtgagcatttaagaaatcttttgttgagggagtaggagaactaggaatatgaggaaaagaaaaataattttccagcatacacttctagtatgtgtaatacctaagtttaacttccagttgcaaataaatacctaagtttaatttttggcggta

SEQ ID NO: 244686 - DNA, 844 bp, Cannabis indica
atgagcatgataacctccatctttgactttttgcgagacaagtgtagtgatcgtgtgggctatgccatattcatgttacgaaagaatactgtatttagtgggagattgtagcccaaagccaggacttgaatataatgacttgggatatattctgaactttgttttatgagaagtattacaatgagtctatccgtactgccaaagcgaagagttcatacaattgcttcagagtggcatgacaatgattgagtatgccagtaagttaaattggttggccaagattgtgtttgatgatgtggctattgaagcctcgagaaagacaaagtttattggggtttctgaagaacacatatcccaagatgttattgtgacagctaagcaaccgagcgtttttgtcatatgctcaaataatagagttggcacttgttgttgaaggggttgaggatcgaatttgaaagaagagtaacatttgaagagattcgtggaagctaccttctggtactggttcaagtaggggttttaacctatttaccaaaagagcaagccaaatgatccacctgttacgggcccgaataaaaaatttcaaggtaatcaaggtttccatcaaggtaaaaaaatgagaattggcaaccctattctgagtgcccaaggtgtagaagacactatttgggcgaatgccaagctcgagcttgcttctaatgtggtgtagtaggccatctaaagaggaactgcccacatttacaaataccagatatgaagaaagatgatcttttggttcctgctttggtgttttctttgacccaagcagatactaacgctaacccttccactgtcacaggtgaga

SEQ ID NO: 244687 - DNA, 1897 bp, Cannabis indica
cttcatcaataaccttcaattggctaatgtgagagagcaattcctctatttgatccatgctttctgagcacatcctctgattaggatcttccgaagagagcatgggagttcaccagtcgcagatgagaatcgccgtcgccgagagagagaatcgccttaacaatttcatttttttgaggctgtttactattatattctgaggctaaaaatcataataataataataataataataataataataataataataataataataatatccatatttcgtgtatttttattttattaaatcgtataaaaatttgaacagaacaaaaattaagagagcataattatttgcgtgtcactttaaagtgctactctcactaactatcgtaagtcttaactaaccaaataacgacaaatctacccaaagaaaaaacacactaccatttttctctcgtttcgagactccaaaccttaattgacacctgtaaaatctgttaacatctgcttggctgctgagaaaattggggtaggaaattttcaattttggtttcatttcccgtttactttcccagtatctggtctacttttttctgcgctgtatatagttttggaaaaacggagaagttgagattcaaaattccctattttcggtctgcgtaatcgtctttgagatgagtttaatcctaaactgttgcggaagctatggaattcattctcttagaatttcaagcctcaagcgggctcacaaaagcacttgtggtgagtctgtttggtctctactttcctaccatctactgtttttgagttttactagggttttatactctctatggaaacaacgttctcagctttaagtaatctaccattttttttggttcatgttctaaaaagattttaattgaaaatattagtgtttgcagaatttcgggatctgttttaattaactttaataaacacttatggttactattgtttttttgaagaatttcattgagctgtatcgacaggagtggtttccaattttctgtaatggaattattatgtactgagaggtttttgtgtatctgtgatccagtgggattgcttgtacgaatattatataaaattttacaatatttattttcaaggtatccatatgaggccaatcacattagtgaaaaaatcatcttccatagatgaggatgatcattgccgagatcttgcaccattgtcaaagatcaatgtaaacagcagcttgagctttatggcagctatgaatggcatggccggtaagtctttatccttcgcttaacatgacatgttttacaatacttgttttctttcatttgttcactcttttcaaagaggtttattagatatttgttgtcccatttctatatcgtattgcattatgttatcataattttttttgttttcacttgggtggggaatgttgttttgatggctttgaaactattcatctccttaacttactcttaagcaccctacacacgatttacacatgtggtttgcatttgcatgttttatttttgttcttccttacagattcacttatgtcctttttcttgtctcatagttctataagcatttcattacttttaaatgcttgcactgtaatcagtttcctctgtttataatgttttcagtagcaaatttggctgcagtcgacctagcaaaggcagtgagtacaataaattttctttagaagtgttttttgcttcctagtttatcaaatctctctttatactttgtatccattacaagtttgctaatgtgaaataagctttgaaaatttaacataaatcatatttagttgttgttttcaagaaatatagttctgaaattttttaaataagatatttctttatggtgttatgaacctcttcattctagttgtgtttgt

SEQ ID NO: 244688 - DNA, 814 bp, Cannabis indica
acaagacatatttagccaaaaaatgaacaacaacattaatagatctagaacaaatagaaagactgacataatgaaatttagaaaaaactatgtctaaaatctaataagactaaacccaaagaagaagtcaaaaaaaaacttgattattaaacttcagtatcatattcaaacaatcaaattcaaatagatgttgataacccaataggcggtattggatggttgtattttataacgctagagcttttgctattttaggagaaaaactacccaagatgtgacaaacagcaaattccataacttcacttgtagaatcacaaaccaccatacccaaactacatctatcatcaattgaatcaagagtgacatcaatatttattttcagagctcccataatggaaaacacccaaatagaattagaaggaccagttggagttgaaggcaagttcccagccgagtgaaagccattggaactcttgtctaatctttggtaatcaacaaaaaaatcataactcaaagaaacaacaatatctagagtgatacacaatttttactacaagcatacaatgttgttataacaaagttttaattatagaaaggttgtcgaaccctcaaagattgattattaaattttactaattactataccttttttttttagttttaatttagtagaattaaaagtaaataagaatttagaacgaaataataaagtaattgaaaagtaaacagacaaacaacaatttaatagaaaataaagaacatagagcattgattttcttatttcctaactatgaatctcaatttaccgtattat

SEQ ID NO: 244689 - DNA, 677 bp, Cannabis indica
aaatatactaaacttaatctaaaattaaaactaaaaataacctaacactaagctagccttagtggcttcaccacttaatcttaattacactaagatattagtatagagcatagctataacagtagtgtctaatactttttaaaagtggtatcttaaaattagatagtaatattttataataattattaaattaaattatacataacttaatatttaattttacaaataaaaaaagagaaatattaaaaggtactagtagtgactaagcaaaagccccctgaaaaaaaatcaaaaaaatgtatatatatgtattttagttagttacaatatatatatatatatatatttatcataaaaaatgatatatagagacataatactaattgggatttggtgtaatgactaagttagaatcaatggttcaaatcccactaaaattactttatttttctttttaaatttatttttgctcttgccttacaaaaaaaaattatgtcctgacaaatctaaaaaatattaagtacaaatggtactcaatatcaatacttaaaaagagtattgttattaaatactactagtgtctaacatcttcgtgttatcttataattggttagtaatatttttaaagttatgaaacaaaaaaattaattaaactgtagaaatatatatagatgttg

SEQ ID NO: 244690 - DNA, 1822 bp, Cannabis indica
ttaataccattttaatttattcaacataaattgaatctttctacttttataaatgattacaagacttaatttttaataattttcttttaatataaaaaacttaaataatttataacactaacaaacagaaaaattacttagtttgtggtgctgatttgtactaagttttaaaaataaaataaaatcaaattattatttaataaaataaaagattaatatcttccacaaactacaaaatagtattggtaaatacaatttacatatttattttgctatccaaaataattatttaattaaattttaattacgttaaaacattctccaaaattttaaaaaataaaaaaatttaacaaaaccagacttaaaataacatgttacatagttattagattgtttcaacactactttataaaatatcttaaataaaaaaaaaattatactaaaaacttattatacaaaaaaaaacgtatacagtatcgtatcgtagaatcacctaaaagcatttaaatttaattaaattacttatggtaatccataaaaaaaacataattaggtagttaattattattctaatttctctttctcttaccctcatccatccgttgaatagtaataataacacaaatcaacaaatcaaaattaattaacttaattacgtaattaattgatttctgtttgtcttaccctcctccggtgaacagtaaacgcccaaacgtagcgagaaaaagccgagactgtaaaccaggatgaacgaaatacacagcttcaagattctccttaacgttcatcggaatcgcttcatagatcgatcgcaaagcagagattccaggaaaattctcgcttcgttgaactccagtatgtacgtacaacaccgagaatttccttttccccaatcgcgggaaaatcttctcctccaaatactttctcagaacatcaacactcaaaatccgagctacataaaacaacgaacgaacgatccaaacatttcaatactcaaacaacaagaacagcaaaaaaaattgaaaaaatgaatcaatacgtacctggaaaaaattttccgattatacgaaggatcttgcgaccttgtttatccttgcctttgatcttgaaaacctcaagcttttccaggagttgttcttgttcagattcggatatttggctacacattttttttttggagagaaaattctgagaatgaaattgaaatattataaaaaaggaaaagagaaagatgattggattgggagaaaatgaaatttaatataaaaaggagtgaaaaataattaataatttaaataattaaatttatttattataataacgacataaatatgaccagtccttattagggaatattctatggaatcttctcttttattttctgaacaagaggacagttctttcaatggttatggttgtgacacgtgtcgtttgagatgatcttggccgttgttttttaataaatgaaggacgataactacgggatttaggaatgggataaagtcgaatgcggcaaaatgttcggcggtggtagtagatagggtgatggtaaagcttattaaatatgtgtaataattaataattatataaaataggttttatgtgggcagtggatatgatttttctcatattgggccatgttgtgggccacttttgttggataattatggactctgatgttttgcctatgggcctttactgtttggtgggccccacattttgttgtgttgtaactcgatttatcgagtgagacgcgataacatgatttgaaatttgttagtgggtttagatttatcttgaatgggctcagatcgtattcgag

SEQ ID NO: 244691 - DNA, 2489 bp, Cannabis indica
gtattatcaccgctaaaaattaaacttagatatttatttacaactggaagttaaacttaagtatttatgctacaaattactctaataataataataataataataataataatcaaattaagggtgagtttatggtctttggtttgtcactccaaaaaaatttatttttagtcacaacaaaatttctgactaaaactgaaaaaattgtgagtaattataaattattatttttatgttgtgactaaaagggatccgtgactaaaggtattagtcgcaaaaatcacaatttattgtgactaaatatatttttagtcacaatacttgttctgactaaaattaaattagtgacaacttgtatctaaatatcatgttttagtcataagtaaatttttgttgtgactaaaagtcacatttagttacaaaaaatttatgttataactaaaaaattgtcactaaaagtaaattttttttttttagcatgtgttatttttacttttgtaaagttacatatttcttagtttgagtttctgagttgggtttctccataatgaacattcttcattataaaaagaaaaaaataagaaagaaattaggtttcacataaaattatttttcatttagcttttttatttatatatttaagtgattttaataatttcttaatttttaaataatttggaccaatcaaaagttgccacatgtatacatgacactactagaaaatgaatattttatcccactttctatacttgaaataaaataaaataaaaatgggataaaggtctgctaagagtttttaccccacgtttgtataaggcacaaggatcatgtttgattgagcactaaaaaaagaaaaaattacactaaaaaaagttaaagattgttttcttattgactggccaaacacgcccttgatgggtcttctatcacactttggagcaagggttactgtttggctggtcaccaataagttaaattttcatcctttattgttttgtttgaaccaaacagggtgtaaaggagaaacccttttatcgctgtttttaacaagaaaaccatgataaaagagttttcctaattcttatatcccattagggttttatttggagtgatatattcctttctgacacatatttcttcagtcgctctttgtatctttctcccgattctatttcagctgcgcatgaaggctcctctccaaacgggctccacgccctctgaaacttctagttaccattcatcttcttcttttgtgttgttttgttcttgagagattcaagctccatgcccacttatctcgttcttctttttcctttttttttgaaacaccgatcagctcgatctctctacttctctcttttctcaggtgcaaaggtttgttgttgacggtggttctagttcgcggcttttcatggtggacacagcttcatttatgtatgattgtttatcttacaaaaaagattgtaaagttctaagattttttggtataaagtttagcttctattgtaaagattttaaaattctaaattgatataaattttcggtttctgattgtaaatacggtggtggctttcgtggaactgatataagtacttttgttgtagtttaattttttttattatatttgttgacatttaatccttatttttaaactaaaattgggataataaatgaggtctttaattatcccattttttttgtaaaaaccagaattaaaaattctttgttatcccttttttttgataagatgttttattgcatatatcccgatttttattttagtgaaaattgagataaaatgtccttattaaaatatgggataaaaagttcatttttatagtagtatgatatatagtgacaaactttcaaacaatataattccacaaagaatttgtggtagtaaagtagtagataagatatggctaataatgagggctcatcttgaagataaatctccgatcattaattaatattatctttgtatatagttgaggaaaagatatcaaaactcataaatgtcatgatagaataattaatatgatcaacatattcaattgaagtagttgtacgtagcatactattataaatagaatgttaatatatgtagaaatgatatacaaacacaaacatatatattgtgagatcatcaatcaagaaatcaaatcataatccaaaatatatatcatatcaatatggagaagagtggtgtgatggtgatgatgatttgcatagtagttattggtcttgtgtttgttccatctcctacttttgcaatctcatcatcagatcaggatcgtgtcatgatcaacggtcaagatggaaagatggtgagtatcatggatcgtgattctctattggaggtactgttgaaggaaaggttgtcacaagacaatcaatgcttgggtaaaggttgtgctccttggagtccttgccaaccaggttgtcattgtgttggaccctctggttttggagcatgcatttaaaaatat

SEQ ID NO: 244692 - DNA, 1008 bp, Cannabis indica
tttttttggtttctatatgaattctttttctgttttctttttcaaattcatttattaaaaatatttttgaagaaaaagaaaacaatcacatctgtagaagttatctaattaccaaaaccaggtttagagcttggtatttttcagtttatatatttagttttctaggttctttttatcttttattttcttctttattttttttttttaagaaaaccctgtatccattaagaaatagaaattatatgttcacaatacaattaagagcataagtaatacttctttatctaagctgaaagtatatttagctagtaggtaaatagcaatatttgtcactctaacaacataactaatagtattttgaggaaatgaagataacaagttataaatattgcaaatcaaatcatctaaatagaggttgatattagttggatggtgaatactatccacaagaacttggcaatctgatttaattttagagacaacaattgtgttttcgagacaccattttagagattgttgtagggagagagattccattaacaaaggcaaaaaaacaccaggccaagggatggaggttgtcgcaattaaatctcctttacagttgcgtatcacaaagccaaggcccattttgcatctgtttatgtcttgaactacattaacattcaatttcaaaaaaccaactggcaggggtatccaatttgttattcgcgtttctggcattggacacgtggactctaggttagcatccaagactcagcagtggggccatcgaaaaaagtaaagtgggccaatcccacttggataggtccttctaggaacgaatcttagctccgcaatcgcaaatccttctaccttcggcaagccatgtccggaagcatgtccagtaccacgagaccggaagaagacagtgcgttcccgaaagacccttccagtttccctttttattcttgtgcacaaataaggaaattccaagtgttagagaacaatagagttgttgggttttatgcc

SEQ ID NO: 244693 - DNA, 2384 bp, Cannabis indica
catttgacgaaattagaggaggctaggaagtcttatgattcttattttttaaaaaattacattaaaaatggaaatttttttatttttttacatgtattgtcccctttttgtaagttttgttaacattttttattttatttatctctaacatatctacatattatatgtggcagttacttggagagttattaggtacatattttatgatatttgctgggtgtggttcagtggctgtgaatttgaatttcgacaaaatagtaacatttccaggcatttgcataacttggggactagtggtcatggttaatgtctatgctctcggtcacatctccggtgcccattttaatcccgccgtcactattgcttttgcttccgtcaacaaatttccgataaaacaggttaatatttagaattaaatatgcaataatgtgtaattaattttgattgttaatattttgaaacaatatcttaaatttagtactattttgttggattgagtagctggtacatgcatgcataagtattaactattggatgttaataattcaaaaaaaaaataatgcttgaactaaccataataggttggattttatgtccttttttttgttttgttttaaatgatttttaaatagaaatgtatcattgtcattcattcaatacattttatgtattaaattctttttattgttaaaaattataatgaatttttcccacataatcatccaaaagatttgcatgaactgtccaaaaaaaagcaaaatctttatatatatttttatttttattaaaagaaaggacttaataatcgaatcaaaaaaagtatgtcaatcaataattttaaccgaatccaatttggtaagaaataagaaccatgcaaggaaagcaaggagtcctcttgaaaaaaaaatcgaaaaaaatatatatgcattttaactaattaccacatatatttatactaaaaagtaatatttataaacattgtaatgattaaattagattatatatatgatagaagttaaaagtttaaatcccattagaactacaagaagtttatttatttattctcgaaatgacacaatttttatttagtatttttcttgtaaatatattataggtaccggcttatataatttctcaagttgttggatcaaccctagcatgtggaaccttaaggttgatgtttagtggaaaaggagaagaccattttcttgggacaatgccggcaggctcctacatacaatcctttgttgctgagtatatcgtcactttttatctcttgtttgctatctcgggtatttgccttgatgatagagcggtaatttctacacttctaaatatcttaatttctacatttaatcgaagatttatacttttttagattctgtgttttacattttttttttaatttcgtgttttaagaattttttttgaatattttgttttgtaaaattttttagtcaaatatgagtagtgtgaagaagtctttatgcttaaaaaaagaagtttgaggagtccaaacaagtaatggtacaaaaatctaaaaaataagtataagtcattcaatcaaatatatgtgttttgatgctattcttataaattcatcttgaatattttttcataaatcagtatacatttatttgggtgaaaaatctaacaaaattattttaggtagggttcaattcaagtgcaaatagatagtgttatttcaaatactaatttgaactttatgttttgtaaaactaattaattaaactatctattttgttaaatgataattttttttttcgaaatgtcttatggtaattaagattttatattttctaaaatagtataaaataatattttaaatttaatttttatcaaataaaatttaataataacttaatcgaaatgtgctgttacattttttttttaatactatatctgtttttcttagaaattaatttaagaataattatattaaaaataaattggtaaaaatgagttcaatatattatttttttagggaatttaccaaatatgcgttaatttattattattttttaaaatttatgttaatattttcctatttttatttctcttcaccaacattgtgagttatggcttattgtgatttgtggcttattgccgtaaaatatttgtttataaatatattaatataattaccccttatttttatacaattttagaaagaatagaatttaattgtcatatatgaaagaagatctgattggtaatttgtatagggtccaaaatagtattaccaaataatagggtcgacccacatagaggtgaggcggagcagtcaccccttgaaaaaaaattagaagaaaatgtatatgtaattagcaatttttcacacaaactttaacatgtactaaatc

SEQ ID NO: 244694 - DNA, 991 bp, Cannabis indica
aagattatgttgcatgaataaataggatgatttggatgagatggagatgcacaaaatggaagaagctagaaaagcttatattgctgcggttgctgttgcgaaagaaaagagagacgaagagtccattgcttctgctgctcgtgcccgattataccttcaaggatttgttttcagaaaatgttcagtcgggggaacataatgagtgctgtttaatacgatttcataatggaagtttttggtatgaatatgttcattgtgttatttgtagaacaaagtgaaatgtgttggtgtggtgtgttgtaacattgtccatgattaaatgttcgaggttagggtcgcaaaatgtttaaaaagataagagtaaaattgttgcgtgtctgtgttacaatgctaatcttagctatttaagcaaaaataggtttaataaagtcttgttgagctgtctaagattgacatgagctttaacagtgtactcataagtgcataggtgtataatattagttgtaaaggattaaagaaaagaagcaaaattgtctcgcaagttgcctggacaaagaaaactgtttttttaaattgactcggttagtaattacactccagggtatcgctttggcactgcatttggctagggagaaacaggtgaaagatgtccaaattgaaacagattcgttggcagctgccattgcttttgcggctgagaggcttcccttttggtggagcacttttcctttgtttactgagtgtttgaatttgtgtaagtcttttaataatgttgttgtgttacatgttaatcggaatgacaatgtcttggctgataaactcgcccgctgggctagggtgcataaagttaaggtgtttggtttgttaagggaagtagcctcctattgtggctattagtgcttttcttgttttcaataaaagttctttaatcatccaaaaaaaaaaaaaaaaaagtccaagtcccagtcgtgatttttttttccacccataa

SEQ ID NO: 244695 - DNA, 1041 bp, Cannabis indica
cattttctttaaatagttcatattacttataatatatatcaataaatatacttatatatatatatatatatactaagcaaaatgctcatttcgttcacttgaaaataaaaagaattctgctctctcatctaaatccaaatatttgtctgcgatactcgagagtcggatagtcggatccgaacagagaccttgcgaaatgataacaacaataacaacaacaacaacaacaataatactaatcggatgaacacatatgaggttgtgttagcaagattggaaaagctccaaaaggtccaagacaacatgatgcaactagcttctatcacaaacacaccaagaagcatctgttgaaaggagcggtttacttgaaggacgtgcatctttgataagacaagtacatactgtttaacaatgaactcgggcgacagatgataatgtttgaggaatcagaacttttaagattactgaaaggattggtgaaaaggctcggtcttcctctgagttcatcacaaaagacgaattgattagtctccttaaagccgaaaggggtaaatcatcatctttaactttcattgactttcatccacccttccttgtgaaagttgtagtcaaaccttaccctcgtggttacatgagttcggtatttcgaaaatacgatgagaaatttggcaatgccaaagaccatataattcaatctatagatgatttaggtatttatgcgcatgattttaaattaagaatccaagaataaagtctctcactgatcgagcatactcttggtatgcaagtttgccgtcagggagtataaggagttgggacgacatggtctctttattttgtgaaaagttctttatgattgaagataaatggagcatagctgacttactaggagaaagacaaatctttggagaaagactcgttaattatgttcaaaaagaaaaaagctcttgattgtgttgagaccatggctaaaaatgatctggtcaaaatgtgtatcaaacgcatgttggatgaatatcccttatgttgggttttatgccc

SEQ ID NO: 244696 - DNA, 2195 bp, Cannabis indica
tttaaaaagaatttaaataagtggaagccaatattattaagtgggtttcttacatgaatataaatatatatatatgataaaaaaaaaactaattacaatattaacgtcacttaaataattattatgacacttataagtaaataataacgtcctcctactatataaatgcccaagaattgttaaaacggttaaaagaaatgaattgacctaaactccatgcacctgcatgattactagtatatacaaacaaaatagctttattattaattttaaaattcttatattaaatattaaaatttcattcactaaaatttataatacccaaatagaaacttaattagaagcaatttcatcttaaatacaacctaaaaaaggcattcctataatataaagttttaaaaaattaatatatacagataaaatactaataagttacattttcataaaaagattcactttaaaataaaaatgatttataaacattttggtcacctctttccattagttactttaaaattatgtatttattttaaattatattatgttattttattatttaaaaaaaagaattattttccttttttttagcaatatttttgttacacctttaaacttatttaagaaactattacattaaaataaagtaaaataactcacataagttattagtggaatttttaattacataattacataaaatactactttttgtaaaaaatttatatttttacgtttaaagtttttttttctacatttttagggtactttataaaattacaagaaaacaaaaaaaaactacataaaagtaacaagaaaataacatcaaaataccaactaaacacattaattaatataacataaaaataatatacaaataacaaaaaaatgaacaacaaaataacaaaaatataatataaagatacaccaaaagactatatatattttatgtaaataaaatcgtaaaaatcgtaaaaatattgaaaactccatacagactgtatttttataattttttgttgttatttttttgtgtttattgttattttaaaagttatactattatttcttaatattatatgataaatttttagtaacggtaatttattgtaaaaattaatcatctgtcatataatatattagttttaaaaataaatttattaacttaaataatacatataggtactaattagtatataattggtactatagttcaatagtttttctttaaacagtaaaaaaaaaaatatgattcgtatatcttgaaataatcatatgaaaaagtagattataatggtatttttttaagctcaaccaaataataatgtgactaaaaatgatttttgaagctttagagaggagagagaaaaatatgttgaacaagaaatgagaaaaaacggataagttgaaaaatacttattttttttattcatgaatcaaaaatactcttatattatattttattaaaatataattacttttttgagtatgttgtataccttcattctctacttaataaataaaataaaatgactatacaatgtaattttctaaaaaaatatacggaggactaaccaaagaagaataaaaaaaaaaataggtgctattattagattttttttttttttggttggcttatttcagtggctcaaatccacttaaacattattaaaatagtaaattaagaataaacaaaccatactatttaacaatgccatatgtacaaattttatattaaatgtcatcaattattgttttatattttacgtagtggatacatgtctctctcgtttgtctaattttaaaaatatcatctatatatatttatttatatatatatatataattgaaaaataaaggataatatagtggtctaaaaatacttttaaagtactcttttttttttcattttttctaattttttattaatttcatttcaatattattatatagctaacaataactaaactaaaatatcattactatatagattttcattactttataaaaatatatctataattagatagttattttttaaaacaataattatacttatagaaaattataacatattcaacttataataatcaatataaacattgtagttgacagtggcggacccaggatttaagttgaggtggggcgacattttttttcttataagtgaggggagcatctttttttttttctacatt

SEQ ID NO: 244697 - DNA, 923 bp, Cannabis indica
aaaaaaaaaacataatacaaaaatatattcaggaattaatattattttatttattgcaattagatcaatattttattatctcttgccttgccttgtagttatatttttattgttttatagttgttttatgttatttgctagattgtttttttattttacattctgaaacacaatatttttgtaaaattgttaccgtaaaaatgtaaaaaaactcattatctcaatatttttataattttttttttattttatattacttttataggttacactaattttgttctaataagttatataatcacattttaataattggatccaaccaatactaacttttacaacccacaagcttatatggtgcaaaataataaaagagtctccgaaaagaagaaaaattgttacttaaatttaggattgtaattatggcaaggcacatgattcctctgatacattacattatatatatattttatacattgtatatatattctcatgctcgttgtgtcttcattaattgctttgagaacttgtactagttatttataatagtacaaatatatatatgtatgattactgagtatatatatatatatatgaccgtggactaattatgatcttcaatatctccctgcattttgcaagttatatatacacacaactgtataaattataatattgcagttttttaacaatcgaacacgacacacgatataattaatatattatatatatatatacatatatatatatatatatattggaagtatgatcatgattaattcatgaggatctgatccctgtttgctgaacaatattaattttgtgataatgaggtgcaatgaatgtgataaaatgatcgaatatatatgtaacttcggattggtctctcttcgatgaatttatgtctccagtactcatccgat

SEQ ID NO: 244698 - DNA, 1357 bp, Cannabis indica
cttctatttcctctacaagtccaaagttgtaacataatccccaaagcaaggatctatgtctgcatccctaccttaggtggatcttcaatgcccttggctggactcactgtttgagctcttggtaggaaagtcttcctctttttctttgaaaagagcgatattgtaacattgtcgagcagatttttggtctccccttaagcatctaacaccatgtttggttggaaacttaattcataagttgtaaattgaggtgatcgccttcgggtcatacaaagttggccaccctatcatgacgttgaatgctgatggcacgtcaacaatgatgaacttggtcatgaatgtgttttgtgctggactttcactgattgttagttgcaattagatttatcctaaaggagtcaatccttgacttgagaacccgtacatgagttgtgtacagggtgttaggtctttcagataagccccatcttttcatatacactcctgaagatgatgttggaggaggccccatcatccaacatgcagcgtgccactttcatgttccttatttgagtagttatgaccagggggtatttgtggggaaatccaacatgggccacatcctctttggtgaaggtgatggcatgttcttctaactttggctacttgtgatttctttcctctaaagccaggtcttcatttctttgctcatgacaaagtgttcgaacatatatgtccaacacgttttttttttaattctcagcaatgtggtgtccacaaatgatgacttgtaaatggctagtgactagtagaagcagctgtgcctggctctaatcgacttggacatactaatgtaggtgagggttgttccttcttatcaagaactcaatctcttctttcaagttcttccacttattagtgtcatggctaaaatctttatagaacttggttggatcgctcttgctaatagctttcttcattggagggggcttcttgtaaggaataaaagcctgggtggccactaggatggcctcgggggtgtttgtcaggatggagaagcatgtgaacttctcctcgttttcttgagggtgtagttgtgcaagggtataattgaatttccccttcttttcactgccttggccaaaattattattgttccatttccctccattgttattgttttggtgtgggcagttttgtcggcacaagctgtagcaggtgtgctgctagcaataactattttgtgcatgccaacttgcacctgcccgatagctgctttgagttttataaaactgccaggtcagtctaaaactctctcatattgttagttgaccttttttggatgtctctttaagggtcacttagaggtgggatacct

SEQ ID NO: 244699 - DNA, 1880 bp, Cannabis indica
cagtgttttgtgcatacctactggttgatgaaaattccaagttgtgtatatcaaagcatttgtctttcatcagtaattgatatgagtattctatgtttttgttgatgaaattgaaattactaagaatagaaaagaaagatgagttgagattctttcttcgatcaaataatatttgattattagactcttataaatttcagattggggatgaaattattattatttttgagtgggttcaattatttttttaggacaatctaaaatttataagaattatttcatttctaattctgctaagttagagttactccagtacttgttttttctttttcacaattgattggtagaattaattctaccatgctgtaacttaaaagaactatatgctttggtttttgttatagcctacatctgtattttctagatagctattggtttcaaaaatggcttctttatcattcttgtatattcaaatgtctttatatgctgaagcaacaatatagagtaactttcttttgtttgtcattactaactactggttctttacagggaaaggtaccaatcctgcaaaggtctttagtggattgtcatggagtcgatcatcaaggtcacttaccgaagattctgttgattttagtgaacaatgcaggcttggagctcattgtgttacacttaaaaagttatgcgacgaggaacaaaatctttacaaggcggtcaaggtatatagtccatgaaatcatgcattttgtaattcaaaagcaaactattatttgatattgatcacgattatataacccgtgttcatcaaccctagattgccaattctgggctagaaatattggcaactaaaatatgcatatgaccctatgatatttcacataacattaagttattaataaggacttccctatctgttgaaactttttaagttacttgttcttatagcaatgtatgtatatagttttcaatattctggctttaatggtcaatatggtaattggtaaatatgtatgctttctaatgaaaatacagtttaatgattatcctattttcgtccccataggcatatgtaagaaatctcttgtagtattttaatatttggtaagcttctaaatcaaaacatggttaagtttatatatatatttacagtttatattctcttgtgtttatttgaagaaagtagtataatactattatatatgttattaacttctagcataagggcaccttataatggccaatcctactggtgtagtagtgcttaagatgtgttgttgtgtttgtgatcttttttctaggtttccatgttatgtttttagttgattatgctggtagaattaaggaccttcaaattcagatgagaaaagaaaacataagttcatagaccaaactcaaatcaatttttcatgttaattatgagtgtcggttggtctcgtatggtcctgttttgagttttgagtatactataaatcaacatgaatagaacaggtgaataatagttgtcattgaacatggaatatacacaataaaatatcatgaaaccattattaacttgttacaatgagagattagtccctgtatattctcattcaaaagatacaacaaaaaaacaaatccatgcaaattcattagtcttaaactacctataaagtaaatacaatcacaaaaggaccaattataggttactaattgaaaatttgtagttttactaattgattcaaagttagtgtgtttattttcttagtaatggaaagtttgtgttttgtgtttttcttattactgtagttttcgtgtaatatatagtatgtgttaattaagaagaagatgtatgtgttattaattatgagatagatcgtctataggagaaaaagttcatttta

SEQ ID NO: 244700 - DNA, 1165 bp, Cannabis indica
cgggatttgctaaccagtttggttagaatgactcttatgaagccacatgccaaaaggcgatctacttccactttaagcacttggtacctcgcggggttcattttgctgtgcttttgtcagacacctcgcactttggggtcaatgttcagtcaatgacacatgacctgcaatgatatcctgaccatatctgaatgtttccatgcgaaaacatccagatttggcctgagaaaagtgataagtttttcttactgtcgaaaggttagtttggaatagattttcaaaactttattatgatcagaaggattgattggtacctcaattgtatcctctgtagcttgtgtggtgttggtattatcgaggatcctcggatccagatctggtttctcttcatatggtatctccttgattctgaacacttcttgtcgaggaggtggtgattccaacaggtatatcatatttactgacttcttcttttctgcgagttttagtgctgcgttgtagcactctcttgaatctgactggactcttcgcacagaccctaccccagcttgggtagggaacttcatggtgagatgatagatagaggtcacaatcttcatcttttttaaaatagggcggccaattactgcattgtatgctgagtactgatcaataactgcgaaattagccattgatttggcagtgacaggtgtggttcctagggtgattggcagtttaattattccttttaatgcaattgtgtctctagtgacccataaatgctcgagactacatgtcgcaaatctttttcctgtaaccccatctgcttgaaggctttgaaattgagaatatttactaaacttccattgtccactaatatgtggtggacattatctcctcaatgttagcaacgataacaagtgcatctacgtgtgggtggtgaacccacctggcgtcactttccatgaaagttatgtcgtcccattctttcttaaagagtttttctagtcgctcactcaagttgttcacattagtgagtggtttctcctttgcttccctgacatatcattattgcgatttcttggagtcccctgcaatgtggggtcctccaatgattgtcaaaatattgcaaggagtcctcgaaccactcgcattgtttgtttcttcattgtcatccgcttgggga

SEQ ID NO: 244701 - DNA, 1178 bp, Cannabis indica
agtaggtccatatatataggctagccatatatatatatatagagaataagataagctacagttataggttattctgttcatttaatctcactctcaatgacgtactcaattaataactgagatgataataaccgttggatgagttttgatatataaaagatccaacggcgcgtggtgaaaacagtatgtgtttgttgttttttttctttaattgcatatatggaaaataagtaaattagttttttatcttcaaaataaaaaaaaaacgtaaatagtttttaactgaggcaaaggacaaacaccagcttgtcaggttttgtggaggtcaatcaatcaatcaaaaaacaacccattcccattttgaagaccaatcaacacaaacacctttctcttttttgttttctctcaatttgatttgatatcatttacatatgtttttacattaactttgaataaatttttgggaaattttttgaagttgaataagttttagtttttagttaaacaaaacacattttaaaaagttaagattagaagtataattatgttgattaaagctttaaaaaatgaatttcaatttttcatactttgatttttcttggcaagtagtaaattagagttgatgagtttgagttaacactttttctaattaataatttgactttcctttttgggggattactatgacgggtacgttttacttggcccacaaagtcaaactaaactcatttaaatttgaataaacaaattacttaaagccactaaatatattatttatatactatcattaattagtggttaagactaattttttaaagagaaatgttaaaggacaccagtggtgcctagcactcttctatgtgtcagtatcgctattggtccaattaagtatcgactcccatataatttaatatagtagtttttagagagtatcgctaactaatcgtaatgtgacatgtcgagaaggtgctaggcaccactggtgccttatagcaatgctcttttttaaaagagaaaaagaagaataagcaatgctctaattaataaaataatgtactttagatttagaatatttgaattacaattttgggtttaggcatgtattaattagtggggtatattattgttggaactttgtatgaaatatgtaaaaatagaaaagtgaagtgtgtgagtag

SEQ ID NO: 244702 - DNA, 545 bp, Cannabis indica
ctaattaaactctgcatatatatattaacaataacatatatgataatgatacttgtatcaaagtaataatccaatttgagtcttttatttggccaaaagaaagaaagaaagaaagagttggaggattcccttctttttaaccaaaaacagaaagaaaagaataacatgagtggtttagttgatataaataatgtttatatgttcatttaacacaagagaaaagttgagatgaagaaagtgagttacgacctcccctaccactcccctaccacgatgtgtgccacggccacgactgttggaattggtgggaggaggtgtaggacctttcttgtttgctgctgcataatgagcagaaggattttgcagatccaaagcagcaacagaagattgttgttcaatccgcatttctcgagtttgcagcaagaattggacttcttgcattgtaacagattctttggaggtaagagtgacgattgcagaatcgtactcattgcctagccctccaagaatgtagagaatcagctcatcgtctgtgaggtgatgac

SEQ ID NO: 244703 - DNA, 797 bp, Cannabis indica
ataattatttgaacgatttgttttataaaaatatactgtttcaatatatttgataagtaaaatataattgtatctataaacttatgatatgtacattgaatctcaatatatacatatttatatagtagttattcttaatgtgaaaaaaataatttatgataaatcataacaaagcatagtgaaactttatcttaatcttccatcaatttaacaatttcaataagaattgattgtactttggactcatcgtcttttttggacaagtttataccttgattctaactaaacaatgaagattaaaaaaaatggaataaaaaggctgaaataaataaatcaatgaaatcataacaaagtatatagaacaaatactttggatgttcatataaaattattcagacccacaaaggcaaaagaatagataataaaatgaatatgtaagaaactaaatctgataaaaataaataaatacctgtttgttggaactgtaatatgattttttttcaataaacatacgtgcttatgtgcaattagagtatataaatattaattatgagaccgatttaggttgaatatataagaggaaatgtcataaatcagtctcataattaacattgaattcctatgttgtcataaatctttattttaattgtttattacaagagttttagattcttattgaacaattgatttatgaaaaaaaaaattctgaaattgaaaaataagtatgtaaaggttactcttatcaatatatatataggaaagcacaaacggagtttaggtggcaacctattattttt

SEQ ID NO: 244704 - DNA, 1161 bp, Cannabis indica
gaaaaacagaaagataattctgccgtccaaatttgagtcaaaagcaaggaatcgaaatcaaactacgagcgcactactgtaggtcaccatccaagaggtgggtttcattttcgctcgtgtgacacatgtatactcataatgttaatgactaatagtgatgatcatagactcatcaatcatataatgtgtagttctttctgtttgagtttatttatatatcaaatttagatgtaattaagattgaatgaaacgcaaatagctaactcacgtcattgtaagtgacataacctaatctattctttctcatacaaacaaacactcaacacgtgacatctttttcaacaatataatatcgtccaattccaacgataagatgttattgaaacttcaaactgttgcacaatcatcctgcacaacaaaggaacattttgaatttcagaattaaaagtgtagcaaaaaaaaaaaaaaaggaaatagaaagatagcaagaaaagattgtctcaatcgaagataagaaaaagcggtggtttggtaggtaacattgcaaatagtttttaggtgacgatgataacaatgttgaatcttcactccatattcatagttccccaccaaatacaatatattattttaaggaattagacacatttttcacacagcaaaaccatataagcatgtcaaaaagatccatttagttagagcgggttggagtttcgatttgacggatcatcttctgattcgaaacattcggatacttattggatcttgaatcagatccgctctgtcccgcttaatttttttatggattggatctaagtcgacccaatttcaaattatttttaaaaaaaatttaattcaagattcggactccagacacgaataccttgggacctggaccggactgagaccttgacttgggacccagacccgggatccaaacccgaactcggacccagacttggacctggactgggtcctgaacctggtccggacaccgatcccagacttggacccaggacccgggaccggacccggacccagagtcaagaccctgactcggacccaaactcggacccagacccaaccttggacccggacccgacccgttgttggtgttagggtagagtttattaaaagtatattatctttacacaatctattaat

SEQ ID NO: 244705 - DNA, 1055 bp, Cannabis indica
tctatgcccaatcatttttccataatgagctacataggagttgtgggccatggcccataatagcccaaccaataagattcgatctttcacaccatcaccacactgttttttcatctttatagtaaagtctagtaatagataaccaacaactgagcatcacgtttggtttgtttttgcactttgcagtgaatacgtcactgtctactttgttatgtgaaaaagagaaactcaaaatttgttttcatttatgaaagaaagccatatgcatctactggaattttcacaaagagatcgaatatcaaaactagctatatcatatgagaagattttaataattaattaccaggagcttgaattggtctgtgattttcgatctcacacatctcgaccctgaaaatccttctatgcaagaaaaacaatacaatccaggagcacagtctccatcacttgagcattcatctagtaactacacaaaaaaactatgtatatatttatattttgtttcattttttgttttcaattataaagatttcaattttgttgcaatgggattaaataaataaatcttacccggcactgcccatcggaacatgaagctgaagcaacagtgaatatgaaaaacagagtaactatgaccataacaaagcttggctgaaaacccatttgaagagaagtgaagggttcaaatgggttttggagtttggaattggcaagtttattattttgattttcagggaaaatccaagtttgggttttgatttttgtctgagaaaacaaagaggaaactctctatatgggaagggaatagcagaaaggaatgtgaattaataggataattgggatgttactatccaaaaaacaggagaggaaataattacaaggataaatattaaattggctcgtcgaattataattaattttaaacgacgacgtttgggaaaactagaagccaaacgacgaagtttcagatgaatagttggtaagtgtaggattgactctatgctcagatatggttatgtacttatattttggtcatacaaacacgtagctggata

SEQ ID NO: 244706 - DNA, 780 bp, Cannabis indica
ttcacatgcataaggccaaggccttgtaagaatcgtacagctagagaagaaccggacagagttcctacagaagccacgtatcgatctaaggctaaggcagagttcctggcaggtcctaagccaaaaggcagagttcctggcaggttccaagccaaaaggcagagttcctggcaggttccaagccatagacaaaactgtggacaaccgtacccaagggtttttgctagaccatgtcattgtacaaggctaggtatcaatgaagtacaagtcttaagtgtaacaacttggacaaattttgagtcttaagttgaacttttgactataatatactcaccatttagtttcatacagagtttctaagggaaccatgtatgagactaaggttttatatgcttacagggccatgacaagattcttgtcgaagtcaaaagaggacagatatttggctgcccacttggaactaaggcccaagccgaccagggttcccaagccttgaaagggtcatccaaggtcacatgactcagccaagaactgaccaggatcactaaacccagggataaattggctagctttatagggtgaaaccctagagttggccaactccaatgattaagtcctaggactggccaagtctcaagcaagacctctaaggccagccaagattagttgtgaatgcaaatgtgtgttatttttcaaaactcgaatatgtgccttgtaacaccctagctattataggcatgttagcatgattttaaacgtattgtgcagctcgttgttaat

SEQ ID NO: 244707 - DNA, 2544 bp, Cannabis indica
tttttaaaacataatatatgtctagtgaattgttgaatgtgtattagaattgtaaataaaatttggttaactatatagaaaaatagctaaagtgttactttgcaatcataacacaagtgactcttacaagattatattcaatgactacaagaaattcaaattaaaagtaactaaaaagttggaaattagaatattgttgacaataccaccatgaggtggagtataaaaattggttaataatttttagtcataattattaaattaaaatatatgagatctaatattaaatatattaataagggtatgctatctcaagtggtattagatagtattgttatttgcgtttccgaatttagcatgttaaattcaggtttacattaaaggcccattaataggccactgagcgaagataaagtgggcaaagtccatttagacaggtccttccaagaatgtatcccaactccatgaccatagagccttccgctattgaaaaaccgtttctggaagcaagtccagtaccataagaccagaagggtgagacaacattttccctgaagatcgattcagtttcccttttttattcctacaacaaataagaaaataattgattaccaaatttcgacagagcatcgtatcaagctaaatagaaaaacttcctaaaacgaatatcaagtaattaattcaagtaaattttccacaatcaaagcacacgatgttgactaaatcatcgatctgcctagtcagcgaatcctctccttcgtgggctggacttaacgaagcagcccaagtatgttattcactgtaaactctccaatagaggaaaaatagaaacaaatataattctcaaactactataaatacccatcgaatcctatggattaagggttaaactctcttacaacactttctcaggcaaacttgagaacatatattctttgtattcctataggctttttaagctaaagaactactaaataacactaactcgtggactaaggctaattaacgctccaaccacgtaaaaactgtttgtctcttttaattatttgtttcttcagttgttatcatttataatcagttttcaaaaatctctgtaaatattttggtgctttcattgagagttgaaggaagcaatgagaccatttatagattacattcaagcaatcatggccctcacccaaacaaagttcagtcttcgttttactggtcctagctccaaagtaggggactccaatgatccatatgaggcgactagttgttagaaaggtcgtcaagacaaaaattgaaatcgagacgattgcataatcaaagatgcaaaatctggagaaagtatttctgatgatgctgaagaaaacactcaggacacacccgaggatatgcatgaaggcgaccctcaagataaggccactgatgataaaccttggagagaagaaccagcttgacgagtcaaaccccatggtcatcatggataaataacttcaactagcagaaagcaggttaactcgacaagatcaatttaatgaggtactgctcacaaagataaccataatggaggttgtatagccatgactaagatagttcctgacgttcaagcttctctaacaattgatgcccctgagaaagcagatccaatcctagaacttcaagtgttggcaaagacaaaggcaaatggatagttgttaaagagccaaaggaaactgcttccattaagaaacataaaaagtctaaacctgccgaccaatctcaaaagaagaggaaaggaaactacatttgaaagggcacggtgaccagaccaacatctgaggaagagtaacgtagaaaaataagactgatgccgtagtctgaaagccaaagttttggaagaataagtatcctcttagtgattccagttatcacgatgaggatgttgacgaggtacatccagtatcagatgacaacgacagaaacctctccacgaatgatcttcgaagaagactaaatgctaagaacgaaagagcaaaagtagaaaaatctaaaccccgcgggaacgatttgagaaaccacatcaacgatcgtgttcgcaaaagagaatcttcaagtgataagactcaatgcctagaatgtaaggttgaggagttgatgaaatcacgaaaaagatttctagaaaataaagtggtgttgtgtcaaactctgaaagggaagatttagagccttatgtgaaaagaatcattgatgaatcattgtcagaaagtttcagtatgccacagatagagttgtatgaagaaaagatggatcccagagaccacttgtccaaatacaaccgcatcatgctagtcgccaaggcccgtgaagatgcaaaatgtttatgtttttcgttaacaataagcaagtccacagatgactggtagaagagattgtctctgagatcgatccacaactggagagacctacaagaggtattcagaaagcagtttatagtagccaaggactatgacttggaagccagttccttcaccagtgttaagcaacaaccaagagaaagcctgaagaagtttattcaacgca

SEQ ID NO: 244708 - DNA, 1992 bp, Cannabis indica
attaattttttaaaaaaaaataaaaaaaataatatattacgggtacgggttggacccgcccgtttttaggcaaacccgtacccgcccgccaaacagcgggttaaaactcaacccaatccaatttttgcgggtttttaatgggcggattctaatgggttaggcggttcccacggtttagcggtttttatgttcaggcctacttggctctgtgtggcagtaaggtggtgcttgtggaggcctaagtgcatagttctgttgaggcatttgttaaaaattaaaaccaagtggtctaattggtgcaacttattgttggtttctataaaaaaaatatattgtatgatgatctactatccctcattatatgtgttcgaacagggtcataatgctgccttggttcacttagaaaacctccaatagcattaattattttgttggtacttcatacaaaatagaacaagtatcagatgccccgtaagtatggaataattacagcaataatgtttctctgagatgatgcggtagactttttatatatagtcataaaatatttatagtgtgttgtttgtaatacaaaaactcaaatcaatatgaatataagtgacaccattgtttaattaagcttattaattaattaaacagtaaacataatactagctggaggtacgtacatacagatcttatataatattttatatgatgatcatttcatcatcattttttcagttgaatctactacaagttctcctaatctctccttgaaaaccagtcttgacaccaatctggcccatcttcaccattgagtcagcaaaatcagattgaaaaaatggtcgattaaagagaggattattaaagagaccaaggtaggagtccattacagttcttgtggtgacatcgtctctaagcctagcatcagactccaacacagcaaatccattcatgatgttctgcatgatgtggatgtcaaatgtttgttcgctcccttggtcgatcggcagtcgtgcattcacatcaccgttcagggggcatctcgccctcaacaccggaaggaaactaggatttatggcagggtcggatcctcctcctctgggaaaaaagttgtacaaccttttggtcatgaagaagcatgctgtagttccaatagtatgcgcagctatatacgtgtatgtacacaacacgaatagtattaattattagtatgagtaatacacacataaattatatataaactagacacatttatgaagcaaaacacttcaaagtgcatttaacatgagttcccacttattaaaaattagatgtaatttctctttacatattattattcaattgtatgaaatataattttcatgtgatattgaaccaatttataaataaacctttattgtattatacttttatgataacttttactacaagtaggttctcaaatttttttaggataaaattttgtgttttattgttaatagctataccactattaaatgtattgtgagtagcaaaactgagataataaagcatatgcaaacattttacacattgcatttaaacatgattacacatagatattcaacaacttataatatatagtcacacattatacacattaacactaaaagtgcggaaacaaatttagatatagttgagatggaatgtcggttaatgtatgaaatacaatctccgccccattcctgctatctatttatactcccatttccgccccatccccatctaataacctacgaatttggggtaggagaatacccatcagttatgggaaacccatcgggtatccattaaagcaaaatggaaaaaaaaaattaatgattgaaaaaaaaaaaattaaaccaatattctcacaaatgtttattatgcattcataatccaagataaaagataaatctacctaaaaaagcataacctagtagaaaataaaaactaaatatgtctcaaaatttgagaaaaagaaacaaaaaaaatcataaaagtatagta

SEQ ID NO: 244709 - DNA, 576 bp, Cannabis indica
catctcttctatcatcctctcgtttaagcctatcaccatacatcacccttctatctcccaaaaggtcctccaccatcactgttactttagcacaaatcttctgatcatgaccccagaagtcacacttaaaacaaagtaatatcaaaaagtcgaacttgaacaggacccaatgtttaccaccctccactggaagataatgtccaacgaaggcacttttgtttgttgggaagttaattctagctctcacttacattttcattaggaccaattgagtattattccacttaacctctaccacttcgcctaccagttcacccaaaagcgttacattattgatcgttagagccttcatatgaaccttagtcatcctaatcgaacatcactgaatccaatttagcatcagtctataaccccgatttaggtcattcctcccccgaaagtaattccccattgaaagaccatgataatcgatccatcactttctttttgtaccagtcatcatcaatgtagaaaccaacacatgtgcatgcctcttcctgtgccaaactaatagcatcccaccgaatctttctctcc

SEQ ID NO: 244710 - DNA, 853 bp, Cannabis indica
ttaattgaaacatacttcttttatatgtattgtacccaaaatatcctgacataaatgagttatatggacagtatattgaggtgacaggggtaaaatttgtaaagtatttaaaaaaagagataaaaatagtagactttaaaaaagaaggtaaaaataaaagaggacaatataaaaaaaagtatagagtgtaatttcctctaagttttgctcatatatcaataagaaatgggccaacagattaagctcataaatttattgggcccaaaaacattatctcaacaaaaagtacaaactcatataaagagcccattatgccattttagttgatttttatgggctataagttataagagaccatggctggtcaaagatccaatattccgaaccagctcctatgtttaaactcaagtcattagtcaatagtagtgttgaaaatacatagagaggtgcctcgtatcaaaaatctacttgatgttgtgatagttaggtagtatattttattgataattatggcagttaaaaatgaaaatatatgtttgacactttgtgttgaaagtcttcttgacaatgttaaaagtcaggagatgttttcggtttggtaatagcggcggtgcaagatgactttgtttaaaaggagacaatgtagtccttggtttgagaggaggattattgggatatcaacctatatcccacattgaaaaaaatagtcaagagttactttaaatataagtgttttacttactctattagtatgagatacgttattatgttagatcaaattttatagtacgcacatcttttgtttttatcaaaagaaaatttatattactcaaaataattatctcaattttta

SEQ ID NO: 244711 - DNA, 734 bp, Cannabis indica
tcattatcaaaccatggcatcccatacttgaaaataaatcattgcttgactttacaaactattctccgacctggcatgtcaatggagtaggtatattgtgtgtgttgtgtagtgtatattctcaatttttttaatacttattattatgattgtactaattttcaacaaacacttaataattatatacatgtaagtgtaaggataaaaaaccatatttatattcttcaacttcaaccattctcaacttattaatttggttaaatggttaaaagtggaaggtgcaactctgacaaatgacaactagaatttggaaaaatggctttgttttcaaccattaaatgtgtatttaaataaagggctttaattggatttatggtccaaaatattcactcctagtcctccatgaggttatcctaataatttgtagggcatttgttctcctctttattaatattgtatttttatttcaatggtgttgccaccatccatcacacccttacccaagaaaataataaaatgaaaaggtaattttctaaacatgctgaactttatggtgtttttgcaatatattttttaaatcaatatttacagaaagaaaagcattaaatcattcacaaataaaccattatccataagggcgctcctactctcaatagaaagaaaatacctcattttttttcgataaagaaaaatacctcaatttataccttcaacaatagagaatagaacatgca

SEQ ID NO: 244712 - DNA, 1402 bp, Cannabis indica
gataatgcatcacacatatatactatatataattataaagattttatcactatctttctttacataaatctttaccacattctggattcatccaaatgagattgtttttctagacccattacataaattgcaaagaaaaaaaaaataaagaagattatgtaattgttaattatacatacaaatgggtttgctttttaagaaaaaaaaattattatatatataatataagagaaggtaagaaaaaattgacagcactgcaaactataatgtcttattaaaatattatcaattattatgattcattttcatcaagttaattaaaggctcattttttataatatttttgattaaatgaaggagtagcaaataaatataaataccctaaacttagtttgcctattccgaaattcaacattttatttttctaattttacattattaattgaataattagtatttttgttctttgaataataacattttaccctttaaactttttgattgaataattagtatagggtttttgttaataatactcatcgaaatataacttttataattattaaagtaaaaaatggtaaaagatatttaatttgcaccaatttattatcaactacaacttgctgcatctcgcgtttcacgataagattaaatataacatgatagaagaaccatattaatttaaaagttacatttcaaaaaatattattaacaggtcttatattataggaggcacaatttgttagtgtataagtttagaaaaaaaatactaattattctttataatttgatacacactactaatgcataaaattatacatatatatataaatcaaatattaaattacatcattttcatgttaaagtgaattacacaattctagtacaaataatatgaggtaaattttaatcataattgttcataatacataaaacaatatacacatacatattatgtatactatcaacacctattagggtttatttgggagaaaaaaaccaaaaaagtccttaacaaaatagtattatttgtgactcattcataaagaaaaacaaaagtttaatgaagagtgtaaagtatagttggaataatattaatctgattagaggggggcagtaatagtagaagtagtgagattccaagtctgaagaaagttggtgatgaagacaaataagctataaacatataatatataatagaattatatatattaatagagagattcttatctctttaaccaagccatttcatgccaacaaaaggcggtgcttccactcagttttgtctcttttacaacaatattaacatatgtattcattttgctcttttacactataaaagaataatatgtattttttttgctaaaagaggtactctcgaataatttaatttacacaaaat

SEQ ID NO: 244713 - DNA, 2510 bp, Cannabis indica
ttatatacatatatatatacatattattattatgttatatatattaacttatcacacacactcatgtgtatcgattattagctaatttatatttttcaagtatgtactatatacattaattttaatttattctgtactttttatcaagttaataaactatggtagttatgggtttttttttctcccttatctttgagaaacatctacacattgattaagttatcgatatacatataatgtatataagccatgacaagatcaaaggataacataatttacgtaaagaaaaaaaaaaaaagtgatcatgaccagaacaccttttaggaaaaaaaaaaaagtacacatatatatatagacttttaaatcttatatatatgagaaataatatattacaaaagatgtcatttttagagccactttactaaaaagtcagccatttgaaagtcaagcgatttatttgtgttttcttttttttttttaatattaatattattatttacttataatttaggtggtataattatctctagtatacgtgttaaatatatatctagctacatgtaacactaatatatgcatgcatgaaaaacacgttggatttatattaattcaagactatcgtaatcatattaactgtataattataatatatatatatatatattctttattcaaatatatatagagttttgttgatcatcagagagttaaattatgagatttatgtacatatacgtaagcacttatgattaagatcaactatctatatataattgtgatttactggtcagatttccatggggggatagtgaagtagtcccaatcagaactgttattatactcgaaattcttaattatcatcatttacacatttataattaaataaacacaaataataaaaatataaatgctattaatatgtataggaacgtgtgtataccatcaaaagctttccatctaggccaactaattattatatatatataaaaaaatattagtgatgaaatttttttaatatttataattattatacatatgattctaattaaaaaaaattaattatatatatgtataatatatgtccaacgtgtttaatcagtatatcatcaggttcatcacattttatgattatctagacactaatatatatatatatatatatataaatatatatataatataaatataaacacaatataattacaaagggaataattaaagtttttattttttctactataattttttgagaaagttgattattatacatttctgatcatatatagctgtgttatattatatgaacgaagactaaaataatatataaatatattaaataagcaactaatttaagagatatggatgaataaaacttggaatgaaacgaagcaatgagtcttaaacggatgagtactgtatttttttatttttttcttggttgctattatatgttgatgagtgttaaatattacaactttctattatataattttttagtcaattatttattttcaaaatttgtttcatagccgtattgattatatatagtgaacatattatttatgtaaatttttaaaaaatttcaaatagtttaaagtgaaaatagtgttaaaaaactttgaacttattttcagtaatataaattattcaaaaaaaaaattaaagaaataataataaaaatatttttttatgtattttcaagcacgaatattaactaacagatttttaataagagagattgataatagcacacctcctatatatcatatgtattatatatattatataatatattttttttagtaccttgtgacttttgtaaaattttgtcttcaaatttttttttacaaaaatttacgttcaaattgttgcaaattttcaccttcaattacacatcttttttgaaaacttcgcttatgtggcaataagttaaaggtagacaggtagtgttgtaagttcgtgtgtgttttgtactttttaaaaaacgggtcgtgccatgccgtgtcatgctatacttttaaatgtgggtagtattttcgtgccgtgctttgctcgtgtcagctacatatttcttaaacaagccaacctattttcatattcgggcttaaattcaatactttaactttttttttcctacaattactaaattatatgtatattttataactttagttatatttatataatttttgaataatattttaccaaataatcatataaaaaattataatttaaatatttacttataaatactcaattttttatatcatactctataaataaattaatatataatattaggtttttttttttatgttttaataattttattttatagaattataagatttagtattatatttaaattttattattatttcaactaatttataattgataagttataaggttttttaatatgccgtgacgtgtttttcgaacttattgtgtgttgtgctttttggactagtttattcgtgcttacatgtcgtgtctttcattcttctcgt

SEQ ID NO: 244714 - DNA, 1763 bp, Cannabis indica
ataattagcaaacttttttacttttaatcataaattttgttgtgactaaaagtaagattttttgtaacaggacgattctcctcttcttcttttcttttttttttttagaaacaaaagatatgttctttacagtaaccatcccattagtctttttaacacaaaaactaaatataacattgacaaactcattacaaataacaataatttgtttcaaattaatttcttaatcagttgtaatgactgcatacttagaatatgaaattgatagaaaaattagtatgataattgtgttatatgattatatatgtattgttatccgtgtttttagcaaaagacacgtggattccaaatagaagcttaaggcttatcaatgggctcaaataacataaattggcccgagtccgggatcaattttgcttttcgagagaacaacaacataactcacctaagctaggttccgtcaagcctagtcagcatccaaaaggtctatctccgtgtatttggaagaggtccttggcgtgtattcggaagcccaatattagtttctcatttttgccaaatcgcacaagattaggaattactttcctagaatctcggtgagaggatgatatctcactaaaaaagggaactaaataattggctatcaagtaattaatatgtcattaattacccataaatatagtacacggtatgagcaactaacttcgtgataaggcctccacatcagcatacagtacacaagatgcctcgtgggttgggcttacttaataagcccaaagtcattgtattattttgtaaaatcttatgagctctataacactataaatactcactgaatcattcatgcaaatgattaaaaattcttgactcacttgctcgaaaaaagaatagagtgttcatactcattgtattcccttaggtttttctaggcaatctcataataatattgactcgtgtctaagactcattaatgtccaaaatatcatgtaaaatatatgagtgtcttcttcatatatgtctctttgaattatattttctttagttcttacatttaataattagttttttgaaaaactcgataaacatgtataatatgtaatgtgggccttattttttaaaaataggcatttgagttataattcttcgattacagagattttatttaattttaggtaggggtgtgcataaaaatacatccaatctaattgcaaccgaccatcccatcacaaccaaccgtcaaatattggatattcaattgtgatcgaatcatattagatgttatttttgaatatccaattagatcggatcagatgttggatgaggtgtccaaaaaatctaatacatgcatccaacacttaatcaaattaattagtattttgatttaatttagatgaataattaaattatatgttgtcatacttaaaatatatatgtatatatgaaaattaaaatataaaaaatttacccttttattagatttgatggattcaatccaaaaaatatatacaagaaatgcatctaatagataaaactgatccaatctaaaatccatgttggatcgattaaatggctgaaattaattggaccggatgagataataaaatctaacatccaatatataattggatcagatatggataggtctaaaaacattaactgtggtatgataaacactcctaattttaggtgtattataaatgataaacatgaatttgattttttttttatgatttatgcttagtaacggtaggatgatgatcaag

SEQ ID NO: 244715 - DNA, 1042 bp, Cannabis indica
atttaacattaattatggaagaaaagttagaatttagtttgatagtgttttgagtttgatatgttgagtctcaattgtaataagcgaatgttagtggaatgaaaattaattttctatattatttaattttttttaaattatgcggagtttttacttttgtttataatctaatttatttttaaatgtatggtatcattaaaaactaagcacacttagattttgtattgtggatatatgtacagcaatattattttttacctcataccactccattaacaactttcctatggttcttcttgaaaatagtgtaaggggatatatgtagtattatttttggaatgatatatcatatgtagctaatctcttcctaatatggagagatttagatttggaaacatgtatattttcattagcagagaattgaaattagttttgtttttactgttacaacaatatggatttagttcccccatttgttgttgttgttgttttctttcaaatgttcttgtattctttgatttcttttgaattgtctttgaattaatcatcagtggtaaggtttaaaggggttgatgtattgttgatattgtgtttgtttgatctaaaatctagaagaaattctcattgttctctttattttgttttgtgtttgatattgattttgaagaatgcttttgcttatatgtgaatccattacaccctctgtttttatggtgctcaatattttacaatcgatttactttgggttatttcagatttatttttgaactattcaaatgttttgttcatgagtagtgagttttactctcactcatatgagtatattagattgacttatctttggtttacaaagaagaataaggtatggcttgtatttgatttgagcaaaaatatgtctgtatgtttttgatttatacaattgagattgccaaccatgttagaatatgggttgattcttaaagatttgaaaaactaattacaaattcaaatgtggtagacatatataaagtttgggattgagatgagatgtgattaatttttg

SEQ ID NO: 244716 - DNA, 1611 bp, Cannabis indica
cgggagatcaaacctaatcgttaaatttaacagaatattcttttattttttaagtatattcggttaaaccaagaaatgccgttagataggcacttttaatatataaagatatgtggtattgttaggtcatttcggtattatactaacattttagagtatctccaactttaaacactaaatttggagcatatatactgtgcactataacatacacaacaaaataaagcaaaattttataataccttgaaacaagttggacactaaattttttgttttgctctctccttgtagatgctcttaaaattttagccctataattagagtaataacttatgcacctaaaatatagacctatgcactaaattttgtgatatgtgattgctttttttaaatggtggatctcgtctcaattagatgttactggaaaaatattgtcatgttattgagtgcaatactttgtgcatatttgatatgtacataaataataatttattgtaactacagtgtttcagctatattggaattgctcttaactcacatgttactagtggtgttaatattctcattagttgtgaaagaagcttaacgctctttctcttcttctatggattggattagaaatttatatgtaaataaaatttcaaattattgacatttaacataaacaaggttgatcttgagattggtaggtcttataaaaaatatatattgttgggcctatgtaaataatgtggtattttcaaaaattactgaacattatttatatttgttaaaaatattttctctttcaaatcttgagatttagtttgtctttacttaggattagtcatacatgaacataatttgtaatgagaaatgttaagggagaccataaggtacaagcaccacaagacgtggcgtgacatatcgctattgatgcattttaatatcgggtctcatacattttagtttaataaatgatatggaaaatcactagccaattataaagtagtactttagtgttttacccaagattagccatacataaatattgctccaaatgagaaatgttaaggggcatcttaaagtgtcaaatatcacaaaaaagaaatggcatatcactattggtgcattttaatattaagtcccacatatttaagtttaacaaatgataaaaaaaactctaaccagttataaaagggcacattaatatattgtttattgttattgttgttccattaatatttttttgtgttttacattttttttagtataactctatttagttataatctcttaattataatataatttacttggtcttaagtgtattcttagataaaagttctaatgtatttataaaataaaaaagtcacgcgtgtaataaactgtatgaaccatatttttagtgtattatatatatattttttaattttttaatattttgcatgatgtcttaaataattacagcgtacacgattataaaaaaagtgagtgaaaaactctaccatatgctgaaatcgataagagttaatgtcttaaataaccatatgcttacgtagagttaatggccacttgattgttcaataacttcttttttgtattttagaaaaaaattaaaaattactgtat

SEQ ID NO: 244717 - DNA, 900 bp, Cannabis indica
atattgttaaaaatcatgaacttttcataatgtattctatggtttatgttaaaatattattgaaaactcttttataatactttttatgtattattttaattcattggtatgtttaaatgagtattatttttattaatatctataatacattttgtcacttatactaaaagtattattaaataatctacaataatactattatggagtattattctattattttcataaacttaaaatattattattattttaattttcattattggatatactattatcatacacttttttgtataattttattctgaaaattagttatgatacatatggaaacatatttacacaaaaaagataaactttttattcaaactaatagatgtaccaaagtagtttatgaaaacataaaatatttgtgaatgacagtatgggccagtatagaaattgagacaacacatgtatctcacaaaactaactcatcaatctccaaaagacccaaacatccactatttgaagctttctcttcaatcagtaaagaaaaaaaaaaacaaaacttggcgtgataacttctcaagatcacagtaagatgggagtgtaaatgttccaattcagtaggtcctacaccaaattacacatttattactttacattagactacaaagaaacaatttaatcaattataacattctagattaaagttcaacataattcttaagttgttactagatttgaattcatctaaaatgaaatgagatgcaatggaatgttataattcttttatttttctcatgcctttttaacactttttctctctcttacaaaaataaaataaaattattaagagcactctttctatatttttttatcttttacatgattagtaaaaagtagtttttttttttt

SEQ ID NO: 244718 - DNA, 835 bp, Cannabis indica
tgcgtgagatactacttgattgcgtacacttgcgtaataaacataaaatttgtaacaatcgggttatttttatttttttagtttgagcatccctgactgacgagcactgacacgaaagtgacaaagatatgtagttttttgagagactactatatcgtacaagagatggacaataaccacctatctttccaacgagttgagtcatactgtcatcctttgttcaccctagcgtaaagatgaagggtccaggttattcttaaactgcaagtaagggatcagaatatctcgcagctttccttgagaagaaatttcctttggtacagaatgtacccatccaaagaggttgatgaaaaagctccagcagctaaggctgaccggagtgtgccagacaaggagggggtcattcagaatgtttcagaacaaatccaaacagaatgattgatcaggatcatagatgatgctgagagggttgcacgtcctatggtaccagtactgataggaaaaggaacgggtatcgcccgagtagagcttgaagcgaactttttggatgatgatgccctgacctttttagtttgaaagggtgctctttcggaggtttagggtcgaaatactttagcatttactttgcttttatttaacttgtacaagtatttactaagtgtcttcttctgtacaaccatgacgtccaaacttggtggaatgttcaagagaaaggaaggtggcttttccacttataacacatttaaaatttatgttaaaatagactatgttggaaatattgtaccaggattagatttactaacaagtatgtttcattaatatcctaatatgaatt

SEQ ID NO: 244719 - DNA, 752 bp, Cannabis indica
tttctcccaggcgaacaacaacaacaaaccctgtgagatgttttgttcttgcaaagcaaaacaagaacctttttttttatgagattgtgaattattaatggtgattgagacaggaaaaagatgtttgtttgtgtctgcatcttttgtagaagatggataatatcaaaatgtgagttttgggatatggaaatgatcaaaaaggggagtagtgtgatttttttgttgtatatgattatgatgagacaaagacattttgtagattattattgattgaagttttcttgtgatagtgttctttctttccccttattgatcataatcattgtgtgttatttgtgaatacaaatgagaaattggcaatgacaacaacctcttttaaaaccattagatgagattcaatcttaagaggaaagcataactagaataattattaagaaaatgatttgctttaatctaatctatttctgttgatagcatatttaagataataaagggaatttttgtaagggttgtttggtatgttgtataatgattgtattgtatttaatttggacatgatcttggactctagatttggacccccacttagaatcagactcgaacttggattcgaattcggccactagccctagatctcagagatgggatccaagtttagggctggggttgaggtatagggtagggttctaaacatagtattgtattaaataatactaatacaatttaatgtaatatataacacaagtattgtt

SEQ ID NO: 244720 - DNA, 1607 bp, Cannabis indica
aacaacacgaaaacaacaaaaaaatacataaaactaacatgacaataacatctaaataacaccataactcttagtatactcagtacactgaactggtagacacctaagaacacgtatacttggccacaaggctagacattcactactggagacttcctcctctttattaggacagttcgcaaaaagatcttaataaaaggtgtgagtatcacaacgacattgtgtaaaattacaaggaaaatcattagcccggagattgatgttctgtgaattattatgacaagtctccctaaaactacaaggaaaatcattagccataatcgggaagtccctccaggagaacaagctacaccatcccagctcgaagagtcaagtttatccgaagatagcccgaaccaaagtcactatttaaatgcaatatgtaggaaacatttgcatattatcttgaaaagacgtgttagaagtttaaatccatcattctctgattttacactatccaatatgctttgagacggttgcataatgaacagtcaaatcatcagcaaaagctaaaagtctatctcaccaaacacctagagcaagtctacgaattatacaaaatatgcagacatgccatattgtccaaatttaggaaatggtgcaagtaataatcatacaattacgacaatggtaaactttgcaccatctttatgaggctatacatacccctaacaacgttcagttagggggtcagaaaaaaatagcgagacactctatataaagaattactgcattaataataacgacttgtggactaaggcacattaatgctccaatcacgtaaaataatttcgtattaaatttctgataatcatcaaaacaactctaatgaatagtttccaaaaaccttgttcaacatatgtttgtaatctattagggggtttgactagaaattattattatttttttgctaagaagctgaattcactaagccaaacacacaaagtttgttgagtacatggggactcacctcccaaaaacgcaacaagccattacacgaatgggatagaccccaccttgcaagagcatgcacatccttattaaaaacacgcgaaatccaactaacaacacaatcaccattcaccaaagaaacacagtttagaaaaagaaaagtgtaaactcccaaacggagactttccaacaattaaagctttgacaagctgaacattatccgaaaagaaatcgactcctccaaactgcatttccaaggccaagccagcaccaaacctcagtgcctccagttcaccgtgaaaaacactctaaacctcaaccttcttcgcaccacaggtcattaccgatctcgagttatcaaaaaacacaagcgccacaacccctacaccgacagccatagcaaaatccacaaagcccctaactctaccaggtttaggaaggccccatcgcacctcagccacacctcgacgaccttcattaaccacttgctcttgggccaacagccgattatgctcaagaaaatactcctccactctcttatgcaccaagtccatatccatgggcaccccacgatgaaaaatctcattacggcatagccacaatttatggtacaagat

SEQ ID NO: 244721 - DNA, 2443 bp, Cannabis indica
ctagaatttcttgtcaaaagcgttgaaattgtgcttgtggagatccttcaagatgtcactcatctgaaaaggaaagaattaacctagtagttagcccccacattaaaccctaaataaaaaagggaatcgaggtcccctaatcgctgagaagaggccccctccgaatgcaagcgaacccaaaaatgaaaatttcatgtgctatgcatcgggtgactacaccatgaagaaaaatggtgcaaaggacagaaaaggaaaaagggaaaaatgccactagccctaacgcaagaatatcttgccttaagaggaaaaataaaggataaactgaaaaaatggcgcataatcaccaatgtattacccttaacacatttgtataagtaaattttaaattaaagttgtagagataaactagagagaaattagtaatgctagtaacttaccaatagcagaagtatgaacgagagcggtcactagtacgaaacatcggtagaatcgagcttaacaacggtagaggaaaagcaaaaggaaatgtgggctccttggaatttcggttagattgaaggttttgagaaacatgaaaagtaaaagccttaaagaagaaaaacaaggggttttcatacatcaaccaaggtgacacggattttcgatcatctaacgatcataatttaagagattaaaagtctcatgatcaaacagatggggtggtagctggcatatggacaagcatgaaaggacggttacactacttaagtatccttctgacatcctgcaattaatgacattagaaatgattaaaaaatcaaattactttatcaaaaaattagggaaagtaccgagtagtatttgaaatgatcactcgaagcgtgacgtcagcactctaagaggcacatcgtaagtcccatcttacaaaattgtaaaaaaaggacatgggggtaaatgtttcctaggatttctcccaaaatacgtggcagttcaggaagaatctaggtggaaatgggacccgcgttacaagacatgtcaccttaattattcccaaagtctattatttcaaaagaataataacagattagtcatctctgggaggatccaactggaccacgagcatctctcgtttgctcctcttcacgagtgaagcatattcggaggatggtacaagagaactaataaaagatgacatgtccctcaaggattaagacactatacatgcatttaatgcggcatgggaaagagcatcagacaccttactcttacaagcgtgtttaagggtttaagcctattattccctaatttcacaaactcccgtacatcaatttgactactgcatattgagccatcaagtcataaataagagataagtcaaatcctaataacacctacagacaaactaaaatccatcataaaataggaaattatgccctacatcagggttggaaaagtgtgccaagtatggtgtgaacaaacacgacaatagtagcttttttatcaccatcataagtctataaataccccaatgataaacagaatgggcatctgtcagaaaattctttgtaataacactctcattaatacaacgactcgtcgactaaggctcattaatgcccgaactatgtaaaaattatttcttctaacgttcattaattacttcatactgctctaattactggttgccaaaaatttcagtcaacagtaacaacaaaataatattaactgttaataaatatttaacaacaacataaaaacatatgaaaatagttgtatataaaatttagagaatccacaaattttaaccactaaagttcaacatacaaacaacatgaaaacatgtttaaaaaagcaacgaaatcaaacaacgtgtttacaactttaaaacaactgtaaagcaacaaacaatgttactaaaaaatattagtttttgattccatgtaaaacacgaggcttccgtcatacttgatttccaatagtgagtagagtttttttaactagatgtatagttgtacatgtgttgttgcatatttataatgtagttatatatatcatttgaattatgtagttattttattagtttactactattttgcaaaaaaaaaaaaaaatcgattaaatatgcaatacaaatgcaattacaaaacaacactaactaaatacgtaaatcaagtggacattaaaaaatattgtcgacaacttttaaaaaatatacataacatccaaacaacttaactgtataactactctacttttaatatgcaaattaaattataggcataaaaaaaaaagtatccataatcttaggaaataaaataaacttaaaagtaattataatacatttgctcactaattcaaaagtatatggacccttgaaaacaaaatatatacttatttttttcttagttgaacaataacaacaaataaaaaaattaaattacaactctactttaatatgaaaatt

SEQ ID NO: 244722 - DNA, 765 bp, Cannabis indica
attagtaactacaatatataaagtaaaaaaaattgaataaattaatatgtatgtataacggtcggttttagttttttcggtcggtttattacccaaaaaaactaatcgttcaatggcagttttaaccgttagcgattttttcaattttcgcttttgtaggtttcagttccaacaatgttcaataagtcagttttttcgattttttagattttatgctcagccctaagtcgattacaataaaacctaaagccaacaccacaaaagacaacagtgatacaccagtatctttatatctttatgttcagttatctttatttttttaccaattatataagggactagtatggtaaaaattgggtatttacttatgaataggtataataatttctaaccattaatttaatcaaatagttcaaattaaaatttaaaaactacagagcacctaattaatctttttttttatttctaattaattttattcctcacatttcatcattcatatatatacttcaaaggatgtttcatttagaactttagcaactttgaaatcctggagcaaaaagagagtattcttcgagttcttgagctttcttcttagatcgatcattgtgtgtactacatcttcaaggatctcttcttcaaacatcaacccaaaaaatgagtaaattttaacacccttccttttttgcttaaaattatttcatcattttgcatgtaggttctgcaaactgttggttgaatgttcttcgttcttggatcacaaat

SEQ ID NO: 244723 - DNA, 1098 bp, Cannabis indica
ttatgtggctcagccatggcaaagaatcccaccagctactctggtcttcgagcttgtaactccttccaaaaagcagtccttggaaagacacctgtaattaacatacacaccaacgaagacttgagggccttctccactttggtcacttttacgtaaaaacatttaaaataagcctgtaaagactcaccaacttcctgtttaatattagccagagttgtataaggtggtttgtacgtcatcgtggcttggaagtgcatcaagaattggtctacgaaagtctcccaaatcaatatggacgcttcaggtaactggctgaaccaatcatgagcgttatcctccaaggttgctgtaaggatgcgacacattgctaattgtggtacctgggttgttttgtgtcatcgttggtgcggcagccatatcagctatgctagctgggattactatctcggtagtcgcagctggtgcattggacgggttgacaacgttagttgggttgtttttgttgttcgtgccttgatcgcccacctaaggatcacatggctcgtcccgatttcagggcattttagattgtgtcctaaaaacttcattgaggtgatcaaaaagatcacccctatgaacatggtatctccctcctcgtcgtgtttccacagaaccaaatctagtataaagactaggagaacagctatgagaggaaggggaatgggattcaacatcatttaccttattttgcagttgagcttagctttgagggttacgtcgctcggtatcatcctcctgtggaacctcgcgataggcgttttgtgcgacttgttccctatgtgtaggttggttcaagttgagtccctcctattcattttttttgttccctgcgagtacgattattagttcgtcgcctgttatttgctacctgagggttatccacacgtgtgtttggtactcgaggaggacgctgagtcttcacccttccatcgacttcggcttgcaaagcttgtgtaatatccgctaactccgaaagggtatttttgtaattttatttagctgagagtattttcttatttttcatatttatggatttaaatatgtatgggattattttta

SEQ ID NO: 244724 - DNA, 715 bp, Cannabis indica
aggctcggagagagagggcagaccaccggaggaccaccgaggtgcggagagagaaggccactggaggagagggagagacaccggagaagcggcgagcagcggaggcgggaggcggagcgactgaaacagtgaaaatcgtataggggttcgatgtaggaaaattaaaatggaaattctattatgggattgaaatggggcttctactttgagaaaatagcaccatgttatttgtgtaatgtcattaagttgtgcttattttattttatttttaataaaaataatagtaattcattaagctgaaaaatctaccaaaagagtgacaactaatttagaaacaatgagtcatttttgtatttttaatatatagatagttttaatcttaattttttttatatataatagtatacattctaattattaaaagaatactgcaaagttttaaaaaattcaaaataatttacaatacataaaatagatttaaactgtcacacacgtgtaatataaagcacatgtgcagtaaattgttcacacattatttttggcacatcaaattattatagattgtcaaaagattagaaaatattttagatgattacaatgtacactctcgtataaaaaaattaaaattatttggatgtcaaaaacatgaaaaagatgcatcaaggtacattatattttctttgattaggtcatcaacgtacttaagtccgaccct

SEQ ID NO: 244725 - DNA, 769 bp, Cannabis indica
atatataaagacattcttttatacagaaataaaaaggaagaacgatccatagagcaactcatcacataaatctgtaagagtagaaagaaaaatgttcaagggaacatggctggtctagctatggtttaattggaactcaatgtgattctgataatgaccgtgaatggaaaaataaaaagagcacacaacaacataagtctttaccacatgaagtttatcaatttagtatgtttattccatacctgatcaattgcagccactacatctgcaataaatccaccaaagagtctgtaaagtgctttatacacagcaatcctgatcatggccaatcaagaaaaattaataaaggagtttctcataagataatggtggttctattggcactcacttttcactaggctttaatgttttaaataaatttaataaaattttaaatttgttttgttaccatttagaaattttcaaaaagaacaaaatctgctattaataatgaaatgacttcccaccagccatatacaatattatatattttcaactaaaataataacacattttctttttattttgtagaattttaatttcttaaaattgttaacctaatttcctggtcccaaatattgtagggttaggcagggatcctaatttaaaagaaaattgttaacctaattttatgggtcttatactaaatgtattggtgaggaaagaaaagtagaacctttagaaaaatattctctgtgaattgatcatcaataaataaaaattgttgctt

SEQ ID NO: 244726 - DNA, 1991 bp, Cannabis indica
ggtctaatcgacagattaaaaagacaaagaatttcgtgcgggttaggttcgtaacccagaatttcaaaatcttgaattaagggttaatcttcactaaaccccgaatgggcacagtgagaacctaacattgcaaatttaaagtcaaaatgccacaactattaggttatgtgatctattacagtcaaagttacaaagtttcaagcctagattttctacatttttcctaaaacaggtcaagaacagttgaattttctataatggaaacccagaaaattgaagattcaagcataaagggagaaaaagatgagaaacttactcactgtttgaagctttaaggttgttcggatgaagctgatcgatcctttctgctaattccacgaaggattcacgagaaaagagagttttttgctttgagattacttagcaagaaaaatggtaaaagtggtttatgaggattttctaccctatttataagcaaattagtggaagggtgtaatcaattagaatttcaaacgcctcgatttccccccaaaagtaaatattgagaaattaaaagaaattgagtacctagagaagggtaaccgtcaaaagcatgcgagttaatggcgcgtctcgaggtacgattcaatcaaagcattaattagccgaaaactgaagggactcctaatcagagtcacatcggatcatgaatagacacatccaacacgtgtcacccattcaaacgcgaggtcggcttagatgaagtctacgcgtgactttagaagtcccgtgcagacttggggggcaaatgttatcccatttttcacactatgatgtgacagcacatgttggtgacacgtggaccttatttcctacatctgactgaagggatgtttcgaacaaagctcagcattcacctgcatgtacaatgtcttcctgaccgagcagggtgggcgtaaacgattcgagcagtgtatcaacacttagcaattctaagacttgtatcatgaagcacaaaagcaatccctataagtctgggatcgtatcatagagacatggcaagctgtccaaatcccacaatctatgtattctaaatatgtagtatgtgttagacattgtaagcaaaagggaaactttccctcaagtatttggccctataaatagtgatccattctcactgatataggggtcgaaagaattacttgagagaaatctaagagagcatacttagagatttcattgtgagagcttcaagagaggaaacactgtattctttgttcttgagttaatacaatccaaggggagtaggctattacctaactaacagggccgaacctctttaaaatcctgtgttcttactgcttattagttcatacttgaattatattttctatcgcttactatttgactcattgtcattggctaaaagggaggtcaacagccccctaaacattgacaactaacaaatcgtaccccctcaaaataaaaatgagaaagatttaatattttttttattaaatcttaaaaaattaatttagatcttaagaaaaattattttgaataattaaaagaaaaattaaaaaataaactaaaattttaaaaataattacctgatataaaaattatttattttttaattgtaaaatttatttagatattaaaaaaatatattaaaaactaaatattatagaaataaacttgaatatatttgttttttatccaaaagtgtagatttatttatgtatacataacatttttctagtttaatttataatttttttcaaaataattttatatttttattgaattttttatttttttatttattaaggtatgagtttataaatataaataagtttgatttttttattcaaaaaatcttagtttatttaaattatttattaaattctcaataatttttgttaatttttttaagataggtgttgataaataatataaagttttgaaaatattttttttaagtaaaattaattatttttttttttgaattt

SEQ ID NO: 244727 - DNA, 584 bp, Cannabis indica
tggtagtagtagtagtagtgtttggatgcagagaaaatccccagaaaggatgatcggtaggtatggctattcttaccaaggattgaagctgttcaactctactaatagagattggacagcgtttggtacaatgtacgtagtattatacacttcttaattaataatatataaagacataaaattaaattttgtatatgtatatattctaattaaaattgttattaataatgtgataggtttaataaggataggaataaggagataaaggttcatccagtaattaaggcaccaatcccagcagcttctaattcccaaagttattcatttttcccttattggtaccaaatttctatatcactataatcatatatatatatataaactataattatataattattattattattaataaacattattaattattttgtttttgttggatgcagggggagatggtttttggggtctttggtaacatttcttcctttctcatacgagaaatgggtaaaactacgagccctagaaggtaaataaatataaataaatatatagtttgtgatgaagagtttatataaatatat

SEQ ID NO: 244728 - DNA, 681 bp, Cannabis indica
atcccttgacaaaagggaaaaagaatagaccaagccagcttaaagcaacatgattgcgcacaaggagttaccaggcccgtcagtataaacagattgaggaaagaaattcttcgtaggagaattactccctgaagaatattcccgtaacaagcatgttcggataaaactgaaatggtttgcaccatgttacaagataatagtaaaggttcatacaagtctggtgagtacgacaagaacttgaagttagaacttttacccaaacattgaaatagggaacatctcggtaagtactctcactagctaacttatcaattaagttcttttaatatttcatttgcaggaacccataaaaaggctagtgcccacaaccttcttggtgtggtctcccatcgttcttcaacagtggcctctccttcgctaagccaagcaggggtagccattgtgtgatttgaaaagtagacactaagttgtaagcgtttgttacacgttagaccgactgtgtctaaaccacttactcgcaagattaacttcttagagttactctttcagtgccacatgcgtactattgataacaccccaaggaagaacccaagcaaagtctgtgaaacttggtgaatagcaagtgaccaagagacttgcctgcatggtcacatgaggggtgcccataccgtacaacgcatc

SEQ ID NO: 244729 - DNA, 872 bp, Cannabis indica
aaaaaaatttagactaattaattcttatggataccgaaacaatcaagggttgcatcagtacatccattttgatagggtgtattgtagaagaacccaaaaatatttaagttaaaatttaatttttattttttatttttttggaaaaaaatattttttttaattcttttttctgaaacacttaaatattactattttttaattataaaaattaatcatcaaacacgcacacatacataaatatgatgagaaaataaggattattaatttaaaaatacagaaaatcaaaatcaaaatgaaactacttgtaattatttttcgatatcatatttttgatttcctccaaatccaaccaaaagaaacgagttccgtctgaacatggagtatatgtatacactagcagccaacaatagtgacgtcagcagaatattccgtccaaagtcactcactccgttacctcatagtgacgccagcagaatattccgtctaaagtcctggtggcactcgtaacggaagcgcgtgactcacacgcaccatcgtaatcccaatggatgatcccatgatacatagaatcgaatggaaaaactacataacatgatgatgatgatgatgatgatgatgataggtttggtaaagggccccacgtgatgggtttttattatttaccggccgaccccacgtgaccccaactctctaatttcacttttgattttttatacagtgataatagttgtactttttttacttattttcttcgtgtttatttattttttaataaatttagaaaaatgaaaattcggctatttgtcacgtgattacacgtaggatccacggtgaatgtggcgaatctctattgggttttcgagaaccgtgtg

SEQ ID NO: 244730 - DNA, 712 bp, Cannabis indica
ttgaactttatgagatctaacctcctattgttcctcagtagcttagtggtagagcgatctcccctccttatagaaattttgtcccgaaatttacttaaaccatacaaagtagttctgcctcatatcaaactttaattcccaagtcgcctcttcgaccttgctataccttcataacattctcactaataccagtgtcttcttcctcagaacttctctcttctatcaagtatttccactgatcatttctaacgtcctcgcttcaagtctccattgggtccttacacccccaaaataatagctcttatacttgggtacatcactttgactaaagtttcaaagctttgtaattcatagctacaagatgagtctctttatacacatattctcaaagcatttaaaacatgaaaggcattatgtacactgctagtgctggaggcatagccaacatgtacgtcatttgctctatcctctctagaattttaaaaggtctaataaacctaggaattagtttcaccaaagtgttttactcctttcatgtgtgaaatacaaagaaataccatatctccaacctaaaagtcaatattctgttgttctgggtcaacataactttatagtctattctgagtagtgagcatctgagctctgattttgaatatctgtcaaatactatagatgtaatatcccgataagcctaatgtaaataattaaagtt

SEQ ID NO: 244731 - DNA, 4888 bp, Cannabis indica
ttaagaaatggagttgattttgattatagtagtcaaagaattattcatagcaatgcaagtacagatggctcatggacaaaattctttagacttcttcccaaagagatttcaatttggttaaattaacattcacacaagtgattccacatgtcaacaactttgtccaaaaacattatattttctgcaatgtgcctagaaatggaatggaaaaacacattaccatgcatgtagctgcaacaaaataccctttttagaacatttttttaacaacttatattaattgtctttaaaaaattttaaaaagtcactttgatagtccttccttaattgtaaaaatgaaataaaccctctcgtttctcgcctcccacacattcttggaagaccatggctgttgtagcgctctcacggatggaagaacggaaaggtgtggggttcacgaaggctcgcgtggctataacagagcgtagcctcgaacaaaggcggggctcacagcgcaactcacataggcagaccaagctcatggaaccacctacgtttgtatgttattatttctacttttttttctctactgttgttctgagaattattgttattacttattagagttttgtttgtttatcaataattttgaaaatgtttgttatttttgctctaattgtgtttacgtattatgaaacaattcagacaaaatccagcatgtataatattgggacgttttgcagtgttgacattttcaattcggaaataaagagtttcagtcagtggttcgaaaattgattgactgtggtcaaattgttatagtgaaaatggaattgggtttgttgctcatgatgaaatactaaaatgcatattcattttcatatgttgagttaacttgaacgtaccaaacaaatgcaccctataattgggttcagtagagttcaattacaatttcaagcagtagattcagagtttgtgggtatgcttttcgtatgtataataatgaaggaattgaatgcattagtcaacatttgaatctaataatgaagaattttagttgagaaattgggttttcttttttattgtttgtttgatttgatttttaagttttttggttcatttttcacttaattagttaattaattgggattgtgatactattatttgggagtagttataatttgtgaaatcttcagagtatacaagagaaaggaaaacagagagagaagcagagtatgcaagagggaataaaacccagaacttaattcctttattgaaagaaggtctatatatacacaagaagaaaagataaccaaagcaagaaaactattacagacaaataacagaaaacagttagaaagactaactgaaaaacagacttaaccaactatattaacattcccctcaaactaaatggtgtagacaccatttttagtttggcttttaggtacaaaaatctttcagtagacaaagccttggttaatatgtcagcagcctgatccaaggaaggaacgtatcgaacagaaacttggttgtctaaaatctggtctccgacaaaatgaagatcaagctcaatgtatttagacctcgcatgaaaaattgggtttgcaactaaagcagaagcgctttgattatccacccaaatgacaggagtgtgcacaagagggacttgaagttcgtgtaacagagaatggatccatttgagttcagcagctgcattagccaaagctcggaactcactttcagtgctggaacgagcgacaacatgttgctttttcgcggaccagctgattagattctctccaaggaataccaaataaccaccagtagaccgacaatcatcgagggagctggcccagtcagcatcggagtaggcttgaagagttggagaagaagacggtctcaaccataagccatgtttaatcttctcatataacattgtcatgcttcaagttctttaggaatggagttccttcgtattatggagaactttttcccaaaatggctacatcgaagcaatagctgtacaacttcttccatggaaggcctactaagaggctgtttctccgtacacctgatcccaaccatgaacaccccacacatttcttctatattacatgactcctttactctcgggtccaaagcttccgcgatcggcttgtcttcttggatgtgacaccatgcccagtctaagagggagctttgcccattgccatctccattgtttgcttctctaccggttaccaattccaaaagaacgacgccaaaactataaacatctatcttttcattgatttttgttgtataagtgtactctgcaagtttgaaaatgaaatgtttatgatttttttgataagaaatgtgagttagctattgagatttacctggagccatgtagccaaaagaaccagccacattagacattgtggtaagctctccttgcttgaccaacaattttgctaagccgaagtctgcgattttcgggttgaattcagagtctagcaagatgttgcttgatttgatgtctctatgaattactggtggcacaaaatcatggtgcatatagcagaggccttgtgcagcaccaactgctatttgtagcctcttgggccagtcaagggagatatcatcatgggcagaatgtgaggttgagatgatgtgttgattgtttttgccatgtagccatcggtctaggcttcggttttccatgtactcatagactaaaagttttgaactctcacttgagatgcaacacatgagtttcactatgtttgaatgtctaattaagctcagtatccccatttccgcaagcaattccttttcgagcttgtggctcacattcttgtcattccatattctttttacggcaataacatcaccttcgcgattcacagggatacggtagacttgaccgaagcctccagctccaatcagattatggccattcaatccggaaatgatcttagcttcagtgaactctagtctctggaactgggtcaggttccaatttgatccaagtacaattttgcaacaatagcctttgtttatgaagaaatatgagaaggacacagctaacaagagaatcgttgtccctaaagttatgatcaaaataaggtgtgtggttgaaatttttccccgcttgccgggttggggactacagagattgagttttgaattgttggaagttgtgcacagaccaggattgtccaagaaactattggcatatgcagcgttgtccaatgcacgtggaatagttccagtgagcttattggaattgagattgagatgagtgagtttcaaaagaccaagttgaagtggaatttgaccagaaagttgattctgtgagaggtccaaattggtgagcgtaggcaagaaagaaaggctggttggaattcgtccagaaagttggttttgacgaagattaagagtgtttagcgacttccatgattgaatacttgatggaagatctcctgtgagttggttatggtcaagggaaagagttgtcaaaagtgaaagagtggttaattcataaggaatggatcctgtcaaatggttattactggcattaaaaaccacaagttttctccaggaagacgaaccaattggaatgttacctgaaaagttgttgtcattgatttcgagccgagaaagattccaggccaacttctgaggaagcacaccagtgaatgagttgttgcttagcatcaagtgactcaaattaaacgatgtccacaaaccactaggaacatttccagaaagattgttgttagaaattgtcatcgatatcaaagaactacagtttcccagtccttctggcagttcaccgctgagattgttgttataagccacgacgtgggtcaaggtaccctgaaagcaaagatgctttggtagtttgccttcaagcctattgaaacagacctcgaacgtttcgagtttcgaatacttgcccaaatctggaggcaaaacacctgacaatttgttgtcataaagttcgaaatttatcaagcctggcaatctaccaaggccctctggaatatttccagataattgattcataaacaaagccaaatccgacaattggtttagcttggcaaagtcttctggtattcttccagttaagttgttctctgaaacatcaactatagacaatttaagagattcaatcacctgaggaatctccccagaaagattgttcgtgtaaagataaactgtgtctaagttctttaacttgaacaacccatctggtatttctccactcaagttatttttcgataaatccaaactttccaatgctgtcatatctccaatacttccaggtatgtctccaaccatatttgagttagtaatccaaaaaaatttcaattttttcaattgagtataactggaaggcagccttgatggcgaaagatttttattgtcggataaccaaagcatttcaagattagacaagttacctaattcttggggtaaagagccattgaattggttgtgctctagtctgagtcttctgagctcttgaagttgtccaatgactgctggtatgtcgccggagaagtaattaccgccaatagaaagattacggagctgaaccattctgtttatgtcgccaggaatggttcccacgaagtagttgtcagtgaggtccaattcttcaagctttgaacagttgaacagagcttttggaaactccccaggaatgtggttgcccgcaagatcaatgacactgaggtttttgagatcacttataaaagaaggaattggagttgtgatgtttgcatcattaagattcagagcggtgacagagtcagaggtgcaggtgataccaggccaagagcagtgagaagaagagtttgttgatgatggaatccattgactcatataaggaaggtctccccactgctgttttagc

SEQ ID NO: 244732 - DNA, 857 bp, Cannabis indica
taaattttaatatttactaaattatactcgtgaactttaaatttttaatagttcaaaaaaaaatttaacgacttaacaaattttaatgatacaatttgatacatgccaaaattcagagttcaaaaatcctaactatcctaatttttttctaattaaaattataacaaaattttgtgtcggtgaatgccgtgtgggtcgtcactcgttgccagttcagtaatctctccaccattttttgttttaatttcagataatattaattaattaattaattataataataataaaaaatatatataaattaattaatttctgttctttttcttcttcttcttcactttctttctctgtaataaagaaagtggttttttgggagtgaagagaggccaagtgtgagagatctctctcgttgcctaatcgataatggcgaaccacagatttggtggtggccgaacctttaccttctccttcagagcattctcctctgctattgcagctgccgtcttcttctttttctgcttttcattcttcttcgcttctcactcagactcctccgatcccatcacctttgtaagtattcaaatcatctttctttttctttttctatggatcctgaattttaacacaagtagaatttgttcatttctatttatgaatttacagtgtaagatttaattatttctcttcgtgcgaacaaaaccacggcggtttttttgttattattactgaaatatgtatattcatgtgatatgtaaaattactagttttgattgttttctttaaatttattttcattttcagtatcttactagcttagatcgcgttagatccacatttgtgatacctcgataataatt

SEQ ID NO: 244733 - DNA, 1310 bp, Cannabis indica
gtctaactatactgctccgctatactaaaatactaggatgtgattttaatagctaaacaccgcgttctaatgttgtcgggcacaaaatatgcaaaattatattatccctatttccgctcctaactggattccccatgtgtcccaccctaccattctccaccaaattcatccctccctttccactgtctctttttttattaatcctgatcacaccgggaatgtcgataaactgaagcattttcttcctctgtatcagatgaactcagttctcaaaattcccttggaccctgaacctgttaactctcttatttggggctttcatcattctggcatccttaccgttaactctgcttaccatcttgcctcagctacagccaatacaacttctccctcttcttcagaccctaacccttttaagaattggtggaaaactctctggaccttacctctccctcctaagataaaacattttacccagaaagctttcaaccatctcttaccttgttctttaaacctgtttcacaagcaaattcttccacaaccttattgttaatatgtgggggcagtgcggagtctgtctctcatgcacttgttgactgtactggaggcagccaaatatggaaacactccaaattcaaacaatttcatgaaaattatcgaaggctggatattagagaattttatcttcatagccttaattcaatttccaaggaagatctccctttgttgttggtttactttggcaaatttggaacataagaaattctgctctctttcaaaagctgtgtgttactaataatgtccaagagtttgttttaagctatttgcaggattataaggatgctcaaaagttgtcctctacattgtctttgctgcggccttcctctccacctgcattgcatcatatccttcaggaagatactcccgcattatttgttgatgcttctctaaaccatgaagatattgctactggtttaggtcttgttttcaagaaaggtccacaccaaattctcaactctcctaagttttacaaggcaagagcttccactccaatttttgctgaagcccaagctctctatgaaggaattcaatggtatatttcttcccagttgaatccacgattcatctttaccgattgtcttaatcttgtcactaaagtgaacggaacttggcatgatcactcgaccttatctagtattattgtgaagatcaggatctctctctctccaattaccctgaggcttctttgctacacttaccacgccaatttaataaaaatgctcattctcttgctaaggcagccctcaggt

SEQ ID NO: 244734 - DNA, 889 bp, Cannabis indica
atatattttaaattttaattattataacaacaatattttaaatccgtccccactaagattgtgtacacattttctttcatttttataagatttctcaatacataacttattgcaggtaaaatcattataatcgcagtcaaccaagcaatttgatggtaaatttattacacttccaagctctgttatttatttatccatagtataaacataatttgcaaaataaataaggaatatatatgtgagaaaaataatgaagtagtatgagaaaaaaaatagtgggtatcacttttactctaccaataaagatgttttttgtatttttgttggtatgtaataaaaaatattatgtataatttttttttatatgaaatgatacatcataattataaaagtatatataaattttgaataatggtttaattaaatagttgtgcttgtatatattttattttgtcataaaccttgagaaaagataaatgtgtaactaaccatttcaaccttgattttgacactgttaattattcataattttttaaaacttgatgtgtgtctactataactacaatatatcatttaaaaaaattacaaaattacccttttgaaaaaagggatattataaattagtctcaggtaatcttgtgacacatgtcatgatcatactcgccacatcactcttgccaagatttaaaaacttttggtgtggttacttatggcatcaaagaataagattaaataatagaatattaccttgtttacttctctaattttgttaaagaatgaggatgaaatatgtggatctcacattaatttaagaatgagaattaagattagcagtcccccgaggttggtgggattgtcactccctttcttttttaaaattatgaaatat

SEQ ID NO: 244735 - DNA, 1104 bp, Cannabis indica
atgttcatcaaaatcgttttatttaatagtttttgttggcaaacatcatcgtttcattgccaagaacaagttgtgcccttatcaagatatcatcagttccaattacaaatcctaatttgaagttcaacggtgttttattctgatcatagatgcaagctagaaacttaaagatgtgtcttctgcctagaatttggcaaaaatccacactaagaaatccaacatcaaaagataatattaaggaactagataaataccttgcgtccaaaccgaccagaacgaccaatgcatgaatgtagagctctcgattgttgggaaggtcataattgatcaccaaggaaacctgaaagaaaaataaataacatgattaggaaaaccttagtttcaagagaaatattttagcaacaattttagaagatttaaaagacaaatgaacattatcagctgaggcaattataaaaaacggctgaagtgccaaccaaataaaattgacagtacttagcacaagctaaaacaaatattcatatcatacccaattaaaatttctatcaagagtgttatctcaactttctatgggaggaaaaataaaagctacaaaattgcatggaaacctaatttttctgcaggcacaatctaatagagggaagctcacgagaaccaaaaaactttgcagagcactcgtcaagtgccaaatatcattcgtcttttcatttcatttacttatattttacactattcaaatctctgctcagactcttgtgtataaatacagtatttcgctgctggtaatatatttgttcaaccctcacaagtcacaaacatgcatctttcatctaagtaaaaacaatcctagtcctgaaatatccttttacactaaaggaaacaagcatttctcatcaaatattccaaagtgagcaacaaaatagaagagaaagctagaattgttcttaaaacccattatataatacattaaatctccaaccaatttcaatcaataacatctttaagagagcaaggcaataaaggttagttgcttgacaattagataggctttcacagtaatagcagagcatttcagcagaatagaaaaacaaatacctgttgaac

SEQ ID NO: 244736 - DNA, 2275 bp, Cannabis indica
ggtatatttagtaccaatttaaaaaaaaaacacaagatctaaattattatttaacaaataaaaatccaatcgataattttttacaaaatttaaaatggtatttaccttaagttatacttgtatcattaatcattaattatatatataaataaattgtgttgttgttttattatgtacaataatatagtacttaattatatgagatttttttacaaatttgtaagaaagtttagataatttataataccgaaatgaaaattcaaaaacaaacatataacatgcatgtttgtttattatatgcatatagttaatatatacaattaaattatatatatatgtataatatatttgagtagctagtgtgtgatgcatggttggtgatggtgttatatgtattagattatttaatttagagatgaaaataaattaaagggtaattagagagcacaagtcttgtgctggtccgtgtcgtgtgggatgatgatgcttatatatatacacatatatagatatagatatagattatatatatatataaatataggaaataacgtcaagtgtagcaagtgcattgtgcatgggaatcgtgtaccttgtaaggaagcacactactataaaaatacctacaaaccccccaacatatatcacatttatataataattttacctaaaaaagattatttttcattttgtcaaatcacatatttacggtcaaatattttgggagccttgagcaaaaagtttaaaattgaggcctttatgaagaagaaaaaaattgtgtacattagaccacaaatgtgttactaattttttttcaagataaacttctaattataaatttttatataatatataaaaaagaaaaagaaaatgggagatcttgtgtaatgacccaagctatctaatgcttaagttgaccctctgtgtaagtactaacgttgtgttgaaatatacataagtttatttttaaaggcaaaaataccaaaaatcgatataaacagtagaatatttaccgttaaccttgtcgttaggtattgacgtgaaaaaatagttaaaatgaatatttttgtggtgaaagtatctaagttgtgctaataagtggactatattcagtctataaattagatattttcgatgtaaatgttgtttaaaactcatattattgtttaacaataaaattaacgcgttagatttcaatgaattagatatacgttagaaagttaatcaaaaactctataactttatatgtaaatattttcatattaacaatatttggagggaaaaattagttaaaagttaagtaagtgtgcaactatgtattgtggtaagatgtaccctacatgtgaaagatgatcatagccattcatttaaatagagggtatgatctatctacatcaataatcaaataccctaccaatatggtattgtatgtaagattttgaggttaacatataatatacctccattaatgaaaatgatttatggagagaaatgcataaaagtagttcaatttttgaaatttatgttcaaatattctaagtcccaatttaaataattgtggtaataaagtacctaccgctccaacatgattttgttgatgtaatgagttgtgaattaacgtgaactcgtaacgtaatatttaagagattccagctcagattaagctgttcgtagttataacacaacataaaaataaaatttgtattaaatgatttcctttttagaatacaattaaaaaaaaatatacatgcaacggttagttatagtagaaactaaaaagattcaaacaaacaaagatgatataatttttatattctaataattcaagagcaataaaagaattccataattttaagatttttttattatatatatatataaactaaaattttaggatttaagtattctttcacgtgaatttttaacacaaaatttcaaataaaacaattggtgcttaaagattatttttttaaaatcacatttaaaacaaagtaagccaaatacaatgcctttaacacgcatataatggccaattttcacttatatcccaatttccattcaaacctttgaagaaacctcaaacaatattgagaaaattacggtgttctgtacattcaatccaatccgcactattttactgatagtgcatctgatccgcactaagtacatattttatttttatagatccaatccaatccacacaatagctcaaatccaatccaattcactttgcaaaaatacggattgcatcagttattttggatcagttactttt

SEQ ID NO: 244737 - DNA, 1666 bp, Cannabis indica
ccctattatctcatcttgctcaacttttaatgtgttatttattttctgaattactttaattcttttaaatcataaatacttttgatttgccaaatagaattataagtatagtttagtagtaattaatctaattccttgtggttcgacctcacttgcgtgagtatactacttgattgcgtgcacttgcgtagtatttaataattttcgcaacatttgcacacaattcaataccccaattaaagcaattcgatccgataacgctaaagaacttgcaatgtccgccttctatgcctctaaagggatagttcattaccattcttgtgtagaacgtccacaacaaaactctgttgttgaacgcaaacatcaacacatactcaacattgcacgtgctttgtgttttcaatctcatttgccccttgcttattggggatatctcattgctactgcaacatacttaatgaatagaactccttcggctctacttcatggcagtacttcttacgaaaaatgttactccaaaaccccaaattatgatcatcttcgggtttttggctgcctagcatatgcatccactcttaccttcactaggcataaattttctcctagaagtcgtgcatccgttttcattggctatcctcatggaatgaaggcttacacccttcttgacatccaaacaaaccaaatctatcattcacgagatgtcatcttccatgaaaatgtgtttcccttttttggggaaggttccaacaatgaaattaatatgttcttccaaccacattgcatacctgctaacatctctattactcgaaccaatcccactcccaaaacactggaaacaccacaagtcacttccactacatcgggtcaacactcagcacctcctgctgattctcaaaatgttgtgcccaattctaatgcagccagtcctattggtgttgttcctacaccagaaaatactgccacacatacacaaactggtgttgttcccacactagaaactattataaaaaatattggtgttgttcctacaccagcaaacacaacaaaacatatcaaaacgggtgttgcttccacactagaaaataatataaaaactactggtgttattcacacaccagcagccattacacaaaatcaacacactggtgtacttcccaaaccagcaacacatcttgacagtcaattcactgctgatgattatacaaacacaacatcagcaacctctcatgttgttcccacacctgacactcatgtcaacagcaactcacctagtgttgttcctccaaatattgaagccattggtgtcactcccacaccaagttcttcacccattactggtagtaattctggcatcacaccagaaattacacacccagccccagctcaaacatctaaagctggtcgcatgatacacaaaccaccccatctcaaagattatgtttgccatactcattccactgcttatcccattgaggaattcatatcctatgccaaacttagccctcacttccgagcggctgttttagcagcttactcccacatggagcctacatcctatagtgaagcttcccaattcaaacattagttactcgctatggataatgaaactcaggctctcgaaaaaaatcatacttggactgttacaaaattacccctagccataaag

SEQ ID NO: 244738 - DNA, 1447 bp, Cannabis indica
ataatgtcgcaaaatgggcgaaggagacacggacaataggcttaactaagtcttcgaaagtggatcctactgtgctgaccgattacttggagtggaggaagcatgctggctaatctgctgctagctttctgctatgtgctaatttaagtttatagttttttaggttgttttccttggttgtatttctgttttcttgtagtactctattttccttagtttgtatttctctgaactttgattatttggttaattgttttgctctggggtgtttgcacccgtttctttaatacaaaaaaaaaaaaaaatatggtaccctaagacattcatctccttggtaaaagagtagactaagtagtcaccacatgatttgtgatgcattattattaaaatctctctcataaattgattaaggttgcaataaaaaatataactaaatgaaattaaatttaaaatagtgtatatataaatatatatgttgtaaatatactttaggtgataatttttgaaagagaaaaattactcagcaaaatatttattgaaaaaaatttataaatgaaaatactgctaaattaataatctaaatattaagaattacatacatatatatattcacaatataaataaaaatatatcaaattacttttttttttatactaatcgtaataataagaaagtactcaaagaatctcatatataaaaaatattataatatattttttttatggtatgatattactaattgaataaataaatcattttaaaatcatgagtggatggattcaacccctcacaacccctcccccaaaaaatactaaagtaaaattataatgagttgtttaccttgggtttctttttacgatcacacctccgttccctctttttttatttgaggcttctttgattcttattagtgtgattgtagagtagaatgatttgtagacttatatatgttgtaaactaacaacataaactcaaaccaattaatgaacaaataatcaacaattaaatagtcaatcaaaccagaaattaaaacaagataattaaacaatgaaaacagagagaagaacacaaaatttatcctggttcggatctcaaactttgagtcctactccagctctcccccaatgagatttctccactatgaatcagcaattacaaacaccaatttcagtgcataaccatcaagaacaatcacagtcaggcttggctcttcaacactcaaaactagagcaattttagccaatgctgaacttgattctcttctgcataatctcaccaactctctctgttttcgtctctctctttcttgccttgccatgaatgcaaacaagagcttattatatagttgatagtggctgacatgtccagcacttaacaacttgagacaagttagttattaaccgagtaaccgacttcccaaataagaaagaacttaactgaaattaac

SEQ ID NO: 244739 - DNA, 615 bp, Cannabis indica
gtaacttaatactgttattaaaaaggtaacttggtactccaactggtaacttaatctgaacaaaaaaataaccaaaaaaaattgacttacagtaaaatttacttttatcatataagtaacttgacacttttatgttatctaacaaaagtaactaataattatagtataatgtattagaatggtaacctggtattcctcttcgtaacttaaactgaaacaaaaagttaaccaaaaaaattgacatacagtaaagaaagaaagagaaattctatttgtacccggcaaaaaaataagcacatcttaatatttaaaaaaaatcaagcttacaataatttttactgttcttataactatttgtttactatttcaaaacaataataataggagatgacctcggacaaggatgtttgagacctaatacaacaattaaagcaatggagaacatgatgaagtaatgaacattaactaaatatgtgatgaatatatataaagtagacaaagaggacaaacctttggagaaagatagagtcgacaatggtaaaagagtcttttgattgttagcaggcaaagttaaagttaaaagagtcttttcattgatatgagatccatgtttgg

SEQ ID NO: 244740 - DNA, 794 bp, Cannabis indica
gggacaagtgagaatccttccacacctaattcctccatatctgcctcctcttctaacgacggggccgccactactgtgacagctggccctgaggaagattccggtaagagtaataataataagaaggaaaatgatgaagatgaagaagaagacgaggaagataataataataaggttaaaggatctgatgatgaagaaaagacagcaaaaaaagtgttaagtttttttttttcaatcttttcttttaatttagttaattattgatttgattacatataattttgatatatacatacattgatttgttttagggtatagttgtggattgtggtgaaaccctaattaactttttgtttcgatacattttataaaataatgtctaaggagtaataattgagtgaaaattttgggtagtacagtagttgtcatatatatcatgtcaaatatggaattaattgaattgatcatgtgatcttaattaaataattatttagttatataattggaataatttttgttgaaaattggggtttgtgtgtgactgtactatttgtatgtattatatatatatatatatataaatataggtcgtgtaagactaaaagaaagagaaaagccgagggaaccacgttttgctttcttgactaagagtgagattgatcatcttgaagatggatacagatggagaaagtatggacagaaagcagtcaaaaatagtccatatccaaggttatatatttttcttaattactaattaatattatatatcatttccaatatttatttatatataa

SEQ ID NO: 244741 - DNA, 949 bp, Cannabis indica
ataaaaaaaaattataaaaaaattattaaattttttctcatcatgcaacggaatagtctttccttttattttatagaatagtcattccaccaaaatagtgaaaaagtcattccacattacacattccacatttcaatactttaatatgcaatcaaatgaaaattatttcatttccaccattctatttcattacctctaactaaacgctaccctcctaacaatactcggctaaaaaggaaaaaggccaaagcctaatagggagtggagaaggaccacactagttagttttgatgtgtttaagattattattattattattattattattaatatctatgaagtctgatatttgaggacgcgtatgaaccataagaaccatataaataatacaagtgtttggttttacgtgtctggtttagaatcacttgtatatttgtttgtttctaccaccacacacacatttacacctaataataaataggtctcactgctattaatttatttttttatcattaaaaatatgtaatggattggctattgtattggctcaactgtataacacatgattctgcatttttattggtacacatcaacacatgttgcttaaaactaatcacttgggaagatcaagtttgaagataagagcatatgaggacaagttgcaattaaaggagaaaagaaaaagaaagaaagatgattgtatttatttgggccattctgttttgatgaaatacaagttaggtattttcttatattctcactttctaattgtacattgaactcaatgaagtgtaatgatatgttatctccacacacaaatttataatgtaaatttcaacccatcatctttattttgagttagatttataaacaacataaatttaatatttatttttagtaacataagtacctattatttatacaagtgtaattttcttccagtttcatt

SEQ ID NO: 244742 - DNA, 1276 bp, Cannabis indica
gtaagtttagtaaatattacatttactgatcgaaatattagttttttaatatatatttttaaattgtttgaatttttataactaagtattttttcacatttttttgtatataatagttttgttgtacactaataaaagaagcctactttttaaccctaggctaattatttggaatccattcatttttatttctatttttatttgataatattattatactaggaaataaaattgcgttttgtacggtatagacactaatgtatgtatacatgatgctttatagtattatatattgaagaataatgaattacaataataatattaataattttgtagcgtgttatttttttaaattaagtgaaacttaaaaataaaaaacaaaactatataaataaatatatattttaaaaatataggaacaaatatatgaagaaaaatatatgtaaacttcactttttttaataataactttatacataaaaataaaatgtaatagaacaatccacttcataatacaattatttaattatttaatttttttgaatatatgtttattgaataaattgaaataatatcaaaagtatcaaaactttttgtcatctgcgtttcggtattggacgtgaattccaagtcagcacttaagacccatcagtaggactctccttaaaagaaaaataggtcgagctcattttaatacatccctccggacacatatatgagtttcgtattcgtaaagccctccgcattcggcgagtcatatctagaagcatgttcagtgccacgagactagaaggacaagatagtacgttctcgaaagaccacttctacaaaaatagctttctgcatcggtcaacacgtctggtcaaagttgttgaccgacacaaaagccaatactcaattttttgcttcggttggtaaccgacacaaataataattaatttgcattatatatctctccgacactaaaacaaaaatcgacgctaaagatgatttttttagaaaaaaaattatacacataatgcattagttattatttgatgcaaactacctatgcctcatgtatgcaccgaaacaaactaatgtgtgggcttctaactgacgcaaaatattcttttttttggacaaacaaatattccttttgttaataaccccaaattgaacccacatcaacactccattctcctttttattcaatttttgagaattaggattcccatcttctctctcctccatttttgattccctccgccctttctctcggtggtgaactgcgtgt

SEQ ID NO: 244743 - DNA, 1012 bp, Cannabis indica
ctttgtttatgcagacattattgctcagaaacaatctcaatatcagctctcatcaaattgaaaaacaattaaaagaaaaggctttcaagaggaatacttcactttctttatccaagtataaacatttgtgtaccaaaagtaacataaaaatatacaacaaagttaaaacaaatacatatttatgatgatccaaaaaccatgataaggctagcagttgtttccttttcacaatctatttctagagaaaaaggtagcgcgaaaagtaaataaccgaatctatagacgacaaatgaaaaatagcaagcttgtagttgtaacatcattgtgatttttagaaatacaactaacctgtaacaagcagtgctagacctcaattcaacaagcaaaacgagtgaatcggagttgaaaaagaaactactttatgtaaataatatcttcatcaggatcatcactctcccaatctctgccatcttcaggagcatcagatgattcaatttcctcatcatcttcactttgtgcagtattcttttcattttttatcttatctaaaattgctatcacctgaaacaatcaactttaaccgattagcatggcactaaaaagcggacaaagcttaactagcttctttttttatggccatggcagttcgaccaggaacaaaatgattagcaaacacaaaagtaagatggaacacctaaaagagagatttagaaagctcttacaacaaatagcaactttctactgagaaaacaaaacattattttgtatgaaatgctgtgagagcaagggcagttggataaaatgacagcaatttctaaaagagaattttataaacctcttaattgtaaatagaattttctcttaatataaagaaattggcagccaacacctaattcttgaacaataaggataaaggtaaagttttttttcaccaaggattgaaaatcaatttatttcgtaccccagcaaacccaacttagcggaaacatactaacagaattccatatgaaaa

SEQ ID NO: 244744 - DNA, 634 bp, Cannabis indica
ttttttgtttttttcccattttttaaaccgtaattgcacgacgagatcttaatcctataaaaattacactgtgaaaatacggtgtggtctggtgcggtgcggtgcaatttcaacaatttttactattattattatcaaatattataattaaaattttaaaatctatctaataaaattttaacaatataaacaaattcttgttaaagtattaatatcataatatatatactagtaatcaatggaggaataacctataatatatattctagtaataaatggaggaataccctatttggctttgccctcatagactgtacaagatgccaatgaaaactatggtgtaccccgaaccaggctttgagctacatcgcatgcagggagacacacagtacgcacaaatgtacactgatgttggggtatactactccccaggacctgctttaaagggtgaggtttttgatggcataaaggtcgtttgaaggatggagaaatggttgatcgagaatcacggattccagccacagtatgcaatgtttgagcttgatgaggaaaaattctggaggatgtttgatgctggcctctacgaacattgcatgaggaagtatggagcagttggaaccttcatgagtgtgta

SEQ ID NO: 244745 - DNA, 790 bp, Cannabis indica
acttgtatgatttctaatatgataaaatttccatgtgcacctttttgacttgttagactgtttttcttaagtccgaacaggttttaaataaatttagtaaatctagagtaatgagtgccccaccattactagaatttattctatttatggaaataagatgtatataatgtgtggtgttataatgaagatgaatttttattaataacacatttattattgtcagattgaacatgcatatctttatgaacgacatcatttataaattaatgtagtaaagtcctttaaatatgtctctaaatattttaaggaaacttggagtataaagtctttgataattttaaaacaaaatcattacgataatgcttgttccataaattttccaaatatgggaactcattttgtttgtggataagatttactcatatcaactagcttcctaactttatttgtaaatcttgcaagaaattatgaatgtggaataataatttaaaataatccaatatgtattaataatcacattaactatattagaatgaagtcatacaaaataaattaaaaatttatttgtgttaatgaagtgtgatttatttatttatttattttattttttgaatggagtgatttatttttcttaaaaaattatgtacagtcttaaatgaaattatgagaataaattttgaaaatttttactaatcttgtagaaatttatgaatagtgatgtaacttcaataagattacatattcattaatgtagagttttgaggtttaaatgaatcatgtttatactaat

SEQ ID NO: 244746 - DNA, 1598 bp, Cannabis indica
tttttattatttgtatactatttttatgttatttttcttattatttttcatgcagttttcgtgttgaatatatatatttatatatttaaacgtaaaaatataaaaaatttacaaaaaaaaaaaaatgtataaatttcccatatatattgggtcagtcttgggttaaaatgggctaggcttatacctagggcccacttagtctgtgggctcaaaaaatcatttttaaaaatacacattttttattaattatcaaaaatatcgtatttattttaaataaaaaaagctcaataacattttttttcctaaggccccaccctccttaccaataaaaataattaaaacttagaatttttatttaatatatttttaaatgaaaagtctttgaattttcaaagtgtttcgattatccaaaaatattttaacatacaacatctctactttatatggttggatgttgtgctttatcatattactttcaaacacaattatctcaatttttgttgtaattctataacacaatagtggttgagagctttgagtttgaaaaactctagagtaaaaagagtgtctcatctttaatttttctacttacattgaaggctcatgtgtatagattcagtcactatattcttaagctataacagaattgttgattacagtgggaaattgaagtaggctattaatttctgttgggccaatttaaatttagagtattgctattggatacaagtggtgctcagaactttttataggtagtgtttcacgattagttatcgatattctcaaagtttgccttattgtcatgtactgctgaacaatttggaaagcccaaaataaggtagtatggaataacaagcaccccactgtcactaatgttcttgcatctgcccaaacagcttttgatcattggattaaagctcaggataaaacttcgttgtcatcgttatgtttgaatagcatcgatgatgactctgagacttgggctaaacttggtgaaaatacaatcaaaattaatgtggatgcagcgcttttttatagtgagaacaagtatggctttggtcttgttgcccattatcatattagtaatctaatcgcatcctgcgctggtagttttggtggcctttatgcacctgaagtcattgagataatggaaattgaggaggccatcagctgggtccaggctaataattggcaatttgttgagattgagacagacagccttgtttctgtacaagccattcaaagcactcactccatgagatccacatttggccttcttatcaaggactgccaaatacttttatttgccctttctaatgtcaagttatcttggataaaacgatcagcaaatcgagtagcacatcatgttgctagacattctcgattttaccctggttgtagcgtttctaagttttccattactgttgaattccaacatcttttgcactcaaaatgctagttttagatatatcatttcgaaaaaaaaaagttagcgttattctctaaaaattatttttttaaggtatttgaaacttgatgcttaattacactaataataatatgacaccaaaaataatgctaaacactcttttagcaat

SEQ ID NO: 244747 - DNA, 934 bp, Cannabis indica
aaaatatgaaatttccctttatttattaaatgggcggaggtatttatttagtgtcacaaatgtgaacagagatgaaggttacatgaaatttctaaattaaccagtgtatagacgtcaaaaggtcatatatctactaaagcactaaaatataagactaagtaaccagtaaccacctaatccttttaataatattaatcatcaaggtggtggggttttcattgtttaattaatatttgtaattatttaatatcaaactcttcgtctgatcatagggccatggtggatttcaactttaacgaaagctggtggtggtagctgagttacatagattattaattgtgaattttgtttaatggtcggttttgtagcttttgactcaaaaatattacatacatggaaagagatggaaataatgtcactaagtgaaagccactttggaataattttttatgttgtaatgcattccctccttatctcatttcccttgtatacatctacaaaattaattaaattgatcagaatcaagtgtgtctcattagctgaccagggaactaaaatagatatttattaacttaattttttatcaacgacacaaaataaaaaatacgacaatatattatgagttaataaaataagacaaaaggcaagaaacgacatcataaatttaaatttaaagtaattcggctccaaattatttggtaataactttctatttttagtattacttgtggaataacaatcaattgaatcagagtcaaagagaatttcttgaatatcccttaagaattacaataagatattttaggtgttcttttagaaaatatgaattaagatctccaaacaatgaaatgagccactatttataaggttataagtaaataaatgacattcattataaaatatatattcattaaatgattattctctcaattct

SEQ ID NO: 244748 - DNA, 1562 bp, Cannabis indica
ccctatctaatttttagcataaattatcaaatttcccttttcttttttttcagatacaaaagtagtactacttgactgatacgatcacaataattagataattagccccttagataattttttctttcaaagaaaaaacgtatttactcaaaaattaagggtacatttgaaatcctaattaccaattatgtaggactataactttaaatttaatgaatactgtatggaagatattatattaaagaaaaggtggagtgattggaattataaatgtaagttgaacatgacttgaatttctttagaaaaaattacaatatatatatatatatatattgtgtcaaaaaatatatatttcaatttaaattttaataggaattcccatacaaaaataaaaataaatagtttctagtgttaccccacttacacatcatctcccactcacgaagttgacatatacgtgtaaaaatgatcaaaagtcagggtaaggaaatcaaaagctttccatttttcttatgtgaatagtgaaatctccttcgaaatttcttatagggtaattccatagtagtttaatttattttgacattttggatagtttttagtgttttttttattataattatataagttatagttatttaaaattacttatgatattgtataattttataacgttatgattttttatcttacattataaaaatacatttgaaggtataatttgaaaaaattcaaaaatattcaaaatacaacaatgagttttaaaaaaaatacaaaatgtaaaagctactatatatgtttaatggtggaaataattataggattggcttagtcgcaagagatgtccatagccctttggtggaaggccgcactgagtattacttgggtagagttaatcacgaggttgccaaagcaattggagtgtgtgaggctttgagttggatcaaggatcgtagctggcaaagagcggtcattaaactaactgtgtaatggtggttcaggcccttcagggttcagttcacatggtatctttatttggtcaagttatcaatgagtgtaaacaactcttgccggagttggataatgttaatatttttttatattaagcgatcagcaaatgtagtagctcataatttcgcaagagcttctcatttatactctggttgttgttttagtttggagactgttccaaccaatttgttaccttgtttggtaacagattttgatggttaataaaactaaatttttcattaaaaaatcaaaatacaacagaaaaaaatccttaatttataaaataatatatgataagtaaatgattttaaataatacgtgtccattatgtttagaattatcaactgcttgaataaaactatggcaccaatgactaactagatcattaatttgcccgttcgtagccgcttacagtatactaatcagaattcgtcctgctcactatatatacgtctaagcactttttctaatacttgtagagaaaagtaaggggtgagctaaagcttagtagaaatattatcatataatatcatacaatatctacacataccatt

SEQ ID NO: 244749 - DNA, 3344 bp, Cannabis indica
gtactgtctatggttttccttttgttaccgcagttttcctctgccacaagtaaggcttttgaataagttcaagtgagggtcaatctgtctaagacaagtggcctatttctctctcttttttttttaaacaataacgataataataataatataatttgtaactaatttattgtagaaacaaaaaaaatattttttaatattttgaagaatttttaatataattattaaagtcatcataaattatgttaaaaatacattttaaaaaataaagttcaactcagtaataaaattgatcattatattaaaaaaaataaaaaataaatgcgtatgtctaaactttgggtggctacagtgctagccgttatgtgggtgacttggagtgagagaaaaactagaatatttgagggtaaagaatcttcagtataggaactgtgggagatgataaaattctaggtagcaacttggacttttaaatcaaaatattttgaggatttttcttttctagatctttgtagaggatggggaaatttattgtattaggtttgttttgttttcaggtaacaaccaggttctgagttttctataatcacttagtaattatagaactcttcgtttgtttttcgtttcttcttgggagtcccaaattttatgtaattatggtgtttctctaccatatgtgacgacttctaataaacttgaagacatttgacctttgtctctatttacccggaaactttccttagaccatcttagtgcaaaatggtcaaaacttgcattgggacatcaactagacataccacgaatatatttgaggcatcagaataagaatcagagcaagttgaattttagagcacccggggcccagagcccagtgcccaggttgacaatttgtcaatatgggtgccttccaagtgtccgattggagatccgacttttgcatcttcttcgtcttcatcaaaaacggggaaatatgttctttcggaggaaaagcaacaaatcctggttagtacaaataacagggcctggcgcccaggttgacacctggggctggctctgtgaatgtcaacctgggccacttaacatgggagtttttttcaaaaaatttttttgagcatcttctcagttttttcaaaaaatattgagattcaactattttcgaggactaaacggtgggatgctgccttcaagttgctcaaatgccaaatctgatgcgaccattgaatttggaatggtaaaaaacggggcaggagacctcatcttcaagtttagaagccttctagaagttaaaggaacatttgaccaaggcttcaattttatctaagccggctgaggcagagccgttgtacctgtagttggcagtgtttgatcatgctgtaagtgtcgctctagtgcgggaaggacaggtccaactgccaatatattacacaagcaaaagattgttgggcgcggagtccagataccccatgatagaaaaactgtttttttgcttgctaattgcttttcgaaagttgagactactttcaagctcatgtcatcaaggtattaacaaatcaccctctctgccaagtgttgcaaaagccggtgtcatttgaaagactactgaaatgggccatggaactaagccagtttgataccaagtattagccccgagttttgatcaaggggcatgctttagctgactttgtggtagagtaatctagaatgaacgatcacctagacgagccagtcccgggactaccagtcaggaagatttatgttgacagagcgtcaaacgaaaagggagccgaagcatgaatcatcttaatttctccacgagacaccagctccaaggcgctctccattttgagtttcccgcctccaacaacgaagtagaacgcgaagccatgctagctagcctgcaattggctaaagaagtagggtcccaaaatgttgaagtgtacaacgactcccagctagtggtaaaccagatatctggagaataccaagctaagggtgagaaaatgactacctatgtaaagctttaaaaactacaacatccgccaagtcccaaagtatcaaaactcgttcgcggatatgctggcaaagttagcaacagatccagaaattgtgcaataaggagtggtacttgtcgatcatctataaactccgagtattgaaacactgggggtaaaagccataatttgtcactcaaactcctaaataggtttgatcttctagttcttgaattttggagagcttctggctgacagaccgctgcaaggaagattcagtatcaggcttccagatatgtcatcttggactaaaagctttaccgcagggggttgtctgtaccatatctaggtgcatagccggaaccgaaatcagtgctattatccacgaagttcatgggggtttctgcggagaccacactttcagaccaagtctttcaaaaagattcttctccgccagaacctactccacctcttgacacaaagatcagatattgtccgctgcgtcagaccatggtagtgcgtgcaccaccatacaccctttttgtccgacagctttgctgacacctttgtctgccaggcatgatctctgtgcaacgcgtgccctgcactaaaaagtctcctctctagtatggtgccgttgccccacgagctgaatatttctagtgggcctcgtagtcatgtgtttatatattttaccccaatagtgggcttgcttttacaagataaaacccgaatgggtcacgagtatgcgcggactcgaattctagcctatatagaccacattatatcttcatgcaaggggaacaaaattttgggccaaggttctgctggtttcactctaagctttttgcttttccaagagaaacttataaaaccaccttaggacaagggttagagttttttgttataaaactcatttgtaatacatttcaaagcctaaaaggccaatacactaacttgtggattaggaataattaacgcccgaactacgtaaaaatcctccatcttatttatttaagtactatctaatttcctaaaactcttatttaattatttttcgaaaatctcggtaaacaaagctaatatattgatattgaagtgataagagaacaagtttttaggtgtcgggaaggcagtgagtcatggcgtggtgagcacttagtctctatggatgaagtttgtagttgtcaggaagagggaaggttgggaattggaagattggaagcgcagaacaaaaggttgcacatgaaatggttgtggagatatcctttggagccaaaagtattgtggcacaaggtagtggcaagccgttatggtaaagccgaaaatttttgggatatgaaaattaactcc

SEQ ID NO: 244750 - DNA, 434 bp, Cannabis indica
ctgtgaaaactggattttttcctgatttctacaatttttttcgtctagcccgatggggttcgatgttagcccgatgtattttgaaaaagagctgacatgggtaaaagcttgatggggtcagatggagacgtgatacgggtctgatggtaccccctaaaatgttattttttggtttttgtggccaagtccgatggtgtccgatggagacccgataggggtccaatggtacccctaaaaatgttattttttttggttttgtggccgaatccgatggggtccgatggagacccgatatgggtctgatggcacccacataaaaatgtcattttttggtttttttggcttagtccgatgggggtccgacttgggttcgattgggcctgatttgggtttgattgggccccaaaaaattggtttttggtttttatttttgg

SEQ ID NO: 244751 - DNA, 918 bp, Cannabis indica
gagagagagagaaagagaggcagagagagagagaaaggaaggtacaaagaaaaaaaaagagattgagtctaggttttgtatgaagatttttttgtagatgaagaagattcttcggtaagagtgtaagagttaaaacactttaagataactcattagaaaatcgaactcgactgtattgtacatattcctgctcaatcaataaagaggatttggtagtgttctaaaaatggagtagagtcatagatcacatcgatatatcggacttaaaccagtatatatcttgatgttaattttattgttttactgctttaattgattcttgttgttcatactctgttcagttactgtttgtgatttgttaacattgttattgttaaccgtttgatcgtttaaagtttagttgattggattctataccactagttgtaatttttccacaatatcaaataattgttcaattaagatttgttttatttgttaatatcatttttaattgttattttaaattaagtctcttaggcaagtcagattctctctctatatattcattattcaaccatgaaaccaaatacaaaggggtgagcaaaaaatctaagaaatcgaccaaactgagtataccgactgtcaaaaaattgaaaaaaccatgccttcggttaaaatcgcctgaacatggtcaattttagtatcaatggcaaaccgaccgattaaatcgaaaaccgactgaacatatatatatagtatatattattttcctacatatttaatataaaaaatttaattaaactaattttacttatatctttcttatttaacgtcgtaattatttactgctttattttattataattgtatacatttacgtaggggtgttcattggatcacatccaatgtttttaggtctatccagatccgatccaa

SEQ ID NO: 244752 - DNA, 1163 bp, Cannabis indica
aacacatcaacgaacactgttagtaacagcccttctgatgtttttcttggtcagtttgtcaagcatatctttataattactatgatgagctaacattttcttatgagtcatcagattcatcaaaagaaactcagcttgagctctctgcactagggtttttatttcccaatgctatatgcgttgtaagttttgaatgcaataacctcagattcataagcttttgaacttatttgagactgatgaaactgcaggtatattgaattttatgatgcgatgtctgtaccaatggcaatagctctctctggacaactacttcttggacaacctgtaatggttaaaccttctgaggctgaaaagaaccttgttcaatccaacactactactggagtcacaggtggtataggaccatatggtgcagttgacagaaaattatacgttggcaatttacattttaacatgaccgaggttcatcttagagaggtagagtaaccatgtactttgctttaaatattaaggaatttcattgaaatatagagtggatatgaaacatatattgagtattaattaacatattaataaagaatgatggaaagtccctaagtcgtgtgcaaagcaagcaaattatatctataggcagtcaggagaattaaaagtgatggctatatttaagatatgtacttattttgctttagtttttcctcatatttgctttgtttatcaaactgatttctttctcccatgtggtaatatctcagatatttgaatcatttggtcctgtggaacttgtgcaattgccacttgatcttgaaacaggacagtgcaagggttttgggtttgttcaggtcagtggtaacttgctaatacttgtttctacataaggtcgtggttaatttatgtttgataatgacttgttcatctgttcattcttacattagtttgctcaactagaacatgcaaaggctgctcagagtttgaatggaaaattggagattgccggtcgaactcttaaggtagcatcttcttttccattaatcctttagcttgaccattattatatgtatgggaccatatgttcttgtagttcattgtttttcttgttggtagtttgttttgcctcttttaataaacattaactattctttttcttccaaatgagtctcaca

SEQ ID NO: 244753 - DNA, 1275 bp, Cannabis indica
tttaaaattaaaaattaaaaatatcttttaaaattattttttataaaactgtttcactttttaattttttaattgatcaaaattttgaaaacaaaaaaaaaagtcacttctaatatttttttaaatagtttttttttcttaattaatattttaaactccaactagacctagaccggagtcccaaactcggccctgacattggacccggactcgatcctggaactagacccgacttaaataaaatcaaaaaacaaatataaaataaattttacagaatacatttttgttttctgtttttaaaattgaaaaataaaaatagttttagaacgtattttcattttttaaaaacaatttatttgtaattaaaaaattaaaatataattaaacggcacttaaatataaaataaattttatttttttactcaaatataaactgagctcactaaataagaatattttcatgtattatgacatatgtaattctataattttcatcaagcatatgagcaactgacaaaaaaagatatattgaaattttgtctattataaattaaagtattaatctaccactcactaagggaaagtacctctcaatacatagtagccatattattttggttaagttattttttttttttaaaaaaaaaatctataatttgtctaattaatttaaagccacataatatattattttagcataatatcccttgaatttttattgttgagaaattgagtcactgaaaaaatggctatttattatgtcctttaattaatacttagaaaaattatgtttgtttttctttcaaggaatgattttgatattttttaaacaattatacaccttaaaatatttgtacacattaaatgtataaacaaattttaaaaaacaaatcacttaaaaactacgaattttgtttcagaaaacaacaaggacatctactacttataaatttcaaaagcatggttgctaagaaaaaaaaaaaaaaaagaagaatttctaaacaaaatgcaattttatgcaaaattaaaacttgcaaaacatattcttcaaaaaaaaaaaaacaaaaaaaaaaactttgaattggaatatagatatagattctttttgtggcacacaaaatactatgtttagttctagaaacatcatttatatttataataatatattatatgaaaaaattgaaaagagtaacacctgttgatagaaaaagaaataaatgtggcacttcagtgacctcctataacatattcccaacaagttttttttttttcttt

SEQ ID NO: 244754 - DNA, 583 bp, Cannabis indica
aaatatgtttagaataataaaacttgagcaatgggactgatcggcttacatcaaaaatgatgatgcatgggggtgggagcatgaggctccataagaaaagtagttggtattgaagtaaattaattatgagagtgaaaattttgattaaaaatcaaatggacagaactaatttcatgcaacaaaccttctacactcctaggctttgcacaaagctctttccaaaactccatgaatactaatatttggaatagaatgagtacttccaagcatagaattattgtcatatatgtgacaactcaattgttcttcaagattgtttcgccgtacagacaactctcattgcaaaactaaagacatatgtgttatagttaggatgaatttttcacttaaaaatacgagtacagtctcaactccaaattattagttaataaaaatttatatatatatatatatattgataataataaagaaaaaaaggactatataaataaacagttacaccaattattagtttcattattctacttaaaatttgtatgtttggtatcactgtacgcacagagtttgatgtgtgtacttgctc

SEQ ID NO: 244755 - DNA, 643 bp, Cannabis indica
ataaaaataaataaaataaagtgggtatacgaacgtaattctcggtttttcttttattattattattgggccgacaacccaatccaagccgaaaatgggctgagtaggccggctttgggctagctaaaagcccattcggtggagaagattcaaacacttgtcgttttacattattctctcgtttttcctctgtaggcttggcttggcttggcgccaaagcacttcaaccttgtttaggtttcattttggagttgatacaattttctattcatatatctgaaatcattatcattttgctaaagctgattttatgaaattttatattatgtgtaaaataaagcttgaaactttttatatcatgatgaaaaccttgtacaatcaatggtggaacccttagaaactgcaatccaaaattgccaactcagcaactgttcgttgaaattcctcaaagactagaaatccccatttacaggttagaatataggcaacagaggagggtcatcctcttcttccaatgtcaagcatttattgaaggttgagcacttagagaagttagcggttttgactggttgggaggtttctgtgtcttctttggttgcattctttggtcaaaaattggattctgttggggagtctttgggtg

SEQ ID NO: 244756 - DNA, 883 bp, Cannabis indica
tattttttacttttttactgtatttttttataagttttatactgcagtatactgtgttaagttttcactggtgttctactggtgtttttttagttgttctagtgttgttttgagttgttctgctttgtgttttaatggtattttataaaaacacagtatttttggaaaaaaatccgtgtgacagtaattttataaaaattaacctaaattccaatacttttgcaaattgtaaatgtaatgaaggcccaacttgaaggcccaacatgagctgaaatgtaaatgtaatgaaatagttgtaagcatacattactcataaatctagggaaattcttatgtgacccaaaaaagagtgcagtgactagtaggagtattcatcaaagtctctatacatagaaaaatatagttgtaatttgtattttctttaaattgtgtagtgcgatgcggtttacaatttgcaatctcatatttatagtttgaaccaaatcgcaccgcattatcattaaaattataagttttatctaagtttatatatgtgaagcatagccaaattaatcattttttttacctgattattacaacacaaactaactgtggtcttctctgccaaataataataatcattatagtgattcatacaaatattgaacaaaaaatcgttatttgaagtagtaccacagaactgattcacattcaatattaacttcgaattattaccatacattgttactattattatcttaatggtacaagatttaatatgttggtagttgaatattatttttaggctaattaataatttttctccttgaattttgacatatactaaatcgtatcccatgaatttttttgaccgttaaaaattcccccgaactattgagattgt

SEQ ID NO: 244757 - DNA, 1325 bp, Cannabis indica
gcattgcacataggtatgatagtcggtacctagaatttcacgttcaaattagttgtactaactcctactatgggatagtcgagcagtatgggaccatgctgggtaggtcaggtcatatagattagagctgggatttagaaccaattaattcctatgatatattcaggatcacaggatgtccagattttagtgaatattatagtcctccttcttcatcttcttatgattattgtaaatcccttagatgggaaataatttcccaatttccccttttacttgtttttaacaaatgttaacacattgttctgtcttgcagaaatggatctcgaggaccttcttcattcttcaagcaagaaggtaaaagaaaaggttgacggctttggaaacttcttcggatatcaacgtggagcccctcaaaaggcccaggaagacaactgccaacaagaagcaagcctcacagaccattgaccttgaggcccctgagaaccaggttcagactcaccctccggccctcacacatactgaagagcccattcccaaagcaaatcaggtcgcagcctcttcgagccaagcgcctgagactctacccattgaggttgggaatgctggctcagagcattgtgtgcagtacgatgtggcttgttggcgtcacctccggtccttccttcccaacgactgggacttgataaataatggaagcctgaacgagatgctcgagaggagcgttgcctttggcctctcggtaaatttctttatccttctcactttacttctctctttaacaaccctaagaaatacttttgcatttttgtttatttgttttaagcaaactttcatctcctttgtggggtctggacatgatgaggcaactggagaacgagatccagaagctgattggtcaacgcaaggtcgtgtccaggtaatggaacgaggctcagacggagatctctcgcttaaataaagaagtcgaggaggtgaagagggccaacaaagctgaacttgaagctgcttagaaggaggcgaaggacaagtccgagctatgccagaaactccatgaggaactcaatgcagccaatgcaacactcgaggggaaagaagccgacaccaaggagcaatgtaatgccattgccaaatgctccatctatcaagcttggatggcgaatccagaaatggatttgaatttcctgggaaagggcatggaggaagtcctcgcttactgcgagcaagctaaaaaggtagaagaggaagccgaggcagcgggagaataagaggaagaagaactatccaagttcctactatgtagacttagtctttaatcatctact

SEQ ID NO: 244758 - DNA, 2922 bp, Cannabis indica
ccaacctggtgaaacaattaaccggttctacaaaactagtagaactggttaaccggtaaccctaaaaattccatatctctctcaaaacattcccaaactcaaccaaactttttcagtatacctataatgtcacccaacaacagttttcaagcaaaaataatagcaaaaatgcacagaaactcaaaacaccattattgaactaagtttgaatactcaacaaagcaacaaaaaccagatgaaattaaccttaatcaacttagtgtaacaccagatattcaaccctaaattcaacaaatccaaacagaccctaatccccaacttgtatactcaaaaccaaaggaaacctttaaacaaacttaacaaaactttgagagaactagaatagggttataccttggattaaacttcttgaattcagctagattacccttgaaaattggaagaagttgggatgaattcttgctggtcctcttgtggcccaatggttaaaaagaaagcaagagatggttcttctctttacactaggttttgtttaatcacttgattttcccttgattttctagctaaagatgattaaaaatctaaaatgagaccttgtctccttagggttcacgaaagaatgagagagtaaggaaaagagaacttgattttcatgcttatccactaaaatattactattcctaattaataaaaacaaaatcaaattatacttaacaatcctcacttaattcactaaaaacaaaataagaaccttaaattaaatagaattcccatttttcccttcacttcacacccaagcaaacttaaggcttaggggtaaaatggtcatatatcatcaccttgcctaaactcgatactccacatagtgacatgtttatctcattaaataaaggttttaaactcacccatgtgactctaatgaccatccatcacatttttcatcgttaccgaacaaaagtcatgaaaattgtaaatgtcatacatatcaagaataatacacttagagtttaataaaatctacaaaattgagaaattataattctaatgctcatttctaaaaatgggacccacaacataattattcatatatagttataaaagaaagataattaatgctaattgccctactaatctatattttaatcatgtggtcattacaattatcctcctgttaaaagaatttcgtcctcaaaatttaacttgaacaactctggatattgagccctcataccggactctagctcctaggtggtttcctccaccttactattcttccagagtaccttgaccaacgatatggtcttattctgaagaatcttttccttcctatcgaggatttaaattggaatcaaactgtagttctagggcttcatagctcaagacatgagttgagtctgatacatatttcctcaatattgaaatatgaaatacattgtgcacaactaataacgtaggctatttgatatgctaccaacccgaccttctcgagtatctcgaatggtcctatgaacctagggcttaacttgccacactttccaaaacgctttacactcttcattggtgagactcgtaggaaaacatattctcccacctaaaattctatgtctttgcgtttaggatcagagtaacttttttttcatgctttgcgaagcaagcatccgagctttaattttatctattgcctcattagtcttttgaataatgttgtaaatataggtcgaactatttaacatgatacaaacacgatccgacacgcaaaaaaatatccttaggcatgacacaacatatggtgttgcaattaaattgataaaagcacgacacgacaagctcaaaagcctgacacataagcacaaatatattagttcaaaagcacgataaatttaaaatctcaataatttgataaaaataacaataataaatatttatttatttatttattaaaatgctatttatttttaaattttaataattataattaattttgtatataattgtgtgtaattattgttaaaaaattaatataaaagtaatttaagctataaaatacacatatatttaagtaattagcttctcaattgtaattaaaatacaaaaacatagagcatgaatttgagcccgtataaaaaaatgagttagtctatttaagaaaatcgaagtgacctaaataaagcatgacacaaattcgagcacgacacgaaactactaggcttgctttgctggccatatagcctatcctataaaattattaacacgacacgacacgacacgactcatatttttatatggcgtacaacacaatctattttttttttggaccagcactacacacaaatatttacaactctatctcaaaacacatatgtgattatgattttggatatttatggtaaataatgatgtgatttcggactataattagctttttggtgtaatttaaatgttcccaacttgatttatgagttatagataaatgtaaaattagaatatgcttgagggtttggttggttgtacttgtatgcatacatgttacatgcaacacaacacattaggttgatgcataataagatttccatgagtctagctatggctaaatctaaattatgcttgagtagtagtgtgattgttgagactagctcgttaaccacttgaggctagttcaagtggtcatagaagagtgtgtgtgtgttggaggttttggattcgagtcctaaattatacatggttgtaatatataaacgtttaaataaaaaaaaaaaaaaacctagctcgtttattgatatgagagaataatttgttattgtattcctacaaggttaggtcttttggtagttcttcaactctgagatataacctactagtttagttcctagtctttattctatgtattgtctaatgctttagtctacaccttaaacgtaagaa

SEQ ID NO: 244759 - DNA, 1008 bp, Cannabis indica
agagtgtaatttcctcttaaaaaaaactatagaaaaacaaaaatttttagacccaaaacactctcagttccggtcttgccttaaaagcagttggttatatacaccctcacgtctaagaacaaagacttttgatgatgaacaaaatgcaagaggcttaatttgtcattgtatttagagcaaagaaagaatgcaacacccacaatcaatcttattggtcaactacataataaaacgaaattgtttatacaatttcacgacatatctacgtaattggttactcgatttgaaaaataatttgtataaaaattggttaactacctctttaaacttttggtcagaaaaaaaaatctcttcaaagggaaatttatgaaataatatgaccttaatacactgaaggggggcgacattctttattaattatgagttgagatttagatgattaaatgtagttcctgctattatttttgttctgtgttacttatctgtatcactcaaaataaagtttactcagtatgatgtcaactaacaaagtaccaatctccacttgtagaggcttggatgcaatcctaagaaagtactggtggtgtggtaacatggaaaaaaaaagataccttgccttaaagtcttgggacaagatatgccagccaaaatcggccgggggactcgggattagacgctttgaagacatgaatagagcacttatcacaaagttggcttggtgtatagcaaagaaggatgataagccttgggttaaggctttaatgcacaagtattgttcgactgataacttctggcaggtacaaaaaaaaccaaagtagattcttacctttggaattgcattctagaggtgagaaacataatcttaaaggggtctatgacgttggctgcggatgggagttcgattgatttttggaaccaaccctggattccctggttggatcatactgagttcaaggaactcatggacagacttaagcttaagagatcacggtcagacaattgctgata

SEQ ID NO: 244760 - DNA, 1516 bp, Cannabis indica
acacaatctgataacactttcttcacaattgttaaattcagagacagaattatcacaaaaaacctttgcacaagaaaaatcgtttaactcaaacataaaagagtcgtagcaaaactgaccttcaagagggcgaagatggtgaagacaaatccagaaggtgcaacgatatttagggtttcaaacggagaactgaaggaggcgagtgaagatttcttataaattcgtagtaattgatttctaaaaccctagttcactgaatttaccaaactaccctatctctaatgtctgggcctatattcagtgggcttcagtacacgtaatttataatgggaattttaccctcaaatgtattttttttatttttccatatttttaccaatttttattttttacacatgttgttttttacaaaattttgtttgtatttttcaaaaaataatgctatttttatgtagcagcaatggaaaaacaaccaaaaaatacaactgtcccaacttttaataaaataaagttaaaattcgtaaaaatattaaaataaaaaaaactgtagattcgtattaaattttttgtgaattttgtgtatttatgaaaatattaaaaagaaaaaaaaaagtataacagtgaaaaaatgaaatccagatttctgaacaaaaaatatttatttatggtaaataagtttaacaatgagaaattggatcaaaaaattggtttaggtacttgctaaagtactacaaatataataacatgtgaagttttacttttaagtattctttttgtctatgtcaaaatccctaaatgactctttctaatttataataacaaatttttcttaaaaaaaaagtattctttttttttttaggtttgtgaaaaatataattgaaaaataataatttttatctaatagttagacaattaatcagttaataaagttgtagttagatattgaaaaaaaaaatgtaacagtaaaggtttcagatttcaatatttaataaaagtgataattatcaaaatttcctttcttttatatctacgggcctttacatatttaaacgaaggaagtaagcccaaatcatatttttatttgtattttgagatttttacaaaatactgaatttttggcaaaaaaattacaactttattgttgcgcaaaatattttacaaaaatactatctttttataaaacaatcataaaataacaaaacaaaacatttaaaaagaacaactaaaaaaaaaatcgtagaacaatagtgcaaatttaacacaatacatagtataaactttacacgatatttttgaaaagaaacacaataattttgaaaaaaattaccgctccacaataaaaaagttaaaaaattacagtatttggtgtaaaaatctctttcacaccgaagaatatttaaacttttttttttttgaacaaagaatatttaaacaccttattattaaaaaacgaaattcaaattaaattatttttatatcaaaaaaataatactttttttacattatattatttact

SEQ ID NO: 244761 - DNA, 652 bp, Cannabis indica
gtcccttaacttcaattaaataaaaagtgtctgatttggtagtgttaaaaatttgaagggcaatatagaataatgatagtagttagaaggataaaattattaattatttaacacaaaagtcttatattttgaaagtgaatagttactatctctaataatttaggaagatgatttttttgggccaaagttatttttaaacaagataaatgaaaattaacatgtgacacttatttcagccatttattatgtcattatctattagctagttttatcattagtattttgactaagctagctagtctagaatagatcaatgtaagggtgattttgtaattttggaaaaaattagtcatgctttgtccaattaataatcaaaggaaaatatgaagttgaattctagaatcttgcatggaatatgaatttagtgttgatttatggtcctactttgttggagacaagattatgtgttgttcataatacacactctacattattacatgcacttttatgaaagcttttcattttttatttaatcattctacccaattttatttatttttaaataatatataaaaaataaaatgctgacatgtaatatatttaggagttacccactttaggcacttaccctttttttttatataataattta

SEQ ID NO: 244762 - DNA, 3224 bp, Cannabis indica
tgaaaggaataaaataattaaaagcttctcgtcagtatcgaggcctcaagcgaatgggctagtagaacctattaataaaaccttgaaggatactatcaagaagaagttagacactgccaaaggaagatgggttgacgagctaccacaagtgctctggacccatagaaccatagacaaaacaacatcagacccactctattttcattggcatttggctcgaaagcaatgtaacctgtagaagtaaacattgcgacccacaagggtgaattctacaatcaagatcaaaaccaagaatttctgaatatgtcgttggatctgcttgaagaaaattcaacgagtctcaaataaccaatatttcttatcaactctatatcacgagatactttaacaaaaaagttcgaaagagactctttaaagtaagagatttggtgtttaagatgtgtatttgcaaaatacgcaagatccaatagctggagtgttaaacccgaactaggaaggcatgtacatcattgaagctatagttggaactggactttaccaattatcttggcttagtggctcacttataaaaaaatcactggaatagtgagcatctacaaccttattaccagtaatttattatataatgatgtattaatctttataatagtggtttattattctgaataaaaagttgaatatttcaagtaatcataaagttttatttctttaaaattacatgggggcatatatatttataataactagatttcacctagaaatatatacaaaaatgctaaaacctaaaaattaaatttttttcacaaaggaaaggatgattgattaaaattatcttaagacaatacaaagtcaagaattgaaaaaaccttttctttaagtgaaagttaaaatggcagttgtaaatgagattttttctcataaaacaacaaaaaagctatatgcgatctgaatgaataacggcttgcatgttatagcatgtattataaacgagataccaacgtgtcttgaaaaataatagacaagctaaaatatggatagaggattaactactcatacgagcaaccaaaaatatttaaaatagttcttaaaagagtgttccaaaatatttgaagtttgctctaagcatagcagactagtaactgctcccgaaagacatataggattgctaactactcgcgaaaacatggaagaatataaactactcgcatattaaataacattggtaaacctaaaatatcccaagctaaatcaagaaaagtgttttgttatgaataaaaatgcaataaacaaacattaataactcgagcaaagcaggataagaggcataaaagtaaatatttatatattagcaatgttgtccatccaacaaaccaaaagttaaataatattacaaatgccgcaaggggcaaaccatcgtctcgggctaatggctattatttggaaattgaaataaaaatcactaagtttacatggttggtgacttagtgggttcttcttcttcttcctcaacctcttcacccttagcatcctctgcctcaagttttttggtctgcttgcaaaaggctaacatctcagcggctccctttgccagaaagctcaagtccgtaattggattttccacccaagctcgattaaatgatcatttggcgatcaaatttatcctagctatggcattttcctcagcctattcaagctttttgttaacctcgtcaagtgcttcctgggtcttttgtttggcctcagtgagatcctcagcctgttttttggaaacatcgagttctgtcttgagagttttttcctttttctcgtgctcttccacctacttttttagtcgagaaatttcagtctggaacgcattccattggtttgcaaggccttcgcattgatcatttaatttgcgaagcttagcgtttagctgagtgatagtttgaagtcccctttggtgagcaacaaagacagaaggaatgcctacaaaaaatgagatcatgatagaactcatgaaaataaatataatacatgaattcaaaatgaataagaactagctgagtgcatgagatcattgctccttgatgtcagactttgataatcacctttgttgatcaacttccagtcctcttgttgaaaatttttatagtgacaccagccgttggtcgcatgcagcgagcatacttgcgagccctcaatacatgtaaaaatgggcagggggcaagagggctcctagaaggccgtcttaggatgaaatctagagaatttgacctgatgaactgacccaagagctggttcaccagagctcgcagaagttgggataggaggataaattggagccacctcaggctcaataacaagctaatttgaggcacgcttcttattggctgtcgacttcttcaatgttttttagaggttctagtttctaccaagaagcagtttccgacgcgatagacctccttttgcctttcttggaatctggggccttgataaaagattcttaaagttcagatctgcgagacaacacaagaaaaacataaacacttgtgcaaaataaacaaaaaatatgtggtgagatagtctcccacttaagaaaattaccatagtcatcagacgataaagagtgccatatttattgggaatcccaaaataagaaccgttacaacttatttggacatgatgcttgggataccaactatcaaacatatgggaagtaagatctacacaattccagatataaaagttatatcgactttccctaaatttaactagtgtaatttgctcggctctaagagttggggaccatccacaaataccaaagttattacatgaggaggcatcatctttagcttcctaaggggttgtgttgtttagataatggcaacgagccacatagtctttgtcctcctcgtcgacaggaacaggaacttgttgccagtctaaaaaaatttagaccttgaagtctccagtagattgatccttgccaaggagggcgcaagccatcaaattaattattctcgtgcaataagaagtgtgccgcttgcaatctaaaaggaaggccaagaagaatcatgtgccttatctcaatttcaggagttggaacaggtctcgtagtgatcgctgtaacacaacaaataaacaaatttaataaactatagccaatgcgcattgaattaaaactcgaaactaagtttttgagaaaagatatacttacgcatgatttgaaatttggtggtgtt

SEQ ID NO: 244763 - DNA, 2511 bp, Cannabis indica
gcatgtttggacaggcaaaacaccgcagctactctcagctcccttcaagccaatttttccaatcttcaacaccttaaatccactaccaaaaacccacttaggcttccttatccaccagtaaaccccttgccaaacagacttccttaccttcatgctctagctccttgtcgacctactgctctgaataggagtcaccaaccttttttccccatcacctcacaactgaccccttatcgccccaaatgttagatttgcttcaaactaggccatacatcgccctattgctatccctacacaaatcttcaattcaccccttcaccactaccttctatacaattcaatgcttatctaactcagcatactaattcacaagctttctctactgttttctctccatacccaactcaaccattcacatctgctccaccccccacgaccttctccttcccccaccattcatgaccccaactggtacatggatttgggtgcctcccaaaacttcacccctgacctcaatcttttggaagcttctcagccatatcacagaggtgctgggaggtaaacttgacacaatttgagaaaaaatcattagcaggtaaagttggatatgaaaatggtatgttttctccaatctctaatgtgggttatgtaaatttacctgctaatgattcttttctcaaatttttccaagtttatcattctccttccatatccaaaaatttacttagtgtctctaagctttgtcaaaataatgatggttatgttcaattttaccctcattgtttttatgtcaaacaccaggtcagccacaaactccttctcacaggtcttcttgatcaagggatctatcgtgcttctccatcttgtttgcaaccagcctcttcatcatcttttatccagcttctcctatcttccaaatcagattctcacttctggcattctcacttaattaggccatcccgctagtgaaaccatgtctaatgttgcttccatatgtaatttttcttttttcagaaaaacatgttagtagtacagtttgttcgacttgtcaacttggcaagtcgcaccgtctttctttttctaattatgtatcttgagctcaatattcttttgaattaatacacaatgatctttggggtccttcccttgttaccgtaatttttggtatttattattttgcattgtttattgataattattctcgctttacatggttttttttactcaaaactaaagatgaagtattccaagcctttcttactttcaaaataaggatttcaactcaatttaatgatcaaactaaaataattgttcagattggggaggggatttttgttctctttcaacttttttctgctctcgtggcattcttcatgaactttattttcctcatactctacacaaaatgggcattgaacgcaaaaattgtcatattattgacacgagtctcagtcttctagctcatgcttccatgcccaaacttccaaccttatgctttctctataacagtctatctcatcatcgtctcctcactcgtgtccttatactatgcagtccatttcatgttttttatgacaaacttccctcttatgctcatttttgtgttttcggttgcgagttttttcctttcttgtgcccttacaacgcccataaacttgaatttcgctctttcggatgtgtctttgttggatatagtagccagcataagggctacttatgttttcacccctccacaagtcacctttacattactcgccatgttatatttaatgaacatacgttcccctttactttctcctcttttatttcctcgcgtgttacttcccctcatactcttatcaatttattgcattttccttcttcaactattactcccactgtccaatctctctccctgtcccttactcctatacctaatacttccactcactctccactattaactactccttccactccacacacagtcttcccttctctatctccctcttattgaaacactttgactccttctagccctccccctactattccattagcagtagagttgcatggtcttctagagcatgccactacaactattaatttacatcacatggttactcatgctaaagtggacattcataagcccaagttattttatagtgtggctggaagtacaccagttaaaccctcctcttttaatgaagcatccaccaatccaacttggctttgagttatggacaatgagtttgttcctttgtattcctaacgtgcttggatcttgctccctcttcctccttgttccaaagtcattggctgtaaataggtataccatattaaactaaattttgatggtgcaatagatcattacaagacttaccttgttgcaaaaggctttcattagactatgggtttggatttccatgagactttcagtcttgtcatcaaacgaaccactaagtggttgattttatctttagatgtatctttccactggcccatccaacatattgatattcaaaatacctt

SEQ ID NO: 244764 - DNA, 2404 bp, Cannabis indica
taccattcgtttcctttaatgccatcggcgtcggagctcctgagattccaaataaaagagctttccaattaccaaactcaacatctcatctctctaatctccaccgtccatttcgtttcggtccgtttcctattcttctcctcatttttcactatgcaattctacatctctccaatttttttatttttttatttatttgtaatcgactctcttttcctatcatctcataagaaaaattcactacatctgtcaatctattttttttaacgaacaaacattttattgaaaatccataaatgaatatgaaagaaacaaaattggaaaaatcatctaaattaatttactttccattctgggtccacgcacgactaattcataaataccaacttgaattaaaaatacttaaaaaatattattaagtaaattagtaaaataaatctaaaaaaaatcttaattaattcaatacaaataaaaaatctcgtaaagagtacaaaaaactaaatcaaactgttaatcttttttgacataaaccgtcaattttgaaaagagtaaaaaaaaaaaccatgcttcaaagaccaatccaacactattattatagcaagtttgagcaactgggatattgttcaatattttcgttcacaaatttaaacaacccttcccttattaaccttaatcatccaatgctactatatttatatctataatatataacaagttatcatttatcatttttaataaattgtatttataaaatatatatcattcaaattatttatattttttaaatgtaaatcatatagttattttaatttattaaataaagaagaaagtgataaataactttaaaattattgcaaataatgcacattttttagaccaaataattatgatgttgatagaatacttagttacttttgataaaatgatcaactttaaaataaaaatatctcatataaaataacttttaatttttaaattaattacttttaaaattttatgttcatttattatttatattatgttgcttttcttctcttttcagtaataaaatttatgttttcttcaatccgatttaagaaattaatattttacaattaaattaaattaatcacataatttattagcaaaaattttaaacataagttaattattttaaatttatattatgatatcttaatattatttaagatatatttttggtaatcttaattttgtgtaaaaattaattaaatatcatataataacttttaaatatgaataccaaataatgttttagtaactcttagacattcttagttattagtttgccttgttagttataattagttaggttcataactaattctgcttgttagttggttgctgatgtattccactcttcttgtataaataccatatattcattaataaagattaatcaaatctactttcactaatatggtatcagatgcttaaaaatcttctttctctcttcttcttcatcttcatcgtctatactctgttctgccattgatattcgccatggttcgaactcgacctactggttttaggagttcttgccaaaattctctgccaaatacttcttcgacaatcctagatgctccaacaaacgacgatcggatcattcctccagcttctgcaatcactggagaaaacaacaataaccagaatcttcttcattgccctgctcgtgaagatagttcgagtccatactacctcaattcaggagatcaccctagcctaatcttggttactccaccactttctgatcataatttttaggcttgaagacgtgacttcaaactttctactggagcaagaaacaagactgtgtttctgaaaggcacattacctcaacctccgatcgaagatcctcttcatcatcattggcttcgttgcaatcaaatggtgatgtcatactgaactcaaggtaatggccctagaatctttaaacttagagaaactcttatcacacttcgacaaggcgatgattctgttagttcatattttacaaaacttaagtgtatgtgggatgaaattcaggaattgagaccacggattcattgtacttgtgctgcctctgttgataatttggctttcctcaatcaagaacaggttctccgatttctcacatggttaaatgaatctttttttattgtttgtgcacaaattcttcttattgatctctttccatctttgtctaaagctttctccatggttgtccatgaagaaagacaaagaaaactcaaaaatcctcaactcccacttatggcctctgtccaagaatccactcaaccccctaccgctcttgctcaaaatccatcagcttctgcaacatctactaatcctcgtccaaataaaaagttgagaccctactactctaattgtcacaaaccaggccatt

SEQ ID NO: 244765 - DNA, 1190 bp, Cannabis indica
cctccaacactcacacacccacttatggccacttgagctagcctcaagtaaatcctcatataattttcataatatcatatttttcaccctaattaaaaaaaaaaccgattttcccatctaataaataaaattaaaaaagaaaacttcatgcatataaaaaatcaaataacattttttccctcacaatttttgaaaaaagtcccctaattctaaaaccaaatcgggttttacccacccgagaccaatcgggtcaatcgtagctgatcaaaattagggttttacaatatttctatatatatatatattcttcttcttcttctgttctcaatccaatcatgggacactctaacgtctggaactctcaccccaagagctatgggcccggttctcgcacctggtaacgatcccttccaattcaattcgttttttttttaattcaaattcaagttatttcttttttggatatttcgaacaaatctcaatttgatcttctgatttttttttgatcgaattgattaaacagccgtgtgtgtggaaacccccatggtttgatccgaaagtatggtctcatgtgttgcagacagtgctttcgtagcaatgccaaggagattggactttcgattaaggtaacaaagtaaaccgtttttttttttggattatcaatttaaatttactctaacgatcttgtgcttattgctttgaatttcttcttcttaattttttttgcagtaccgttaagagggatttgacttacaattttcacagtgggatgttttggcttaaagaacaatcttatttagtttttgtttttttgttttagatctctttcttaataagaaagattatcctttttcaatgttttagtttgttacattgttgaacttgaatttgatttggaatatgttttagtaaaagtaaatttataagttcattgtttcatacttcatttattctttattttcaagtttacttttttcttctttgtgcaatgtatttgagtttgatgggtgagaatttatactgaattagtatattgtggcaatttgagtgagtttttctatgatggtattttagaggttgcctgcaatgggctaatatcggtctcatatattttaaattaataattattataaaaaatctttaaccctaaggcgtgtgatggtgttgtgcaccactttggcctaataata

SEQ ID NO: 244766 - DNA, 1070 bp, Cannabis indica
gattgatgggtactacctatgtcaacgaggtgcatcttattttcggtagcaaaactccaatgttaagtgcgttagaacttattttaccagaatctaatttactatcatgtatgtttgattattaacgaaataatctaataacgtaaaacatgtttcacaaaatgattaaatagagacattaatgttgaggatccttacattggttgtagcataataaagttattctttttgttcaatcactctagcctttgatttctatttctgcagcagagtatttccaagtgatgaacttaaaacttgaactattaatttgatcactcttctatacagccttccacgaagacctaagtatcacactaactaaagtgtatttaatcagtgtatggcacaaaaatcaaagagaaatgagggagactaagttcaaaattttgatgaaaaaaagagagctttttcttgtcaagttttgattgaatgacttatctgacaaaagctctcatcactttgcttttgtactactcacactagtttaggtttagattaaatggaccaaaataaatgataaatgggctcattaaatgacccgtggtcgaaatcatataaactatatggtggcccatatttaattttgccattttatttcaatctaatcttgattaaaagtattttatctttttcaaattttaccattcattagatctaaactatttaaattctaattttaatttaataataattatcaaataaaatataatttaaatatagtcattaatttaacccataaagtgtgataattaacgaataaaatctaatttctcttttcttcttaattttttcccaacctaagtgaaaattctcaaattagacatagtcaagtttcgaatttcaattgattgagtcatcaagatgatattatcccaggtaatgtggggactatggacttataaaattaagctcccattaagttgatctaaaatttactgagtaaatttcttagcttattaattcctcatgacttcattatagactaggaattgccctcttgaatacatagaatactctatatatgcaat

SEQ ID NO: 244767 - DNA, 973 bp, Cannabis indica
ttatgctgcaaacatagataccaaaagatcactaattggactagtgtttatagtttttggtggaccattcagttgaaaatcaaacctacaaaaggtagtttctctttccacaactgaagcagaatacatgacaatgctgaagccttcaaaaaagctctttggctaaaaggtttgacaacagaacttggcttaaactcaaacaacataaccatatactatgatagtcaaagtgcattccatttgattaaaaatcctatgctgcatgaaaggtctaaacatatagacataaagtttcactttttcagagaaattgtagctaaaagagaagtttaagccaagaaaatcagcacagatgaaaacccagctgacatgttgacaaagagtgtaaacttaaccaagctcaagcattgtttgaatctattgaacatctgcaagtgctgatgcctgtcactcaattcatttctgttacacatcatatcttttctaaacttaacatgtctaaactaaggtggatttgtggtgtttagttcatccatttatgtttatctatgatgatgtgtcactaactgttttaacagttagtacccgggttaaataattaacaccttttaactaatccctactataaatagaccttgtaccattcacttgaattcatgttgtgagatcagaaaacttagaaagactgaaaggagggttgtaaaaggggtctaagtgtatttgatcttggttcccccaatgtgattttcatggtaatttttgctcaacaattctccattgtttcaagtctctcatgtactgattatcaacatcaataaaaggtctcttgttattaattcttttagttacatttcactctgttttagttaattgatattggttgtcaattgtcatcatatcagtttgtgatcaaactgtttagttatattgttgttattttgattgctgtaatgattgcttgatcgagtttttt

SEQ ID NO: 244768 - DNA, 1224 bp, Cannabis indica
aaagagttttatttagggcataaaacccaacagtatcatggcgactcatgacatggagagtagaactaggtgaattaggcatataatacctccctcgaacagcggttaagggacaggtgctacaagattttgtagtaaaatttgttccaaaacctgtttgcaacggagaaaaattcaaaaaccaagaatggatactaaaagtctatgggtcatctaatgtctttggggtggagtcagaatagttattttgtcaccaaacagagaaatgcaagagcactcactcaaactaggattcaaagtgaatgaagccccaattcaagggattagactagtcaaatagataggggcataataaatctcagttcaatctgattactagttaatcgtgcaacaagtcaaaggggattttgaagcgaaagaataaagaatggttagctatttggccctagtgaagaaattagcgtcaacttttaaacattttcaagtaaaccaagttctgtgagaagcaaacatgcccgccgatgctttggccagactagggtcctcttccccactccaaattacccgaatgataccattcaacttcatccccgagcctagcatctcactagaaaaagaaatttaatgcacataaacaatgttggagcctccagaagactggagataaccaatcacataatatttaaaggaaataagatatcgtaggatccaaaggaagctagaaaggtgatatcacgggcctcgaggtacacactaatacaagatgaattgtatagatgttgtggtatttttaacacgcaagtatatgtatcgttttaataagtaatactcaagtaagtgagatcgttcctatgagggctgtagctaagtaccaatcaattgaattcttgtttctatttggcaatcgaatagataaattttaaaactaaacaaaccaagaaaaataaataagaggtttaacaatggattcgaaattagggatgtgattttaattgtatctatctattatggtctaacatgattcaattcctattacgaaattctatataatagcatgtttactcaagtaattatagtctactcagatatataaatctcagttacatgaaaattttccactctcgtgataaattaaacatgcaaaaggtattaaacacataaaccctataagctatccaaaccacataggtactctcgtcctatatcgaaatttgttcctatttc

SEQ ID NO: 244769 - DNA, 1153 bp, Cannabis indica
agataacaagcgtaaaaatgctccaaatacgattcaaactcaattaaaaatatatttaacttattctaaaattaatactaaaaataacctaacacagtgggatttaactcttcatcgaaatatataagcatgagatctctcattctctaaagatacttgagaatgtttttcacatttatttagtgttccagacttgggttcgattggtaatgactcacaatcactactgcatattaaatgtcaagccttgtacacaacatcgcatacattaagctcccaacttctaatgcataagtgtactttctcatgtcctccatatcttgatgagtctttggacattgattcttgtatagtgaaattccatggctggacggtaactgtcctttcttagaattctccattgagaatatttctagaaccttatctctataagttgcttaagaaagttttaatgctcccctttttctatctctatagattttaatggcaagaacatagcttgcttctcccaaatccttcatttggaattgttcggctaaccacttcttctgataacctttctccattgagtcctagaaatagaatgtcatcaatataaaaaacaaggaatgctactacattatctttaatgtatttgtatacacaagcttttttatcgttctgttcaaagtcatactctttaatagtcttattaaatgcaatattcaaagatttagaggttttcttcaatcgatatatggatttaagtaatttgtaaacctttcgaccttcccctggttgacatacccttcaggttgttccatattaatggtttcgtcaagattgccatttagaaaagcaatcttaatgtccatttaccatatctcataatcataagtggtaactactatggatagaagaatacgaatggatttaatcctcgccataggaaagaaggttttgtcataatcgacgccttctcgctgtgtgtagcttttggctataagcctagctttaaaggtctctaccttcccttcaacattttttctcttcttaaaaatccacttataccctatagctgtaacatcttcaagcgggatttcatattcctagactttgttggtgcgcatggaatccatttcttgatccatggcattgttccacttgtctgagt

SEQ ID NO: 244770 - DNA, 691 bp, Cannabis indica
tcagtgtgtgcttttggggtaactctttgagttttctgtgagctagtttgagttgcatttggaatttgcagagattagctaagaagttaatgatggtgaaaattcttagtataggttacatagttaacatattgcataatggtaaataattatgtcatttctcagtagagtaacagagccagcttttagtacaaattgaggttttactttgtgagatatgaccatgttatatgtggaactaaaatcgttcatttctatttgttaatctgtaatgtgtagttttctagaaagtattgtaatgaggaaaaaggttagaacttttattttgaggtttctgaatggatatgtaaggttttaatttaaaatttggggagttgaagcaatggttctgctggttgatatgaagttgtgcaagaacctagaacggttgcaaatgtaggctcactaaatgctggtccaaattcgttgttgttgttgcaaatgatattgaaatttggttttctggtttcactgttttggtttagaggtgaatttattatgagaacgagttatccattttcgaatcttaaaattagaaagtggtatctgctagttactgcttgttggttctcaatgctggatttctaatggaaatatctgtattgagtggagttttatggaacctagagtgagtgaacagtggttttgttca

SEQ ID NO: 244771 - DNA, 964 bp, Cannabis indica
aattagttttttaatgtttacttaaatttagtataattataatatgcggtcgtggttatattattgtattattatttatgaaattttacttttgaatttaaaattaaaatatatttatattttataatatgaaagggcgcaattacatgcgccggtaaaacttttccgtgacctccaaaattaacaagaaatattttactggagaagttaattctgctagcaaaactttcccgcaaagtagaaatttggtgggaatgtcttgttgatgacttatctcgtcgggaaaacatcacagaataatcaataattacctcaattgtcgtagaaattgcggcagctacttttacgccggtgacatcactcgtcggcaaaagtgaattttcccaatgaagtttctttttttttgccataatcctttttcccggccgtttattgcagtcaactattgtcgtggggtgcctcaccggcgaaagtttgtcagtggctttagttagtttttgtcaacgcaaaagctcgccgaccaaactctattttattgtagtgtctatatgtttaatgattagtgttgaaagtcttcttaacaatgttgatagtgatattggtgagttccgttagtgatggcagcagtacaaaatgatttcattacaggggagaccacgagtacatgatttttggttttggataatgaagattgttgtggtattaacctatgttcgacatttaaagtgtagacaagaattgtcttgatcatataaatatttacctaatctattaataatttagtatgagaccttttaagaatgtacccaaaaataaatctatacaaatagataatatactaatataagaatttattaaaataggaaaatttacatagtatactaacttttactatttttttacaagaatattgccaggcagtattttttttttaatttttaattgtgttttcttataagtttca

SEQ ID NO: 244772 - DNA, 1955 bp, Cannabis indica
tgataaatatccaaaattgagtgtcaatcttgttgaatctgatactagaatagatcttaataatcaatggacttatgaagtattttttgctcacttcaattaaaattttagagaggtccaggagcttacaaaagtaagtttaaattaacccctcaccctattcatcctctggttattacaacaatagaggaactaattctagctacacgtctcgaggtggatccaccattcaacactagaagaggccatcctaatactcagcatggtggaagggtttttgctacaaacagcaagcctcaatatcaactatgtcacaaagttggacacatgtctcttgattgcttttatagatttgataaaagcttcacatgagcattaacaccttccaatggatccaataccatacaagctcatgtagctcagatatctcaaagtgcagacacaaattggtaccctgacttaagtgaaccaaaccactgcccatctaatatgcacaatctggtgaatggttctgagtacaatggacatgaaaggctctatgtgggtaatggaacaagtttggaaattcagcatactagccatgcatttttttaagtctaacacctttgataaaaccctgatccttaaaaacttcttgcacatacttgatattactaagaatcttctcagtgtttctaaatttactcttgacaatgatgttttctttgagtttcaccctcttgtttgttatatcaaggaccatataaccaaagccacaatcctgactgggactctccacaatggcctatatacttttgatccaggtcaatttcaagttgtgtcactaaatcaatcattcaactcttgtccagtttccattcttggtgatcaaaaaatatttatctggtcacttctggtacaagcacctctgagcctagtgtcaattcttgtagctattataataattcacttgtttctctttttgatttgtggcatattagattaggtcaccctcaaaaagagttgtgcaaaatgtaatgaactcttgtaatatctctattagaaataataaaagatttgtttttattttccaagcatgttgtttaggaaaaactcacaaaatgtcctttcctaaggagtctcacactgtgtattttgaacctctgcaattagttgtctctgatctatggggaccttctcatacaatttctcataatggatacaaatattacatgtcctttgtaaattctcacactaggttcacatggatttatctactcaaaactaagtctgaaactcttaaaacctttctagactttaaggcagaaattgagctccaaataggtaaaaatatcaaggtacttcaaactgattggggggagtatagatctttttctgaacctttaattaaacaagttgggattattcataaacatccttgtccaacaactcataaatagaatggcttaatggaaataaaatataggcaaatagtagaacatggtctaagtttgcttgctcaagcttccatgcccttaaaattttgggacgaagcctttgggtgtgatgtgtatcttcataatattaatagactacctacacctattttgaatcaaacttttggctatacatttctagagatgtggtgtttgatgaaatcgaattcccctatgtttccaaaaatcctagttctgcttcaagacctatctcttcatctgaatttcttccttttgctttaattcccaaagcatctcatatgtacactactgagtttctttttccaactgatcattcacaattttttggcaatgtgtctattcctaatcacaatatgtcttatagttctgagtctgcttccctttctctttagcaaaatgagtcatgtgctgaaacctcaaactcctgtctatgttcctctctctgtaaatcatcctcagcttgtttcaatcacacaaactattccatccactaatcct

SEQ ID NO: 244773 - DNA, 1745 bp, Cannabis indica
atggaatgatgactaagggtattgtgtaataaacaaactttgtaagtaaaaaagtaggtataagcgtgtatgagtaattttgtaataaattgtgtaaaatagatttttcatgtaaaaatttctttttatatttgtttattaattaatataaattaaaaaatgtaaaaataaataaataaatagtttaagagtgtttttaaatcgttacatcgtctttatataaatatagatatataaataaatattacaacttttcgaaaaaaaaatattacaatattttttaaaaatcggtatgttatatatgcaaaatttggataaatgatagtttattactttattctaagcttttatttgggccacctttcctttcactggaattaccttcatatttcatctctaccctacacgtgtcatgatacttttccactatcatgattgaattgtttatgaacggtaggaataggattttgtgggtctaatatggtgatgatgatattatatataggtgatcgtaaataatacattatactaaagtgggccaagtgtgcaagaaaagatgagccactgtgtttcacttgaaactccatagtccaaattgagtaggtaagacattagaattttagagatatatatgtatcgaagtcgctaaacaacatgaaagtaacgttttcttcttttattttcaaaatgggaatgagaaagtattagttataatcaatattgttgtgtatgtaataaaaaaatcataataaaaagggtgttcatgaagtgatttacacctatgtgtatgttgtggggtcttaccctagtgagatcgttttcactaagatttagtcattatttctacattttttagttgttcaaatttatatgctatcaaatattgcatggaaaactccccatttatgcaacttacttattataaatagtgttatttgcgttttcgaaagagacacatgtaattctaagatctaaatcaatttatgtaagcccaatagagataatgggctaaactcagtgaaggagtaggtctacagtttcggttagaaatcaacctaattaccacaggagtcggactactagggttccggaaggatatctcacctcgaagaaggaagacctggcaaggtgcatttagatgccctcatggggtacttccaaaaggaaaaatgaagaggcatcctcaagccgaggctgatgtagcagacctctgacatcgaatcccacaatatcaggatcttgtctcctgtgtcaaaccatgagagtgtgtgtgccgccaaaggagacatgccctttgtccaacagctactacactgacgctattgtgcacgaaggcaacgcacgcatgccacctgtccacatcaagcagtccccccatgtacagatgactactgcctcacgggctgggcctcaccgaatcggctcaatgtcaatatattacttgtattcaccccatcagtgggacatgttcacatgcaaaccctagtgggttcgggtacaatcataccagactttatcctataaatataacattaactcttcatgcaaagggttgaaattcaattacttacgtagtaaggccaaaagttagggttcataaaccaagtaagaacacttgtgcattacttgaaggcttttctagctaaataatattgactcgtaaactagagtttgtcaacactcgaaccatgtaaaaaatcactatctctaattctttattttatctattttcttaagctttcatt

SEQ ID NO: 244774 - DNA, 1453 bp, Cannabis indica
gagtagaataaataagtagctaacaatgtaggaaaaagtgatgtgtgggaacggtttttgatatattttgaggattttgagagttgatcaataaactcaatgttatgccttgaattattatatagttttattttcatgataatatataatgaggaagtaataagccaataaatatatatagtactacccttgattttagtataatatatcaagatatgtcaatagaaaattaagataatattacattgtttgtgactataattctgaaaattattgataatataataattaaaaaaattacctaatatctaagctttacatgtatagtagtgaattatgtcaagtatttgttctatagtataaattgtagtatatgaacatatatatatatatatatataaattaaaattgtttcatgaaagcattttttttcttaagattgagattgagtagaagaacaagatatcccttttttcttttaatttgtatatggtatactaattattataaaataagattatataatcatatgaaaataattaattatgatgcaaaacgcatgcatgcaagtgatttatatataaaattatcaaaagatcatatacattttcatatatatatatatatgattggtttatgtatatcggagttggaaggagcaaaatttttttttatttttttttttgaaaagtttggaaggaggaaatttgggatacaaaatgatcgagtgcttcataaatatttatgtgtgtatatttaatatataatttacaaattaattaataatataagaaaaagagcatatataatctaatggaataactgtacggattataattcttaatttgtaatagggcaagctaggggagaagaatataatcaatagaatgattctatacttagaatctttttataatcaattatatattatacattacatgcgtgtatctagctagcttagctatactgttatatttattgttaatatatgtatatttatattatttgtataaagagagatcagagagattatgattgatgtataattctatgtgttatagctatatagctgtttggaagcagggaaaatgtagcctaaatatatagcttaatttaggaaaagttgtgtggatcgaactatataataacatttaatttatgattattaataatttatatataattaattgttgaactatatataattgttgaacagtagttcaactaatgaactattattattaaatattcatttttttttatgtttgtatttaatgtatccaagacctaactaattaataacaaaaccatcacaaattagtatagacatatatacatattgtcagggatattgtcacttaggatagttagttgttaactggcttaactgttttctgtttcagttgcattcattctattagagttagttagttttgttgctttcgcttgttca

SEQ ID NO: 244775 - DNA, 634 bp, Cannabis indica
atgtattttagttttgccttatctttgtaaatggtgttggaccaaaaatactgcaagattattctcgtagttgattgatattctcaaaattaacactaatcccctattactaatctgatcaacaattactgcaaaacttatgataacagtcaataacaaccaccattgcataaaatattaaatcaaactgtatatattattttctttttgattatatataaaaattgaaggaatatatttcaacaaaatctcgtctattgaaaatgtgaattaatttttaattgaaggtagtttagtttcttaaaaaatattgatagaaagagttgtagagagagtacctagttaaaaatcttgaagaaagtaaagagaaaatgaccaaaatgttaatggttactgtcaagggagatgttttttcttttaaaaaaaaaataaatacataaatggagtgagttaagtgtaaattccgttaattatatacgtgacaatgtaaatgatatgcaaaaagagtattggctgggacagaggaagggatagaagatttggctccattttacgtgattttacagttaaatctccacactctaaaagtctatcttattcaagatatttctgagtatttgatacaatattacaa

SEQ ID NO: 244776 - DNA, 1444 bp, Cannabis indica
tcttgtagtacttgacaccttaaagttaagtgtccctgtaatttttttataaaaaatttaaaattcgagtttctttcaaatacctatacaacaattaatataattttttagtcttcgaatattgtaaaaaggcggaacccaaattaattttacatttcgatcggtgacaaaattgattagattgttcgaacaattgttgatgattagaaaccttaagtgtataaaatgaagcttaaattaaattacattaaatctagacaaaaatggaaaaccaaagttcaatatgggcatcataaagtggccaaattcttaagggctcaaaaactaggcattacatgtcaaatgcacatggtttacttcactagatttcatcttgacgtagattagaaatattctaatgctgagtagagaagtacacttcctaagcatgcatcattaaaaattattatatatatatatatattgatataatcaattaataagagctgcaattattgatattttatctgcacaaacaagttcatgttcattacctaaaactaggaaaatataacaaagataaagaaaaatgaaatcaatcaaatctaactaacttcccaaagatcaagtcttttttatattgccatgatataaaaaaggcatcttttgcttataaaagctctggtttttaattggggaaagtgaataaattacatgtttattattctttatacatttatacatttacaccaaactttgcaggagaaaaagggggtttgcttcacattgtgtacaagtccaacacatgcccactttcttttgaagcttcattgatggtgctgtttttccacttcatatggtatggagtatggacaagaagaactagaaagatgtgcctcaacatgtgacaaaggaggtcccttgtgaatctgataatagaggagaggagccgaaaatgcaatgacaagccaaaagattcgaaaaaaagaagttcttgcattcaagcctacaacataaaattcaggcatttgcatctttcttcttgatatgataagaaaaatgttgtgacagccaaacaagttagtgtatagatatagataaagttgcaacaagttttgattttcatgaatattgctcgagtaatcggtgaaaatagagctttttaaatgtcattttgtaaaatggcattcatttgttagttcttgaaaaagtagctttccggacaaggatgtgtattggaaaagctaggctcaaaataaggtcatttagcaaagtgacattaaacacttcatttcgatcaaaacactaggctaagtttttaaaagaaatgtatgttcctaataaaagaaggagagatgaataaatggggaatgtcagcaaaaacacatctctgaaacccgttgaaagccgaagacattaaacaactaacttagtacaaaatcactagcacataaattgccaccga

SEQ ID NO: 244777 - DNA, 1034 bp, Cannabis indica
aacaacgctgagatgagattgtatatcagagaactcagagagcatgattttctcacaatcctttacgagactctccccaactccttcttcaattaatcgtttcttaagcttctcggtcgatactgagagatcattaggcacaatggagaggttatcgttaagtaccgttctaatgggaaatgaacttcgagtacttgaaaacaaagcttctatccaagcctccctatcactctttgaatcagttctcaaatgaagggtttttgtagcagtaaatatgtagaaacgccggtcatcggacttgctttttcgaaaggaagagatctgctttattcaaataaaaattatacacacatatatatttataaaagataattcttttctcgactgtgttcacaatatctatctatatatacacaaggatggaacaaaattcacatggcaaacaagaaagacagctgtcctgaatacaaagacaaaaaaaaacaaaatatctaagttcatctcagttttagatgacataatttagccccaccattaaccaagataagaagaagaaggtccagactccaggctgagcttgctaaatagtagttattaacccaaaagaagaaaagaaaaatcatgatttgagtaattgttaaacattacctgttgttactttcaaagatgtataattgaattatttagatctaacaaaaattttaggtttggaatatccccatttgaaacataaattatattatttttcttcccaaaggcaacattattggttcttcccatttgagacaaagttacaagaaaaaaaaatccaaactttgaaatggttctaacttctaagtctaaaccccactaataaaataataataataataatagcaccaagtccccacaccttgtttcttcttcgttaatttcattgaagatcaaaatttcaaaaattaaacataaagatactctaataaataaaaataaaaaatcatcactccttaaacaactcaaaattaaattatttatttatataataataaaaaaaa

SEQ ID NO: 244778 - DNA, 2731 bp, Cannabis indica
catgaatgtatgggaggtatgtattttattttctttgatgctctaaataaatactagatcttaacttcaatgattatgagcaatagttattttaacaaattatagctaaattcaaagtttattttacgttctttaagaatttcaacattttatgttctgaggtgtgttattgcgtcaccataagtagagtattttatattattttgagagagagagagagagagatttaccgattggccgatgggaatcccatctttttcatctgtaagaaaaatgaataaaagtacaaatattattataatgaaaattctggccaaagttcttttgtaatgatatgtagcacattataagtattaaaaaaaagtttagcaagtgtgttgttggtctcttgttaactattttatagtaatgtattagaatttaaagttaaggtgcatatcatcttaaaaccacttaggcaatgaaaatagtatagtctattcattttgtatatgacattttatattcatacatttaataatgtaagactaattttaatagaatactacgtgttcataccacataagataaaaagaaaaattaagaagaaactagtattaaggatttaagttctacaaatatgactacataatttattattaataatatccctatattatattaccattttgagcacttaatacagtaacagtcataaactaattggacactaataagcactaacagtagaaatttgtacatatatacatcattaactattaattatttttgtttcaattttggttgttatataagatatatttatataactgtataaataaataattatgttataaaggacttactagaggttatagcaaggctatcagtcgaataactaagattgggaattgttgagttggtagtagaagcatcttctacgtactttgttgtataataatttaaaccaacaaagtctatagacccttttacaatggtagattcctctttactaaatttgggcaatcgacttcctactaacgatcgcatgctttctgggtagtctcccatcatgattggatccaaaatcctatttataattagtaagacaatacattcattgttattttttttttctaatataataagaaaaaggagagtgggagaaattgtaaatttaccatccaattgaaaaatcaagagctctcaaggtagccaagcgactgtctgttgtttcatattttggtatcatccaatgactcatgactgttattccaattactccattttgagacacctgaaatgaaaccattaattatgcccttatccatgcttaatcattacaaaatatattaatgagaattactaagggtacataatatgccaagtaatttaaaaatgaggattgttattggacactaatagtctaatactttctataggtagcgctctacgattagttaatgatattcgtattttcttaaattatacaagactcaatatttaattacatcaataacagtatgataccaaagagagtgctaaatagtagtggtacatttcagaaattcactttaaaaagtgacatacatttattattatgcaccagtggtcccaaacattttatttaataaataatatgggtaatagtgcactaatcaattataaggtcggtatggtaacaattgagtattttaaaatttcaaataataatgcagttgttggtttaattgctattctaagtaaggccttagttgtattgggctattggtcatgtgcaggaggaagacccccagtatgaacaaaacaaaaaatgtgttcataaaattagacatctctagaattgaatgtcatgttagtgttcaaatcaagcagcttgtatgatttcataccagcatgatatccaagaaaaatatagggaacatacctaggagaaaacttagatctagattgacttaaactggaagcataggcaggcatccaaaggcttttaagttctcataggtgggtggtttagagtggagaacataaaatgattacttgttctttatgtttggtgtaggtgttctgttaattaggtaggctgctatagtaacacaatctccccaataaaccagtggtacataagattgaaacaacaaagcttgagcaacattgagtaaatgttggtgtccttagcattatctgacctaactcctttaatagttttgttgaactggttttgaactaattttatgaactgaggtatagcagtttgtgcatcaaatttgtgtttgatgatattgatcctgatgtacctggaacaatcatgaacaatggtgataaagtaccgatatctcttagttgtcatggtgttgtatggaccccaatcgtcaacatgaattagatcaaaatagttttcaacaatattgtgattagatgttattatacccaaaatttgacggtatttcagagagtgacacgtgtcaatcaagtggagtatgaaccaccagatataacaatgattatatcatttaatgcaaaatggaataactcattaaatatagaattaatagagtatattcgtaactcgctgactgtatagtcttaggcgagacaagaatacacaaactatcaattcttgtattaacgagagaccatctaacctcagaaggcataattccgaggagaatatggatagggtatagcgagatatccacctcgctacatataaggaaatgttgacaaggggaatcagcccttgaaacactta

SEQ ID NO: 244779 - DNA, 1341 bp, Cannabis indica
gatgaatgataaaaaagaaaaagatacgataggagtgatgtggcgtttgatactactcgacatattagtttcaactttattcctaattttaaattagtatatatagtactgcaggagtgtgcttctggactgtcagtacgtagtgcatgtgattctatattatattttagttggcaacacttaatcactttcactgccaaaaaggtttaataattcattcgcttgactcagctagctctcccttttacattgctatatatttagaaactacgatatatatgtacataaattatacattctcatcggagttttttttccaagagatcgatcaaaggtttttgagtatgcatggacaaaaaccattattacttattagagtttttgccttagacaagtgttattcttaattatatatataggtcggattcgttgctatgtgtatatttgcaataatcccataataagacaatctgttgcaattctgggaatgatatatgataaggtgtacaattagagtttagttcataattaattacaattgaatggagatgaagctaaaaagtgataaattaaggagctatactatgttgggtctccatcctgatgatggagatgtgttatttttcaacatgtatatgcacaaaatgagtaatactaatgtaaaacttgtgtctcttcttcatccttactaaaaataaatttatgatcaagtaattattttaacaaataaaatgttgacattaatttttggttaggattaatggtgtttcttttcctcttttgcatgtttaattacttaaataaaatagaaaagaagataaaaccaataattactagattaattaagtaacaaagtaacaatgatttaatattataagattgtatgtagtcatagtcaaactcaatagtattattcctttcctttcccttcccatgataatataatgctttgagattaatataatgaattcctctgccaaaaaaacaaaccaatatttatcacagaatcaacacaacatatatgtataaatgccaaataataataataatatagtccattaagatataaatatgaatatgatgaaatatacgaccaataataatagtaataaaaaaattaccttaacaacaaactttggatatacatataattatgcttcatcatcatcatcatcctatatactcaattattaaacaaaccaaagtcatattaatattaattatataataaagaaaaaggtattaaaataaatgagtgaagtaggtacgtaccatttgatgagaaaataagtgtggtaatcccaaattgaaatgtttgccaaggttgcattaacatcatct

SEQ ID NO: 244780 - DNA, 1209 bp, Cannabis indica
gtgtcatccagtttggtgctatgtctatcatttcaacttctttcgtacaattgatgctgggttcttctaagaattgggtcaggactaaattggccttgtctattactgtgctactcacaagccgtgctagagcttcaccagtagcattttcctctcttggaatctgcttgaggttataacctttaaattgtgcgagcaggtcttgcatcttgcttagataggccaccattttctctttccgggtcgcgtactcacccgagccatgatttactacaaattgtgaatcactacaaacctcaatgtacttggcgtgtgcctcctgagcaagttttagtctagctatgagtgcttcatactctgcttcgttgttggaggccttgaacccaaatttgatcgcttagtgaaggtgttgcccctaggtgtgacgagggaaattcctacccagaaagctggtctgtagctgatccatccacatgtaatttccaagtaggtctgtcttcattcttttttgataggtgttcttgtactggccctgggttgtcccttgtgctattttcttctttgcctgtgcactcaactacaaagtctgtcaaggcctgtcctttgattgttgtacagggttgaaatattatttcgtactgacccaactctattacccatttaagtaatcgcccagaggcatcaggcttttgtaatacttggcacaatggttggtcggtgtatacccgaatagggtgagcttggaaatagggccttaacttccttgttgctaagattaggcaataagtgagtttttctatcaaaggatattgaccttcagcttcaacgagttgtttgctgatatagtagactggatgttggatgttattttcttctcttatcagcatggcacttatagcgtattcggttacagccaagtatattcctagttcttctccgtccaggggttttgagagtacggaggtttttcaagttttcttttcaattcttggaaagcattctcacattcctccttcaattcaaaatttttattacctcggaggatgttgaagaaaggaacacacttgtctattgatcttgaaacgaatctgttgagggtggtagtctgaccagttaagccctagacttcctttatttttgttggcaatttcatatccaggagggcttgtattttctctggattaccttctattccccaagcattgacaa

SEQ ID NO: 244781 - DNA, 1456 bp, Cannabis indica
ttattttcttaaattatacgagatccaatatataattacatcactaataatactttttaagaattctctttttccttcatctaattctaggctggatacatacaacaacttgttattcttttttcgagtagactactctatagactatagtttatacaacgtgtaataatttatatttgatttgtagggcaaatggtggacttttagtattaactagctacattaatatgatgcaccagcctgttttagaatcccacgttttttaggaatgaatttttttttaaaaaaaaaacaaaaataacaaaaaaattataaaattactgtatggacaaaatttttattatttttataattttatttacataaaataaagttttttgatatgttgtattcttgttattttattcttaattttatttgtatactttttttatattgttttgatgttgttttcctattactttcatgtaatttttttgtcgttttcttgtatttttatagaatactgaaaaagtatgtccagacatatcataatgaataaaagtatacttagatcgaaatagttgaacaacaccaacaaactgtcaagtagtacttgatgtaaaattttccatttcagaggaattactagagctactatttaatcattgttgtctttcttcttgaataacagtaacataagctttattcacacttgcaagtggatcacgtataaagatttgagatctcaccatgttgtaagaatcatttaatccaactaagaattcaagaagtcgatcttctttttgatattcttgaatcactttcatagcaccataagaacacactagttgtagtctatattcccagatttgatcccataaaaccttcaatggagtaaaataagtggtaacactattcgatcgatccttgagtaagactttgcataatcttcttagcttcaaagattcgatgtgcatttctctaattgaatctttcatgaagttctgtccaaattttagtagcattatcaacatacataatgttgttagctatttcatcagaattaggatgaagaattgaagatataatagtattattacatcgacaccagctgtcataatcttcatgatcatcatcgggttgaggtaatcttccattaacaaacttcactttatttcgagcaacaagagcatttagcatggatcttctccaggtgttgtagttctcacacccaataagaatctttggaacaagaacaactcctcgattatcaccattataaaggtaataaggattcgaaagatcattgacattcatcgatcgataattgtaatgctctgatatacttaggcgcgctatagtaattttctaattaacgtgccacctttaccacaaaaaacaccataaccagctgcaagaactcaatttcaacttaaaatgaacctaagaattgaaccataatcaattctaaccc

SEQ ID NO: 244782 - DNA, 1385 bp, Cannabis indica
agagattgatagtgacacttctcttaattttaatatgagactatgtgagatagttgccatttactgttggcggttgacagttaattcttaactgtctagtgtcataggagttagttcgctttccaattggtgtaactaactactgccgtgtatataaggcattagttaatcctagttttggttagcttactcttatgatgaagacacttgtatatatatgtaaatacaaacttgattcattcaataagattcattacacttttacaagttattgtttggttactctgttttggatgattggttactgacttggagttctgtcaaagaactcaggttgcatgaggcaacaaatccaagctgcattcctaacagactataataaaaaaaatattacacatatatttatgtaattttatcattaatttaaaaaatactactaaaaataaataagaaacaatttattacaacccaaatgtattaactacagtaatacacttgtttatttattaccattagatttattatcaattgatgtaaaaacttccttatcatacggacaaagctaatattcctatcataaatgtcctagctagcgttggattttccaacgaaactaagcatttttttgtctttatcattcggaaggctcaatcccatactttgacttcaatgatgggaacaacttccgcactccggtgctctaatgaacaacagctctccgccttacttcgggagttacattattaataaaaatataataaatgatacacttgcaggtgttgtacttttcctagtattgttaagagaaatgttaaaagacactagtagtgccaagcaccctcttacgtatcaatatcgctatattggtctaatttagtatcgggtcccatatagtttaatataatatcttttaaggagtatcacttgccaatcacaaagcgacacgtcttaagggtgctaagatcactagtgcccaatagcaattctattgttaataaggataagttatcacattatttttagtgtaatagaaaatgagacacattaaatattaatgttgtgacatcatatcagggtccatttcttatagtttataataagcgaaatattgacttaagacattttttagattcaataaagacttctgttgccccaagttgagtctttttttttcagaagaagaagtcattaattaaggttttctttttaagtcattctatatattaaatttttgttatttttaagtctttctaaattaagttttcttgttttttttttgtatttttcatttagttaattttaaattatatgtcgaaattatttttttttcaaatattcgttatagttagaagttcttcttacaattttttaaaattttttgaata

SEQ ID NO: 244783 - DNA, 731 bp, Cannabis indica
cttgttgtaaccgagctatataaagctcaatccatctcattgcaaagtttaatcgagctataataaaagtttttcctctgcttttgctctgttctctcctttctcatagttacttgtatatgatttacgaatagttgtaacatattatttaaattgccacaatggacattcaaaaacttctctaaacactctctctatctgtagagtattacttggagaaatgttaaaaggcaccagcggtatctagcactttcctacgtgttaatatcgttattggctcaactaagtatcaggttctatataatttaatacaataacttttaaggaaagtactaagcactactgatgtccaataataatactcctcccttacttcaaactctctaaattgtataacaatcattatactaggttggtcatgcctaaaactatatattaggacgagttaaaagtgaggagagtctaataacaagttagagaaagtgggttggcacgagtccgggtaggttggggctgggttttgaattgggctgagtcttgtcttttttttttttttttgaaaaatatcactttctttttcttacattttttcataaaagtatacaaaatttaaactttaagcaccaagaacaagccaaggaggaggaggaggaggagctgctaggaagtctcggagcttctgcacacaccggccgctggagacaagaacaacaaattacaaagaaaaaaaa

SEQ ID NO: 244784 - DNA, 843 bp, Cannabis indica
taattgtatcactttttaataacgtagaaaaaaactagcataaaatttagtatacgtgcctcgcacgtaactgtttactagtatatatatatatatattatgtttttgaataaaaagtcttaaaatatttcaaattcaagatttatttgacaaaaatttatgatgatttttcactaattaataaaaaaaatttggtgttttttttttctaccaaacatcataataaagtttcctaacgtgagtaaaaaaaaaatttaagtgccatatatatatatataaaatgtaagatttttttttttgtgttgggttggagtagtaatacttttgtatattaaatttaattatagtgtgacactaaatttagtgtgctcttggagatgctctaagaaagaaaatgcttgtttcaatatgccaactataggttatgtaattgggtctctaattcaaaatagtgaattaatctttttaagtagaaatctcaaatctttactaagggctcgtttggcacgccgtacagtattgtattgtattgtgttggattgtgttgtattgtattgtattgtattaatattatttaatacaatacaatatttggtattgacttgtattaattgattgtgtaaagttataatatattttcaatacactcaatcccaacaccaactctgggtccgggtctcgggtctggttttgggttcgggtccaagtccgggtcggggttccgagtcgggatcagggtccgggttcgggtacgggtacgggtctaggtccgtgtccaggtccgggtctaggtccgggttcgggttccgggtccggggtccaagttcgggtctgggttcgggt

SEQ ID NO: 244785 - DNA, 1091 bp, Cannabis indica
aataaatcctgaaaaaaaaattattctaatttatgttggtctaattttgggaccgttgtaaattttgccttttgtagtagtgtctactttgttagagaaaaggttcaacatggcctcattaaagtgaagcatgttcctttctttgattagctagcagatgagcttactaaggctatttcaagtagtcgattttctattttcagaaccaatctcataatagaaatgtttaattatgagattgaggaaggaagttaagacagttaaagttagttagcattaagttacttagcattagttgtctttagtatttgttgttcaagttagttagattcaattgagagcgagctgttagtttgttactgtaactaactaactaactaactctcgctctgtcttttcattgcaatgtatataatcgaactttttgagctaagtgtagtaatgaatcaattctttcaaattttttcattctttcttcattctctctgttcttttctttcatcttcttcattatgttcaaaagaaatttaaacaaaaagtcatatgtttgccaactttaactaattgtattatacaagatattaggtagcgtttggttggaggtaatgaaatggaatggaatagaatagaaattttttttattccatttcttttactacaagaaaaggtcttttatcccggtttttaaggctttttatcccgatttttgctaaaatgaaaacagggttgtatgccagtgggataaaaggtatttaaaaaattgagataaaaggggtacttttcatcccgcttttaatgaaaaactgggataaaaaagtattccttttatcccagtttttagagaaaagtggataaaagggtactttttatcccactttttatgaaaaaacttggataaaagggtacattttatccattttttttaaaaaaaagtggaataaaaagtcaccttaattttgatcccattttgcaaatgtataggttttttattttattttcttttaattttattacatttcatttcattcatttttttttctaataataataaatataaatataatttttatttttataattatatagagtat

SEQ ID NO: 244786 - DNA, 1021 bp, Cannabis indica
acatcattaaactactagaaaaggaagtcattcgttgcataaaactcattttcagtaaggttctaattttcttggcaattttcgaaaagcttaccataaattgtcgtttttcaacatttttctgtttttcttatttgagcatttttagtttatcatatttggggtattacagaagatttgagatcaaacagatttttaaaacccgagttatgacccatttgtgcctactgcccctgtgctgagaaaacagcagtccgtttttccttgtacctgagttaacagactaccattttctataggaactgtgggtatgggccttttggtcatttaaaactcgattttttatccataaaacaattccaaacctttctctaacccccattctaatttcctaaccctatttggaagcctcctaccctcttctatcaacatctctcttaccaaaacctaatccctcttttctcttttcaaaatcctatctctttcaaaagtcaattctcttcaatgacttcatcatcaagacaaggaaaaaggacaaggacttccatgcaacaagaagagctaaggagcaaggctaggcatgaactcttctcccatggaagatttgcacaaaagtttcaagaggatttctcaaagagggacatactcattggtaagaaatgtgatttgagtgcccttaactatgttaattttagcaatctctttagagagatgggttgggaagctttgataggaattaatacctatatctatcctaggctagtgagggctttttttgcttgcattgaaatttcttgtgatcattatagcattaggggaacccttaaaggagttagatttaccatcattgttgattccttaaatgaactcctaaatgcccctaatgaaggtctcttacttgatcctaggcctagacttaagaatgatgcctactataaccatgcctcatttactagtatagtttgtgtaggagaagatgtccttgacaaaccaaaacgccataaccttactcttcaaggaa

SEQ ID NO: 244787 - DNA, 1345 bp, Cannabis indica
gtacgaaggtccatatgagattcaagacaaaattagtgatagaacctatcacttgaaaaggctagatggatcacaaagcccaagagcatggaatgctggccacttacgccggtactatcagtagactaggagtggccagtcttcttttctttagtttgattttaatttctacatgtaattcccatgtatgcctcaggggaggaaccatttgaataaaacaagaagggattttcaattcatattaagtatttttttaaaaaaaaaaattcttttaacaggtgatcaagagtctaaactcttaatacttggggtgtagcatacgttatatgattatcacgttatatcctttctataaaaaaataactaagttaacaacacgtgtaagagtaggttgtatcccctgaaacttgaactttagcgcaccgaaagtaagctagtgctttattatacataaaattaacttagtaaaaatcttaattaactcaagttaattcacaaaagaaatccaggcttcataattaactcaagttaattcacaaaagaagtttagactttgtaattaacttaggttaatttaaaagagaaattcaagccttatagctaactaaaaagtttaggattcttgaataactaattgattcatgttaattaaatatttgagtttcaaaatcttggaagtaagtagctatcaagttttgtgctgtaaataacatttgtttcattataatcaaatttactaattaataaaagatcgaaaatcattttatgttgcatggttcacatgatttatttcatgactatatttaatgtatcaaatctattaaggtcagaacatatataaatatatatatttgttcatgattatagtgtcgtcaacacaatgtaatataataatgattatatgttcaaaagtttaattcccatgatttgtcagttcactggatttagactgacatgataattggtgataaggtatacttacaccttgaataagtgttatgtcctttctagggcattggcaaagtattccagtattggatgtatggtgtatacattgaaagggaacgatattgatctttgataagatatcataaacttactgctatatctttctaggtcaatatcaatggttcatcttaggtctatgaatcttaattctaatatggttaggtttaacttagttgtattatttatgttcttcaagttgttcaaggaagctaacaaatggttcaagcagatatttacatcttgggaacatggtagttcaattgagtaggagagctgatcatagatatggaatctatagcttctataagtatttagaagtaaaacgatgatttctttc

SEQ ID NO: 244788 - DNA, 2327 bp, Cannabis indica
aatgatgatatgtattagtttagaaataaaatattaagtatatgtaagtatagaaaatcaaatttcccatttcaaggctagccctgcatagcaatccaacaaactacaccttcatgcaaggtggccaaatgacgggagctccgactatgggtagctcggctggtagagtgtgtgtgggtgtgatatgactttcttaaagagagaagaaagagattggttgaataaaaacgggttttaattaaagagtataattggaataaaattgtaataatatattttatatgatgcaaggaagggtgatattgtttgggtccatgattgatattagtcatccattcgtgagaagtaagagcgatatccaatctttatctttgtttgatctatgccccatcaaaacatttattcagcaatgtaaatttgcagccaccaaaatgtagatcaatactactcgcactcgttttttcaagaaaaaattccaagaattttcatgtctttagtatttattgttgtacctcctatttttgtctttatctgtcaagataagatggagattgcccactctcatccattgcatgttgtaattattgataattaccgaaattgcattccaaattattgtttcttgtcatccatacaacaaacagtaggcgtagtttcaatttcaaaatcccatatgaacacctgaaaatgaaattctacgacaaacattacttgtactcttagatctttttttccctaaaaggcaatatacttctctaccctttgagagagaagaaaagtgcctccatcgactaccagtcatttattcacctaaattttctttccataagaaatacagaatcaagataggaacttcacggggtggaggagggagcataaaagttgcatctctcccttccaaaaatttgagttggtaatgtgtaacttgacatccaccacgtttgcaattatatataagaaatttgaaaaattatactttaaaaatcttaatattttattcttaaaccactacattacaaactatgatacttttatctaaaatctaaaaatacctctctcataactctaccccattttttctcaatccgcatatgcattggaccccccatcggacccgtcggaccccatcgaaacccccagcttgcaagcatcgaacccccatcggccccgtcggaccccccatcggacccatcggacccgtcggaccccaacccaattttttcccaactcgcaagcatcggacccccatcggggtgcccatcggaccccatcgggccatcgtcttccccaaactgcaattttcccaaatcccagatctgaacctaaaatcgaacctaaatctaacaaaactcacggtgcacacataaacacatacattatacattataaccctaaaatcaatacctatcaatactccaaaacatatatcacacaaaaaaaaatgacaaaaaaaaaggggccggcggtgggagatcggttttggtttgggagggggccggcgttgtggacggtggtgacggggggtttgggttgtggacggtggtgaggggggtttgggttgtggacggtggtgagggggggtttgggttgtagacgagcagaaaaagagagagatggagttgagttacgagaggtattttcaagagtgaaatgtatgagtttaaggataaaatattaagtatatttaagtatagaaaatcaaattttccttagatattgcaccttattctgctcggactttctttagattctacgggattgtaattgttacattcctacctttctcagccgatattccttttctcgagctctttctttgctgcttaacaccatattaccacacgtagacccgtctatggatttgaatggaataacaacatgggtctagttcgaaagcaatgggggcgtccagtgctttatagaatatcatcgcatcataattgggctttcgtctttttgatctcttactatcgtgaatcatttcaaattaagtccaacgaatttagaaacagtgtttcatgggtttcaaatttgtccaccacctccaatgaacctagatatgagcctatcaataagttgggcctccaatggacccacgagcctttagttgcattgggaccattagtatataacaaattcattgtaatttgtaagcattgttcgctgcaattccttcagcgagaaccaccccgtatctattccgtgaccttgacaatgttcttcatgccctccattcatttcattttcaattgtagattttaatacctacaaagatcaccaactgcaataatgtaacttcaactcttttacctaagatatcccagtac

SEQ ID NO: 244789 - DNA, 1126 bp, Cannabis indica
taattttttttttgttgtgactaaaaaattgtcactaattaaaagtgattataaagttttaggtttgaaattggggatacacagttaatcataactatttaataataaaataattgggtatttacataaatatgggaaaaataaagctagtttagataaatatgataaggaaaacttaataaaaaaaatatagtatttaaaataaaaacttaacatatatgggatgagattgaattactataaaaaaaatactaaaatttctttcatatttattttttaaaaaaaaaaaaaaacaattaaaactatagtgatcgccggagttattactggcgccgaaaaagttattggaatttacattatcgccagaaaaatcaccggaaaaactaccaagaaactggtttcttcatcaagaaatatttcttgttgaagaaaccaagtttcttagtgatttttctcacgataatacaaattccaacgacttttcttgagtttgctgtcgtcaccagaaaagtcgctagagtagatgctggtgtcaaaaaagtcgtcggagttgctgtcggagccagaaaagtcgtcagaattggcattgtcgtcagaaaattacagaaaaattactaaaaaaccggtttcttcatcaagaaactggtttgctgtcaactatgccaagaaactagttttcttggtgatttttccggcaactatgcaaattccgacgactttttcgaagtttgctgtcggtgctaaaaaattcgccggagtagctgccggtgtcggaaaagtcgttggaattggcattgtcgctgaaaaaatcaccaagaaagtagtttttcatcaagaatttggcttcttcattaatgccagttcaaacgacttttccgtcatcaactgtaactccgacgactttttcagtacggaaagctactttggtgatttttccagtgccggcagcaaactcggacgacttttccaacaacagtgacaagtaaaattgcctaaacaaataaaaatattagatttgaaaacttaatttacacatatataacatatatatcaaatacataaaaaaacttaaaaaaaaaataccatataaattagtcaaacttaaaataatcatatatatatatat

SEQ ID NO: 244790 - DNA, 669 bp, Cannabis indica
ttagttattttgtgtatttatttgcatgatgttttattctattttagtacttgttaatactgttgttttagttatttcaatcttttagttatgttacacttgtaacgatgatatttctatagagtattaaacttaaataaatggtgatatttcaattttacatatttttctttatttttttatgttaatataaaaaattaagtgtgtaattggacatgtaatttaaaaaacgaagattaaattggattgcattttaagatatacttggatttaattggatgaaaattttccaaattcaattattaattaaattggattagatcaaaataaaaatattgaattagatcgaaaatccaacccggcctagttagaaagtttaaatgtcaaaaattcaaaaatgtgtattcaattatgcccctcaaaattgtgccaaatacttcttgattttaaaggtctagaaaattgaaacaaaaaacctttcgaaattattctaaaaaaagtcccacaaaaagattagtgtgttcataacatgagaatcttaacccaactataaattactaatgtagtaatttttgcatcattattatattagaaaagattacttcatggttccggctcacattttactaataattacacaatttgcgatcatattatagatatatttat

SEQ ID NO: 244791 - DNA, 1435 bp, Cannabis indica
gtctttttgtattggtcacttgggtttaattagagctgctgatgtggcaggcttattatgtatatatataagagattagaactcattataggcagggaattaagtattaagagaagtcttttggagagaacaaccctctcgaaaggttgtgtacttgggagagactagcctctcgaaagctaggtgtaatttgatcattattcataaataaaagacaattctttgagggatttcattcagggaattcgaatacttgatagcagatttctaatctaagaaattctatcaatttgcataataaacaataggtagaagagctaagcgaagatttcttctgattgatatgccaccacatggatttttttcatgaacctataattcttttactttgaaaccatattcattttctttcttagcaggctactaaaatcaaaattcagcatagcaaccaagaggtttttgtcaggattgggttattaggacagctttcgtgggtgaatgtgactggattgttagtaagaataagcaggttgacagactattatataaatgtggagtggggatgagagaaggggcataaaatgtgagactgaattgtggtgatctttgagctctagagaaatctctgagctctagggagattccaggtccctcaaagaatctcggttatctgtttcaaatatgaattcactcgactgtggactaccatattgaagcaaaacaataaaaagagaaattttaaaggaacaaatttcacaaaattaattttttcatgtggcacagatcaactagagagacagcaagagagtttcgtcgtagctaccttttgtttttgagtttcacaacagtataatgactcacgaaccagaggataaattgcattgacaaattcctcaagcattcctttttctttgtatatatggcaaatctttagttttactttttcgtgtagccaccatggtttagatttctcagaatgttgaacagtgtgatctgcagatacaagcaaagagagaatatacaataaatatgatatttattgttggaaaacaaaaacagtaagacataccaaattatttgaaagaaaaaaaaagaatgatacctaaattacttgggggagatagcaacaaaattgcttcagcaactctactatcttcaagaagaagggaagccaaggtcaaccgagcatcaatattgtcctcaagcgtgtttagagctgaattgaaagttattaattacaaaacaaagtagaaaatagtaaataatttgttcaaatataaacattgagtatttttaccgcaaatatctatataagaatatatcaagaagaaagatcttctggcatgacccaaaagaaaaatgtatcatctgcctatgttctttcagtttgtaaaattgataccttatatgctactcacaactcaaaagagagacc

SEQ ID NO: 244792 - DNA, 960 bp, Cannabis indica
agaggccaaattaaaaggtaccatatgaccctttacatcaacaatcttcaatgctacctcattcccttatattttcaacttacttctcccaaagaaagaatgaaactcatccaacataaacttcatgaaatcagattctgtaaaactagaaaattttagaacctcatcagctttatcatcatcattactcatgattttactcttttctttttcttcattccagtcaaaatgccacttcaaaatgtatagctcataactatataatttgtggattaagtcgtttaaggtgaccaaaggagataatgatgtagttggatagtcaatgtctttattaggaaaatcccaagcatcttctcccaaaacttttagtttcacatctctaatatcaccttttaatacattcatcacctaaacatacaactctaattattttttacatattaaaaactcaatcaacaaatatataacaaaaactattctacgtacattaattaggaataataaaatatatacttccgttcaaatatattaaacagtcttttggtttttaatatatttatttttcactacaaaaaaaaaaagacttatctcgacagccttatctcgacgtgcctgattttttttttaaaaaaatcctgagcatataggcccgctgttattgctattttttaaaacttaaaatttgagcaatctcggcgggcttgcatgtgcgtgtcgagataggcctgatttttttttaaaaaaaaaattgtaaaacttaaaatttgaccaatctcgacgggccaatataagcccgtcgttattggtccagccgtggttaccaataacggcgggcctatattggcccgacgatattggtaaaaaaaaaaagcccagcccgtccttccaccctttaacctctctttttcatcttctttctattatatcttcaaaaaagccctattttcttccccccaattc

SEQ ID NO: 244793 - DNA, 1731 bp, Cannabis indica
atataccttacatcataataactagcaagatctaaaaatcaataggtcctaccatagtattaccctatatatataatatgagcattgctattaggcaccagtggtgcttagcaccttttcgacatatcgcgttgcgattggctagcgatactccctaggacccgatacttagttggaccaatagcgatactgacacataggagggtgttaggcaccactagtgaccctttagcatttctcatgtaatatttatatatatatatatcatcattaaaaaatgattactattattttttaaaatgattacaatatatatttataacataacataagctttaatataatgactaaactatttcatgcacccagtgaaagtcatgagttcaaattccaacaaattatgtttaattttctatttaaagtttactttttgagtctctactaataaaatttgtatttagtgttttaattattattgatcataatatttttattgttaattattttttattttacactagatttaatataataaaatataaatttatattaatttttaatatgttatataatgtagcaaaagaagacgttctcccacttaaaaaaagtatcgtctccctcaatttaaatctcagatcaggcgtatgattgaatattattttagaagagtaactgtctcgcctcgcttatatgcggatacatctctatttattttatatataacaatttatttctatacataaataatatggaactaactctaataataagtgggaataattttgatatttttttttggaagattaataattttgatattgattggaataatcatatagtcaatcttgatattatccactctcccacattgcaagctaggtaactaggtagtagtgttagatgattaattagtaaggtccattattattattcttcaactgcccaaaaaatatttagtggttgaaatgtggaatttaaactgatgaaacaaaaacaaacgggtaggagacaaattagtgatgtggttgatcacgggtggataagttggataggaaaaggagaggagaattattataaagttaatttaaaaaggtggaagaaaaatgattcataaattttgaccccttatatttataactaataaaagtcataatcattgaagatttaattacatgccaccaatttcgatctaaggtaatgtgtaaaaatcttctagatgaacaaaaatgattgtgatgatatacgattgagctaaactaaatattaatagtaaaaaatacctttttaaaaatttgaagtatacacctcataacatgtgtaatatcgtttaacaaaatgttaaacttattattatttttatatcatagtaaatattgtactaaatttggcacaaaatattatatgctaaatttacatcactttttggcacagtatttggagcacactttttgttaaataagatatattttagcttttcaccacttatttacactttctctggagatgttcttactataatgtaaaattacaccacaataaatacactattttttcatttacattaatgtcatttgtattattttattagtatatttaactatgacattattttatgaaacatttatattatatattttttattgtcttacatattaaaataataatataaaattactataaagttattagttttttatttttttaataaaatattaattagatattaaattt

SEQ ID NO: 244794 - DNA, 2393 bp, Cannabis indica
aaaaaaaaaaatacatttcattaaatcatagaatcaaaattataattagagatctatgaactctaagagaaaatcagccaatttggccattaccctttataattccaatatatattgttcattatctaaaagaaaataaaaagaatagaaaaaatgaaaaataatattattgtctctccaatgtatgttttttgcccttcaaattgtgtttctcttttttttattagtgttttcgtcgtgccctaacccttaaacgagttatatagtgacatgtctccgcctgtaattttagaagcctttgctcaactttttctcgataaaatgtatataaacttctcatccaaactcaaaataagatgattcaatatgtgttcgaaaatatagatctcaacattgtgtttcaaaaaaaaaaaaaaaaaaacttaaaatacactttacacttcaaacttgaatggttgcttatactcaattaagtaattaatactaataaaaactcacaatattaaaaattactatcataacaaaagttgtaacatatatataacaaccaaatacctttttcttcttgtttatcatttaattaatccttcaatctattttttgattgtggtagataataatatatatatgtatatatatatatatataaatatattgtgatattattatccatggtatcaagtcaagtccagtcaaactcttcaattttgtattttgtacaacttaattcatagatctgcaagctttaaaaatatcaattatatatttaatacaaaaaaaaaaaaaaacttaaagatataactaatgaaaaactaacaataaaatgtttgaataaccaatttggttaataataataaaaagagaaaataaaaatgaacttacagtattaataaaaagtgtgaagaaagcaaacttataatgtgtcaaaaaaattaaggctatgtttggtatacttgtttattctttctgatcaatcaccctaccctttgaaaaacaaaccgagcttcttcactcgattactaaagaacatctccttcgaagaagattcgaggcaccaacaatgatgatttagtctaatatatgatataatgaagacttgtatccgcatagcttttcgagttccattttgttcgggaggtgtagcttctttctcgatctatataataagtaaacaatatttagtattatttattgatttagttcaaaataataaaattaaaaagaatatgaatagaatgaaataaataattattaataagataataacgtatttaagtaaataattaattaagatataaatcaataattagttaaagaaatatacaaaccttttgaagtttaagccgcatagattctctttccttttggagactttctttgtctacattaaaaatcagtcaatattattaataattaaattaattcaaacaaaacaaaaacaagttattaattaagctttcaatataacattataaaatatatatatatatatatatatatttgtagaaagatacattttcttacctagttagggcatcagtaccggcaaaaatattttcagttttcgacatttgaaaaatatataacaatctttcttatatgtgagtagttcaagaacaacgaacgtagaaagctagtttttcaagaaaagagaaaacaccgatgatttaataaagttcgagtctagtgcaatactctctactcctcaacgaaagaacaatcatgatcatcattatttctttattaatcaccgacaaaattacaaaagaatttcagtcaagttttatctcaagaacacaaaaagatcgaatatagaacaacattaaaaattgcaaataataattaatccctattattattaattataaattaaacataaacaaaacaagcaattattaattaacaaacaacaacatatatttcttatctcaataggacattatttttactctcaccttattaatattatatctctttttcgacactttaaaaaatttaatctttttcataagaaaataatttttcaaaaaaaagagaaatcttcaagtgcaagaaacaagaaacgaggttcgagcctagtacaatactctctacacaaaattacaaaagaataataataatatacctaagaaaatggtgttttgcaattcagctttcctcctttttgcagcaagaattagctcactcattggcacttcttctataaattaaataaataaataaataaatgttacattattattattattattattagtacaataatcttatcaaattattaattaaatcaccaaataaaaaataattaaataaagaactaacctcttttaaataatgatgatgatgatgatgaactagtagaagtagaaggatgatgattataattatgagaa

SEQ ID NO: 244795 - DNA, 1579 bp, Cannabis indica
ttattcatatttttcgtaacacaatggtcttgattactaactgtcgcttctccattttcgccaacatttccttctgatatagtagaagtattcgctgcagtaggtttgtgcccattataattccctgaggaattggcatttccattaggaaactttcgatggagtttgtatctagaaggataaccatgtatctaaaaacatcttgatatggcatagctaataataccacaatgagtgcacatcaaattaattcaatgtggttgaatagctcctgcaaactgtccatggttcgatccatgtcctcttttatcactgtcagtggaggcattcgacaagcatctttggctttcttcttgtataacagaagcgtaggctttattgatgttaggaataggatattgcatcaggatttgagatttagcttttgggttttgtgccgtaaataaaactcatttaaatataatcagatttactaattaataaaagatctgaaatcaatttatgttacatggttcacatgatttatttcatgattatatgtttaatgtataaattttattaagtctagaacatatgattattcatagttctagtgttgtcaacatagtggaatataatcattattatatgttaaaaagtttaattcccattattcgtcaatacattggatttagagtgacgtgataataattgataaggtatacttacaccttggataagtattatgtccttcctaggaaatgggcaaagtataccagtatcggatgtatggagtatacattagattagatcaatattgaacttggataagatatcataaacttaccgttatatcattctaagtcaatataattggttgatcttaagtctatagatcttaatgttgagatggttaggttcgatcttaattgtattatttatgttcttagagttgttccttgaagctcgtacagttgaacacatacatcttgggaacatgatagttcaattgagtgggagcgctaatcatagatatggaatctatagcatctataaatatttataagcgaaatgatgatttccttcgagcttggcttaatagagataaatgattgagacctcattttagtaattatattagtttactaaaatatcatttataggtagttaagtgttttaagaataaaatatattgaagggtggaacggtaaatttgtccctattcaatgttgatcatctatagaggatctttgactatttggattgtaacaatgcatatttcataatttatctatatcttggtacatataaagcgttctatataattaagagggcaattccaaatttatagtgccacaaggaaaaattaataagttagagaatttactttgtaaattctagtgctacttattggaagtcttgctatataggcccatggtcctcacactagttgagataatactgcttgcagactcaattaattagttataattaatcaattataattctaacattagactatgtcttctttatgaatttttactaagcaatggctaaattgtgaagaaaagaagttttggggttcatttgttaattaaga

SEQ ID NO: 244796 - DNA, 1004 bp, Cannabis indica
cgtgtaaggtgactttgtcttgttattgataagttgtatttaacatgtcctcagttttgactttgtggacatgccacatcaggtagacaaaatttaggataacattttccctccaagtccctgtttggacgttgtatgtatagggactttttagttcttgtcttgaatgtaggggcttttatcgagcagccttgtctggcaaagtatcagacatttcaaatgatgtgctttttaaacctttgttcttctctcgcccatgtatgcctcctcttctcttctttgaaatttctttctttctttgaatctgccattgatgagtttcaagcttaaaggttttagaaactttttgattctcacattttagagtagtcttttcccattataatttatttgatagctttaggatgcataatgtttaactttttgatagcaagatcgagtcttgtggtatcttgttaaaggccctgtccaactcttagatgttgtttaggaactatgtctaatacttagatcatgtatgggaactttgtatatgacttagatcctacataggatctttatccatgactcagaccatgtacaggaactctctccaagacttagatcctgtataggaactctgtccatgacttagatcccgtacaggaactctgtccatgacttagatcacgtataggaactgtgtccatgacttagatcctatatagggactctgtccatgacttagatcctgtatacccttgcctggtacttagccccttttaggaataatgttcggtacatttcaggttgaatctttcctgaacggtcaatggcctttgtttcataggctatccggttaataattcttgcttttatactttgttgattaccgactttgtatctcaaggctgtctggttaatacctttaggttttggtcagttaacctgtcttttgtctaagtctttttatgttctccggttgtttacctccctctatctttttgcagggatgaacccacatg

SEQ ID NO: 244797 - DNA, 1606 bp, Cannabis indica
cgcattgaagtgtcactaaaaaattttagagtctctcaatgttgttcactaaagatcgtttttgtagtagtgactactagtgctacccccactaaattgttgtcattgggaccactaccattgattcttcttggtcatttttcggttatttcattttctacttgtgatcatcttctcattctcttctacatgagccttagttcacaaggcagttgtcacacactcagtcagcttgttaaaggccaaaggggctgttggaccatgtatcgcaggcctcaaacgacatatgaactatttaataaccaagcgttggtcaaatatactaggacaggcataagatgatagctatacaaacttcatgtaagactcattcacagtcatatccgcttgttttaagcaatcaaatactccaataagaaccctcctgtgagatagactaaaatattgttccctaaaaactctctcaaaatctcaccaagtcatccatcagtctccattgtctaggacaaagtctcccaccaatctgttataccaccctctaacttgaacacaaaaaaagcaacttgatattcctcaggtgctcctattgtgtggaaatttttcttgatctgcctcaaccaccttttagctaccatggaatcttgtccaacctcaaactcatgcacttggatccgatgaaatatctaaaaatgatgactctatcgagtggaaagatccatctatgtagcgggaactgctcttaatgcttcaagaagagtgttcgtagggaattaagcttgtggatgttggacattaattggaggggaatcttctccaactgttctccttgtcttttttccttctggaggtattttcttaggtttgagaatcaaaagctactcagttagtgacgattggatgcaaataatataaatatgcaattacatataaatatgaagatacttattactattattacttaaaataaaaaatctaaactacttggtgacacactccaaggtaattaaacccggtgctctgatactatttttctgtaacgacccgacccctaggccatggcagatatgtaatatccataacttgagtggtcaaaggtcacattttcacctttgtagaaaaataacgcttataaatgatccttgaatttatatataatcacaaaatacttatttaaaaaaaaggaaactcctatatcgaaaaaaaaatattagtaacaaaacaaagaccactcatttatataaaagaataatattatcctcaccattatgtagttaccgaatagatagatttaatatgtcaataaaataccaaaattatatctagcatccataattcctcctttctaactagtacatagctaatttaagtcatctagaccatccattttaacttaaatacaaaacagtttcattaaaagtttaataagtaaaataagactaaaataataaagactttcttcttcaacggtaccatcctcatccactagcatcaaactcagttcctagaaggggagaaaattgggcggtgagcttataaagtccagtaggaaaacaactaaaattaaaggacccttggtttaataaaaattcctacatgattagctttt

SEQ ID NO: 244798 - DNA, 930 bp, Cannabis indica
agatcctggtaaaataattcccaacacaagatgcaacctggaaaaggcattgaagatcatcttgatgattttgacaaaatcattcttgatttagaaaacatcgatattagtatagaagatcaagatcaagccattatcatccttaactcacttcccatggaaagctatgaacacttcgtagacacaatgatgtatggaagggattctttgacattggaagaggtttaaagtgctcttatttcaaaagaattgaagggaaagtctgagttgaaggaagaacaatctggggaagggttgttgattgttcgaggaggaactaatcaaagggacaacctgtacattggaaatcaaaagaaaggaaaacagaaagggaaatacaagaagaaatgctacatttgtcctaagacaactcacttgaagagagactatcctgaacccaagaatttgaatctaaatcaaatgtagaatcatggcaatgctgatgtggttggtgaatgggatggcagtgatggatatgaaagtgttggtgtgatggttgtcacaattggagattcagggggagatcggatcattgattcaagttgctcatctaatgtttgtccaaataaaaaatcaattttgtgactacagaaaaattgatggaggaacagtgagattaggtaacaacaaatattgtgttattgtgggcattggatcaataaagctacaattatcaggaggaactcacagtgagttgttgcaggtgagacatgtaccagaaataaaaaagaatctcatttcagtggccatgctagacaaagatggatgctcaatcaaggtgaaaaatggtgttctcaaggttcaacagggttagaaaattatcatgaaaggcactataatgaattgtgttaatgataactctaggaattagaattattttcacattttttt

SEQ ID NO: 244799 - DNA, 1097 bp, Cannabis indica
aaaaaattaaaaaaagtaaaaattaaatagaactataaatacaattataaaaataacaattttacgataactataaaatataaaaaaatatatttttttactgaaaaattattaatgtaaataaaaaaatttaaagattaaaaaatttattatgatataattttgtaattttattttaatatttagtcaccctaggtcaaagtctatttgcatgatgactcatttcatcatcgatgacgtttttccgcatcttatgcctatttttttttattatattaataacaaaaatcatttcatttattattattttttttaaagatcatttcatttatttttatatatgttgtgtttcaatgtgttaaaatattcttgcaacattctaggatgccatgaacatgaaccttcccttattttaagaacccgttcactttccataaaactattgctaaaggataatgcaaattatttgttttagataagtattataatcacaaattagaatttaatgaaaaaaaaaacaaggaaaaaggaaaaaaaagagaaagaatctatttgagttcacacccgaactcgaaggcccaccttccatttccatgtaaaattctggaacattaatattacattaacacaaatgttcaaatttagacaagatggttgacgtggccattgcctaatcagaatgatgaacggtgtagaataagacacgtggacaattcctttttcgttgatctctccagtcggaccaattggcgaaagcacagaggcaatataaatagctgaccaatcacagactttcctcctcatcgcatattctcatcacagaccgaagatattgttattttgatctcgatttgtctctaatggcggaaaagagcttcaagtatgtaatcgtcggtggtggagtctcggctgtgagtttctttctattctaagcccgatcggctatcggaatttttgttcgcgatttctattttggcatgtttgtttgttttagattattccaactgcttagagagtttatatattgtgtttttttattctctttttgttttttactagttgattttgatcattgtgtttttgagtttgaagcctga

SEQ ID NO: 244800 - DNA, 1019 bp, Cannabis indica
acatagtcggttattggttgttattttagtcttgttagttggttttgtttaataacagttttctgttatgatctgttttatccaaacaattcattcccctttgtataaatattgtttcattcattaataaaataactattttttactgcttttcactaatatggtatctgctgcttaagaattttttttttctctcttcttcttcatcgtctacaccctgttctgccattgatattcaacatggttcgaactcgagctactggttcgaggagttctggccaaaatcccccgcccaattcctcttctacgattctagatgctccacaaaatgacgatccgatcattcctccagcccctgtgattactggagaaaactctactaaccagaatcgtcttcttcgtcccgctcatgaagatagctccagcccatattatctcagttcaggggatcaccctggccatatcttggtcactcctcctctctctgatcacaatttccaggtctggagacgcgattttgaactatctgttggagcaagaaacaagactgtgtttctcaaaggaacattacctcaacctccgatcgaagatcctctccataaccactggctccgctgcaatcaaatggtgatgtcgtggatacttcattccgtcactccagaaatcaagagcatcatcatgtttcttaatacttcggctgagatgtggactgaactccattctcgttttgatcaaggtaatggtcccagaatttttgagcttcgagaaacacttatcactcttcgtcaaggtgatgattcggttagttcatactttacaaaacttaaatgcatgtgggatgaaattcaggaattaagaccacagattccttgtacttgtgctgcctctattgacaatttggctttcttgaatcaagaataggttttacaatttctcacagggttaaatgaatcccatttccctcttcgagcacaaatccttctaattgattcatttccatctttgtctaaagttttttc

SEQ ID NO: 244801 - DNA, 1262 bp, Cannabis indica
ctactaatattacaaccactacagctacagctaacgaaactatggcagattattgaccatataattatcaataaaattattaatgaatatacccataataaaaatgccaagtttgcctaatgaaattatttcattattatatatgatgttgttagataacaatataataggaataattgtaaatatcataacatgaattaaacaaaaaaaaaaatatattaaataaaattaatataattaatttatcatagattttggcgttctaagatataatgagtaaaaaattataagttttggatgttcaacacgttccgtttgtgataaaaataaagtctgaaacttcaagcgaatctttgactatcattcgttcacttttagggaaaacgttgtgaataaaagttttagatttttcttttagcttttcaaacgttttgtattgttcaattccgagcaatattaagagagttatgatcaaaatatcatcaatcgtcgtagtaagatataatgcgtcatttaagaaccgacggtaaaaatattttgtgtcggttttgaaatggcacaaagctttttgtgtcaatttcaaactgacgcagtatgttatcaagaatattttattttttgcgtcggttttaaagtgaagaaaattatttttcgcgtctttttagaaacgacacaaataaaatactatttgcgtctacggtttatacgtcggttttataaaccgacgcaaaatctttatatgtcactaaaaaactgacgaaaatactcctttttgtagtagtgttttttatgggcattttgggaatttcaacaaaactagaattaggtcttcatttttaaaagggagaatcgcaaatttgaaaggagaagaccttttaaaacttagaaaaacatgaaaaagaatattggagatcaaactttggagcaattgtagaaactccaaatttaatttcttctcttctcttttaagtttctattttattatgtttctatagatttgattataaacttgttaatggagattgttagctaaattccagtttggtttaatggagattgtttgaaattttctatggattaatgttattttgatttctttcttctattgatgtatgatttatccatatttgtgcttattacatgtgtttgactgaccatcttatgcatgatttatgatttcaatataaaatttgaaaagtgaatattgagaattctctaattgaataaacacagatttcacacaaaacgagagtacttgtgtg

SEQ ID NO: 244802 - DNA, 3625 bp, Cannabis indica
agaaatgacaaaaggggtcatgtgggacattcttgtgacacaggtttaaatcacaaggcaaaatgtggttgaacgctttccaagtgaagtgcttaatttttggggggatagggagtgtccagagagttttccaccgattcttaagtggattaggatcggaggaggaggcacagtgaacatttgcaaaagaagaagcaagatggtatgttgaattgacagtgagaatgccagattgatgaaaaccccaaatgagagtatcagcagggttgggaataagagggatttggaaaacagatttggcctggtacatgggaaggtagtgctgcaactttgcaacattaatccaggtgctattaggattgatgaaaaaggagacagtggaaagagaagggtctatgggatgaagaagagtgtccggatttgaccaaactctccaagcctgcttggctagaagggcttgattatgatgagtgagggttctaaaacctaaacctccaaagaatttagagaccgagagagcagaccatttcttccagtggattttcctaacatttgaagtagagccccaccagaattttgataccaaacgttggatagtctgacaaatagattttgggatcttgaaacaggacatggcaaaggagagaatggcctgtacgattgctttgattagtgtttcctttccagcccttgagtaaaatttatcataccagatattcatcttagaagatacattttggataaggtaatggaaagatgagttggtaactcttcccacacaatgaggaactcccaggtatttgcggataaaaccctcgctggcaagctgcaaagcagtctggaacctatgttgtgagtcctgagaagtgttcggggagaaatgaatggaagattagtcccgattaaccaactggccagtggcctggtgataagtatgaagaatagcattaatggcctcacttgaatgaggcgtgacaggagcaaacaacatactatcatccgcaaacaaaagatgggataatgaaggagctcccgtacaaattttaataccagagaaaacatcagctgtctcttgaagacgaatgacagtagagagactctcagctacaaggaggaaaatgtaaggagataggggatcaccttgacggattccacgagaagagaaaaaagtgtcagacaaaataccattaagggataacaggtaagtgactgtggacagacaattcatgatgagagagataaagttggaaggaaaaaccacatgagcaagaagatgactgaggaaatgccattcaactcgatcgaaagctttttccatatcaagtttaataacaacccaacaaattttacccaatttcctggaatgaatagcatgaatgatttcattagcaataaggatgttatcagatatttgtcgactcgtgaggatagaactttgattaggggcaataacagaatgaagaactctcttaattcgattggcaaggacttttgaaagacatttgtaaagagtgttacaaaggctggtgggttgaaagtcacacacagttttggcatttttcttcttaggaatgagaacaaggatagtttcattaatcaacgaaatgtccccattatgatttagaatatggagaagcgcttgacaaagctcagagccaaaaagatgccaatgtttttggtaaaaaagagaattcaacccgtcaggaccaggggctttatcccaagaaagactaaacgtagtctttttgatctcatcctcagtgaaagcctcatccaggaaagttttttgaacaggagagagacgactagtgatcccttggaggatagaattgatagccattttattgacaccttgagtatggaagagattgaagtagaagttaagaaattgagataggatggtgggtgagtcatgtgccacagatccatcaggaagggatataccacgaatgaagttattctttttcctaatggaagccttatgatggaaaactttggtgtttttatcaccggctctaagcagtcgtccctagctctttgcttccaatagatttcatctttttggagtaacccatctaaattggattggacaaaagtggtctgctataaggattgagttgtaggcttagtgttgtttagaactctgtgaagctcagtctgagttctagcaatttggacgttaaggggatattgagaactactccaatcctttattacagagagacagtaagattgtttagcaacaaaattttgaagaggaaaggaaggagaggttgtagagagacaccaggaagaattgatagtgttagaaaaagatgggtcattaagccaatggttctccaagtggaaacaagtgtgactctgggtgtttgaaagcttgtcttccagttggactttgagggcccggtggtcagacccgtaaaaacccaaatggaagagagaagcacgggggaacaaatttttccaagattggttaacagtgcaccagtctaggcgttccaaaatgagaccatgcctccaagtgaatttgttaccagagtgattgagtggtaaatgattaccttatttcaaaaagaatggaaatgatgcatagcgtgtatgggaggaacagtggtcaaatttttatcactaacagataggtaatcattgaaatcacctataattaaccaaggcgaaagaggggcatcatcatacaaccgattgaggagattccaagtaacagacttttgatcaggataaggagagccatagtacccagtaaagtgccatttcatatcattaaaattacttataatacaatcaacctgattataagagtaagtagtaatagttacatcaatgcaattgttccaaaaaagtaaaagccctcccctaaaccttgcctaggcacttctaaaacattatcaaaatgaagcttgtttttgaaataaagtccacggcctggctgcaacttagtctccataacaaaaaataaaatgggctgatgctgcttgaccagcagggagagattacggaacgctcgaggactccctaaacctcgagcattccaactgcagagactcatttttctcggcggggtcgcatcgaaacatccgctgtttggtcatcatcagacaaagagggaaccactgcttaatcacttgaaagtgctcttgctctcttgagcatgctacgaaccgagtgaccaacttcagtagtttgcctagtgaaaggctgcctggttacagaggagggagcagaggaggaaattgtacatggttcattaatgatgaggctgtacttctgtggcaatgttgaaaagatggacggggtgggcaggattcaatcatagcaatacctttaccttggtcaatatgagtgatgacagaggtggtcatgatcggtagaggaatagtggagtgggtaaactatggaggaaatgacaccgcggagtgagtgggacaagtggtagaaaactcagggcaagaaacttgtggttccatacagagaaatcggtcaacggcttgttgcaagccttgatcattggtagtactatgagaaaaatactcctcgataggagttgagttggaaatctcaaacgggttcttcttgagatgagccagagttgtggcttggaggttttcct

SEQ ID NO: 244803 - DNA, 1615 bp, Cannabis indica
aaaagaaaagaattgaagaacttactcactggtttgaagcttcttgttttgctcggatgatgtcatcaacagttttcctgtgtatcctttgaagaatttgagagaacactcgtttgaaaatttttgctctgaattttcaagagtttgaatggctaaaaagatcactaaagattcctagtcctatttatgagcaatccaaaaagggaattaatcatttcaaaaattcaaatgtctcgaattcccccaaaagtgtatgttatgtactcattacagagagtgtaactgccaaacacacacaagcatcgaattgtgatttaaggaaaaactatcaattagcattaaatgggcagaaattgaagagacacctagtcaaggtcacatcgattcatcattcgacatcaaggacacgcgtcacccatccggacaagagtccagactgagtaaagtccacctacgaccaggaaggtcctacatccgaacctggcaatagaattgaatgacacatgtcacatatttttgatacctgggtggaggaaaatgtccctagtagcctataaataactaaccagcatctgtaatagtcaggtttctgagcaggattgtggacaacatgtccgaccaagtaggaaatgtttatgctgagcgacgtgccagagatgacaactttagagattaatttcgttgtgtctaaatgcgaagacaatccctataattatgggatcgattcagagaaaaaagataacctattctaagtttcctatttcatacattgtaattatagaatcattgtattttcctatttcattcattgtgagctaaagggaaaccatccctcatgtattatgtctttataaatagtgacttagcctcactatgaaagggatcgagagaattgctgtaggaagatactctagagagaaaagagtgatctaagagagaaagttactcagagataaattggaagagcaatcgagaggtagaacaattcattccttctcccaatttaatacaaatacaaggggagtaggctattaccacacttacggggccgaacctctttaaaatctggtgttcactttattttattatttttgctttcttttaattatattacttaatcactttatttctaactcactgtcgttggctagaagcgagatcaatattcattttctcccgagtttacttgtatctcattattttttttgacgaaacaatagcccaggttgacaatatatcaaattgagtacagagtccagttttaggcctcttagaagttttgtttgctccaaaaaaaaataattgaatcttaatctttgatgaaaacgaagaaatttctcggtagaaatttttgaaaaattcctttaaattggcccaagttgacaaaatttctacttagccgttgggccagcaccaggtgtcaacctgggcactggtctcttgttttagcccccaggttggcctatctcttctccaaaagcacctatctccctatttatgacatagatgaagaagatgcgcgagtcagattttcaaatttgatgcttagagctggcccaagttggcaaattgtcaacttggcgttggctgcccatgcattgtgtgttctaggtgc

SEQ ID NO: 244804 - DNA, 1047 bp, Cannabis indica
aatactaaatatatgttgcaactaatttgattagagtaacttattgtttatttttgtctaaggtttaaattagcataaaatcagtacgtaggacaatgttgttcaatatcttcctttaagatagtgactatttttcactcactaatcttactcgcttattcttatttgcggttagagtgccatttgctcgttttcgattcactaattatttagatatgcgtgaatcgaaaacccgttagaaatataacttcgatatcacacctagtatatatagaatatttatttatttatttattttttgataattatatttatttatttatttaattggtgaattgatgaaaaaagaagaagtggtggtcgatggtcgtggaggaaggcgatgcttccaaacgaatctgatccaacatagcctccactccagtccagtccagtccattccaccgcaacattctcttcattccaactccaatggctactcctgcaactctctcactctccttctccttagatccccaacaccaccttccccaccattactgctgcgcaacccatttcaagccccatcaaacgcttctcttcaactccaccactcctctccccaaatacccacttcttttccaccccaaatccgaccgttacatcgtcaaatcttcatcttcatcttctccgccttcaccttcttcaactacagctccagaaccagacccagaaccagcctcgccttacttcttagacacacttggtacaggtcggttcttgaccatgaagagcttgataagctcaaattccttgatgggttctcgtattctcaggaattggaatctggggttttatgtgttcgggttatgagagcagaggaaatggatatgaccatttctttgctcgctgagtcctttgctgagtccatggctatggcttcggcttatgatactctgcttaagttcttcataaagcaatacttgatggaaagaaggtctctaatgcctcatgctgtaacccttgttgggttttccagaaagaaaaacagcaagaagatgatgatga

SEQ ID NO: 244805 - DNA, 1084 bp, Cannabis indica
aagactctagatgtaaattttccagtaatgactcatagtccattccacgggtgttgtgattaaaagttgatttaaagattaaaaagctccactttgtttaaataaaccagtaatgcctctataaagcattttttttttcctttcaaatctaacaactttacttcatcacaattaaatattaaatttgatgacttttgacaaaatttgacaagtttccatcttttactttttttatgcaataatagaccggttggttaggcccatttttatcaggccagctctaccaatgttgggcctagttcagcctacagaaaattatgggtcagccattcattattaaaaaagaaatttatagacatgacatgatagataccatatgaatttgtttaattagtacaaaagtaaacttgatagaaatttcatgttacaaaatatgtacgtatatatttatagttcataacatgttaaaaattctcaattttatagttctctaatccaacacagcttaccagggcaggatcacacatggaaaaaagagtatcgaaattcaaaatttaataataagtagataatatctacaacccaaaattagataattaaaaaaaaaaagtcttctaaaataggtgaacatgaccaatgattgtatccatgttagttgtgaaatgatccatcctatattaataaaaaaattgtaggattatatatatgattcttatcttcatgtatatgcagcaaagcggggtttgatgcaataaaacgattttgaaatcagcataaaagtttgtggattttggacttaccttaaacgagttcggctcttataagctaatccatattattattaatatattaataagttgtactatatttaaataaaatgtatttatattatacgagttgtgtcgtgttaaatctgttttgtttataatcagatgatatttgtattttattttttaacattactgtcatattcaaatcaaacatatatttgtatgtaatatataagtctcaatatgatatgactatgaatatgaatatgtgtggtcacctctaatagtgtagtatttaaattggaagttgtaac

SEQ ID NO: 244806 - DNA, 3137 bp, Cannabis indica
ttgttttctagtatttttatagaatatcgtaaaagtgtaaaacgaaaaacttcaaacataaaaatatagatttttttataaaaaaaaatagtattttatataattatttttttaattttcgtcaaacaccccaaattgcttgggccaacccaacttacaaatagcatcacttaattcctttgattgaggcaaaagactaacatatgagaaaaaaaaaaaaccatttttgtaatataatgagtttattgtttacatataataattcttatattaaaaaataaatcaatttgtccattttgtataacttgtattaatattagatagggaattttcatattcccactaattattttttgtttttcatctcttaaagggacaatctagctagctagttggaacataataaattagtcatattctctagccgaccaatggttttattagggaaacttcctaataaaacttttatacttaaaatagagaatttgtttaaaacttttaattatgtgacaaatgactagattttaattaagtataatttcctttaaaaactatttgtatgcgtcaacaagtagtttttttcacatataaggaaaaatataacattcatagtgttacttataaatatgtacaatatattaatttccttacaaataaaactataaaactagctagtaataacgtactaagttaagttgttatgaacttattttgttttaatatcttagataagaaaataaaatatataatatgagtttgattagcactcaacttttgatctactctttagatatttacttcatttgaggcaagtttgtgaatatcccatctgagaaaaaacagaaaaagaagatcttttagctcacattattattttatatgggaataaggaatgtatttttttttcttagctaatggatttgtcttcttctctagatccaaatatatgtatatatgtatatatgtatatatcatagcatatattgttgagtaaataatcagtctttcttaagtttttagctttagaaactcttcatcaataatagatgatagtggtgtataatatgatgaaaccatatgtgtaatcaaagagtgagatacaagaaagtcccaagtttatgtttgccaatcttaggagtgagagaaaagattacaagctaaggagagaactgtaatttcaacaattgttcagaaaatgggaattttgttaagggaaaaaaaggagtaatgatgtgcacaaaaaatatgatccgaaaacactgcatactcattgataatgacacaatgagagttcactcaatctcatttaattaagataatactcacaatttaaaaaagtaggctataatattttggtgaatattgtgtatatattattacttaaaagtaaggttaattagtatttatttctcctcaaactttgacatgtatctcataaaaaacaaattttaacatatactaaattgtatcctttaaattttttagggtgttaaaaattttctttaaactattgtgtttattggattcaaagacttctatttaattttactaaaaatatctaatgtgactgttatactcatatttcgagcaagtaatatggttatgacatgtatgaaaaagttagaaaataaaccaactcggattatgaaaaaataaaaaagttcaaataactcgcaccgaaaaatacagttggtaaaaaaattcgaactcattctttcaaagataagggcgaactgtgaataactaccattttgtaagaccaacgagatgaacaatcaacgtagaatacccatctcgagatacacagagtatactacataacaacagtcaattaaaaatggtagataatgagttctttaagagtttgcaacttatcaacacacatactcgtgagtatgttgaaagaacaagagatatattcacaatgtaattcatcttgaaattatcacattatgacatcatctcgcatgtgtctccctcaacatcacagaagaacgcgagaagtacttcccaagataagagtttgcaacttatcgacccacatactcgtgagtatgttgaaagactaagagatatattcacaatgtaattcatcttgaaattatcacattatgacagcatctcacatttgtctccctcaacatcacagaagaatgcgagaagtacttcccaagattatacttagacacaaaaagctatcttcaaagtaaagcatcataagatggtcatatgtgttgcgaggagaagaggcgtagtcagcataactgctcttatagataaagacaagagcagttatggagtagtcagcataactcctcgtttgggaagagaaaatggtgaagaaggattttaacaaactgagggtgaaatcccacaaagatgtagtgcaaacgtgtacgatcccataagatattgagtttattatgggacggttagctaacattactctacagtccactctcttagaaagaattaaagaagcgcagtatcaagacctggacttagtaaagtctcgagacaagattgtagctgggaagatcaacaattttacagtggatagtaatggtatgttacagtttatggactgtgtttgcgttcttatggatgatgatattaagagaaatttttaatgagtctcatatgactccttattctgttcacctaggcacaatgaaaatgtatcaagaccttaaattcatgtattggtggcctaaaatgaagaacgatatagtagagtgcgttggaaagtgtttgacatgtcagcaagtgaaagctgagcaccaaaggcctgcaagtttgctgcagccattgaacctttcagaatggaaatgggaagacattgccatggactttgtagtaggattacctatgactacgggatagtacgactccgtgtgggtcatagttgataagtctacaaagtcagcacacttcttgcctattcagatgaacttctccattgaccagaatgcattatatgttagaaaaattgttcatctccatggtgtcccaaagtccattgtttctgatagggatctgaagttcacatcaagattctaagagagtttacatcgagctatgggtactcaactaaagttcagtacgacattccatcctcagacagatggacagtccga

SEQ ID NO: 244807 - DNA, 959 bp, Cannabis indica
ttatgtgagcttccagtgccctttgtaaagtgagacgctgaaccattactaacactggaagaactatacttaaagggaagaagttattttattatttgctaaacttcttgtttatgtataattgcgttacattattccccctaggtgatatgttttttggtaattttcagacagtaagtctgagttattttcttagtcagttgcagttattttcttcttaacaaaattgatacaagtttttgttacatatattatactatatccatcttcaatttttgatgcaggaacaatatatacaaaaaattggtccatttgtctgaaataaatatcgattattttaaaatttgattttgagaaagaaaggaaataagaaagtgttgagaatcgcttgagcttgatctaattcacagctccgtattcaaattaacaataaaacagagaaaatattgaaagtgtttcttttattaaatgtgaatcagtttgtgcaagattgttggtttaagcttatagctatttatagctttaggcttagactgtgtgattagttgttaattgtcatttcacaacttttaattaactctaactaacactaacagccttaacagtaaactaacacctactttaggtacttaataaagtacaactagggttaggggtgattaataacagctccaccttgagccttaatcctaggtcctgtaattattgtgagctgtgtgtagttgaagtgtagttgagagaagcttgaggtagtggatgaacataactcactgcagaaatttagtaagcatatcagatggatttttagctgttgaaactttctctaatttcacctttctatcttctacatctcttacaaagtgtagtgtaacattgatatgttttgttttctcatgggatacttgattttcactcaagtgcagtgcactttggctctcactaagcacggagattgactt

SEQ ID NO: 244808 - DNA, 524 bp, Cannabis indica
cttcttcttgtttcctttcatcgctaacaatttgtggagagctttccaattcttctgagggaggagccatgagagagtacctgctttctttttggtgcttgagatcgaatttgtgtatgtgacagttgtaagtaattgagtgattattatgacaacaccgtgacaatgacctttaattccatcctttttttgatgtgactgtgactacagtattcttaattatctatttgtagctaatccaaattagctaaagaagcacattaacaaagccaaaaaatttgtcccatttttacctatacaagccaattaaaacactccacctcaatttggaggtaaaatcaggttttactcaaatgtgtttattaataatataataaaaagtgtgtatgttatttttcctttactaatctcatgaattgtttaaaaaacttaaccacattttaaaatttagatgatgtagtaatttagttataacgaatacaattatgaaaaaactattccgacatatttttcaaaaatagagg

SEQ ID NO: 244809 - DNA, 2693 bp, Cannabis indica
cttttgttaattttttgtttcttttttttatgtatttgtgaaatatacctattatttttaatacgacaagaaccataaattatatgatttcacaactctaagtacatttaatatttagttttttgtccatatttacattttaggagaaaaaaatacattaatatttacttaaaagaaattatacaaaaatacaccaaatttttccatatatatatattaagacataattaaacaacttaaagaattgtacaaattttgattcattttttttttctttcttttttttaggaagtactagaaggcaacatgtacaatcttgaatcgtacaaagcctcggcagacagcttcatgtgcaccttagttccggagtcatcatcctcacacattgagtacacacccggtggcctcatatacaagcccggtggcagcaatttgcaacactcaaccacaatcacatttctcatgcttgtctatgccaactacttggccaaaacatcccaaaccctaaattgtggtaacataaacgttagcccgacttggcttcgccaacaagccaaaaaacaagtcgattacattttaggcgacaaccctatgggtatgtcctacatggtagggtacagcgaccgataccctaaaaggatccatcaccgaggctcatctttgccctcggtgaaggaacatcctcaggctattgcctgtaaggaaggctcaacttacttcaattcgtctgatgctaatcctaatgtgttggttggagctatagtagggggtccggggaaggatgatgtgtatgaggacaatcgcgctgattttaggaagtccgagcctacaacttatatcaatgccccatttgttggggcccttgcatattttgtggctaatccaaacccctaattttcttttttgggcaccaagacatattatggttggtgtggccaaaattaagtatacaactaatttttgtgtatagtaccaataacttcatacacatgaagatagggaaaagataaatgtctctcatcttggttggaggcaagagagaagaggctttaattgttgaaattacacccatatataaatatttatatatttataggtttttcttgtcataaaaacttgtgacattttcatattgatgaaaaaaaaaaatccccattagggacaactcagtgggactgagtttttttttttaattattttaattttattttggtctatatattataagacgaataatgaagagctttctaatgagaaatccaagagcatgatgtggtcagtttgttggttttgtaattatataaatggaatatatataagtattatcaacttttgttgttaccattttaaattgtgacaaattaggagaattatgatattttacattattcattttgccaatatatttttttaataataatatattaaaattaaagcataagttttgaattttttttttcagacttcgtttagtacgtcgtattgtattatagaactcgttggtacgccgtataagagtcgtattgtattaaataataaataatactatatttggataaaataatacattgtattaattattacggtcaatttttttaatacaatgtatgttgtattatttaatacataacaaatggtccgtattagcttgtattataatatttacaaaggcttcggggtcaacaccaatctccaatccagacttgagacccagacccggacctagacccagacccggactccaaaccccggacccgatcccagaccccggactcgaacccgaccctggacctggacctggacccggacccagacctggacccagacccggaccccgaacccggatcccgacccgaaccccagacccggacccggacccggatcccgacccggaccccagacccagacccggacccgaactcagacccagactcgggacctgaacctgaacctagaatccaacccggacccagacccgaaccccgacccaggacccagacccggacccgagactaggattgggactcggaaaaaataatactaatacaatacaatacaatatattaatacaagtcaataccaaacatagtattgtattaaataatactaatacaatacaatacaatataacacaatccaacacaatacaatacaatacaatacgacgtaccaaacgagcccatatagtattatattaaagtattttttatataatattttcatataaaactatatgtggtattaatttttatgagtatacataaatatatataatattgagacttttttatttttacacttcaaaatagttttattttttatttttacggaattttatatagaaacccctattgcaactgacggagcaacctaaattgtaaccaaaatctgtatagcaacccacatagaaactaccggaaaaactaacttagaaactcaaactgtaaaatttaaaaaaaaaaagttaaaaataataaatagggtaatttccttataatattttagtataaattaaaatataatatagtattatataaaaaatataatatataaccttacttaatataatacgacttaatacaagtcattaaacaaacttttaatgacacattatttgtcttgataaaaaaataagtacaagatagaaaaagcacgcacatgtgcatatcctaaataataaaaaataaaaacaa

SEQ ID NO: 244810 - DNA, 1065 bp, Cannabis indica
gaaatgtgtttcttttgacatatctcagtcatggattgaagtgttcagtgtgttagctcataatttttaatcgaatttaaagggacctacaattattgctctctgttcctaggagtagctgtgacctaagtttgggagaatgaatatttcctactgagggaatttctctcttaattctgatgcttctgtgatagctggaagagattttgctaatgtgattctatgggaagtgttgactatgtgtttcaggggatgtttcataattaaagtagctaagctcttaatttcgagaaggataatatgctaattttatgggatataatttagagagaattgattatgatgctttagtagtggtttcttggattttaaataaaatggccaatattatttttagtaatgttatttctaatgttttatctttaatagttacagtcaatggtggcactagttatgatatctcacgtaatgtaatagcacatacactagctaactgtattacaagtctgttaggagagagcactcccatcagcttctctactctattttcttaaataataccaaaatcttttaggctatttttagcctaatttttgggtcgatgtttagagtcatttttagtctttgttaatacttttaggatagaattatgctttttttctgtgtttttaagttcccgtggttttgaaatgtcaattgcatcaagattcaaaaggaccgaggcgggatggatgaaaaaaagtgtacatcaacataagaaatattgcatcttgtcacggagaccatgacttatggttgcagcaagaatgagatacggagatattatttcaagtgtatacagtggtcgcggggaggaagcttagggccgcaacaaggtcttcatcaccgcagcgaccatgccttatggccgcggggagaagactggcaaaaagaccctattttcactttgtgaagtcaccgcagcgaggcaattagtggtcatagcgacaaagtccgtacggacacgaggggcggttttgtatctttgatatttttagaaatggaaccctataagaaaaaaggaag

SEQ ID NO: 244811 - DNA, 1326 bp, Cannabis indica
tcttaatatagttttacagtattaaaaatattgttcaaaatagtttgtttgtgttcaacaaactgtgtttaattaaaagttgtttttgataccataaattgtataaaaattttcaaaaattaatagaatatttgttataattataatatgtatacattattataaagtagccttaatttccatagtattggtaagacctaattaattaagtgctaaaactaattaattaattacaggtaatagtattatatattactggatcacttactactgttcttggaccagaacacaagaaggaaattattcgctacatatataatcatcaggtataattattttttaacgagtattgctataaagtatcagtagtgtctaaacattgttggttcatatatccattcattatttttttttcttcatatatatgttattagttaattaattatacattatgtattagaatgaggatggaggttggggacaacatatagaaggccctagcactatgtttggctctgtagaaaactatgtttctttaagattgttgggagaaggtcccaatgatggtgaggaaattctattgctaaaggaagaaaatggattcttgatcatggcggtgctgttggcatcccatcttggggaaaattttggctatcggtaccaacaatataatattatcataaaatatatatttgcctttttaattaagaaataattaggatttaaaaactctttattaatttattaatttggtttattatttttaattatatattaggtgcttggtgtgtttgaatggtcaggatgcaatccacttcccccagaactctggctattgcctagagcgtttttccttcatccaggtccaacaataaaaatttattaattcacgaataatctctaatttattatagaaataaattaagttcaatttaaactaatatttataaataaaaataacttcaaagtttaatatatattttttatgaatcaactataaaaactgcataaacttgccttcgaaatttagaaattttcgctctatatcaatccatctcagaatagtgctcaaatctgagcccatgcatctccaaccaagccactttttaatctcctgtaaataagtcttgtaataacaattcaagtatgttccacgaattcagcctggatttcacacaataaacacttgtattctaagtttaatattaagtaagtgtacctgtaaataagaataattaccacttaattaattaattacgtcatattaaaatctttgaagtcgtttttattttttttcttttttttaattgttgatattctactata

SEQ ID NO: 244812 - DNA, 962 bp, Cannabis indica
cataaaatcacatcaaacataatatttatctaattaacaaaactctatcattttggtaactactaattttaacccgatatttaaataaatcatattggattgtactaaccatatattaacatttttttttgtgaaaccatatataacatgttaatactttgaacatgcataacatattttaacctttgtaaattttggaaattagacatttaaaaaaaaataggtttaaacaggtcattgtaacacttacactggtcaattttaacatatgtacaacactataaataaatgataaatttaataattagaaaataattaatcaaacaccaaaaataaacatttgtaatgttgtagatatgttataaattatttagttaaccactttatgtcatgtttgatcatttatatttaatctcattgaatgttaattctcccatttcactattaatttaattttaatttaaaatttacttgtgtcttattaaatttaaattactaagatctgtatttatttctttgtactaaacctaactccattaattttgtatcattttcaaaacgtgttataatagctacaaggtagaaaagaagtacaagtgagctaaaaaagaattaatcaactttaaataaataatattaattaaatgattaaaaaaaaagtgaaaatacgtataatataatataacatcaatgaaataacatatcgcatatatgttgttaattttattctaatagaactgcatttttttgtttgtgctacaatacattgtatgctaaatatgtgttgtattagtttggctcatattttttaagatttttaaagggtaaatactattttggactctctgttttacaaaagttatcaattggaccctgtgttttgttaaatgacaaaatggaccctgtattttctagaatagtacaaataggaccctgaattgattttttgtcaaaataaagtt

SEQ ID NO: 244813 - DNA, 2005 bp, Cannabis indica
tctccaaacttcagcaatcttgcttctcctttttattcaaaccccaaacattgcaacaactaatattgcaaaaatccattaacaacacaagctgaagtcattctctcccactacttcttcatgctgtccccctgttaatacctcaaaggaattcctaagcactttctcacccttgtcactatcccttcttgtcgaaccagagcccttagaaacaaagttctttggagcaatccaatccccactagctgttttgacagcagttttttccccttggccattgactgttttttcttttaaaactgctatagcatccgcctcaatcataggggcagtagcctcagccacatccttgctagcagtagccgcaggaggctgctcaattacagcaagagtaccatcatcattcccctccttttccaccttattttcttgctttttttcctcctctttaggcttctcaaccttcctacattcagccattatatggccaaacccacaacaatacttacacttaaccgagagcaattcatattcttttacttaatctaaaagctgcccatattcattaacaaaccaaaatgagcgttccgggttctccattatgtccatttcaacagggactcgagcaaattgaactcttgttctttccttggtgtgcttatctaccattatcggcttccccacagtgctaatgagagcactcaaagttttttttccccaatattgaagaccaagattaggcaacctaatccaaagaggaaccgatttcacaatcctaacaacattcaagtccgctgtccaaggtctaacaatcaccggtttcctatcgaattgaatcattccattctcaaaaacttcgtctcgcgttgcttcatcattgaacttaaccatagtgagcccttttgccattctagcaatctgaactattcctaaatgcccccaaattctacgaataaatccctcaaacaacactgcaggaacattagcacccaaaaccatacaaattacagctaatttccaactctcttcttccattttcacctcctccatatctatatgagctatctttctaccctctttaatcactggttatgaataagtcaatttagcatcagagtttaaaactttacctcgtgagaaatgctgccagtgggacgtagccgccgattgtagatccacttcttcggcccagctctttctcgcagaaatcaatgaatcttcatcatccatgttctctgtcgtgagcttcttaggaacaaaaatcatcgactgtccatcttcatgcgagcacgcggagctctctttctccagatctggaatcaccggtgaacccttcgcaaccttgaagcccggcctgcgacctggtttcttcttcctcaccatggagacgagagagacctaggtcagaggtgcatttaaaaaaacacaaactttttacaaaaaaaaataaaaaataaaaacaaagcattaaataagtgagagccacggtataaattattactaatttcctacactacaccacattgtagtggtcatgtacccccttttatatccacgcactacaagaaaaataggcaaactcggcacaccaatctcggcgggcccgcgtgtgtccgtcaagattggtctctataacggcaggctcgttgtaaaccgtcaagaaaggtgacccaattattttttttaaaaaaaattataaaagttagacccaatctcgacgggctgaaacaagactgtcaatattgtgtgcccaatctcggcagtcctagttgggcttgccgagataggccacgaaattaaagaaaaaaatcagcccagcccaaatcatcttatatctctctctctcaaaaccctaatctttccatcaatactcagctgtaaccctcttcttttctctcaaccattccttctcttcttctttctcgcatggacggcagggcttgaagattctctctcatcattgaagactcacaaacaaacggaggttcttgttgctctctcgtcg

SEQ ID NO: 244814 - DNA, 994 bp, Cannabis indica
acagccaaacaagtaagttttacttttcttttctacctatatatattaatgcgaaatttgtgaaactaacattaagaaacactaaaatttataaataactcacttaatttattggtcgcatgcatagtgtaggtttatggtcgttttgcgatcatagtagttgtttatggtcgcacagtataatttatgatcgtttctacgaccatacaagattattttgttaataaaaatttgataaaggctagttttataaaatattttttattaatattatatatttgaaatgaatattaaaatatattaattaaatgagaataaaaagaatttttagtgatatattttgaaaaggcataaatatgatgtaatgtaaaaattttaagtttaagataaactaaagaaaataaaatattggtataaaagataaaaagtaaaaaattgttgaggtcgtctaaaagcttcattgcggttaaaagtgagttttattgttaattatgaattttaagcaatatttaatacttaaatactaataagcattatttaacacgctatatcgaatcatacattttaattttatagacccttgctattgttactacctgtgctgaaaatataaagcctaagacaatataaaattttgagttcaattaattcctttccttacacatggttttgtgctgtatgcctaaaccaaccaatattagttagaagcatatatatatatatatatataaatatatatttattatattacacttaagtttaattaaatttaaagataaataatagggcaattttctaatgagacttactctgacaaaaaaaaaaaaaaaaaaaaaaattccaatgaaacttagggcttagcttatttatacctagatcttattgctataaggttttagtgtactcaacatatcttatttcaaattaaaaaaataataaatacttttgccttaaaaacttttgatatattatgaaatccttctccttaaaaagg

SEQ ID NO: 244815 - DNA, 1552 bp, Cannabis indica
tttcttaaggataaagtgttatctgttgtccacccctgacatcataaattgttctccaaggctggcaaagaaattttaatcaaggttgtccttcaagttattccctcttatgtaatgaccggtttttgtctccctactaaaatttgtaaagagattgaatctattgtgtttagattttggtgggggtcctctattgattacaaatttgtgcattggaaaaattggcgggttatttgtcaatccaagttcatgggagggttaggttttaggtctctgacacattttattcaagccatgcttgctaaacaagcttggagactccttaaatgttcaaattccctgctgagtctaactctgaaagctaggtgttttccccattcttccattcttgatgctatttgtggtcatagtccttccttctcttggagaagtatactttggggtagggacttgctcaataaataacttatttggaagataggaaatggacataaaattaatacaattgaggatcgttggttacctggctttggtctcaactctaacaccttattacatcattttccttatcccaacctatcttttttcatctctccttctggttcttgagatctggataatttgaaatattattttgatgacaacctcattgatagtattcttgatattcctatggctagacataactataatgatgacctagtgtgggggaaagacaactctagggtttttagtataaaaactgcttatcaccttgctgtaagctctagatatatttcttcctcctattcttttaatgataataagcgattttggtctaaactttggttttcttgtgtaccccataaggtgaagcatttttgtctggcgtgtgctttccaattctatacctattgcagttgaactttttactaggcatataattccttcccccatctgttttctctgccacacgaaattggaaacagtaacgtatgtcttccttgaatgtttcagatcaaaaactgcttggaagcactcacctttctataattattttgctgaaaataaattacttcatattttttcttttatcactaaggcttttgaaacctttgataagtgtgtgttggctacttttttatgtttcctttggacgctttggaatcaaagaaataatatttttcatcataaaaagtgtttacctccaatgcttctttatgatgatgaagccacttacttacaggaatttgacaaagctcaacaagtgcaactaaaagtagacgacaaccacaaactgaagataggcaacctactcaacctgtgcttggcatgttcaaaattaatattgatgttgccttagataatatcttgaagaaacatagcttgggaattgtggcacaagatggatatggtaaattgattgctggcgtaattactcctatatcaggtaatgtgtctccagaggttgctgaggctaaggcccttcttttggccctgcaatggattcaagcgattaagcttcctgttggtatcattgagacggactgtaaaaacttagtggataagactt

SEQ ID NO: 244816 - DNA, 692 bp, Cannabis indica
aaaaaataaaaaataaaacaaactaacaaacttgtttcccatgtataatgacatgaatagacatattgaattaaaaatacttacttggcatgagactatggcctactcttgtaggtgacagaggtgaaggcaggctctctcacacattcttattttataataattataaaattgttccttcaactttcgtagtacaaattactaaaatatgtgcctaatttttggatttcggattaacacctgaacttaataattgcctttctttaaaatccgaacctgacacatgcgtggagcatttttgggttagacccgtcccaaccacacgggtttttaattttttggttttttttgcagcgagttggggccagtggtgggttttcgagtttgcgggtttaaatgttcagccctaattccatctcacctccttctcaaaccacattacaaaactcacgaacccaaaacctaacccacacatcgatcggtctgttctccctctatcgcgcgagctcacggccggttaaccaaaagcctaaccattgttatgtcctccatcaaaattgtagcctccgtcctccctctctctctctctctctgttgagctcacaccaccggcgccacccaccatgacaatatcagagtaccaccacacgatctctctccccacgacgacgatgtcggagcaccaccaccac

SEQ ID NO: 244817 - DNA, 2194 bp, Cannabis indica
ttgctttgcttgctcaagcatccttactctcaagtttggatgaagcctttagaaccactgtgtatatccataataggttgccaacacctgtgttaggaaacaaatctccacttgaaacattgttcaacatccaacccgattacaaatcctttaaaacatttggttgtaaatgttttcctaacataaggccatataacagacataaacttgagtttagatcctctccatgtacttttcttggttatagtctaaaccataaaggctataaatgccttgataaaaatggaagactatacatctctagagatgtcagtttttgaggagtttgtgttcccttatgaagagcttgctgtcaaaaatagcagtcccttgtctgaatcacacacaaattctgttgtatcagccattatacctgtttgctctcatcccaaaactcattacaccatgacagatttactttctccaaatacaaggattgatcaacctgttttacttgacaattcatcaccatctgttgctattcaaaatgttgcatctgtttctattcctaacagttggctacctagtcaacaagatgtgcctgatgcaggagagttctctcgacaaaacattgaagcttctgatgttccagctgcttgtgaagtttctgcaccaggaactcatcaacctgaccctggtcaacttgtgcaaactgaccagcaatctcttcaacctgatctctcttcagcaggtccatctgaaatgcctcctataccttcaccacatgctgctgctcctcctcaacagaacacacatagcatgaaaacaagatccaagtgtggaattcataagaaaaaagcttacctggtcacaaaagttccttccactcttaaagaagcattgcaacaaattcagtggaataatgcaatggctgatgaagtcttagcattaacaaggaacaaaccatataccctggttaagttgcctcctggtaggacagctattggttgtaaatgggtatatcggatcaaggaaaaccctgatggcactgtcaacaaactaaaggccaggttagttgccaagggtttccatcagcaacccggatttgattttacagagacgtttagccctgtggtgaaaccagtcacaattcgggtggttttaacacttgccttgtcaaaaggatggagtatcaagcaattagatgtgaataatgcttttctcaatggagaattgcaagaagaagtgtacatgattcaaccacccgggtttgagattcctggccaaactgatttagtttgcaaacttcataaggctctttatggccttaaacaagctcctagagcttggtttgacaaactacaacacagtctcttatcccttggttttgtttcatcaaattcggatcactctctgtttattcttcactgcaatacccatgttaccttggttctggtatatgtagacgatattattatcacaggaagtgatgatgctgctgttgctgatctaatttccacactcaactctcagtttgctctcaaagatatgggtcctctgcattattttttgggcattgaggttcaatacactgatcaaggacttcatttatgtcaagcaaagtatgctcgagaccttctgctcaaagcccaaatggtggatgcaaagccttctccaacaccaatggtcagtacaatccgtttatcagcttatgagggggaacctatggccgatgtccaacactatcgatcaattgtgggagctctacagtacctcaccattactcggcctgaactctcctttagtgtcaatcgtgtctgccaattcatgcaaaagccattaactacacattggttagctgttaaacggattcttaggtacattagtggcaccacaaactttggtcttcacctcaaaagaacccaagtcctttgatcttgtggctttttgtgatgccgattgggcatctgaccctgatgaccgtcgttcaactactggctttgccattttctttgggacaaacttaatcacttggaagagtaaaaagctaaccaacagtctcacgttctagtacagaagcagaatataggagtgtggcaaacgttactcgctgaactgtcctcggctacattacctattttctgaattgaaaatccagcttcctcaacctcccacgatttggtgtgacaacttaagcacggtattgttgacacag

SEQ ID NO: 244818 - DNA, 1138 bp, Cannabis indica
taattgtcattcattcacgttttataaataatcagtaatatcttttactaatttaaaagtaaaaaagagataagagttacatatttaagtgattgtcaaattgaagaatttgtaattcttattttgtgatcactctatacacattttgtaactctattggacgaaactattattttgctatacttaaatatttaatctaaatattatattatgtaaataatataacacaagatttggtagtactaattggcgaacaaaatacttaattggcctaattagaaataatcaataaattaataaattaataggaagttgggagaaaaaaatgagtgtccacacaagtattagaaaaaaaaaagagtaaaattatagtaaatgatccaaagatatagtagtaattaggtaaatgtacattttaagtcacgtagataaatgacccttttatgttatttaatccttaaattttcatttgccacataaaattttcttattttcacgtttttaatgtttaacctatattttttattttttatttttcttcatcatttttttattatttagaagaatatcacttaaatattgtggatgatatttatttttaattatatataaaaattcactacaaaaaaaaaatactacttttagtcacaactttttagtcacaacataatttttttgtgactaaatgtgacttttagtcacaacaaaatgtttgtgactaaaacatagtatttaattacaagttttcactaatttaattttagtcacaacaagtattgtgactaaatatacatttagtcacaacaaattgtaatttttatgactaatacttttagccacaaaccttttagtcataatataagaataataatttataattagtcacaatttttttacttttagtctacaagttttgttgtgactaaaagtaaattttttgtagtgattatatataattttttttgattatagtatgtatactttaatggtggtgtatataattgtattaatataatatatattgtttgaataataatattctaattttatttttattaagaaaatatatggaatataaatttattattgtagtatattgattttttgttttacctatcaaattatattgtgttacata

SEQ ID NO: 244819 - DNA, 1348 bp, Cannabis indica
ttaaactttttttactaaaattggacaaaaacttcaaatctaacaatctcaatagtttaggaaactttttaacgacctaagaagtttaagagcgtgatttggtacacgtcaaaattcggaaaaaaaaaaatcataaataaccttattaaaaattgatcatatacataatcaaaattattttctggtatgtgcacacattctcacaactagtccaaaaactaaattgttaaaaaatgtaaaatgttgcttattaaaatattattataatttaacattgggttggaactattttggttagtattcggcttgtttaatttatgttgttcagaaaaaaaaaaaagaaaattatgttgtcacatcactttgtttcaaaagaaaaaagaaaaatgagatatgatgcagaagagaatctcatgatcgttctgagaagtcatatctatcaaatttttttatataataaagagttttttgggcaaaaaaataaaaaattattttgataataaattttgtagtaatttttttttcaatttttgttttacttgtatttaattattctttaacagtaaattttcgaaattattaaactagtagtaaaattaaggtatttttcggttaaccgtggactacttatgtgtacactcttatacacatgacacgattatattagtacacctaaaattattattttcaaattttattttaaaattaaatgaaatattttaaaaaatatatatattataaattttgaaatgatttttgtatttttaaaataataatattagttatactaatataaatttcacaaatgtataaaagtgtacacataagtagtgataactgtaaaaaatagatgacaccttaaatttgcaaccagttcagtaatttagagaattttgccgtcaaaatttgaagttagatggttaagtgcaagttaagcgatagtttaaaggatttagccccaaaaaactctataataattgcttttctttaacttactataaaaatggaaggctagtcaaaataaaacaacaaaggtgtctttggattgagttgataatatggagaaagaaagtctggaggaattacagagaagatgttcacttttcaaagaaatatcacaactatatgaagcaaattatgaaggtaggtttcatataaatctaataatatgtattaattaaattaaccttttcaagttacaatcaattaatgtgtttgtttgtttgtttattaatataatcagaaaagaggaaggttcaagaattgaagcacaagcttgaagaaattgaaaaccaacacaaggtgagcatacacttaaaaatatcaattacctctttattatcaaatt

SEQ ID NO: 244820 - DNA, 1274 bp, Cannabis indica
cagtagaacaactaaaaaataccagtaaaataccagtgaaaacttaacacagtatactgcagtatgaaatttataaaaaaacacagtaaaaagtaaaaaatactgcctgacagtattttgaaaaatagcaaaagttagtataccatgtaaatttctccctttttttcatttaaaccttagatgcgggcctagacagtttcatcccatgaccggcccttgttgggccccataaaatgcctaatagcttcttatactgaattattatatgtcaaatagtttcacaaatacaaaagagagatggaagtgaagtttggttttatatcttcgtcactcaatttttatctcattctaattgacaagtgtcggtatgtagtaagtcgtattttgacaccgtatacatgcaatatattctctatgtatatattgtttttaaagcaacgatgtatattttatttcatttgttaaaaataaaaagaaaaaccatatattttattgttatttatataaaaactgtgggcttgtttggctccattcactatgtctttatcgagtggctaccaaagttttaatcttattaaacaaaatggcgaaaatcgacgtcgtgtaattggaccgtacttcttattctcttattaaattctcatttattttccttttattttctagcaagaaaatttattagcttattataatgcggtcaaaaaaataaaaaagtacacaactacgtataaatatgtgtacgatcgaccctgatgttacttatgctaaacatataacatgctattaggtattatttgcccagcgtccaccaaatcatactatataaattttaataaatttttatagttatcattaaaataaaataagtaataatttgatattaaattatactaataatcatataattcttttaaataatgctaagtataatagattctatttactattcctcccacaaataacacatgatccaacattgtgcctattacaattttcaaatggtttttaattaggagttttttttttatattttttttattttgtattaatattattttaaataagcatttatgctactacaagtaaaattaaatatttatattgtttattaatttcaaatatactatttttaaagtttcttatttataaaaatatggtagaaaaactctcccaaatgcacaaggagaagtgtgacacccatgtgtggctatgtgggcgagtgagacttacacgcgagtgaatgacaaagccttcagagttgcctaacgctcaca

SEQ ID NO: 244821 - DNA, 2474 bp, Cannabis indica
gtcttcgaatcgctcgtactgcccctactatctctcatctttttttcgcggatgacaaccttctttttaatgctgcttctcttgtcgtgacattcactacaaaaaatttacttaatgactatagccttgtgtccgaacaacgggtcaataaatcctccttttatttctctcccaacatggatgagcatactaaaagatccatcaccatcattcttaatattcctatccttgaggctatagaaaagtaccttggtctgcctcaatcctttaggggctccaagaaagatgctttcaatcacctttctgaccgggtttgggctcatttaaacaaatggaatgagactttcttttcgaaaggcatgaaagagatcttactgaaatctatggttcatgctattctgtcctatgccatggcttgtttcaaacttccttgtcgtttccacaaaaaccttgaatctcttatggctaacttttggtggggaggcaccactcaaactgggaaaactcattgggtggcttggcgaactctatgccactccaaatttcacggtcaccttagctttcgatctataaaagactttaatcaagctatgttggccaagcaggcctggctcatcattcaaccccctcaatatttgtggcttctttgcttaaagctcgttatttcccccatgccaccttccttaatgctggtaagggtcgacgacctttactagtttggaatagtatctcttggggtaaggaactcctcttgtcagggcttaagaagaaggtaggtaacagtgaaaaaatctctatatatgatgatccctgggtactagggtatggtaagttggcctaccttagtgttccctcacatcaaaccaaaacaatatccactcttatcactgatagtggagcctgagatattaactagcttcacaacttttcccccacgacatttgccatgccattctctccatccccctccccaacactcacaccaaacttaatttactggcccttcacacctcatggaaattacatggtcaactcaggttaccaccatgctcatgccctaaacacccaccaagaaccttaccctcaaattcatctccccaacataattggtggaaatctttttggctattactaattccctccaagaccaaacactttgtttggagggtctatcatgatgctctttccactggatctaagcttcaacaccaacgaatcatccacaacccagtctaccaaccctgctagacgacggaggagactgtagcacatgctctttttggttgtttaactgtccagaaggtatgaaaattaactcccttatttgaatatattattaaatataacatcttttctactgttgataggttgcatcttgtctctaacactttctctagtagcgatttccaattttttctttatttgttatggaaattatggcactgcaggaatgaacaattatatcatcaaaaagtttccaatcgacaagtgattttaaactggacaacgacttacagacaacaataccaaattcatactcagacccctacatcttccttagcacacctggctagccttcctagctcccactgggagtcgcctccacttgacaatttgaaattaaacattgatacaacacatgatctcaaagctagaatgatttatggtatgagattgtaatggagtcattcttgccgctacgtctcttccttggacaagagttttttctcgtcttctgacggaagctctttctctttaataagctcttaaatggtgtattgagaaacagattgtaaagttttggtagacagttcttttttttttttttttttgaagaaaagtcttgtatagacaacagaaacaagactaactgaaaggcaaagaaccattccagaggaatttactatcaagcccaataccccacttagcaaccctatgagcaatagtattaaactccctactgacatgagctaaccgtagagatgggcgaatagataacaagttcttaatacaaacaattaaatcatcaacagaactacaaccctgagtgtcttgatgaagtttatcaacaatggatttgcaatctgtcttcaatacgtccacaggcaggcaaatagaataagccaactacaaagcatgcaccactgccttagcctcagctaccatcggtgaaacacaacctgaaaatggtttagccaatcctgctaccacctggcctgaatgattaagaacagcaaccccaatgctgtgcttctgtctactcagatcaatggctgcatcagtaaagatctggaaatcaccttcagatgggagctgctgcaaatttgtctgatccgaattggaagtacaaggcagcacctgagcctgctgtgaatctaaatacttgaagaagaaagtgacactccaatcataaacatccaaaggttggttacacagattatgatgaaaaatattattccttagattccaaagag

SEQ ID NO: 244822 - DNA, 721 bp, Cannabis indica
aaaaaagaggagataaaataaaagaggacaatataaaaatggtatagagtgtaatttcacctatatttttttggtaactatttgatacttttgtggcaacattttgtggtaactatcatgtacttattacctttacagttgtatagagcagtgtagtagtaatagtattattatgagcttaattttctatctgtttgattgaattataataaattagtcatcttagctcgatcgaaatccaaattggggtgctaatttgtggaatagacatgtcattattaacactgctgtaaaacaaattaagcttgttttgaagcagcaaacaccagaacaagaagggtatgtgttactagtaactgtttttgtctaccttttctactcaccaatattagaaatggtaacctgttacaataaaaattaaacatcatttgcaaagtgacataaaggtactaattaaggataaaccttagattttcttgaactagtagctttaaaagacttaatactcacattctcataaatcaccaatccattaaagctttcattgataagacttaccttaaaatttaccttaaaggacgttcattagacattaatttcaatcgtatcttacacttaaatttgattatcaaatcgccattttacgatatctatcgaacaatttttctttggggtaagttgaaaaatgcctcttttattcatcaattaatcaaatttacct

SEQ ID NO: 244823 - DNA, 1305 bp, Cannabis indica
ttattatactacaaacaacgcctaagagtgagttccaattcccatttaaagcagcaactcatccaggaatttcatgacacaccaatcggggggcacgcgggtccagagcgaacatttcttcgcttaagcgcgagttttttctggcctggcatgaaaacagaggtacaaaaatttgttcaacaatgtgtgacttgccaaactgttaaatattcacctactgtcccatacggcttactgcaaccattggaattgccagaacgaatttgggaggatttatcaatggacttcattgttgggttaccaaagtcagcaggggtctcaaatattttggtcgtggtggatcgtttctccaaatacgctcacttcggagcattgccaaaccagtatacagcaacaaaagtggcagatttatttgctaatatggttattaagttacatggaatgcctcgatcaattgtgtctgaccgtgatccaatttttacaaattcattttggaagaaactctttgaattgatgggaaccaagctgaagatgagcacctcttatcacccacaaacgaatggacaaactgaagtgacgaaccgctatttagagcaatacttgagggcatttacagcggacaatccgaaacaatggagcaaatttcttccatgggcagaataccattacaacactagtgagcattcagccattcgtatgacaccgtttgaagcagtctatgggcgacccccccccccccaaccgatacaaacttatatacgcggcacaacaaagattcaggcgctagaagaagaattactcacaagggatgacatccttcggcaactcagggacaatctcactcaagctcgaaatagaatgacacagcaagccaataaaaggcgccgggatattcagtttaaaatcggtgatttagtgttggtcaagctccagccttatcgacaggctactgttgcgaatcgcttgaatcctaagctgtccaagcgttatttcggaccatttgctatcactgcccaagttggaccagtggcatacactcttgcattacccgaaggaagcagaatccacccgacctttcacgtgtcagttttgaagcccttctatggccccaaaccaccggtgtgttactcgctgcccgaaatgagtattaacaacaaaccactgatgttaccccaggccatactgtcttctcgcatacattcaggacaacaacaggtgttggtgcaatggtccttaagcgcattagaggatgccacctgggagaatttggctgagtttgagcaggtgtatggaagtgtcaacctt

SEQ ID NO: 244824 - DNA, 1376 bp, Cannabis indica
atatagctaagtttattttagatttgcgtatggttattggtttagcttgtggaagagaatttgacatatggtacaagttaaagctattgccagtacaggtggtgaattcaattggtaatctttgtcctgggtcacaaggaaaatacacaacttagaaaccttccaagttccaatttgaaacatttccaacttcaccatgaaagctcaagcacaaagatcacgctttcaaaacacaatattcatcgaagagataagttaaagtaaaaggagaaacaaaacaaaaatatgaaagggaatatacttatgttattgttaaatagttatttaatagagttattttagtcatttattttattttagtcttatatggtagttgtttatataaggctttcttattagttgtattatttacaattgaatgaaatcttaattttcctgtatcttttttattctttatttgttatttttcttttcacaaataattatcatgacatcagagttaggtttatgagactgaatttcttaagtgtgatcacataactaggttcacaaataattatcagttatcaccacacaagcgaaattcatatgcatatgaactgcactagggaaagcctcaataccctcacactcatctagttctaacagataagggccctctctttaagtttaactgtttaagtgcattgtactcccaatctgggagctctcagcctcatgttcatggagttgagctgagtcaactactagacttgcttgaaatcttgaaagaatttacaattgagatggagcattactattgtttccaaatattggctctgtcatcctcatcaaatacaacatccttccttgaaagattgcctcgggttatgatctttgaactcgaagaagagagtgaactcaattcagtggattgattttcaactggagtcttctctttttctaagttagattcaatttttatggacttgtttttgcaagttgactttccttgtagacttacagggtaatcctgattattagaatttcaaaataggtccatcgatcaggcaagttggtttgataccttcagggccaccatcaagaggccacagtgagattaagaacgagaagggtgaaaacatgggggaagttacctatggaggatttagtccttgccttaagaaaatagctacgggatacgtgaaatttggatcatacaaatcaaggagcaaagttaattgttcatcacaaaaatgtcatttgtatctacaaaatactacaagccaacctgatttaagtgtggcatatatcagtaccagatatattctaattcattcatcatggacaacattttcataaaactcgactgttgcagtgaaatacactcatttcaa

SEQ ID NO: 244825 - DNA, 1805 bp, Cannabis indica
agccacctactatggccaaggtgtgacttcccctctggctcggatcacacccgatgtgcaagagactgggaataccagttctatagctgatcaaagcagtcccagcagtgaaatcccatccacaaccaatggttagaggacggtaggagatgaaattgagattgaaaacccctgtgatgcccttggactcatgcaaggtcatacttacacaatgaaccatgatcaggaggatcttcgtgctacaataaaccttgcattcgatgagaagcagcaccagttcatcaagtggagggatagggagatggaaacattgaagcctcaacaagaagccatcaatgaccgaacaaggttggctaccgatactgatacggagagcctattaagcagctaatcagcaaccaactactacgtccagtatcccactaggaggttgagcagaaattgttgctgggcataccacccagacacatagtcgtcaaccgtcccatccccggtcacaggtcccacttgtggcccaagcggtagatggccagccttatctgaccgatatttaggtggagttttacctaatcacttcgtcaaaattgatagtttaaccaacccaccggccaaaccagtcaaacactgagacaacctggtgcttcagtattcaactgattttgtgcagctcataatctcaggaatgatttgagtagaagaagaggtctagacgaacaatacgttcaaccagctactcaactaggcatcctcatccaggacccaactctaagacatcctgacgtgacacaggtcggtcaagaggctgaactagttcacccatctctgcaagcacatttagatgaactaaaaaatatggttcaaggcctgaccggcccaaaactcactgatcttaagttggacagagcacgcagatcacccttcacttccgaattcaacgtccttaagctacacctaatgttcaagatgccgacctggaagatgtacacagggaaagaagatcccttatcacatcttaaatattttgagatgaaaatggacctgtaaggagtacggggcaatgtgcggtgtagggtattccctgccagacttacaaaagccacacaacagtgatacttcaagctaccgcaagggatatttaattcatggaaggctttttctgttagaattattttaccaggatctagatttactaccatgtatgttgtttaacatcctaatatgaatttataaaacaatgaaataaatacatgtaaagtttaagaaaccttacggtgggtacatcgcaattaaatgactcattccgctcagatctctaacctttgtatcctttctgtagcagagtatcacaaagatctgggcccgattgtccttcttgttgattagattcttctcagtcttacatactatgatcgaggaccaacttgatatgtgtgggaaatccctccatcactaaaggtaagaaaatatgaagagagaatgagagagatagggtttcggctatgctatagaaaaggaggctcaaaattttactgaaggatattgcttggcctcagcctcatcttctatattcaagggctcctgagaatattgcttggcccttgaacctcccttcaacttagcttcgcgcttaagttgaatgagtgtattctcttgaagagctcgctcagcccgtccagcaccagatttcctcttcctcttcctcagtggtttaggaatgaaatcctttggatagagcctgtacctcacaaagttatccttagaggtcaagcggatgatattcatgtcttcccccgacagtcgagcaa

SEQ ID NO: 244826 - DNA, 1764 bp, Cannabis indica
gttcaattacatgacctccgtccgggattcatgtccgaggcagtggtaaagaatatgggtaattatattggaaaatttgtggagtccgatcccaagaatttcatggtaatgtggagaacttatatgtgtttgagggtcacagttgatgtcactaagcctttgaaaagaagaaggagagttaagaaggacgatacagaggagttctaatgcaatttataatatgaacatgtcccattgttttgcttcttatgtgggatatcgggtcatggggagggatattgtccttctttgttcactacgcctcttgcagaaatagtgaagccatatggatcgttcatgcgagcacaacaacattgccgtaaatataggatcggagccaagtggctgtgcaactactcagaatttgttgctgccagcgaggagtactactaccaggggttgaggatgactcggctatgaacacggcagggatccctgcggttgaggaagactactactaggggtcgatgccattagccatggagacgaatggtgggggaaacgatcaagccgtggtggttggggcaagtaatgtgggagttgacccaactgtttcagtcaataaatctcacgataaaagggatttttccatgtagcctcaagtgggtattaataaatcccatattaatatgggttctcacttgccagctcacatggacattaataattcccataataatagggattctcacatgctgccttacgtgggtattaataaatcacatattaatatgggttctcacttgccagctcaggtggatattaataaaccccataataatagggattctcacttgcaagctgtcacaagcaatgtgctggtgataattgacacaaaacgtagaacgactcaattgggcctgtttgatgggcccgttagtatggaagaggtaatgaatgatggtaaaaataatataaataatgatattgttgaggggtcaaaaaacgatttttcatgtgggctctagttttcaggcccaccaggaattatgagctgatttagttggaattgccatgggcttgggaacccatgggcttttcaattccttaaggatttagtaatccacaagagatccaattttatattattacgtgagactcttagtaaaagagattacatggagagagttcgtatttcgttgggctttgaaggcttatttgtggttgatgtgcaaggtcatagtggtggtttggcttttctatggagatttggagatgaagctagcttaatgggattttcaaactcgcatattgatttgaaaatcattgtttctgatactccctcatggcggttgacggggatgtatggtgaacctaatcggcatctcagacgttaaacttggaatttacttagagatttgtcctctgaatctgctttgacctggtgtattataggtgacctccacaatgttctaagtcatgatgacaaacggggtggtaatccttatcccaattggcttctgtcgggattccaacaaactattgatgactgccacttgcaagacttggagttgattgggtatccttttacgtgggaacgaggtagagggactcccgatggatagaagttcagcttgatctggtgcttgtttcggatgctgtgcttgacctatttccaaattgaaagttatttatgttgggttttctgcactaaataaaacccattgcaatataatcagatttactaataaagatcagaaatagcattttacgttacatggttca

SEQ ID NO: 244827 - DNA, 1352 bp, Cannabis indica
aaggtgtaagtatacctatcgctgattatcatgctagtctaaacctagtgaacttacaaattagggaatgaaacatttgaacatataatcatgattatattccactgtgctaacaacactataatcatgaacaaatacatatgttctggatttaatagaatttatacattaaacataatcgtgaaataattcatgtgaaccatgcaacataatatgatttctgatctttattaattagtaaatctgattatattgaaataggtttaatttagggcacaaaatccaacaaaaacttttcccaaaggccatcttgcgttctatacagacttgtcattcagatcataaacctctttgcctattctttggaggagatattgaaaaattcaaaagaacctttaaatttgaggagggttggactcgcgatgaaagaagtaagttggtggtcacacaagcttggaactttgtggtgcataattgggccacgactagaatgtttaaaaagattggggccactcgggtggcttttattcactggcataagactcaatatggtaaagttgatgcttctattaaagatttagaatgcaagcttaatactctgcaaagactatctgttggctctagagactggaaggtggagtgtgaggtccgcaaggccctcaatgaggccttagatagaagagagatctactagagacaaagagcccgtgtttcatggcttagagaaggggacaaatgttctaaatttttctttctctgcgctactattagaggtagacgcaacgccattgagagtatattggatagtaataatgtttggcttactaagcgtagggagattggctctgaattcacaaggttcttgaaagatattttcactgagactggatctgggtcggttcttaattgttctaacttgataaatgactgtctatccctaatggagaaggaggagttagttaaggcccctaattttgatgacattcgaaaaactcattttgccatggcttctaacaaagctctcagtccagatggattgccaattaccttctttaaaactactgggaggcggttggggaggacttttgtgaggctgtctcagattttttctccacaaatgttatgcataagaggatgaatgccactaacttagtgctcattcccaaagttcagaaccctaagaggacaaatcactttagacctatttcccttcgcaatgtgtcgtataaggtgatctccaaaattattgccaataggatcaagcctatttttcctagaattatctgtctgagtcaatttgctttcgtcccgggtaggaactgttgggttttatgccgtaaataaaactcatt

SEQ ID NO: 244828 - DNA, 1128 bp, Cannabis indica
cacttcacaataatttttattttttctctagtcaaaattttactccaattttctcataaatctacacatctatctataaaaaacacaaatttattatatttgaaattatatattatagttatgtgagtatgagagaatataatttggatacaatactcataaaaagagatatatttgaattaaatgttatttggggtaaatttggttaacgtataaaaaaagagtattcttcaacttctcctttttcaattctatttattatactgtcattaatttcaaaaaatttgtttctttgaattacaaaattagtgatgaatatactaagctttgtagcccttctcccaaagttgatattggaggaaggaagtatgggatagacttagtcttccaaagcataagtttattctttagttgactatgttgaatagattattacaaacgaaagacaggttgctcaaaatgaatattgtaacggttgtgtagtttgtggtagccgtgaagagactacccatctctttgctacacaaataacattaaaatcttggtaatcttaaaaagttggttgaacaggattacttcagccactaccattgcaagatctcttgaaattgattcgaaggagcaagctatctaagtggaggaagaagatatatgctacagtacgtagctgctgccgtataccatatttggaaaaatcataatcaagcattttagcttcaagcattttaaatgaaagataatatttgtacataatataaattggagtgatcacttgtaagtttgataattatatattcaggctaaaagatgtttctgtaattaaaagttagttggttgaatgattataactcatctaatttattaaaaaaaaaatatatgtatatatatattatttttactattataatttgagttgcacttctataaaatttcatatcactaacgattgttattatataatctgattatattatcataattttgataacttaaattgatgactccgtttgagttatcaaaatttcctcaagattttaaagaatgaagactaatttgtagtttgtgcatgtaataaattagaatatgtaataaagcgatgatgagaaaaaaaatacatcgaatgagttg

SEQ ID NO: 244829 - DNA, 1555 bp, Cannabis indica
gtaactttgttttctgaaaactgttttcaaaaaaacaaggccaaataagtcaaattgttttcaaaaaacaattttttgtttttaaaaacaaaagacagttttttagttataatgccaaacatgcacatagcttttctcaaaaaagttattttattagaaaattatagagaaaagttaaaaaatatgaaaaaaaaaatttttaacatatataaggtacttgattaccctattatgataactaattgcccctctacttggttactttgtcatattttttaactttttctttaattttgccataaaataacctaaaaaaactatataaaaagtacaaaaaccctataatataatctaaaataagttgttccttttcctatagaaaagtttgggccaaagtgggaggtcttgggcaacggcctatcttgtccccttttgggccgggcctttataaatgagctaagtactacactttgacccattcttttcctatttccatgaagttaagtttcgatcaaataaatttttgtaggggatttttacaaaaatattgaatttttgataaaagtttacaattttactgttacacgacatttttacaaaaatactatctttttataaaacaacagtaaaataacaaaacagaataatttaaaacaaaagtagaataaataaaaaataaccgtggaacaacaataaaagcttaacatagtatacagtatgaaacttacacaaaatttttgaaaaaaaatttctctctacagtaaaaaaaaattagaaattttagtacgtagtgtaaaaacccttttttttagtgagtttttgtttttagttatattgtttttttgctcaatgctcccaacacagttaaatttttattgttggatcatatatatttctaataaaaaatcagttttattaactaatgatctttcaaattggcaaatgactcatcatcctctaattaaccaatgaggcaatgaacttccttaagaaaatgataaataacaaatcctttatttattttttatttgtttgaatataataactaattttattgctgaaaaatcaaacaatacattggttattaaacaaggaggaaattacttccaatcccgaaaacctccttttctatctgtagtgcataatctcaccatgtgttgtggtattaccatttcgcattacatgttgaagacatacacccggaaagacagataacaagaacctaatagaactaaaaaacagcttctcctagacacaacctcaaaaaaaaaaaagggctaaaatgatgaaaacttcaggatcactctctacaaagaaaaataaagacccagcaaagaacaactttcggtgggagaggatcgtcttagttgcatgacagagagaatcttgtgcttgtgaagaggactccctcaaaaagaagaaaatattttaactgcaaaataaaaatatacatttattagtaaggaaaatatagaaataaaaataataatcataataaataattatataaaaaattaacaaaatattttcaatacaaattaattaataactatat

SEQ ID NO: 244830 - DNA, 750 bp, Cannabis indica
agatgtgcgttgagcttttcgtgcatgctatgaagaaggagttgaatgaatatgaatctggttcagagtttactgaaaaagatgcccaaagctactagtggagctttgaagattggatgattagttttacaatcacgatctgtagtttggataatattgttgtgtttttctgatgtttgtaattagcacatgtagtattttgcaaactttaacatgtagcttttggttttatatttttttgtgatattttgggtatatgtaagtgttgtgtgtgcaaggcttttttttgggaacacttaatcaggtggtgacatgttttttttgatggtatatgaaccttgtatgtttggaaccttattgtgggtaaatagaacttttgtgtacttaaatgtatgctatttttttatgtaagcaactaataagtttactttttcaaactatgatcaatctaattaaaatggatatttttttttcaggtaacaaatcaatatcatcagataatatttttgtatacaaatcgatataagagggtaacaggtacatattttttttcaattagtgtgaggattccaataggtatatattttttttttttttgtgaaaaatgcatattaattttcattcgaagatcattataacaaaatataaaaattgaaatagatggacatgggtaacatgtttgtttattttttttgacaagtttttgtttttgtaaaatgagaggaaccattatgtaaagaccgcatatga

SEQ ID NO: 244831 - DNA, 909 bp, Cannabis indica
aggatagatttagtgtcccattggagtaaatatggtgtgaaactacactatatttgatgttttagtgtcccattggaaatcgcctaagttacctaattttcttagtttgcccgaaaaatgcattacctcgggaatggagtttaataaaaaatattaagaatatatattttttttaaaaaaagtatatagaagctcacaatataaattgagcaatatattattctataatattttaatgtttatcttactacaaaaagatattcaacatcctagattggtctaacaacataattctttttcctcccaaaatggtataagattcaaaaataagagatgcaagtgtgacaacaaatgtctggtaaagattagtgagtcaattaatattgattgttagacaccacaccaagacataatatttgagaagtgctttaatttgagtcccacataatatgtctgaagcagaggtgaagtggctccttaacctcaacaaaccccctcaaactcaatgcgacttctacctgaacctcctcccttgtagccatcttgcattgcagagcctgcagttgctttcattgtccctccagaaccaaccgtgtccatggctttctttcccttcttcacctctgtcaagaactggtctaacccaaatggatcagcctcctcatcaccacctccacacatgtcagcatcaatatctttcttaggtatgtagagggttgaaagtgtaggctgggcagtaaacaatcccttgtcatacacattgtactagtcatcagtaccaaaaccagattccattcctttttcttggttgaatagcctctccccttccagttcccttagtagaagccatgccaagagcaaccttctcactgatatcacgatctctatctctagagattttactcttct

SEQ ID NO: 244832 - DNA, 674 bp, Cannabis indica
gcagttaaaaaatatatatacatacagatcaataattaatatcattggctttataatatttttaataatatatatatatatataaataaattgatgatgatgatgatgatgatggctttcatcttaagttattatgtctttatcaaaactgttggtcacaggaatcttattattacaatcttacaagaaaaaaacagtcctctcctcatcaaacttcaaatttacaattattaatacaaactcacaattatttgtagttttaatcaattaaccatttttttagtattttttttttactaaaagaagtatattaattagatatagatgtagtaaataattaatataggtaagtggtgtacgtatctttcaaattattattattgttattattattcatatatatctaaaattttattcaataataaaaatgggaatatttattaattaatattcgctggctttttattctacatgtggtgaaatatatatacatatacatcttttattaacatatattcctctttcactacatcatatatatatatatatatataacgtgtatatatatttacattatggtaatagacaatatataattatatatttacatgtatgtaaatatacatatataaaacaacatgacaataatttataataatattaattaattaata

SEQ ID NO: 244833 - DNA, 1792 bp, Cannabis indica
taaaattaaaaaaactgaaaaacgctcacctatggcatcggttcttacgccacatatggcgtcggttattagctaggaaccaacgccatatgtaccctatggcgtcggttcctaggtaataactgacgccatagggtacaaatagcgtcggttgtttataaccctttagcgtcgccctgatcagcgtcagtagcgaattttgccaaaaccgacgctgaaaggactaaaaaaccgcctctaaaggcactacaaaaacctgctacttttagtgacaattttttaagcacaacataattttttttgtgacaacaaaatgttacttgtgactaatacatagtatttagttacaagttgtcactaatttagttttagtcacaacaagtattgtgactaaaagtacatttagtcacaacaaattgtaatttttgtgactaatatttttagccaccgaccttttagtcacaacctaagaatcataatttataattagtcacaattttttcactttttagtcataaattttgttgtatataatatataatatatatattttatataataaatatatatttttatataataatatatatatatatatattatgttgtgattcgaaacatacacaccacaaacacagaacaacttattattaatagattcaccaactaaaaagaaatgaattgtagcaaagattaatatataaaatttgacaaaataaacttagtttgactcagggagaaaataactattgatggcttaggatttttttgctctttgatttttaattacaaagtttaatggtgtgaaaaacaccaatggtacatcgattcttgagctgaactttgctccaataacttagttttagataaatagagagaaagagaaatctaagtagtgtcattcaaggtttggtgtctcaacatccttttatagcttggtagaaggagttgagcttcgaagagcaacggtattaaccatcacttggcttacgtggcatatcagtattaaatgtattgagcataggaacttcaaccaatcagtacaaattcacctttgctttaaaattacccactgtcaccactttggtaaacatgtgtgcaaggttgtccttagtattgaccttcttcaattaaacttccttaccattgacacactattaaaaaattaaaaaattgagtttttccgactattttaaacagttaggtaaagtgttctcgtcagtctctaaaaccgtcgcatattcaaccatcgaagaagtgggtagaataggcgacggtaaaaaatcgtcaaggacgttgagcagtatagttgactgtttataacaatcggcatacctttaatataaattaataaaaaaaataattaaagaaatacatgtagctactgcctaagcttgtcggagctccaccatacacggtggttgtcaaccatcaatgtaacccctaacaataaccagtaaaaacatagaaaataaaaagaaacaatattattagggttacatttaaaaccctacaaaattgaaacgttgaagacgaagacctctcgaggacgaagcccaagccatgacaacagacaacaaacgattccgaacactgagcttcacaatctccatttgtcttccacaactccactactggattctcgactgtgattggattccatggtggtagttggtgggttttgtggtggtggttatgggtttcgcgtttcgtggtggtggttggtgggttctatggtggtggtggttggtgggttcctattctagggtttgaagaaaagagagagagagaga

SEQ ID NO: 244834 - DNA, 775 bp, Cannabis indica
atcttgcattggaatggtctttctttctattttaaaatagaatagcattctaccaaaatgatagaaatgtcattccatcggaatggtattccaatgattttaaatgcaaccaaacaaaaatatggaataaaaattattttctttccatttcattacctccaataactactatacattttttttcaaaattttcataattacgaaaatttcatcgaactattttcgttattgacttatatgccccttccatcaattacaatttacaattatatggatacatcaatccataaatggataataatatgttggccatgttttttttcaagctttattattggtagttgtactacccaagcattgtgattgagcatatgatattatataaaataatatactatcacaaatgactatttttaatatacctttattttttatttttcaaaagataaaaaaaaaaaatgaagagtgcaagcaactaaggtggcgtttggtaatacttttattttcaaattttctaatcataaaaataaaagtaaattttttgttttttaaattttgttttttgtaaaataaaaatgtgttttataatcacttttgtttttcaatttcaaaaacaaaacacaaaattgtgttttgtaaatattatttttatttttatttaagtcaggtttgaggtcaggtctaagatcgggaccgggggcgggtccaagtctggggctaggtctaggttcggttttcaagatctaagttggagtcgaaatctaaaatattgatt

SEQ ID NO: 244835 - DNA, 2186 bp, Cannabis indica
tatattatataaaaattgaatcttgtgtttattattaatttttctaacatacccttcttctaagaagattgtgtcttttactagaatttactcattaacggctcagtgtccttacacatctcaacaaggagaaaaaacacattatgggcacattcatggcataggcaagaagagctggaatatttcaaattaaacaaattatatatttaagaaaatggagataaataatctgatagtttcattttttacttgggagaggatatttgttaaacttggaatttgaaatgatcttaaattaaaacataaatcctttatttgttcaatgcttctgactgacaattaattaagagaattatgttgaatgctaattttggatcggatcattggtattggtttaaagagacttcaagggtttattcggtgaagagtgcttacaagagtctctaggtgcttcatggtaggtggtcgaaagataacaattcaggcctttggatggtattatggcaactcaaaaattcctccttaggttaaagacttactatggagggcatgttctgggtgtttaccaacactgacctagttaaaaggttgggcatgttgatgaggtcgtcatttgcccggtgtgccaaggtgtgaataaaaaatcttctacattttggttgagtgtcatttatccaaagcttgttggtagcgggtcgatggggctatttgcaacctttcagacagatttttcaagatggttttatcaattagtcatcgaattttcaaagactttggtttgttatgttgcgatgatttgttggtctctttagaaagcaagaaatgggcttgtttggcaaagtaaaaaatatgttgcaaatgaggtggtcgttgttgcattgtcttactttaatcaatggaagattgctcacaaaatttctgcaaacacaatagattctagtacttgtgtatttaggtggagcattggtcggtttgcagtattgatatgattaaagtcaatgtaagatgcctctgtcacttttggagttctttatttcgggatcggagggctggcccgtgatcatcatggagttgtcctttacattggtccaaataattatctagtcgtgtctttcctcttttgacggaggcaattgggttgaaggaagctttgagctggatcaaagaatggggcctagatcaagttgttgttgagtcaaattgtaaaaagcatcatttatgctctgtatagttcggctcctttattatgtctttttggtttagttatttttgattgtcatactttaatatctgatcttaacaatgtttcttgtgtttttgttaaacgatctacaaacaaagcagccaattgtttggcgactgccacttgttcctcctcaggttgtggctatagtgagagaatcgtccctatttcttttcaagctattttaatggataatttgttcaatcataaataagatgcatctctttttgtcaaaaaagacataaatcctttcaacaaaaaaaaaaaaaaccataaatataaatatgacaataagaggttgacatattattccatttattatttttttttaacaatattattcttactatcagcataattttttttaataattacataaaacattaatttttgtaaaaaaaattatatttttacttttaaagttttttttttatatttttacagtattctataaaatacaagaaaatcacatgaaaataacaagaaaataacgtaaaaacaacattaaaataacacaaaaaaataatatacaaataacaaaaaattaacaataaaataataagaaaaaaaatacaacataaaaatacaccaaaagatcatatttaaataaaatcttaaaaactgtaaaaatattgaaaactccgtaaggactgtacttttgtaatttttttattatttttgtgtttttttttaaattattccttttctttaacaatatttttttttattttaaactgtctgaattatgcatgatgtggtgtcacctccatttgtttgtttcttgacaagttaggaaatttactcatatatctatgctatattaatgtggttatataaaaaagtaatattttttaaaaaaaaatattataatttaaatttaaactcactacacatatctcttattttttatcttatattaaatgtatatatataacataaagtt

SEQ ID NO: 244836 - DNA, 1128 bp, Cannabis indica
gagactcctaattgtttcgatcagccttattgttgtaaaagatgttggtgtcgatttgttggggctcactaaacatttcgggatgtatcttctgtgtttttcggagggtcttctttgtatgaacaagttgacctgttgtggcccaattgacctgttaaatgaaacctgggattattgctaatagtatattttcagttgatatcatgagaacaaaactttacatataagaagaaatcatagcatatatgtcgtacatttggttgaagaaattgatggaatttattatatattgttctctaactttgggttttgttaaggatatatttatatgtgtccagatttaggaaacaacacttggaagtaaacctgcagctgaactgctgcagaaattaaagccaccttatttgttttgaagacatttacattgtaagttttttggttgtgttctgggagtataaaaaacttattttagaaatgttaagaaatgattttttacccatattttaccactgtaatatttctgtgtaacttactgtgctgaggtgtatttttgcttttcctaatttcggttaggatttgattttgcaattgtaaaacgtgtagatattgtacaatcattgttctggaatattcttgtacggtacaatcattgattataaaagtttgggccagcctcaaagttcattgagctgagcatttcacattctgcaattttttgcatttctctttcattctctgtttcctctattttcaaacttggtatcagagccgtacctgcaccggtggtgcctattttgtctcagctccatggcagatcaaaccccagctcgttcaggtgaacaaagcatctccagcgtcatggctcaatcatccgttccttcagcaagtgctgtaggttctcaggttgtcaccactttgaatcaaccatttgccttgaagcttgatagaaacaactatacgttgtggaagactatggtatctgcgatcgtccgaggtcacagattggatggatacctaaaaggtaccaaagttagaccagtggagtttcttcctgcagacccgtcgacaggagaagaaggtgttacagttaatccagagtttgaaatctggatcgtgaatgaccagttg

SEQ ID NO: 244837 - DNA, 605 bp, Cannabis indica
aagtaaaaaaaaaagaaaaaattcaatatgtagtgtaaaaacccaacaaaataggctaagagatcattacacaacttggctacattttgggcccaacaaaattaaagtcgctacaaatgttagagaagttgtaaccccaacaacaaatgggaagagtagttcttacaatcaaatcaatgatatagttgttaatgtcccatacatatactcatagtcatagaaagaaagtttaccacaatgctgtgcccacttgtgaaataaagttccatcgcagattcatcccccacccccaccctgcttgctttcatttcattggggttttaatactgagatgcactatttacttaccctactatctatctaacattctactttcaaatatttaatcttttttctcagaatcttatgcatatagttgagcaaactgttaatacatataaccagcggtatttaaccgcattggtatgaagtattttaaggtgttgaatactataatcatgtaacgtattgcaatggtttacttatatttattctaagaatatttaagagaaaactgagcatgggccagggccacccattaacgtccctccgccccatatgacttt

SEQ ID NO: 244838 - DNA, 1013 bp, Cannabis indica
tttcccgatctttagctaaagctaagtaccgagccatgactaatgccatgccacttctgaagtcacctagatccttgcccttctcaaagatttcagcatctctctcaacagacatgcgtccctatattgtgataatattgcagccatacatatcagtgagaaccctgtctaccatgaatgcataaaacatgttgaaatagactaccactttatcaagaaaaaagttcaacaaggtatcctcaagcttcttcacgttcagtctcaacagaacttagccgatatatttacaaaagccttactaccctcatcatttaataacattgtatctaacatgtgtctccaacatatacacgccatcttgaggggaatattacgagattacccttatccttgtgatagttacaatacaattaagccattcttggctcgattagttaggttgttcttggactaagctaagttagttattcttctgactaactcatgcctatacatatgtctatacgtgtaaattaatacacataataataatagaagttttaagctttttctctctcgccctctgtttttctcataagagacgcacccaaaatttgttacaatggatagggcttggcattttacagtacaagtttgaaggtatctaaactgaattcgaagatgcaaggctagcaataggtgaggagagaaatttacagactacctttcaatgcatgtgtatacatgatttgggcagagaaaaattaataagccattgtggcgacaagaagttaggaatatttggtgatttgttttgtctgtgaaatatatatcattgtcaatagaattgcgagtattgattacacatgggaataacaaattgtgcttttttgggtcgggtcaagccaaagttttatcgggttgggtcgagttggggcgtgtcgggactgacccgaccagttttccattcctaattgggaaattatagtaaatggccccaaatcataggagtatgttagtttatgtcctctttt

SEQ ID NO: 244839 - DNA, 1619 bp, Cannabis indica
gtgataaaatgttacttttattcacaacaaaatataatactaaatattatatttaattataaattgtcactaatataattttataatcacaactatttttaatgataaatattttgtgatcactaacaatatattttattgataagtattattactatcatatagacctttagtaataacatagcataagatttgtttagttaaaaattaaaatttaattttgcaatgtaatactgaaaaaatatatgtataatttatatatacatacgacagtttatatgtggttgagtaatttaatcaaccaagtatacgtacattgatttttatgtcactaactaataaatttcacaatatattatagtcaaaaagtatcataggtttaagttataatacaaagaactgttatattataattaagcgactttctttcgtagaccttttctttattgccaaataaatgagtaatatgacagtgatattaattaatactactttttttttgggggggggtagggggttcgtcactttatttttttcttttctatattaagaataattttcgatgtattattgcccatatatataataaatataatacaaaccctatcgtttgttatatattttaatttgtataaatatatatataatgtaaatttaaaacatgcaagttatttatttaattatataatctataatgggtggtgctgcttttttggccggtgctactatatatatatcgaaattattctaactattaaggtgtctaatttgcaattgattacaaagttgtggtggaattggaagtcaattcttttagtcatttatttattagtcttttttagttatatttatagataagtactgcatacgttcaaaaaggacaaagagagaacgaatatttggcagacaagaactaaaactacatcaatctataattaattccagatgaactaggactcaatcctgggaagattcattacacatcgatgtaattcttttatatatatatatatatatatatatatatgttctatttatatataaacatatctagatttaattagattcatgatgaattgaaggataatcatgattttacaaaattttcactttcttcttcgactatatatccttatgataaaccattatatgatttttttgataaatcaatgagttgtattgcacaaaataagctttttacaaactatacgcacccatgaaaagggccgatatctatgaatacaattatatcaatctagagtcaatatatgcaatatgatttacaaagcaataaaccaatctctatcattattcttgatctttttaggcatcaccctatcaatccgaaccttgatgttgcattttgtttcttcaacaattcggttcgagctaattctagctttttgccataccacttcatttcgggctctccaaatgttgtacaccagccctacaacagcagccgagagaaccccctttctaaactgggacaatttggacttcccaatccatttaagtagctgttgtaggctactggtttgagcatgccagttcagccaaagtttcagatcctgtaggcatttctcagcaacattgcactcaaagaacaagtgctggca

SEQ ID NO: 244840 - DNA, 985 bp, Cannabis indica
gattagagacatacacaaaatcaattaacagtaatttttgatgggcagggagaaataaatggacacggtcaagattagtctaaaattgttaatagacaaaaaaaatgaaaaggttctgtttgccgaagctggcaaggactttgtggactttctcttcactcttctgtcactgccagtcgccactgtaataaggttgctcaactcgaacaaccgggcgatggcaggaggtcttgaaaagatttataagagcattgaaaatcttgaagacacttacattctatccactgctaccaaagaaaccttactgaaacctaaaatttcgccaaccttgaagttttcactcctctctttgcctcctagtagtagtagtagtgctactgctagtagtagtttgcaaaagaaaatgtacatttgcgtctcttgttattcgtatgtttctgatgacctgcgagctgtatgccccagatgtctgcgttccatctcaaaagaggtttcgtacgttccagctatggctcggccggctgcaactcaacaagtggttggtaatgaaggaggtggttatgtgaaaggtgttgtgacgtatatggtgatggatgatttggaagtaaagcctatgtccaccatatccagcatttctatgctccgcaatttcaatgtcaaggatcttggagtactggaggagaagacggttaagctcagcatgaatgaggtttgatttctttcaatcttaccactagatttgtcatctatattatatctctaatctctatggatttgataagatttgttgtaattccagcggaaataaccttgaggattcgatcataacatctgcaatgaactcacaactttgacagtaaaatgaacataaaccaattaatcttcacaatgaatcaaatccgaaatcaaacaaagaacaacacacgatttattctggttccggtcttagagatcaatatgatccctggccatactccagctgaga

SEQ ID NO: 244841 - DNA, 1503 bp, Cannabis indica
tttgtgttgtatgagaatggttgtcgtttccactttactgctttttatggtgctccggaatcccatttacgaactaatacttggaatctattgagaagttttgcttctctttcgaacaatttcccttggttagttcttggtgattttaatgagttgttgtcaaatgaagataaagatgggggtctctgagaagtgaaaaacttatgaatgacttcaagcaactattgatttttgtaatcttattacaatcccttatactggagacggtatacatggactaataagcactataatgggactttggtcaaagagaggctagatagagggtttcataacggtgtatggacagacttctttgtcgattctcctctttctcatttagatttataccattccgatcatcgtgcaattgcatataatgtttctctgccacaacaaatgtccatttcgactacaagacaccatagatttcgttttgagcaattttggctcaaagattcagattgtcgtggtattattgaagtttccaacatgtaacaacttccaacctgtttcttctctgctgcaaaatattgcagattgttcaactgcactccagaattggcatgtctcaaaatatggccaaatgggccgtgacatagcagcagcccataaacactcatctcaattacacaacagtaatgaccggtcgctgcaacactttcagacagtcgaggatgcagataaaatattggatgatttgttggaaaaagaggagctttattggcaccaaagagctagagttaattggttgcaaagtggagattctaatacaaaattctttcatgcccgagcaaaatcaaggaatgccactaacagaattaaatccctaaatactgatgttggtggggttatacatggtgatgaggacattgctaatgaagttacttcttatttctcagaattgttcacttctaatggtgttgatattgaagctttgaatatggtattgtccactatccaatcggctattacacctgaaatgaatgctattctgctgcaaccttttactgcttctgatgttgaaaatgctcttcattcaatggcacctgataaatccccaggagtggatggtatgtctgcgatgttcttccaaaaacattgggatattgttggttcacttgtaacccaaagtgtccttcaaattcttaatgatggtgcggacatgacatgtattaattcagctctgattacgttaattccgaaagtagaccagcctaaatttgtgagggaattcagacctattagtttgtgtactgtgatttacaagttagtctccaaagctattgcggttagatttaaagaagcgctgccttttgttatttctcagcatcaaagcgctttccttcctaaccgcttaataactgataatgtgctcttggcttttgaacttgtccattgtttgaagaacaaaaagagaggccggttggggtattcggcactcaaactggatatgagtaaggc

SEQ ID NO: 244842 - DNA, 928 bp, Cannabis indica
ttttttttagttatgacctactaaatttcaggccgaccttccttgttattattagttttggttaattatttcttattatttttgtaggtttgatggagatgggtgtgtgatcttctaatccatataataatcaacttcatcaattctatttttatatatattaaaattttagtttttgttattattattcaaaaaaaaattattattatttatatatataaaaaaatatttgtagaatgattcatggtttgcggattaagaatggaaaagcaacttatgcgtctcgttatgttagaacatcacgtcttaaacaagaagaatactttggaggtcctaaattcatgaaggtaattatgattaatataagcattaacaattaagaattaattaggctcaaatttttggtgattattaattatgataattatataattatgtgctcaaagttacttttagtaagaatatagaagatcatggtttaattaatcaagtttgaatttcaaattaattaatatttgtgggtttcaaattaattaattaataaagttttatttcttactaattaactttaagattggagacatgaatggggtttttggattacttgtggtgataattcaaattctgagggcaattctcaaagtattagatctttcatatggacttggaacaggtataattaaatacataataatctctttataaaataataataataataataataataataataataataataataatttattgggtgaatacttaaatttaattttaatgataataatacttaagttatatttccggaatttccgtaaattcaagtttcaaatgattatctgtaacgtactcgcttcaagtctccattagatccttacactcacggaatgatgactcttatacacgagtacgtcactctggctgc

SEQ ID NO: 244843 - DNA, 1449 bp, Cannabis indica
tatataattaaaataaatttttttatataaaatatctaaataatttttatttttaaatacatataatatatactattataaaattaataaagaatattttgttaaataattaagatattctgttaaaattaacgtaggaactaaaacacttcgttaaaccaagaattccgttacatagccacactttatatagaatagatatgaaattcaaatttttatcatcaccaacttaattatatataaaaaaaaagtattaaatgtagaattgtgaataaattgtttaatcaaaaccgaaaaataaaaaaaataaattgtggagttttaacataagtcatattgtgtgaacactcggtcaaaccgagtataaaaaaagattaataaaagaagtgggtgagacccacataattattgttaatttattcaaacctcccaccgaccttctctctatcttctctctttccttcattctcttcaaaacaccaaagacaaacccctcataaccaccacttgtggaacatcgacgacccacctccagtcaccgtccgatcacagagccaaagttgcagaccactgactgatgctgatctctcatgcacctcaagtttggtggcaaacggagcaaggacgcaaccatacgaaagcttcaaagttttgccgtcaaagctttgaggggttattgtgattaactctggtcaccatttgcaaaatggttgatataattgaaatcagcatcgcgaggggaagaccccccaattaaatcatctcactcaactcattactttgacccaatgagatttgggtatctccaaccctttgtaagtaattttcagtgcttttggtgtttgtttcgactaacgggttgtacatttgtgatctacgcatcaagacaattgttttgatatatactacttctatttttgataatatttctggtacaccaatctctattgccaccgatagctaatgtgcaccgcttaggtgaggttttggaacttcaaatttcagatatggtcatgttatatgtcgtcggaatcggtttgaagagtacattataatgatgataattatttattttattggacaatgtaggactaagtgacatttggagtgtctaagctatttgaacttaagaatcggggggcttaggaacgtgccttttggagaaagcttgacgatcctaaggaggtagggactcaacttgtttattgaacatgattttatatgtgttgacactactacaaataatcaaaattcgcgaacggtcttgagtaacgattttttttttaggaccgttgctaaaaatattaaacaacagtttaagactgtcgggaaaaatgagtatttcccacagttttttaacaatagcttaaaaactaggcgacgatttttattaaaaacaggatttattttttttaaaaaaaaaattaacccctatacccgacgatttaa

SEQ ID NO: 244844 - DNA, 695 bp, Cannabis indica
gtattcgaaaatcaaacacgaacacaatacaattataaacgtgtcactcaaaccatttatttcatgtcattttttagtggtgtcatcgtatattgccaaccctacagtcagtgtcttcccgttaaatctcgtgactgtaaaatctatgtacacctacaaattttcaagagcacggtgtaatttgttgcgatgccaaactccaacgagaaccggtgtacaaagaaccttttaaaaagcaaaaggagaagatcaagaaacgccttgcaaggcaaaaaaaaaaaaaaatcaaacaaattacaagtagtgatgcgcctagcatccttagttgttgatttttgatatgtgattactcacacttggttaattttgcagaaatgactttcttaaagagtgtcccctcgtccacaaaccaaagtccaccaaagacggtgcgactccttccattgcgagtcctggagtgaaaaggaagagtgatgtccttgattcgtaggtaatcaacttgtcaaaaaagcagccaggagccacacagaacaaaggaaagaaactcgtggtggatccagccactaaaactcgtgacttggtagccctacaagagctttacttgaatggtgacttcttctttgatcttgagagtgctttagtcacgtatatttggagtcattggtccgagcatataatcaaagggatgatggagt

SEQ ID NO: 244845 - DNA, 1562 bp, Cannabis indica
attaataaaattaccacttattcaaaaaaaaaaaaaattcccctattgggtccatcacacgcgctgcaaccacgattgcgattctcttaaaatctcctcttcaatttgaaccgaaacccttttgcgtacgcgcgtactattcccactcccatcatataaatatatataaatattaaatacctttccatcatttctttcatttcaactctcacgtttcaacttctctagcttcatttcatatgtgatatagtttacccaatcaatccatcgacacacgccatgcccaatcaactcacctacaccgatcactacatcgacgtcggagacgacaccgtcaagacactcgtcaccaatgcccctgacatggtcgattcctggattgaagacatcgagcgtatccaccgtcgccgtctgaatcgccttgttgtcggcctcgacatcgagtggagacctaacttcacgcgcgctaacccaatcgccgtactccagctctgtgtcggccgccgttgcctcattttccagctcatccacgcaccctacatccctaactcgcttagagagttcttagaagccggcgcgtacactttcgttggggttggaattcaccaagatgcgaggaggctcatgtcggagaagggcgttgacgtgactacttgcgtggatctcggtggccttgcggcggaagttaccggcaaccggagcatgaagaatgttgggttgaagggtttggctcgggagtttcttcaactgaatatggagaaaccgcggaacgtggcgctgagcaattgggatgtacgctggctgtcgtctgatcaggtacagtacgcatgcactgatgcttttgtatcctttgagattgggagggttttacaagcctggaaatggggttgaaaatgtgttcttaattgcttgtgtttagggttttacaaggctggaaatggggttgaaaatgcctgtagtttcttaatggggaagaccaatttagggtttcttttgcgtttatattctaataatgactgaactaatgggcgtttctagagaagtaccttttcaacattgtggtattttgaatggaaggaattggaagttttctggtttgatgattcaattttctagctatataatatagtagctgtttctttcaatataacctcttaaaatgtatacattgatgcactctatctgttttagcatggaaataatttttcagtcaaattttttctaatggtcatgtacgttatagttatttaagacatcctgtaaaattttaagaaatttagaatagtttaacacgtcgaaaattatgttcaaacagtgtgttgaatgcgtgactatttattttatacctgtgtaaaataaacggtttgaacattgttttctatattgtaaattattctgaatttttcgaaattttgtaggatatcttaaatagttataacgtacatgaatataaaaaaaaattagactaaaataagttttctgaatactgaaacaaattaaaggtgcatcggtatatcccttttaaagagtgcattagaatcaccttatagtttttgtaactg

SEQ ID NO: 244846 - DNA, 1734 bp, Cannabis indica
atttatgaaatttaaggaaaaaatgccatattctacgtaatttcctattaattattgaccatcccattatggtagtgagtaaatattagacacataattaatgattgtgtttatgatattaaactcatgattatattagtccacaataataattctaacatccctttcattagttgaacaaaaaagatgcatgtatatttaaaataaacctattaaaataaaaggcatttaaagtatcttattagccaatacttttaattattaatttgtcatattcactaagtaaaacctacattattttttagtaaataaataaataaatatatttttttactttattcttattctttacctaaatatatggatagatcacaatcttattataaaagtagattccaaattctctagtagaaattttgaagcaatttttttttgtcaagagaatcaaaagagcctcaattaagggtttaggatattttttgagaataaatgaacttgatatgtgaggcagaataacttttaggctcattaaactaaaagctttctaaaagaattggtttctcattcaaatttctttaaggaacatataaggttgtgtttggaaataactgtgaatttattataatggtaattatacggtctagtaattacactaaattttaaaatataatgtgtttagatatgaaatagtaattatgtatgaaatactaatattttatttggtaaaatacttagtaattacacaggaaaataatattttttagtagttaatgtttaaaatataaaattttagtaattacactcaattctcatggaccacgagggccatgagaattgaagagtgtaactggaatccctcgattacctccaattacacagttatagtgtaattacatagtcagacaaacatgtcatactgtgtacctccaattatacacaaattcaattacattgtcgctttccaaacgcaaaataaaaaaatagacaaacttttttgcaccatctccaatatatgcacactttgatgtaaacctaaaaatactcccttctaccctgtcaattttccttcttttcttttctctttccttcttcactccaaacattttctctcttctccacacccaaaaaaaaaaaagagtcattacgctaatttttggagctattatatatgaaagataagcatatttctatcaaggaagagccttatcacaagataggaggagaaggtcaaagttttaaggttttaggttgttttttgatcgaaaagaaatgagtatgtaattttatgttaaatttattgttaatgttaattttgttacagtttaatagaagtatacttcgtcctctttgtcagtttgaatattatgcaaaaataattggtgcactgttactctagataattccattagctcaacaataaaaaactgtttaaaagggaatttcgatcaccatttccattaatttgtttacttcaaatttttcttgatggtattaaaatacccaccagtaaaaatactcactgaaaccaacaattttggaagaatctgtaagtattggaacaacgaaaaacaaattaaacattatcgagtatatatcgaacacacttgaatacacatcaaacaaccacgctatataaaaagctattagtaatcgagtagcataatcaaacaacagcatataaaaatatttagaactaaaaaaggcatttgctatagagattttttaattttatat

SEQ ID NO: 244847 - DNA, 665 bp, Cannabis indica
ttgagatcaaacaagggttttagtggaccgtctgatcaaaaaataaggaatggcgataataaaattttaataacaattatgtaaataaaaagaattgagagagttaatagaaaaggaatccgagtaatgcagtggcagtaagggagtcagaggagtggttgagttattgagctgcccgataatagaaaagctcatttaatatttttggcacttttttgtgtttgtgtgtttctctgtggatttaaactcatttaatttgaacccaacccaacccaataatattatatcatttttattttattttattttgtgaaataaaaaagggaccctcgtctggcgtgtcacttttgagcagaggcgaagagttcgaggcgattgaccgacagatgggggctcaggggtccattctctccttttcactctgctttttcaccattttacccttctccttctcaccctttccttatttactcctctccaacaaacattacaatttacttacttctaacttctcattctaaaaaaaaaaatcaaataacataggcttttcctcaatcaccacttttatttctaccactcaaaattatgagtatatttcaatattacaaataataaatttacattaaatttagaaattactcttaacttttttttattattatttt

SEQ ID NO: 244848 - DNA, 1290 bp, Cannabis indica
atttcgatccttaaatttatagtgcatatatgatttattaattccgcactttattcataatcatgtatgttttaatctatacaaataaatgtctaacagctaacacatatttggccatacgatagggtgcaacatttgaagatctaggaaaagaagaaaactatactaagtagagtttatttaaatcatgaataataacctctgacctcatcataatcacccaagttggtacaatccaacgttaacatctttacaacttccgaagaattatgctgaaagaatccttaaacgctgcaactttatgcccttggcaaccttgacacttgacactgtccatgatggtccataattaaaaaggtccgttgaataaaattgggtttgaatcacattctacttttccctcttttgtctctagcaaaagccctttcgaactacaccactcacttgttttgaggtgtcaacactgactttaatgagatattttgcctgtggctgccacttctcagcctgatgtcacaaaccatcatgaagcaaacaaacaaaatcattatttgaacatcataaagtcaggttcataagcttaacgaattttaagatagaaactgttgtttcttttcctttgattacagattcctcaactgtgctttaaaataaaaaaaatttaaaaatacgaagaattggtcccaaaattctattccaacaaatgctttatattatgagctattatacatcagctttatttctttgctacaagatagctcctttaaattattattttttttaaatctcactcctcgattaaatgcttctttgtttatttttagttttttattattttttattgtttaatactaaaagtatgttaaaatatgacatttaaataaaaaaattaatataaagcgtataatataaaaatttgaagtaaaataaaaaaagtactattttagtaatttattttaaagaatgaaacaaagacacagctaaaagtgctgatcaaacatgagggactaagtcacaagtgactaatttcccatcacaggcgactcttttactctctaaaaagtgtcaaatgagttttatcattaagaatatatgtttattaaattaaattttgaattattttaaagtcatacattaaatatatatatatatatatatgcacatatatatattaggttgatattacgtgcaatgtacttataattagttttctttttaattaggttcaattaggtgatgttaagtgcaataaatgtatgtttaattttttttaattagataatgtatttt

SEQ ID NO: 244849 - DNA, 1388 bp, Cannabis indica
aatatattataattttacacaatcaattaatacaagtcaataccaaacattttgtaaggagaatggggagagcataaacgaaaaatagagacgaggttaagaggtgaattatccgcttattatcatgtagcatactcatttgggctattgtatttgcatttaatcaagtttcttatttattatttttttaaaaaaaaacaaacaaaaaagtattagacatgccattaaattatacttttttttctttctttattttttggaatctgtatttggcagatgaagatgataattaatcagagttgatcagtgttaaggcatgcccatttgtactataccatgcataattgtcataatgaattccaattttcgaaaacatatgaaattaattcacttatcacaattattacaaaagtcataacattaactaaaccaaaaattatgttttttttcttcattactgagacactgacacagaatcaaacactgctcctctgatttcttataataactcattaattggcattaaaaaaaaatcttttaattcaacaatttgttttttttttctttttgaaagatgaattcaacaatctctgtttcaatgaaaaatcatgaataattagtcacaattaataataaaaagttatgactaataaaaatcatgaataattggtacctggtgtcttgtaaataactaaggacattttataataattattaaattaattatgtaaaattgaatacacaatagttattttatactaattattaaattaattatgtgatattatcggtttcacatgaacgtagaagtgcattaagttcttgtattcaaactcattgtcaaattagagacaaaagaattcattcttaactttaaatggttcttgtagaacatttatgggaacaatatcgagagaattagataatataaatttagtggatgggagcattattatttgattttactacatgatttcgaaattaaataaaaaaaactagatattatattgcatttaaaatgcagtttagtggtgagggagggatgggaaaaagggagaggttacgagttctaaattattaagctaatatatgattgtaaaaattattacgctacactcaaaaaaaaaaaaaaaaactatcttcatttggaaactttcaaaaaatgatgtgctttaaatgcagacaagttagtagtatcaattttcattattttttcttcttctttttattcttctagctgaaattttattttttaatcaagaatcaatctttcttgatgtaacgttcccgcttcaagtttctattgggctcttacacccacagaataatgactcttatacacgagtacgtcactctagctgcttcatggactgatgactgaccctaca

SEQ ID NO: 244850 - DNA, 1052 bp, Cannabis indica
gatatacaattataagttaatattaaaattctttaaaaaaaatagtcgggtcggatcaactttgattcaaataagtcaagtcgaatctgatctgatttgagtatctgatctagtggagtggggcagaatagatccttacatgatttacatcaagttagaccataaccaaatcagatacccgaacacttctactatgtagttatctcatatatcgattatgataaattcttttgcataagctatatataaagagggtatatttttaaatcttggattcttgggtttagtaaaaatgttgaatcatttgaccttataccttttaaataatttagctacaaaaagtactagcggtctaagaaaattgcacgacacaccacgcacacatacatataaatatctacccatacgtaagttctggtcatgatgatgagattgagagaccaaaatgcagtttttgactgtcgagccatttctctgataattaaataatttcaattttatttccttcattattttcacaaaattttctattagtattgcccacttgggcaaccacttataatacgaataattttttctctttctttttctgttcattccaaataaaagaaagagtctcagttagtgtctgcttttaattttttttcctattcttaatatccaaaatgatcctccaaaattgaatcctttataaagaaataataaaagtaacgattcaattatttataatattttttttttgattcaagcgtttatatattacatcatgtcttacctgggactcgaacccaggacctccaacactcacacacccaactatggccacttgagctagccccaagtggttaattatttataatatatatacttatgagtagtatatatcaaataaacacaatagaataagtaagcacgtacaggcggtgacttaatttaattgtcaaattgaagtaacaattttttaaaatatatattataaatgtatatatagaattgtttagtagatgaattaaattggatgtttagtagatgaattaaattggattagatta

SEQ ID NO: 244851 - DNA, 1200 bp, Cannabis indica
ctggttagaggaattgcccttgaccaatcacatgtcattgtctaccaaaccataactattgattcaaatttttgagctgacttgtttgaatttacacaagacaccttataaacaagttttttctttcattctcttatactatttttgctttaatttccaaccccacaacaaaatctcattttaagatgtctttggcttgtcccagtgatcacattatgggctatggatcagtatcaattgtatttcattgcctattttttttagtcacactcaaggttttggataattcctgtacttatttcagcaaagtcatgtaattagactaatgattaagatgcattttcatatgaacaatgttttattagtggagggccctgaaaagaagataaggactgatcatcatgacatatgggactgtcttccttccaaacccttcaattgcattatcattcagattaataggtcaccttaagaatttgattattaaaaaacatgcaaggattgatgatccttaatctggatgagatattttgatacctctgactaatatgagatcattattatatatagatcacatgctaattattaatgtgttccaatccagctactactcaagaaaatacaggggttagcatatttgtatggcctatcctatctcatctcaatttgattgaatcttttagatatacaaggttgatttaattaaagtgaagctgcattaaaatattcaggtatgttaagaacattataaaaacaatatttggaaaacaaaaaagtaaactatcaaaacacaaatacaattgagagtttgatgaataagttgatgagaactagtttgatgggaaaatactgtgtgtggataaaaggccgccctcactataggcgggttaggcgtgtgcctgagctcaaaaaaaattcttccttttaaaattacatatttttttactgattttgaaaaatatcatattttactctaaataaaagctcaaaaattttattgtttatggcctaccaaatttcaagactagcccaatatatgtacaggtgaatacgtacttatgaaacataagcacctgaaagaactctaaagaagaagtaacttgtatgtagaagtaaaactacatacaagggtgcgtgagtattggaggtcatgggttcgagtgtcaaattatacattattataatatataaacacttaaa

SEQ ID NO: 244852 - DNA, 2018 bp, Cannabis indica
tggacaaattttgggataacaaatgtagcataggttggcaatcatagaggagtaatcaatcacgagcacaaatgggttcaatgcttggagttggtccaatatcttaagcagagcacgtagagcttactttgcagagtttattgcgcgcattgggatttctccgtttcagctgataccttcatcttataagctcctagctagatggtacatttttgaaaagttaacaagttcaaggtgcccagtccgaaggaaaatctataattctatggcgtgaagccttaggaaatgaaggctaactggaagaagttaggggttttacaagctcgagaggcattctgacgctcactgccctaccagttagactaagcattctcatgacctccgagagtataagttcttctacactagtttccctgtgcagagtgtacctattctccaactcaacttccgaatcccaagtaaaaattcctacacttgctttttttaatctgtttctcttttaaactcttctctgatttgattcaagtggtgactaggattttgtatttctttgtttctattgacagagcctgtgccccggagtgttgagactaaggaagtggctaaaaaggtagtccagtataaggccttcaccaaagcctagttaaaggttgaaggcttggtcaccagacagtttctcccaagcatggactcattgcaaaatttaaaggaattgatagtgtcaacaacattggccaaggttaggcttcaaaaaaggccaaggaggtgattgcccgtgacttagccaaaatcatcacggaggccgctaaagaggaccagcttctagaagctagttggaggctctgtcacccaaaccctttgtcaaaggttaaggagatccaggagaggtatgctgtagcatactcggatgagggtgacccgggggccaggacttttagaagaggtaatagactcttctgcatattccgtacccccagcctaaattgtgtatctcgaatggatcaagggggatttgacagtggctccttaaatttagaccacactaagtaccccatgagtgacttcatagatagggtagacaagatcattaggagtccaagcaatttagaattgtctccaaatactattaggggggacccatttgcaaccatgtccttccaaaacttcagagaatacaaaagctttgttggttgggaggacatgactttttttgcccgtggggagccttatagctgctcactgaatggctgcacccacattcacactttttaggaatatgttgttgtattctatgtaacacactaactattataggcgtgttagcatgatttttaatgtactgtgcagctcgttgctaatcaacaagattattggaaatcgtgaataattaaaattttgcttaattatttaagacataatatattactttataaaattctgggatgctgtttacaaaatatagttacaaaagtttactatttatatacaaaatatttttcgcctagcgactaaacaacaaaagccctgatgtctcgagaatcgtacactcaagacctaactaccctgacatgtacaatcttcatctgcttgctctcacggctcctcaactttacctttgcccttacctacacatagcaatagcattgtgagtcgacagactcagtaagaaaagcataacatataacatacacataacccgggttataacctggcgcccatacaccgatcataaccctaatccatgtgtcccacacggtactgagtctagaatgtttgtacgacggtacttttgacatgctaacagcctatactcggtacactagtcatactttagctgtaccgatgtgatactgtcaaaaagtacggtactatcgaccataatatcagcctatactcggtacgctagtcatactctagtcgcaccgatgtgatactgtcagatagtacaaaagccaacatacatatcctatgtaatctaacaggctcactaacatgcacgctaaacatgtaaatacata

SEQ ID NO: 244853 - DNA, 622 bp, Cannabis indica
tactagacacatttttttattctgtctttcaaaaattacaagtaaattgatattgatgagttttctaacaccttattgaagcactaatcaataatcaagttctatttttattttcatttcgtgattcatattttttagtttattgtatataatatttataaaaattaataatgtgatattttcttccatcaatctatacttaaaaatgagtattagtcatcagaatatttaatggttttgtttgaattgttatactgttattcgatattggcccccctacaatttagtcctggctccgcccctgtgcatatcaaaactaattggcaataaaataagtagtacatttatcttatatatagtaatttattttctcacagtaatttaggactaactataatatatatcattttgattgagattatttactattttttatattcattttatttaacactacaattttttggacatatttaaagttgtagaactttaaaatggtataaaattagtgtaaaaaattatgtaaaaatatgatgagttcatagaacctatctcccatatatggaaaatgtgcagcttattgtaataagtgcatttttacctttcaaaactatttcttttt

SEQ ID NO: 244854 - DNA, 1011 bp, Cannabis indica
aaatttcaactgcggccaaggtttcctcaaacccatttgcgagttaaattttcaaaaaaaaaaattgaataatttataatgccgaaaataagatttacatattttattgcacgcacaataattttttcttctacacgtggcaagtaattatttaaatctaactttcggtactataaactattcgaaattttataaaaatttgcaagtggttctaaatagctttaacgtaagagatcatataaaaaacaaatagattaaaaaatttatctgaatgccgcaacagataaaaaatctaccgaacaatctttttgggagtctactagaggaatttccaaaaattatttacgtaaaacaattaaagaaaaataaaacactcaattaacactacgttagtgtataaaaataaatggataagaattattcaattagttaaaacattaaagacaaaagaaatgaataatcataattgtttttaaccttctgaatgtacgagaattttaaattatcaaaatgggtgaaaagatttacatttgcaataatagttattttatcaatttaactataataataataatatagatctatcttatactattgtcgtttttagggatgtttcattcaatctaatactcactattttgcttatagtacattcaattcacactaagtgtggatttcattttttattccaatctaatacgcacaataactcaaattgaatccaattcaatctgcaaaagtacgaattgaatcagttattttaaatttattactttttaatattaaagtatttaatatttatgaaaaaaaaaattgtttcacatacttagcaacaaaataaaataaattattattattttatgtctccaacaaaaaattaaaataaataaaataataaataacaaattcaaaggaaaaagaaaattgtatatataaaaaaatgtttaattttgttttaaattgtatgtaaaaaaaattatataagaataaaataaatatacaaaaatataa

SEQ ID NO: 244855 - DNA, 87 bp, Cannabis indica
atgagacacatattttgcctaaaagaaaatacatatacgttaaagttttatattcatattcagttaaaaaaaaaaaaagcaaagaaa

SEQ ID NO: 244856 - DNA, 881 bp, Cannabis indica
ctttattgatgttgaataaaatagattacattgaaatggagttttatttagggcataaaacctaacatacgactcaccatttctgaagcaaatagagccaggttagggcctgcaaagtgaaatcccagacgtccctggtatactcgcctaaaaaaggcccgtcttgagcctccctcagcttctttttcagggcctccgcttcagcgtctcccttggacagttcctccacaacattattgtgtttggcaatgcggagttggatcctttcttcattaggatgggcaggagtcagaatgatgcctggaggggctggatactcgtcgaccttagagggaatccctgaatcggcactagggccgagggtgtcaaccctcttcagcttttttgaaggcttcagctcataagtgacacttttacgcttctagtcaagaggagggacaacctcctcttcctcctcgtcaatcaaaaccacctcctggttcccactagcttcaacaacgggaccccctacaactcgagggtgctttagtgcgtttttcttggggctatgggcctgggccaaggcatcaaggagatcctctataggttctgctattcaaaatgagcaaaaagtcagagtgacatcaaaaattataagtacaagtatagtgtagcgagacttatcctaccatggtgatctaactcagccctactacacttataaattaaaaagctggtgtcgtcatctcttaaaaaactatctgaaggaagaaaccaactcgaagtcatgaaggaggaatgatccaaaaggattagtacgggaggaccggagcccatccgagactgacctaagaaatgacttaaattggagaaataaaaacccttggcgttatcaccccacc

SEQ ID NO: 244857 - DNA, 1459 bp, Cannabis indica
agcttttcttgattagccttgtacatcttttgctataaataagaatggtcttagctgatattgtgtgtcttacaattaatttcatctaaaagtcttttgcttagaaactcttcattctttggtttcttttgtcattacaaatactatgataattttttggttgaattgattattataagattatttaacacaatttgaatattttataattttctaagtaaattattgttcaaaaataaaaatgaacaaaagtattaattattgtgtacatttaaaattaacaaaaaatgtttattgaaattttaaataagtaaaaaatatatatatgtttggttaggtttggaaatttaatttgttagtcaaacataataaatactcatatcaataggttaaaaatacaattccatatgtactagctccatctacatacgtgtgtactagtatgtcatatatacatgtgtagttaaatgattactcaacactaagtttggtaagatatagaaagattaaagagggataggagaatttgagagagggagatattttcaaataaattagaaatgcagtgccaaaatccgtccacaaaaatagtcggtgcctatgaattcttaatccttttaccttttctcccattctcacaatcctccataccaaatagaggagccataattaaagtctcctattataatttgtttctcaactcatatgttaaaatattttttttcaatttttaaacaaaatttctaatattttaatttgtacgtcatacctgtttaaaaaattttaaatacattttcaatacggtaaattattcttaatttttcaaccacctttatttccatctccatctaattgtatctctatccttccaatcgaacttgaaatctcaaagtaaaacaaaaatagatgataatttttttttttttgaaactctaataaaagataaattagtggttgttttctctcatgataaatgaaaactacccttacacgattaatattgtacaataaacaaggaattgagtcaaacaaaactttatttaattagggcatgtatatattggttgtgactcatagatgatatacatactaagtcatgaaagaaactccaaaaattaatgttaattaagtcaaaagtgtaatatttaagcttctattattattatcgggttggagccatataaatatatatttatatggaaatatatatatatatatatgtatagttggaggcatgattattgttattctattcaaagtaaaaggtttcaaaacattattataaagggtaaggtgccatgtatgattatgtaccaaaaatatgaaaaaatatcaaaacttatattaatcaattttatcatataatatatatatcaatactatacagacaatggtatacgtaagttacaatttattcatgtactactaattaaaaatacaaaaatattaaatttataaa

SEQ ID NO: 244858 - DNA, 1151 bp, Cannabis indica
aattaggaaaaataactatctagtatactgactaaactttaatttttactaatgttatatatgacctttaaaatacacaacattatatatatgtatatatttatataaacacacacaaacaattgtcatagaaggacaaataatatttaggtggtggtggtttaactatgagttatcatatttttatggatccatgaaagtctaggcattttttcctctaaaacaaaataaaggttttgtctttattattacctttcaaatcagaacagttgtgtataggagaaagaaatatctctaattaatggttattttttcaatattagccttatactgtcttaaaaattaaaattaatgttaaatatatttttttttagagtgagtgattcatgataatcgttagagaaattttcaattaataaggtaattctctagttaaatatatacaaaattagaatatgagtcactacaaataaaacgatatatatgaccaaattatctcaaaaatttaagcaaaacaacttaaaatcgacttcaagaaacatcccatataaacaatcaattaaaccaaaactacctacaaaataaatagatataaaaaaaataaactagcatactatacaacgataatattgtgaatttttaaattaaaaataaaacgtaattattattttaacaagaaaaaacttatctttgaagtgtttcttttcacttagcatgtcatcattatatcgaaactaatttgttatgttcaattatttgacctaagtcttctcaggcaaaaatatactagttaattaaacttacaccatgcataaaatttgagatgttaatcaaacttaacaaattaaatcccaacttaaattaactatttttcaaaaaaaaaaaatgtaacaaaactcaattagctaacaaattgcctaggcataaccccttttatttggacaatgagttaactactacgtcgactgatagtattttggttataactttctcgatattgctcagaactgtacgattaaagacgacccagaaatataaaagagagatctataacttttatattttgactttctccaaaatctgatcagaacatagtctaatttaagcttgaagttttagctttaatttcttacacaattttctctatttta

SEQ ID NO: 244859 - DNA, 1043 bp, Cannabis indica
ctaacactacgtggcttggcacgtaacaatcacctagtatatatatatatataaagaaaagtataatgagagttgagatggctttctataaagatagtattatttttttttattattttgtgttggttttagattttttttaatcattttctatactaatattaaattaaaacctactaattaaaatttaaaaaggaattaataatgaatgaattatagtattttaaaataaaaagtattaatatgataattacaacattatatttataatatatgtattaattatttatattctaccattaaaaataaaaaatatttgtatttttatttgtttatttatgaggctattcatcatcaccaagacgctttattattttttgacataccatatatatgtatatcttactattgctcaaagacatgaaaaatacctaaaaactatcgtatatataccagaacaatatatattttagaatttgaattatttttataaaaaaaattatcataagaagtatgtcaaactattagtatgattatgattaacaaggtatgtattttctattttctattagtatttttgaatatatcatattgtgtagctcatttgtgagacattttatcatcaaaactccgaaacattcttaccatactatgaatatatatattctactattattcaaatgtaagatatatagaaaaagataaaaaaaaaaaaaaactaaaaaaagactatcttatatatatcatcatatttatttttagaactttgaaggtcttttagaaaattattatatgggattgggaaggaaactaagcaactggtatgattatgatttataaagtatgtattcttaatttttaattattattgttgaatatacttattttcgtatgcattctcatacatatatttatattatatttaggcaagagaaatgctaattacaacctcctattacaaccttttagtcaacctctacgtccaaaatcacatgccgaatatttttttttcaaatttttttcatagcagtattcgttatagt

SEQ ID NO: 244860 - DNA, 665 bp, Cannabis indica
gtgtttgccaaaatgacaatcttggaaagtgaaattagaaaatgacatttcatttttacacttctcaacctacttggtcactcttgctttcgtcatgtaaaagtatatcgaatcgatttcatctaacaaatatttgtctcataagtcattttgcaaaagagcctcttgagacttgtcctataaaactccagtttccctaatgtttgtagggtatgtaagaaaaattaattgtcaagagtgacacttgttagtgtgagaattaagaatttggtgatatttgtaggaattacagtgaaagatgtttaaatacttttgaatggtgtattatggatgtgttattatctgtttatgtatcatttttttgccttgtcaaattctaaaaatatgctataataatattcaggtaaatcctcacactcatcagttgaagctttgtgattttggaagtgccaaaatgttggtaagtattttcgctatgttacatattgagtgattaatctagcttgttagcttagcttgatccaattgttcaaagtttagtctcttttctatgttatcagatgaaaggagaaccgaatgtttattacatttgctcgagatattatcgagctcccgagcttatatttggagcgactgaatacaccacaactattgatatgaagtct

SEQ ID NO: 244861 - DNA, 1570 bp, Cannabis indica
gtcgcattattacgcctcgcataatgtaaaataagcaggactaagaaaaaagtatacaagttacgcatttattgagatatatatgagatgaccaaagtagtcttctcctgcgacttaataaagactgtttctttactaaacgaattggtccaagtgacccatcgtagtcgatgactcgataagaactcgcatgtcctatgttatcaacgctaataaggtatccacatacgcgattcaattaggatgcagataccttaatacaaggtctgttatagcttcctttattgtgataaaacgcaccttaagcctgcgaacttgtgcgagaagatgaacaggcaactcgcgctatgaaagtcgcatacgcggttgcatttagtaaaacgaatttaaactgttcttcatttactcccttacgtttatttcaatttaatgttataatatttaatgtaaaacgattctataaccgattaagttttgtgtaaataataagacacttcctttgtatatgaaagagtgatccgacatgaataaaataagacaaaaaatttcttacaacagtgtattaatcagaccgtgatctaattgaaccactatattttcttatattcattgttttcattacttttctatttgtttggacaattttggttgaatactcagctgttttctaagtatcaaatctttattttatatttggtgttatttaaatttctccaacagttcacttgagaaacttgtaatttagttttctaggtaggtaccaattttgaatttgacaaagataaaatatgccaaaagaacaaagaagaaattagcatgctgtgtaatggtggtgtccgtggttagagagaagtttagagagaagcggaaacaaaaaaataagtgttgactgtaaaattgattaaaaaagaataaatataatgtaaaaattcgtaaaaaaataaaaagaagggtaaatagagtgatttgccaaaataaggataatagtataataaaaaaaatatttctgaaattttcaaaagctgaaacatagagaaaaccgatgacgggcggcgccatttcggccggggtaaacgtccgccggtggatctccaggatattaattagaccaaactgcagcagttcgaggcattgcttctatccgagtttcagagttcagtggttcagtggcggcgccgagtcagctaggtcggagttctcgaaccagaacgcgtatgagctcttgggagtttcagagaccagctcattcgccgaaatcaaagcttcctttcgcaaattggccaaggaaactcacccggaccttgctgagtcgacgaacgattccgatgcttctaagagatttgtgcaaatccttgcggcctatgaggtgaatactctttaactcgatgaatctaagtacacaatttcctgtatttcttctcagaactatacctagaaaggttttgattaatgttcaaagagttttattgggtttctattcatatgattaatctcttcatcgtttacatatgagtaggatattttgatttttttttgctattaattgggatagaatgaattttactgtaaa

SEQ ID NO: 244862 - DNA, 1283 bp, Cannabis indica
tgaagaaaaaagaagagaagaaaaagatatagacttgttgggtacgttagctttttagaagcataaaatcatatcatgtaattttttttttggaggggttctaactaagagtctatgcatgttgattgacttgatcttgatctctctccaaatatgtttatttgttggagcagttttaatgggtggatcagagttaaaagtgtgtttggttgaaaggtttttatgattattattagatttagttctaattatagttcttttactctgttatgaccaccggtacgaacaaaaagaggttcacatagattttttttttgaaacatctcattttcctaattttttccgtgtgagaagaaaattgtgggttagattgtttgtttgttgtatagataaaacatctttaaactaatattgtcactattttagaataatcaatccaaatgagcaagtgcgttgcaaattcgaaagcatatagttttgcaattatattgtttcttcatccacagttttgtatataaataaattgtttgattaaaaaaaaaaaaaaaattgtttgattaaaatgaaactatagcgatatatgcatatgtacaatgttatatcatatatatgctgaattaatataaagattgaacttatataaaaaaaaagaatatcaattatgtgtacctccaagctaccaacaattgattttgataatctaaatctacagttctatatttacaaaataatagaacaagaatcaatatgaatatttggtcttacaatcttcactaactctttagatggagttagtgaagaatcgaaaataacaacaaacacaaatctaaaaacaataataacacaatcacaacaatattcattttttagcaaattgtacagagcatatatcaacaacttccagtaacaaggtttagaaaatgaaattcagtttatatatgacttaaatgatcataataaagattttttattaccattaattaggttaaaaaataattagcaaataggaaaaatctatacaagaattaacatttagaaactcattgttttttttttttttataaaaacaaagcatggactaacacggtttaagcattcttaattgcattgttactctaaaagtttgaaaacgaaattcatatatgagttaaatgaacataataaagattttttatttttgaaggaaagcttatattcaattcaataaaatcagttgttacaggagcactaataaatttaggacaaatatctgtccacaagtgaacccctaccgaactagtaac

SEQ ID NO: 244863 - DNA, 2103 bp, Cannabis indica
ctggtaaaataatttccaagaaggacatgatggacaaagtggacaatgcaatgtgccaaatcaagatcttattcaaagtcttaccaatcaataccaacaactcatgagtctcttatctcaaaagcctcaagaaactccaaaacttctacaagttcagatcaacccctcgtgtctcaattttctggtaagacttttcctattttgcatagtaggtggattatagacacaggagccacacatcatgtgtgtcctgatttatccttgtttaccaatattaagaaaagtacatccctttctactgttaaccttccaaataatgcttgtgtgagagttaattgtattggtaatattcaactttcacctgatattactcttatgaatgtgcttcatgttcctgaatttagatacaatctattgtctgctccttcactaatcaaatctattggatgtcatttcaatttttctcttaatcattgtatcattcaggacagtaagaagactcgaacgattgggatgggtgatcgaaatggggatctgtactacttgaacttgtcacataattccattcctgctgccattttttctgttattagtgactctactgttgttgatgataatgtttggcactatcgtttaggccatccctcatgtatcaaacaacatcctctcaataaaaaattacaatttcgacattatcctagtcccaattttcattgttctatttgtcactatgctaaaccaagaaagctacctttcatttctcatcacaatattgctgccaactgttttgatttgttgcatattgacatttgggggccttataaatctatgaccacagaggggtataaatatttcattaccattgtggatgattactcaaggtttacttgggtgaaattcattaagcaaaagtctgatgctcaatcggttatttctcattttttcaaaatgattaaaactcagttcaacatgaatataaagggaattcgatctgataatgccaaagaacttcagttccctcttttattcaaacaacttgggattatacattatcattcttgtgttcaaagaccacaacagaattctgttgtggaaagaaagcatcaacacttgcttaatgtggctagggccttactttttcagtcctacattcctttatgttattggaatcattgtgttggtgcagctacttatctcattaataggacaccttcacccaacctccaacataaaactccttatgaaattttacatggtcagccccctaactatgaacacttgaaagcttttggttatttagcatatgtgtccactcttaactcctctagaactaaattttctccaagggctgttccttgtgtttttcttgggtatcctcatggtatgagggcatataagttcttggatctcaacactaatcgtattttttgtagcagggatgccatctttcatgaatatttgtttcccttcgtgcaatctgctggtattcctgattctcaccttaatttcctctctgatttttcgaatgctgatatgccttctgatgttacacatagcaagaacactataattcctcctgatgtaacaaataccagcagtgatgttacacataattctgcttctagaacccctattattcatgattctgctgcatcacaagttgcctccagagccagacctacccgaacccatcataagccctcatatctcactgattatcactgttttctcactaaattctctgctggtgttttttctcaggatcaagatttggtcacagagcatccattgtctgctgtccttgattattctatgctgtctccaaaattccgagcttttattctcgccatttccactttgcaagaaccagacatttttttccaagctcgtgggaatcctgtgtgggattcaacaatggataatgagattgtggctcttgaagccaacaatacttggaccattgttagtcttcctttgcatcatcatgtgattggttgcaaatgggtttacaagatcaagtttaatgaagatggatcggttgagagatttaaagcaaggttagttgcaaaggggtatgatcaacaagaaggagtggactatttt

SEQ ID NO: 244864 - DNA, 1699 bp, Cannabis indica
gtagtaaatctagatcatggtagccatgtgtccatcaactagtggtagagctacgcctggggaatatgggtttctcgatctcgaagccaatatggctactgcagctagagctagtcgatcaaggagtgttgggtttgcgtgggtgcttgtacggatgtagatggttcgtagactgtcggggtatactgtgttccaagaataagaactggtgagacgaacccaaaagtagaagcagttggagttgatgtcaaagggactccaaatgcttgttggtaagcatcttccaggttaatgaagccttggacccttgccgtaaatttagacaacatctcaaccctttttctttgcatttgtccccacagcagggagccaactgcaagtcccaattgtaaggccaccagtttcatatcatccattactttagtctttgctaccatctccatcatgccttgaataaagttcttcagactttctaccgcatgttacttgacattagtgatagagcccatttccatgtcataatcacatgcaacaataaattgtttcctaaaggtagattgcgactccttcaaggaatggattgattcaggagccagtctcttcctccaatcttcataaaatttggtgagggttagggagaagcacaaacacttggtgtcctcactgactcttgccacctgtatcatcttattgtactttgctaaatgagtctttggattagtgtgcccatcgtacaacttgatttggggcatcttgaagttcttgggagtagagcttctgtgattcttcttatacatggctccaggtcctcatcctcagagtctgtgagagccccactttgtttctggaccaacttcgttagtgcagcgatctattcttccaaccttttggtgtcactgtctgggaggtctcttccatagactttgtcatttaggtggtttatgaggtcattaccacatggcctcgccttctcgcattttgctttctcttacttggcatctagacaccttctgagatccaccgtagaccaactatcatcgaagtattgtcccttatcccactgtcctggtttattgaatcactagggcaatttttccttcctttgggctttggtactttcgtaccagtcccttttggcgctacaggacctttttgggcagaagagcatccgagcccggaggcatcgttcgccttctgcgcttgagaaggcttgttggctggatttatattttttcgaggaggtataggagtattaaggttcttagggtcacttacctttgccttccccttctcctgtacaggagtagaggttccagcattagtagggatttccctagtgtttctaccgacgcattccattgaggtgtcatcgtcaaaatcccctcatcgagatctccaaacttggctcgaaggcgagccatcatattctccatctttcgagaaaacttctcttgatgggctagcttttttctggtctcaagcaactcgttagacactcaaactactttggggtcttgctcataatggtagccatctttatagtacccatctttgacgtaatgtccatcgtcctcttcctcttcatcattctcagcatctctctcatcatcgatgtggttgtgctagttgtttgggtcgtcctctcgggcgaaagggggtttacttcctccatgacggtcttgaggccaccttgaagagt

SEQ ID NO: 244865 - DNA, 1146 bp, Cannabis indica
aaaaaaaaaaaaaaaaccaatggaaattaatgacatatatgatatataactgccatatataaaaagtgattatagggggagtttcatgttagattggcttacttctgtgatcaatcttgtaggttcagcccacccaaaaacctttggaaggtcatttggaaacccaacatttcaccttcgatttgcattagtatggtgttgtggagaattctggaggaagctttgcgcacaaaggaacgacttcttttcctcaatgataaagaatgtgccttagcctctatcacaagggattgcattgaatctataatcttcatcttttcaaagaatgtccttacacatgagaagtttggttttcaggtacatttcttatcttttctacaattattaattctggtgttgtctttgactttctacaagctatcctcgataacactactggtggggataaatcaaaattgttgatttatgttggatgtcgatgtagggctagcaactgtgatgattcaagctaatagcgatatttgggcatgtaatactgttgtttgtcatacaatttcaacagtttatggagatttacatgctatcattttggccttagagtggacaaagaaaaataattgagataactttgctatattgtttgatgctcaaattattaagaagatctacaccccctacttagcatatgagttaattgtctagcttttttaatgtttctttcttttactttaatcgttcgagcaatgttgttgctgatggactagcaaaaagtgttagactttctagccattgtgctggtgtttgtcaaagggagggatcctcctcctgtggtgcccatcactttcttttagttttcaatgaactaaattgctcaatatatatataaaaaaataactttattagtttaaaagggagatttatatatgctgtctccaaaagtacatttggaagatttttcatgaacttgcatgttacctaattacacatatagctttgacatttcgtgagcctaatgattaaaccctaatgaggttgaccgaaaagagtctctcataattaattacaaatgaaaatactagtatagcacaaaaacacgtcctttacaaatgtgtcgtattgtgtaaacaataaagataaagatataga

SEQ ID NO: 244866 - DNA, 2311 bp, Cannabis indica
ttttgtttcttactcttccaagagatcatattgcccccaacaaatacacaatatcctgaagtagatcgtctatctaccttggagcttgtccaatctgcatcagagaaacactcaatctgggcatgtccatgatcctggtaaactataccttgtcctggtactcttttcaagtcaatgtttaaaattgcgtttctgttgcgcgcctcgtgctcaaggcgcgcctcattttgaggcggaaaaaaaaacgcactattgcgtgcgcctcaatatttggaagagaggcgtacgcctcagacgtgtgaggcggtggaaaatggtctaaggtgtaaaaaacggtgaggcgcatgcctcaaaaagaaaacaagattttagggttttcttagcccattttcattcaacaacttggaagaaagcccaataacatttaacttaagaaaagggcccattaaaacacaataaaaacccaataaaactcaaacaaatagctaaaaaaaagtccaactaaaaactaaaacaaaactatatttcttaggcttagtagccatgagacacccctccttcatcttctcaatcgcacagtcagagaacaaaagaaaaaaaaaaagagaaattgctgctacttttctccttatttttagttactctaaaaatattattttaattcaataattgaggcttatgcctcaacttacacctcaatgcgccttgaggcttacgcctcgcctcacaaaaaaaaagcttaaacattgtttcaagtaacataaaatttgctctagtgctgcccaatgatgaattgttggagaagacataaattgattaatgacactaactgggaatgcaatatctggacgagtcacagttagataattcaactttccaaccaatttgcgatatttctcaggatcttcaaattgttccccatcacgtgtaagatgcacagctgaattcattggagcattacaaggttttgctcccaatttttctgtctcagttaacaaatctagtacatacttcctttgagatagaaaaataccttgtttactccgagttacttcaatacccaagaaatacttgacctcccctaaatctttcgtgtgaaattgggtatgaatgaaagacttaagggatgagacgccttcaatatcatttccagtaataaagatgtcatcaacatacaccactaacaaaatgatgccagtagttgatcttttataaaacacagaatgatctgatttacttttcaactaactaaatttctcaacaacctgactaaatttaccaaattaagcacgagggctttgtttcaatacatataaagatttgcaaagacgacaaactcgctctacaaatcacatattcctatgagtcatacaaggtaaatagtatattcctacaccatctacaaatcacatttttccaaggtgataatcttgtatcattcaagtatttccattaatattaatttttttttttcaaaatcaagattagctaacaacctacaattagtgatcaagcaaaagtaggtagataaacattaagcatcgttgaatgaacaaaatttctattaccaaagatattcataaaacatcaataaaatccacaatccaatgtccattaagagttctaactaaaagaaattagttcatgctcaaaaccacaaaaatacccaaaatgaaatcaagaagtataaaaataaaatacaaaagatttaaggagtggaagaaactatgtggatggctcctccttctccttgtgtactcattttcttcttcctcctcttctttcttttttttccttcattcctttaggtattttcaataatggtggctgcccagaaaaattttggaaaatggtggctccccttttctatttaagctagggtaaattttcctttttcaccattccaaaaatgtcccccacatcgtcccttaattcttatttagaaacttttccaattagatcagctctaaacaatttgtctttcgccaccaagcctcatatttgccacatcaattaatgaattgtcacgccgtcttttttctacattagtttcaataatcagccctgctacttttgctgcagcaaagttcctgcaaaacttcaacaaaatcttgtactttctctattaagcccttttctttaccaaaattcaaataacacttaataattactagtaacaactccaaattatccaaaagaacacaaaaatacaaaataacacatattctcacaaaatggaaagaaaagaactaaatataagtaaaataaacaacaatttttttttttgaaaaagagaaagaggcctttgtct

SEQ ID NO: 244867 - DNA, 2018 bp, Cannabis indica
gtcacgtttagttattttttgtaatttttttttctaaaaactgttttaaaaaaagaaggccaacataagtcaaattgttttcaaaattagtgtttttagttaatatttataattattttttaaaattaatattacgtggaccactaaaaaaatagccacgtgtacaagtgtttacacgtggacagtccaccgtggcacttaactgtgatttttggacggaggtatgcagagcaaaacggaaccagggtttatgtagtttagccgccaaaattttttttttgtggttaagtgttacaaaccctaaagttcaggtagtttagccgcaaatatcccttattaaattgatagatttgacatttataggatgagaattataatatggtatttgtgaaagaaaagacaagttattagagccattattttatcttttttaattctatataatttaaatcctaaccctaaataaaatcctatataaagaatgagataactcttgttttcataagcttattagataattgagaaaaataaagagcctctctagaattcgaaatcctctctctcctttattcttattttgtaccctagagtgagtgagtgcttgcccacaatattcaagtcaatactcaaatagtttggaagattgtgaagaattccatcatctaaggagatctaggttcagatcttggtaatactctgtgacaaaaaggaacaaggattagagatctgaacggaaggagctattatattttgctaccaccaatgtaggttttttttgtaaacttaatatgtatttattttattgttttaggaaattcatatttggatgttagattatagatcattatcaaacatacatgtttgtaaatctagatcctgataaaataagttccaacatattcttgatccgtcaagagatttgggtgatggagaggtgaccatgcatgtgggcgatggagcataagtgtctgcaaaatgcatcggtagggtctatttaaatttgaataataagtatttgttattaaaaaatgttgattttattcttgaatgtacctggaatataatttatttatctcttttgcatgggaaatcctcttatattaattttattaataattaatgagattattatttcaaagtttagaacgtttatttattgtgcaaaatagagaaatgaacattatgtgctcagaccaagtaagcaattaattttaaataattaattttttagagtagctttgcctcaacaaaataagaggcaaaaggtttctaatgatgagaaaacatatcaatggcatctgcgtttaggccatattgtcttagatcaaattaacctatcataaaaaagtttgtcctctgagagaactaaaagttggaactgttctggtatgcgaatcttgtgaaaaatggctaaaagaccttttacttcaaaaggcaacaaagccaaagaacaacttgatctagtacaaattgatgtgtgcaaactaatcagtattcaagctcgaagtggttatgaatactttgtcacttttattgatgattattctagatacgatgattccattacgaagttcccgaagtcaacctgggcgcaggactaggaaccttttccacgtcgaccttctatgactcgggactattcaactccgagatgtcatcattcttgccacatgtcaaacattgatatccatgtcatcaaggctactcttggtgtacataaaaggaaacttcagtaatgcttagttggattttttgttgcctcaatttggtcaaagtttgcattttttaattctaaaatccgtgatctagagtcaagagtcataactttccaaaaataaattgaaaacttctaagttttggatgttgaacacggtccatttgtgactaaaaataaagtttgaggcttcaagcaaatttttgactatgacccgttcacttctaggaaaaactttctaaatgaaagttctagatctctcgtttagctttccaacactgctacaaaacaagtctttagaggc

SEQ ID NO: 244868 - DNA, 1455 bp, Cannabis indica
ataccttgttcaagtcatggtgatcctcactagtctatactcaaggttgtgagtgagtgtattcatgtatttttatatatatatctttttctacttttcttatatataatatattatatattatgtgttataacatttatttaatctctttgttggtctttgtaatagaatctctaacattaatgtaacataagaagaaatttaataatttttttatacattttaaattttattcaattttatttctatttttattactattcttattcttattcttatacttatatttttatttcttcaaaataaactaaactaaagtagtatccaacactaattttatatatgatatctattaatgttactaaattactaaaatcaataagacagtgttggtacgtacactggtactgtatatatatagcaatggtctagttaattaaaatggcttttatgacaatattaagataaaatattcaacacgaacaaggccctcaaaaaactggcttaaacgatgattcacgcggttcgccggcgcaggacctcctatacacggtttgcatgcttaccctcgtacgtacgtatatatataaagaatatcaacatcgttaatttcaatagtgaccaagacaaataaaaaaaagtccaaattacagttatacaagatattttttagccaaaaaaatatatattatatataaatctattttgtgttgtccttcgtctaaaattttgcctatatatacacaaaaatagttgttactaacctgatatataatgcagccgtaaattggtgagaacttagaattattaggccacaaatattggttattattactctttattaatattattatagagatcaagatcataattaactaaatggggcgtaacaataaatccacaactattcatttggctcccttgattcttgccttgaggattgttgcactcttattatttgttggttcgattgttgtgcttcttctcgacacctacaaactcagtgatggagataaaaccactttcaaggatgttaactcgtacaggtacgtacctgaaaattaactataaatacacactcacatatatatatatataaatatatatgtgtgtgtgtaatactattaaacatgaatattatagggaaatggggtcattttgtgctgtacgcagggaaatcacatgcatattttattcgaaagcacaattcaaataagatgttaaatcattcaaaaaaatttgatatacatataaatatatataacttaattatgacttatgtaacaaagttcaataagtagactcctaccccacacgccttttcccctgtcgaatacatataccgacctattatggaatatatatttttatatatttatatacagtatatgtgtaagttgggacagcagccattggagcagtcgtacctgatagtgcagtctcctattgctaata

SEQ ID NO: 244869 - DNA, 1589 bp, Cannabis indica
tttagtgttgttttacagttgtttcgtcatgattatttatttgacgtcgatttcactgcttttgctcaatcatgtcggaattaatggttatattccggttgtccttgtgttactgtggtggttctgtctgtgggtgtagtagatagaggcctcatactttttttggataaataccattttgaaccctgtgttgttttgttaaatggtaaaatggaccttgtattttccaaaatactacaaataggactcaaaactaattttttgttaaaataaaatttaataataatccgatctaaatgtgataacaaatctgaaactcggtatttttgtaaaaatcccaattattttcccaaaaagtatgaattccacacattaaaatcaaactattttggtagctataaattccacacaatcccagctgctatatcattcatttgataatcaagtagttaacttaaacccacccaaagaataagatcaccaatgtctcatcatgattatgatactaatccaaatccaatctgcaccgttgatccttacgactatctgaagatcatccgaaacccagacggccgaaccatcactcgtcacctccaagtcccaaccaaatcggcctcaccggatccaacctctctctccccagttctaaccaaagacgtcactcttaacccgacccataatacttggatccgaatattcttgccctcaaaagccctaactaatactaataatgatgataataagctccctcttattgtctactaccatggcggtggcttcatcttgctcagcgtttcttcttctttccaccacgatttttgctccgacatggcggctcaactctccgccgtggttgtctccgtcgaataccgcttagccccggagcaccgcctcccggcagcctacgacgacgccttcgaggcgttggattggattaaatcaacggacgagatttggttacgcgagtttgctgacgtgtctaactgttttcttatgggtaccagtgctggtggcaacattacataccatgttggacttcgtgcgttaacagccgtcgatgaacttgcgccgttgaagatcaaagggctcgtattgcatcattcgttttttggtggggtcaagaggactgaatcggagataaggttggtgaacaatcctgttttgcctctaagcggcaatgatctgatgtgggagcttgcattgccaattggtgttgaccgtgatcacgagtattcaaatccaacggctgacgttcgtcgttggtctgataattgtgatggaattaaagggctgggatggcgtttgttggtggtggggtgtgatggtgaccctctgattgatcgacaggtggaatttgtggaaatgcttaagaaaaatggtgttgatgtggtttctcggtttagccaaggttattatcatggggttgagattgtggatccaactaaagctacagaattatttgttttacttaaacaattcctaaataatgacaattgacaactactttggccaaaattaaaataaatatattgtttcagtactgcttccaagaaaaaaaaaagagaaacatgtaatattgtaatgtatac

SEQ ID NO: 244870 - DNA, 612 bp, Cannabis indica
tttatattagacaaagctaaaaataactaacttcttcttgaattaaaataggaacaacaattgggttatacaatcaagtaataaatgagtgtagctcagtttaagaaaatatcaaaaaaatttacgtagttcgaggttaatatattttagtccacaaattaatattattgagctagaaaatcttcaaagtatttattgcaaatgtttttgccctatgagatgaaccctaatttttaagacttgaccctagaattgaattttcaagcctttgcattaagggctaatgttctatagggtagaaggtgtcaactaggcccactgatggggtaaaatataatatttattgactttgggccaattgggcgaggcccaattcacgaagagcatatgtacaagcggggaccatttgaggatgtaagatggcggttaaagttagggaacaaaccctgacaaggtggggccctttgtctggacggttacgtgtactcttgttaatttaattgttgattttttttttttgtttattgttttgtatgttatttttacatgttccttttatatagtttttttattattttcgtgttgtttctatgaaaaactgtaaaaatgtaa

SEQ ID NO: 244871 - DNA, 2210 bp, Cannabis indica
tatcactattagtctaactaaatatcagattttgaatagtttaatgtaataattttaaaaaaaatatagttaatcaattacaagacgacacgtttagaaactgttaggcaccactagtacccaatgacaatcctcattctatatagattgcccttgactccaaatactgtattgttctcttatttgattaaaataattaattagattacgtcaaaaaaaaataattaggtttaattggtaaaagctaagaccagggcctatattggctgcaaagatagataaggcctaggggttagcatgttacgtgtacaagtggcaactggcaacccttttacaaacatatggcattacggatggtaaaatgaattttgacacggcagacgaatatgaacacgacatgaattttataggttaaggtcgagaaaattagatacgagtcaaaaataagtcgacacaacttgacacgaaataaaaacgggtcaaacacaacacgacccgcttaacacgaatttgacacgttcgatatgatttttttaaaatataataaaataaaaaaatattaataataatataattatataaaaatatatatttagtgattcaatgttaagttaaaaaattttaaatgtaattttctttaacatgatattaaaaatattttaaaatttttagtttttattatatataactaattaaaaatgtacctatttttgtgagtgagttgtcaaatataccttcaccctctacttaaatttaaaacataatttacattaacctaaggggtataatggagacatcatctataaaagtgggtacagtttaaagaatatagaaataaaggtaaacattaaaacaataaagtaaagtaggtatacaatgtaatttcctccaagaaattttcaagtaaagcatattaaaaatattttttctattttactttgtgatagccacggttttccgacactaaggaaaactataaaactttttttttcacttttttattattattattattattaatattaatattattatgtgagaatatataaatcaataattcattccaataaatgtctaaaatatttttataacaaagtttgtgttatagtgtgaatttttttcttagaaatacgagtacagtctcgtataaagctaacatgtagacctagttcttgatagaaggatgacgtgttaatagatagctcccataaagctaatctcgcttggcataaacttgcgagaggatacgatcgagacaaggtctagccgcatgctatacctctcatagtcaaaagaataagcaagaccaagaggagttaatactagtcgcgcttataccgattatatgcgatgaccaagtagacctctcctgcgactagtaaaaattttttctttacatagattttggtctgattgactagtgtgtttgacaactcgccaggaacttacatggtccacattatcaacacatagaatgtctaactatgcgatcaaagatgaaggtaaacattcaaacaataggcctgaaggccaccctgcaagtacaaatgcgatagagcctgtgaacttgtgtgttagaatatgaacatgccaaactcgacttatcaagtcgcatgcgttgctgaatttaatacaagaacggattaaattgttcttcatttactttaagatttcttttgattaaatactataatttattgtgaatacgattctgaatcgatcagttatgtaatcttaagggacacttgctttctatataaaggagtgatccaaattaaataaaccaagctaaaatcattgcaatgcactaagccaactgagctctgactgaaccactataactttcttatatttttctctttatttttgagttcaatttcttagtcggccagaggtgtacttctgaatcgatcagttatgtaatcttaagggacacttgctttctatataaaggagtgatccaaattaaataaaccaagctaaaatcattgcaatgcactaagccaactgagctctgactgaaccactataattttcttatatttttctctttatttttgagttcaatttcttagccggccagaggtgtaccactagagggctggccggtaaaagggttggtcaatgggggagttattgagcctgagatccctgactgaccccccagactgctggttgttgggatctgactgttctcgccattagacctt

SEQ ID NO: 244872 - DNA, 1500 bp, Cannabis indica
tccattactcgaaaaatctcaaaattacgctttaatcgacgattcgaaacagacccattagtttgaaaacgcaccgttttggtggagatggaatgggtcgagtcggaagtggcttgaggaggagtggtcatggaggagagagaatatcgaaaagtaggtgaatttggtctgaacagaggtgaaagaggacagcaaggaagacgaagatgatgacgaaacgaaagaggataataaagaggatgagagtgaggattagaaggaagggtgagtccaaaagttggactatcatgactgttgttgcaccatttaagaagatgattgttccatgtttttgggataaggaatctggttcctctgttttggtggatcagtgagcttagttttggcgatggaaatggtagtgaggccattaacgttgttgactaaactggtttttgagattgatttgattggtctggaacaaagctacatgtactggtccactctagttgactactacagaatctaggttcgggggttttctggtatctggttacgattatgatttatgagtgtttgaaaattgtggtttcacttcgacgcattaccatttcgcagagaaatggctaagacattaaacgacaattccaacataaacgaatatatttcaagtatacgacacaagtttggtatgaactaatactggaaatattataattatactagtctccaaaatcattttgttattactctacctaattttaataatcaaaaattaaaaaaaaaaacaattattaattattttttctctcttttttttttttccttttctttcttcttcttttttctaccttctacccaaaaatcctaaacacttatctctagagatggtaaaatgtgtttacgtgtcatattttatgtgaatggttagtaaatttcttgtgagaggtgttgacctattttttggctcatgtttaattttctcaattttaacccaacccgtaaaagaaatcgtgttgtgttcgtatcgaccaattgtgacctgttttgttattattaaagcttgattgtaaagaaaaataatagatttatattcaattaaaaaacttaatatatatgtatatatagtttgttatacatataataaaaattttaaaatatttttaatttcatgttaaagaaaattaaatttaaaattctttaaacttaacattgaatcactaaatctatattttttatatattatattattattaattatttttttattttatttatattttaaaaaaaaatagttcaaacttgtcaaatttcgtgttaaacgagtcgtgttgtgtatgaccgatttttattttatgtcaagtcgtgtcaatccgttttcgacacgcgtcaatttttcttgactataatccgtcaaattcgtatcgtgttcatgttcgtgtgcagtgtcgaaacctgttttgccacccctacttatctctttctctttctctctttctcttgatactctctctctttccc

SEQ ID NO: 244873 - DNA, 1676 bp, Cannabis indica
gattcctagtgttgtccccacaccagcaataaacaacaatcacaagccttctggtgtcgacaaacctctcacaccatcagcacctactggtgttactctcacaccagtaacccctgctaatactcacccaacaacaccttccattggtgtcaataacccttcagttcatgttgaacctactggtgtcattcccacaccagatgcttcaacacataataactttcccactacacaaaaatcaattgaaccagctccagcaattaaatcaaaagctggccgtcagattaccaaaccacctcatctcaatgattatgtatgccacactcattcaacggcttaccccattgaggagttcatatcttatgccaaacttagcccccacttccgagcggctgttttagctgcctattctcacattgagcctacctcgtatagtgaagcctcccaattcaaacattggctcctcgctatggacgatgaaactcaggcccttgaaaaaaaccatacttggactatcaccaaattacctcccggccacaaagccattggatgtaaatgggtatacaaagtcaagtataatgagcaaggtgaggttgtacgatttaaagctcgtctcgtcgccaaaggattcaatcaaaaactgggaatcgattaccttcaaacctatgctcctgtagcaaaattcaacacactcaaaattttgctagctcttgcagcaatgaacaactggaacgttcatcaacttgacattaacaatgcctttttgcatggcgatctccatgaagaagtgtacatgaaattacctccaggttacaaagcaccacccgattcggtttgcaaactcaataagagtatctatgggttaaaacaagcttcccgacagtggtatgaaaagcttagcactactctcaccactgccggcttcattagatccctatccgacaactcactttttatcaaaaacaccaatactttctttctcgccatcttaatctatgtcgatgacattatcgtagctagcaacaatgacatggcaattactcatttcaaaatctttctcgataaacaattcaaacttaaagacataggcactctaaaattttttcttggactcgaaattggtcgcacaaagaatggaatttccatttctcaacggccctttactctccaattactcacggatacgggttatcttggcgctaagcctgcctcaacacctatggaaaccaatctcaagcttagcaaagataaaggcaagccattgtccgaccctacaatctatacaagcctcataggcaaattgatctatctcaccataacacggcctgacataacttacgccgtcaatcacctaagtcaatttctatcttctcctcgagcacctcatctccacgctgctcatagaatacttcaatacctcaaaaggactcctggacagggcatttttttccctgccacctccactccccaactatctgcgtatgctgagaccaatctgtcccccaccaacgttcagttatctttctttgccgatgcagattggggagcttgtcaagacacacggcgctccatttccgggtattgcgtcttccttggacaagccttagtctcttggaaatccaaaaacaacaggttgtttctcgctcttcagccgaagccgaatatagagccatggc

SEQ ID NO: 244874 - DNA, 740 bp, Cannabis indica
ttctgagcaaaaactgttacctgttcaccagaagctccttctcactaatcatgtactcatcttcatgctcagtgcctttctcaagtgagtcagcagccttatagaaggcaaaaagaagctaataaattaagtactgaaaattaaaaataaatgaaaaaattgccagcccattttaaggaagaaaaagaaaaggccaaaagaacacacacacacacaaacaaacgcaggtatttcagaatagatcatgggtggaatgaagaacaacttattaattcagacaaataacagaaaaaaaattctaaatggtaaacatcaagcaatggacttatagtattgaattggatagccttgttctgaaacatgtaagtatgcctttctgcatatcctttcaatatttgcatctagctataataattcataatatagaaaggaaaagcagtagtcctcaccttcccaaaaagcaccttccatactgtggtgtggacaaaagacagaatacccaacaaacgagtgtcccttctatttccctgcagtgttaaaagagcaccttcatttacaatggatagaacacagtacacctgtatctcaaatttagtgctcaacacatttaaattcttatgaagtttagatttctaacaaattagaatataattgctaaatagtcctccactactcagctaagcattttaggtgtataatgattcatgcacaactttcctctttctactttcactatcagg

SEQ ID NO: 244875 - DNA, 1485 bp, Cannabis indica
tggtacaatagtttaaaaaaaaggtaaaaatgatagattttaaaaaaagaaggtaaaaataaaagaggacaatataaaaagggtatagagtacaatttccttatgctggttacaaacttacaaacacaaaatagatacttgtgccgctatttactttaatatttgtaatagcgacacaaatatgcaaaattttggtttataagagacattaaacttttttttttttgtgacttaagtactcaatttttgtaaaattgtaattttcttccaacttttttttattataaactatgttattattttaaatagaacacatataaaacttatacgttagatcattcggtctaaacagaaacatgtagtatcagatactaataattgagtttaggatacttataaattcaaaccttttgatacgtatacaattatttatcctataaattatatctagttttttttttttttttcaaatttatttcttattagtgtcgtcgtattagaagaagtacaaagtttcaaaaataaagaatggtagaatactactacaaaatacaaatatattgattacatgattattctaaagtcacattaaagatctagctcggtttttataatagaatactacagtagaatatccgaatatacagaacagaatacgaaaaatttatattttataatattgttcattttgcaacaaactccatgcatattttttaaaaaataaataaatcaataaataatttagagtattaaaaaattataatattgtatgtatagtggatgtctagaactatcttttgcagcaaaataatgatgctaaatcatatggcactgtatatttaatttgcagcaaaattttgtggtgtacagtgccgaactgtagccattgacaatttttattctttaattatttttattttaatttatatatagaagaagttttaattattacattaattatgtaattatgattgttacattaattttaattattgaatcattattagactattgtgattaatttaaaaattaaataaaaataattaataaattacttgtaatttgattctaacttaattttatttattttcttataaataaaaaattatttatagacattagttgtgaaaaatatcttattacatattttaattaataaaataatttattttaaatatataattaatttgagtttaaaaataaaatttttactattatagcacatcataagaaaatgtaattattataattacattttttaatattttatttttttctatttttgttaagaaattattacatagaaaataaaattgacactttatttacaaaaatacctctataaggcgtggacaatatttatgctttttatgtaattttaattaccaaaataccacttacagaatcagacgatagttggagggtgattgttgcgtagttgcgatgtggttgcatcagacaaaggtttcaattagacgatggttg

SEQ ID NO: 244876 - DNA, 929 bp, Cannabis indica
tatataccattttgctaacgtcaccaactcacaaacatcacattacttatcaatcatcttctctctcattcccttatgaacttaaaacctctttctttatttcagaaattttttgaagcagaggaaagcttcaatggctgaaaaagaaggagacttgaacatggatatcaatgtttcatctaataataaagttgctgatcttgtttggatttggattattgaagctctggcaagctttaaagaagtgaacttttcacttctaaatggtaaaatatatataaagtttgctcttttattgttattaacttcttcattttatcaattttgtaattttttttttggatttgtttcagatttagtgaaagcagctcctgaaattccagatgatgatttgggtaaaaatgcaaaagagatggttgcttttagaagcttagagactttgtttgaaagagttatgactccttctcatgatcaatctcaacattccaaactcagtacttttgatttctcactaagttgtgaaaatgttctaactcagattctcaatgaggtaacatatatattatatctatgtgtgtatgtatatatataaattttgccaatggtctgtctttttgcttttctttttcttttttttttttgatttttaaggaaaaatgagaaaataaatttagttaaagattttgaaattgattagaaaaaataaagaaatttctatatgaaccaaaaaacataaaacgatggcttactaagcaatgtaagtaaataaatcacttaattaagtacaaatatatataacaacttgaggctagctcaagtggccatagggggtgcgtgtgtattggaggtcctgggttcgagtcccaggttatgctgatgtaatgtataaacgcttaaataaaaaaaaagtacaaatatatataagagac

SEQ ID NO: 244877 - DNA, 739 bp, Cannabis indica
ttttcatcatgtcttctttaaacttctttatcatcttctcattatttcctgtgcagatgagatcatcaacatataaacttaaaattagtttatcattcataccttgtgtttttatgtatagtgttggctcacttttgctcctcctgaatcattgttcaatgaagtagtggtcaattctattgtaccaggctcgcggagcttgctttaagccctacaaggcctttttcaacttaagaattttatcttttggtccttgcaccacgaggccatgtataaagaatgatgtagtggaatatgtttcacagtgtctgacatgtcaacaagtaaaagtagagcatcagaggcctgtaagattgttataaccgttaaatcttctagaatgggaagatatctatggactttgtagttggactacctacgaatacatggaaatatgattctctgtgggtaatagtcgataggtatacgaagtcagctctcttcttgcttgttcgaacgaacttctccattgatcagtacgctgagtaatatgttagaaaaatagtttatcttcatggtgctttaaagtctattgtatctaacagaggttcaaagttcacattaagattttgggagagtctacatcgagcaatggatacacagttaaagtttagtaaaatatttcatctcagacagatggaaagtccaaaatgtctacaaagatttagaagagatgatacgggcatgtgtattggatttc

SEQ ID NO: 244878 - DNA, 728 bp, Cannabis indica
gtgcttcatgttcatagtggatttcacaatcctcccactatgacgatgtattgaggtttctttttcaagaactatggtaatcgttgtctgtcgtttaactaatggtgttgaaatagctggtttggaaatctcatttatgattttctcaataaccatttgattacgtggcttgtaacttttcatatagtcatgttcaagaaaagtagcatttgttgacataaataatttattgtcttaatgagtataaaaataggcacctcgagtctcatctaaatgtcctacaaatatacacttcagtcttaggagcaagcttcacagactttgatttaagaacatgggcaggacaaccccaaataaagaaatgtttcaaaccgagttttgtcccatttcataattccattggagtattgcttatgctcttcgagggtactacattcaaaatgtaagtggccaccaaaagtgcgtatccctaaaagttcagtggcagtgatgagtaacacatcatcgatctgatcatgtctaacaaggtttggttttttctcttcgcaacaccattttcctgaggtgttccaggtgctattagttgagataagatcccttcttccagcaaatagtctttgagtttggattctaaatgctctctaccacgatctgatcgaagtctctttaacgatttacctaattgccttttgcaaaaaaaagtattttggccatcttgccttctagac

SEQ ID NO: 244879 - DNA, 1890 bp, Cannabis indica
accacaaaaacaaatggactcattccattagtgatgacagtcttagcccaaatggttaagataatagtgcaagcctccattgttaccattgctccaaatggtacacattccaatatttttgaaaaataccacccttaatattctccaacacaccatctttaattaataataatagttttaaatttattatataatcagttcaaattataataagtgcagtttctgatgatctagattataaatctctctctctctctctctctctctatggatttattttttgtgtgtgtgtgtgttgttaaagtttatgtgtcactttcccttttatataattatgagaaaaagaaggaagagaaatgataaaaggaacgtgaagctacgaaacgttggtttaaaagggcaacccttcgttagatggggaagctatttttcaaatttgagtggatgtggctacttggatatattcaacctctataaattaaaacattaaaaacaattatatatatattactatgcacaaccctatatagctatgacgttttcatttttaataattattaatcttctttttcttttttttttaattctatgctatatatgttattaggtgaagagaatttgttattagctatttggtccaacaccataataaggtggctttaacgtccccctttaaatttttttaaatttttattggggtttttccagagaatcatgactcttatacaaggatacgtcattttttggcttcttcattgagcgacaactgatcttacaaaccaacacgtgagtgttaacaaaaaacaaaatggatataggtagctagtaccgatcaatttatttaagccctcttaaactgtgtaatcccatacctacacagtctcaaaattatcacaattaacggtacttttccttacggatcacaagactactgactgtcacagtagcaatagttttctataagcatctgtttcgtgcagcatttgataagattaaacaggataatttcactagttcaatgctttgcaatgctgtcggaccagataactaatccagttaattaatctcatatatgtgaaattatttatcccatccagtaatgtgggataaatagtctattctagcatgatcacttttttattttatttttaattttgtaaatatattttatattaaaaaataatttaaacggaagaatgaaaaatttatttgtagatttatgggttaatattattttgggctttgtgtagttttgtgaaagttaccgattggacttttaattttgttaagtgatacaatggaccttgtattttcaaaaatagtagaaataagaccctgagcttaaattttgacaatatttgttttagatataaccaaattaataataatttctagcacgaacaaatacagaaaacgtaactataaattttgtcatagcacctctaggtcaagttattattaagttttattttgacaaaaaaaatcaattcagtacactatttagtactattttagaaaatacagtgtttaattttttatttaacaaaagagtccaatcagtaatttaatttttacaaaatacaggatccaaattagtattattcctaaatttattatcggaatattatctattaaaattgataaaaaaaaatgtataatattgatttattaggctaataaattttaaaatatgatactaatttttttttttaaaaaaaaattactattctaagaaatataatatagtactatactgtatatatttctttaaattactataaatatttagatcaaaatttcaatgaagtaatattttattcaaattaataaaataattaagttaatattactaggcatactttttttctatttattttgttttttttattt

SEQ ID NO: 244880 - DNA, 541 bp, Cannabis indica
aaataatacaagtataaactaattcttaagcaaaaataagatcaagaataattaccttaatagccaaaaattccttagaaaattcagtatcatcattggaagaagaaaattgagaaaaatagacatgtggtgctcttggttcaatgttgaattttttggtaaagggtatccaaaactttgagaaattagaggtttccatgagagcatagaaagtgaactcggaagcaccatcatcagagagataaaccgaaagcttttgcgatggataatcatatgacatcgcggataaaattgtgttcatcactaatgttggtggctccattttcgggtcggctgtgaacacgaaaatgtccactcttggtaattttttctcgtatctgtaaatgattttgcattaacatgtcaagtttttagagacataaattcatgtttgtatagtacattttacgtcatgtaattaatatagaggacgaatatagtgtcactaactatatttgatgatatcgatgttgttctatactagagtaatgagtatgtattg

SEQ ID NO: 244881 - DNA, 1061 bp, Cannabis indica
aaattgaaatgtttgaagaaattaccttaaaattgaagaacagctgaaaaatagatgaagcaaaagatcgaggcttacaattttactatgttgggcatgtggattgaatgagaaaagagaatgaaggagttctctctttatagctattgatctcctctattcttaggcacacaagtagtaaatttaattaaatataaaaagataagagagagagaaaatcgactatgttttcacttttctctcctttctttttatctataaattttgaattcccttgttccaaagggaagaggaattcaaaattccttgtttaactagaagacattaaagaatagaaacaactgtgtgagattgcaaaattgatgctcacttggtagtttctagagaaacagacttagttcacatcatcaagtcaacctcacacaagtagaaagttaacttgggggaaatttttgatcaaaaactgaccctatttacatgtacatcaatgtttgactcatgacaagaaagaaaaaatcctagagttgagtagtcccgagtcatagtagtcgacctaggaggggtcccaagccctacgtttacgttaactccaagaactcatgaatgggtgtttggatccctctaagttgttccggtcggaattaattttaccaggatcttagatctactcacaagtatgttgatttaacaacctaaatatgaacttctaaaacgataaataaaaacacataaaagttaagaaaccttacagtgatggcagcggaataaagtgtctccttccactcagatctctaacccttgattcctgtctgtcgcagagtataatcaagatctgagcccgaatgtccttcagatggatgtgatccttcacagtcttccaatctatgattgaggtactgtttgctgtgtgtgggcacttctctctcacaaggaatttcgaaatttctctctcttttctctcttgatttcgtgtgatacaaaggcatacaaagagaagagagggggcggcaatatatagggaaaagggagagctcaactttccaaataaacagtttcctctt

SEQ ID NO: 244882 - DNA, 2368 bp, Cannabis indica
cgagacaaaacgcacgtatcatagtatttagcgtttagatgagacaaaacgcactagtagccataaagctttgttttgcctttctcaagtctatgaccacttgatttattttcctggtgataattttagctttaaattccattaaaatttaaaaacattcactacttcccattcccatttgtatttcgcagttatttttgtcctttttttttcttaaatgtgtcatgataacaaagtgttcaacaaaattcaggaaaaatgaactaaagagattattaagagtatttgagaaagtctatgagttggagaagtcattttccaacattgttttggttgctggttgtggtatcttaagactagatagtaagaaaaaaagttactactagaggagatttctttggcaaattatggatgatggatcgaaattcaagtggaaagagcttggggcttcagatgtggagtcatcttcttcctctatgcctttgaagaggacaagagggtcatcatcaagcaatggaacccaagtcccgtcttgccttgtagatggctgcaattcagaccttaccaaatgccgggactatcatagacgacacaaagtttgtgaaactcactcaaagactccaaaggttactatcgcaggccgcgagcaacggttttgccagcagtgcagcaggtgtgtttagatcattgttgataagaattttatctttaatagaattagacaagttgagaccaaagaagataaatgagttagttttttttttaacactattttttacctctttgtatccaaagttgtgtcttgtgtatgtgtctaagttgaaaatctaataaaaactttgttatgattgtgttcttaaaggttccattcgttaggggagtttgatgaggaaaaacgtagctgcaggaaaagacttgatgggcacaaccgccgcagaaggaagcctcaaccagaacccatgtccttaagttcaggaagatttttctctagttaccaaggtttgaaatgttttgttcttgaattcattcttggttttctttttccatttattatattttatttattcttttctaggcacaagattctcaccattccacaacccacaagcatttccaaatgctgccatggcttcggctgcagttactacaaagcaagagttcagtgacataagaaaaaaccctcttacaggatcactgaatcaaagctataatagtagtagtggaggtgggaaagaattctcattcttacaaagctcaagttgcacacactctgaggcttcttctgtgactcagtcactcatggattcaaactctgccttgaacaactgtgcaaacagccacagattcttctcaaataacaactggctgcaccgggacagcgtcgactctagttgtgctctctctcttctgtcatcaaccacaccaactgatacaaaggagattggattggaccacatgctgcagcatcagcatcagcagcagcagcagcagcagcagcccaactcctcctcctccccctcccctgccagtgggcgagcgcagcagcccttgttccccactgaaagtctccactacagtggtctaggaatggtgatgagtgaccagccagtagcagtagtaacttcagctatggatactacagatggcgacaacttccattgccaagaaatgttccgacttagaactgatcatggatcttcttcttctttttctggtggcatcatcatcatcatcataattatcaccatcataatcataatcataatcataatcatcatcactttaattctcagcgtgggaatcgcgtaccaccatagttggaaggaacactactagcttagtgcgaatggtgaagaaagcaaggaaaccattccaacactccctttctctctctttttttcttcatagactgaaatgacatgtctaatgttatatgatgttgaagttgatattcttagataaataacttgaaaacttttgctgcttattctaataatattggtttttctttttctttatttttttaagaataaaaaacataatgtcaaattatcaagtgccttttcttatacaaaataaagaaacatgatgacattcattaccaaccaagtagaagctctggtggttaaagagtagcattcttttggtgtaatgttggagttggagtcaacttctcttgattatctaagaactaagaaacaaatccggtttggggtgcggttgtattttgtttaattataatttagtcataaaagcctatcaaatttaaaattttgatatatttttttaaataatataactaactattgtagcaaattttttttttcaattttaatcatcaaaaaaaattaatattatttaaatttaa

SEQ ID NO: 244883 - DNA, 2312 bp, Cannabis indica
cttgatgaatattgaatatgtttcttattttattatgtttttatttatttatttataataatttgactaactagtaactatatttttataattgcagaacagaaaaataaggttaatgaatcatcaccaaaagcaaagacaattgacgttgagattaatgagtgaggctgatatcgaaactgattttgattttctttaagtttgttatggacaatattaatattttttaaaactttagatgactataatatttaatcttgaatgatttgtaacttgtgatggatatgtttatgttacaacttttaatttttcttttaatttatgtatgaaattgataatactgaaatctgaattttttttttaattatggaattagggttataacccaacccaacccgcaaagtaaaaaattggttgggttataaaaaatttaggatgtgaatgggttaaaaatctctaggccgatgtcattgggttgggtcattaaaatacccttaacacggccaacccaacccatgctcagccctaatgagaactgctagccaacatgctttttagattgaatgttgacagtacttgttggatgggagaaattccttatcctattttctctgttgttgtaaaagattgtagattataataatagtgaatctttcgagatcgtcgtagtgcaaatgacccaaactttacacttagacatgaattggacctgttatgaacatatttgaggcatcaaaatctgatttggaacaacttccaaattgagcacttaagtgcacaaggtgcacccagcgcctaggttgacattttgtcaacctggggcgcctccaatcaccaaacttaaagatgttttctgagcattttctccaccttcatcgaaaacgaggaaacaagtacttccgggaaaaaacacaaatcaacatggaggaaaaaatggggattgagtggaccaagttgacataagtgttgagcccatatgcttaggttgacattttgttaacctgggccacttatatttgcaattatgacaaaatttttcggacatattctttgttttcattaataattaagatacaagtgctcacattagtcaaacgaagccacctggtggcaaaaacaaggaccaagggacccaggttgagctgttgggcccctgcgcccaggttgacattttgtcaacctgagtcgtttttaaggagttttttcaaaaagtcttctggtcattttttttgtcataaaaaataacgaggatacaagtaaactcggggaaaaaatgagaattatgaagggccaagaactaagcccaacgccaggttgacaatcaacctggtgtgttggtttctttcactcaaatacaaattctacttcgagcattctctccagcatggtaaaaaatagggtaggagacctcatccttgattttaaagaccttggaaagcatcaaaacgacatcccagaagcttcgaaaatgaaacccattgcccaagttgacgtatgacatggtgcgatgggttatgcttatatgattttgatttcgtctcgagcgttcgtctagtttttttatagcaatcgagagctgtgaatttagacaagtcaaattcacaactttataattttactttttcagcaaagtgaattagtcgaaaattaggtagtttcaagtcacccgattccgtgaaatagcaacattttcgagaactgatgaatgacttcaccgaaataaagaaattgactaagttatgtaaaaatattacttaggcatcaaaaatacattcatgacacgttttcccactcacctagcgtccacgttaatgtcatatgtcaacttataggcaccggtatcagaacaacattcaataaaactaccattactcactcaatattaattcgattgatgcgattcaacttgcattttaaagccatttcattacacaaaacaatacaatttgataatatttgactcgattaaaacttttataaaggccaaaaaagattatgtaactttaagctccaaataacttagaacgacttccccacttagtgttcacattaggggtgagcaacggtcggtttggtaggttttttcacaaaaaaaattcaaattttggtttttgatttttatggttaaaatctgaaaaccgaccgaccattatacaaatgtaaaaaaaactgaccgttttaatctacaatttggtcagtttaaatcaaccaaaccgaactttcattttttttttaaaaaataatttttaaattatctataattatttgaaaattaaaagaatagtttattgtatcaaatatcatataattta

SEQ ID NO: 244884 - DNA, 1290 bp, Cannabis indica
ctattcactatcacacacttaagttccaccagcagtgacctaagaaaagaaactcaaacttgagtttaaggctttaagccaatttctccactcttctgtcattactgccaccgtcaaatttgaaaccaccagtggctgttgctttttatcacagggaagaataaagcatatttattagttttattttgtaatctctattcatttaatttaacttatacaatctacaagatatcactccttaccgactattaaaatgcattgatcaagacctgcaacacatcctgcccgaacgttaatcaaaaactacaaaccaatatataagaataacaccacatcctaccaaaaaattaatcaagaactacaacacaacaccttcattaaaatagaaaaccaaattaataaagaacaacctaatgcccaactatgcaagagtcaaactatcaaagtaagaactaaagtcagaacattttaatcactccattcttacaaaaattgaagaattagtcccaaagcctatcaatttggaaatcaccttcaatattctagttatttgcacatgaagaagattaattttgtttctttattaaataagatcaaacctgaagaaaggttgggtaaaataggcgaccactaggagtgttgacagagacgttggcagtagcgatgggagttcgatgacagcagaagcaatgagagttcgatgacagcagaagcaacgagatttccacggcagcaacagagacggaagttccacgactatggagtttgacgcataaagggaagaggaagaaaagtcacgatttgggattttttttttcttttctatttgttcacctaatttaatttgaaaccttagatataattagatctaatggcttaaatataaagtaaaaaataatgtaaaaatagaattggaacgggtctttatatttgaactagaaaactgggtcgcgcgttgcgcggtctgaaagaactatatattatagttagtaaaataatttatcaattaatattaataaaattgagctttgcacaaataaaaaaaaaattatttaataaataaaaagatgtgaaattttttaaaataaaattataaatttgtcaaatatatacataaatatttagagtactccttaagtgagggcatcacttttgctcataaaaataaaagcatttttatagcctttgattctcaatctaatggtaataattaatttgactacaatagaatatctcatacagaattaataacttcttttattttaatttattctttaagaaaaataaaaa

SEQ ID NO: 244885 - DNA, 1076 bp, Cannabis indica
ttcatactttcagggtggattttccccttcaacgtaggatcaataatgtcttccaatgtccctttcttttggcagtgtagagcccaatcagcaagactgacttgttcctttggtaagcttggattcaaagttggtcttgcacataacacctcaaatagaacaaccccaaatgagtaaacatctgacttttcagtcaattgttgtcttcgaaaatattcaggatctaagtatccaaagcttcccttaaccactgtgctaacatggccagtgctcatatctggtcctgttttggagagcccaaaatcagaaaccttagcaacccaatgctcgtccaaaagaatgtttgttgttttgacatccctatgaatgatggtccatttggctcctgtgtgaagatagtgaagaccttttgctgctccaatacaaagttcaagcctacgcttccatgaaaggtgaggtttgttacctttataaagatgttccctgagtgtaccaagagccatatagtcataaactaagcacatttcattatcttcctcacaaaaaccaattagagagaccaaatgcttgtgtctcaactccgaaagcatctcaatttctgtctggaattcatgaactccttgctctgatgatgggtttgatctcttaatggccactttggtccctacatctataattcccttgtagacttttccaaaccctccaacaccaatgacattagcctcatcaaaactcttggtggcctttttcatttccataaaagagaaacgcctacaacgaccttgagcagttgctgagaggtggctactagcggtgctcttgccagagattgctgatttgctggcagtggtatgagagtttccatatataggaagccaacttgaagtgtgcgaatctatactagtatacctcttcttcctttggtagattgcaatgcataatgcagccactatgccaatggatacaactcctccaatagctccaccgatgacttgggcatgatttttcttgctttgaaaggtcttctgttgttgctcattcttggccaacatctcagaaggctttgggtttggacc

SEQ ID NO: 244886 - DNA, 903 bp, Cannabis indica
  modified_base (4)..(4): a, c, t, g, unknown or other
tatntttttttgtagttaatatttaaaacagaaagttcatagtaattttcacggaatcatgagaattaaagagtgtaatcagatttctttaattatctctaatatatcaaatcgtgtaattacttctaaacacacacaaattacacaatgacttttcaaataatgacttttcaaatgcgctttataaaaaacaaaaagttgaaaaccctaaacaagtgtaataaaataaaatttgcctgtatgacttcctatattaaagtctatacatgattcatactttttttttttttaaataagtgtattccataatcaacttttgtacatcaattattatgtcaaatagctcttgtttgccaatcttacaacaatttcaaaatgattggtaaaggcagtgtctatctttctctcctattttcttcatctttagagagtaaatttgagtacttacaacttgtttaacaaaactatcaaaactatttatagttagaacctcatgatcccataaagccttttttcgagctctctaggctctccaaatcatatacacacaagcaagaataagaatgtaaatgtttttcctcaggttactttgtttgcattttctaatccactttacaaatctttcaaaacgatattgattagaatggatccctacccaattcagcagctgatttaaacattgttggctaaatgtacattagaaaaatagatgctcatgtgtttcttgttcacagtcgcagaggaagcataagattggctcttggacctattgtttacgaagcacatccacctgttttcaatcgattccaaccaaccaaccaaccaagcccgcaattcaatgtttaaggatacatctccccaaacatagtttgtgaaccatacttgtccatttacctttagaaa

SEQ ID NO: 244887 - DNA, 683 bp, Cannabis indica
aatcacgtaatacgcctatgttagttagggtgttacataaattgtcgacaaacataaataacagggaaaatattcctaaatatcgacaacaatttaaattaattaggtgtattgttgacaacatgtcgacaaaacatcaacaaactatcgatacattcccaaatatattcggttatgcgtgcatggatatattttcaaatttaatcgataatatatcgatatactatcgatagcaatgcttttatttaaattagtttagttatcgacaagatgtcgacaaaccatcgatatcatgtcgataatggtcattcctgactttccttcgcatattatcaacattgcatcgatattgtatcgacaaacaatcgataagctctggaaaacccatattccaacaaaaaaccaaacctacaatttcagaccaaaaaataccaattccaacaaatgccacacacatataacgaaaacaaactacatactattactaatgtctaacaaaatacttaaaacacaacttacccattataatggtgaatgattcttgagtgattaggggtgtggtccagttttctaccaccgagagagagagagagagagagagagagagagagagagagagagagagagagagagagagagagagagagagagagagagagagagagagagagagagagagagag

SEQ ID NO: 244888 - DNA, 1627 bp, Cannabis indica
tagtcatcaactatactcatgaagtaacttgcaccctagtgtttgagttcttgaagccccccaaagatcataatgaatatagtctaattttccctttgttgtatgtttccatggtgagaattttaccttacaacatttaccatatacacaatcatcacaaaattcttatttctctcgcaatttaccctttcgaatgccctgcttttcgagttcactgattcctctttcacttacatgtccaagtctaagatgccatagcctagtactctccatatcaggtccttccatatcaggtcctttgactaccatgtcattttcaccagtgatagtatttcctttaagataataaatcccattcttaagttcccctttcatgactttgaaagtactatcaatctctatggtatgacccttctcaatcaattcacaaatggaaagtaaatttctttttaaatctggaacacacctgacttcctgatgcttctgatctgatcatcatgtagctttagcttcactgttcctattccagcaactttgcaggccttgttgtcacccaatacaactgatccaccatccaatttcttgaaactatcaaacaaatctcttcttggtgtcatgtgaaatgagcaccctgagtcaagtatccatgaatcacctgattcttggctagagacaaccaagatatcagttgattcatagccaccagttaccacaccagcatctcctctgtctttacttttatctctttgtaacttggcttttagtgcactgcattcatccctgaagtgtccctctttcttacagtagtagcattgtttccctgccttagaattggactttgccttgtgtgattgattagaactcttgtatttcttgttcttgtgatttgatttgtgaaatccacctctattgtccctggtttctgatctgcctctgacaaataatccttcaccatagccatttgatctatcttcatttcttttctgaatttctttggagttcaaggcagattttacctctatcattgacaaagattccttccataaagaattgtgtccacaaagtgttcataactctttggtaatgtgctaagcagtagtattccttgatcttcatcttctatcttgacaccaatgttactcaggtccaagattattcgattaaactcatcaagatgcttcctcagatcttttgtttcatccattctcatcgtgtacagcttcttctttaggtagagcttattggccaatgacttcttcaaataaatcgatgccaaccattcccataaccccactacagtgtcctcatttgacacttccctgagaacttcatctcccagacacaatagaatggcactctgtgccttgttctgaatttccttggttttcttcttgtcatctccaagagcagtaagctcctcttgatcaatggcttctgagattccttgatggactaggaatgcctttatttttaatcctccacagaccaaaatacttttgttgccattgaacttatcaacttcaaatcgggttgaagccattgcagatcagttcttgattcagctctttggtgatgccccttgactgagctatgataccatttggtgtgatcagtacatgatcactca

SEQ ID NO: 244889 - DNA, 1616 bp, Cannabis indica
ccattctagagttcccaaagtcagccttaatatagacatataaacccctcctaggtcgactgctatgactcagaactactaaactctagtatgtatgttttctttcttgccatgtgtcaaaaattgatatccatatcaccaaggtgagcatcctagttaacaactgattattacgttcataaattttaatacaatacaactcatgttattgattgtagaagacatgatttgcattagcatgttttatttaagctccttcagctccacgggcaagtttgccctggactccaagggtttgggactagggtctatatgtctcgtgtccgtggctaggatctagggtcaggtgtcaaagcctgggcattagcaaggattatggtccagagcctgggctagcatttggattggggcacggggtcaagggttaagggtcctcattcaaatttgggtctcgggttagagtgcatgtttaaggttgaggatgggctgaggtttggggtccgaagccacggtcgggtacgggtacggggtccagagttgaggtcagtgtttgttttttaatatcaaatctatggttaggcccatttttatggtccttgcatgggtgcgggatcaaggtatgtgtctggagttgggatcatggtacagggtagggtttcagttcttaggtcggggtccaatgctaggattgggcccaaggtatgagttgggtacgagatcgaggtcgagctcgaggtcgggatcggggctgggagtaggttcgggtctaggtccacgtttgagtttgggtttgtggtccatcagttgtcaaggtccgaggccgaaatcgagatccaggtatgggtttagggtacaaggcaggggtttgtgtttagggttttggcttggtcagggaagggtggggttgaggtagggtttatggttaatattgtataattttgcacaactgatcactacaagtcaataccaaatattaaatactattaaataatagatacaatataatacaacccaacacaatataacataatatgatgtactaaagaaccatacaaatgttctaataattctaaacactacatcacagcattataatatgtattcatattaccgatgattgggtaatattaagaatttgagtttttatgtttaatttttttatttcattagaaaatatttatttttacgttatatgggctaaggttgtactatctgttgaaaaaaaatgataagaaataagttatatagacaaaaaaaaaaaaaagaataaaatttgatttaaatatttttgatataatgtaaaagaagtactttttatgtatatttttttaattaaataattaacttaaatatagaaattaaaatttcttttttgttatttgttatcggattaagatttaatattttaatattttaaaaattaatatttctttttaaatttgtttagaaattataaagaagtaatactctttatagaagtgtttattgatatatttttgtatttggcacagttgcgaaagtgaaatttataagcaaaaacattaaaatttgggtatgtttatttgtgaggacggaattgtttaactggcaattactcagaccacggcaaaacaata

SEQ ID NO: 244890 - DNA, 932 bp, Cannabis indica
ttacatctaaaaggtttttctaactttgattgggcttcttgccccactacgagacgatcaaccgaaggttttttgcatattcctcggtgatcctctcatttgtgcacaaataaacaatcttctacctccaaaagctcagctgaagcagagtatcgggcttcggctaccacctcaagtgaaattacttcgcttcaataccttcttaatgattttcacatacctcaagataaactcacctttatttattgtgacaaccaattcaccatttacattgcaaataactccacttccaactaaaaaataaaacacattgagcttgattgtcacttcatcagagacaagatcaaaaactccactattcgactaataccaatcaacaaaatcttacaactagctgatgcattaactaaacctttactttttactactcttgcttctcatattggcaaggtgtttgtatatgatatatacagtccatcttgaggaggatgtgtggtttttcgtaggttttcaacatgagtttcagaagggtaatggctagaaagtaatttgggctaacaaaaatggatatgtgtaagtgatattttggtaaatagaagctcattaaagataaaattattgcccacacataagagattttttttttaaataaagtgttaatttgtatattaattttatttatttttaaatgatttttaattttttaataattaatattacgggacaccgctaaaaatttactacatatacacgtgtacacgtgtgtacacgtgaaacagttaaactgtgtcacataattgaggttttttggacggaagtgtaatgagcaaaacaaaacctgaattcaatagattttactattaaaatttcaatttttgtagttaaatgttaaaaaaaaaatataaaattcaagtggttttgccaccaattgg

SEQ ID NO: 244891 - DNA, 1269 bp, Cannabis indica
ttgctttgctttattttgagttttcaaccaaagaggagtgaatctaattatagggccgtgaaaatgagtttgattgtgagtgtgacaactcacactatgacaacttcttattgtttgtttattccaatacttatactaacatttaaattaataaatggaaaagagtggttattataatttctttttggttgtactttcaagatcccaataattattttgatgatcttcttaaagattataactttaaagaaacaaacaaaacatgagaataactttttctataatgcaaaactttgatctcatcctaatatgccaaaatagccatgcatttgcagataccttctgcaatttgcagcatgttatttcattatgatatttggcatatataaatatatatagtgaacacacttagtttctaatgtcaagcataattagatagtcttaataatgttttatttgcttgtattgagttgagaactcttgattttttcaatagccacttagagattaggccatgttttacttcattttaaggttgtctttttctatgagaatctaaccttcagttttgttctctttttggattttacgtatagatgctcaagattcaaagaatattctcacttttattctcttggggccaacttttgtggtaagctctagtttatacttgctcttaacatgttttcatggtaactttcagttgtttgcaattatctaatttcctataaataatattcatcttctttttagctcttgaatttaaagatatttctgatttgaaacctaaatttttatagaagaaaaataaaattaaggatattaaaattacttttgatcatatatcattcattttacaaaatacaaattcaaaaattcatctaaaccacatgaatgaacttttaaaagaaaaacacatgaatgagaaatgtatttttcataatacatataattgtgtagtatattctgtatttatttatgtatatattattacttcttatcaatataaattaagggcatattctcttaatacatataattgtagatacgaaaacctatactttgactggcttgaaatctcatgattgtcatgttctaatgcaacacatgcttcctgtggctattcgatcagttttgcctaagaatgttcgagagataatcacaaggttgtgtttgtttttcaaatcgttatgctctaaagtggtagatatctcctcgttggacaagctacaacaagatattacttacatattgtgtaaactagagcaa

SEQ ID NO: 244892 - DNA, 2156 bp, Cannabis indica
agtttttgattagtgtaggtctatttaattttttttttattttaaaactagtttaaataaataaatacgaatacatgaataattaatggcttaaacttttacagtcagatactattagagtttcataaatataatttaaatatattaaatatatctataattaaaattaaattaaatatgtatattccaaattactgtattggatttataatatctctataacaaaaacacttttcactgtactcatatccataaatttatgaatctgttatttttatcagaccaaactctcatttaattactaccaacaaaagtgacacattcattaaatcatacaaattttttgtaggtaacaaccttacatatccaaaaatcgaaattaaaaaaaaaaaaattattgaagtcaaatcatgttgcaaacgaaacccattaagaaatatatattataatataatatatatatatatatatatttatatgaatgttaggccaatatatggggtcccctatatatagctatggccaaattaataataattagagttaaatattttttcagcataaacgagttagagttcacattaaaaacatgcccaagtgaagtgaaagctgtgagtacgtgtaattaattaattaattaatttagttaaattaattaacatttttattattattattatttattgatcaaattaattaatatataaagtgagctctaattatgctgaccaggctcaatgcacctttatatcattattacttgattttgttttattttttattttccaaatgtttctgttttcgtattctaaaagtaatttctttttagggctttacccatgggtgaaaacttcaaaataaaatgataagattccattttttttttaaaaaaaaaaaagttcaacaattattggtttgtagtaatgttcttacccaaacaggttaattgaattagggctagctagatatgaactagaaccgccgccctatatatatatatatatacacaaatatatacatatatttatataggcatgcatgcttaatcataatatatatatacgagtattgttattggtatcagtagtgctcagcacattctaaatatatttcattgtaattgattaacaatagtacttaaaaaattattacattaaactatatgagactcgatatttaattggaccaataaatatataaacacgtaagaggatgctagacactactgatgcatttttagcatttatctaaaatatataagcattactattggccaccaatagatctggacctaacattttctataagttgcgccttataattagttaattatgttatttaaaaattatttttttaaattaatgacatcaaaaaatatgctaggcaccaatttatctgttaacatttctccatatatatagttgaagagtcattttcttatataatatatggtatggattgaaagcttaacaagaatcaacttcattacaatgatggcttacataatttcaatcataatatttttagagagagatgtcatattcatgatatgaaaataattgtccaaactagacttggcattttgatgattctagtgttaaaaaaaagtacaagaaactaaagtctttacattttgtcttttattcaaataatagagtttttagcggctaaacttttttaattattatttcacttgtacttaatctttttaagcttaaattttagtagtaagagcatctccaatgaagaaactcaaatttagtgttaaattaacacaaaaaaactacaattttaacaataattttttttttcaattccaactacaacactaaaaattacactaaattttatattctttattattttattattttattaatataataagagtattttaattataaatatatataattatttagtttttctccttaaaagtattatttaattattaagtttttttttaaaaaaaaaaaatagtatggtctacagtgtcctactataaatttggtgggacacggtagacaaaaccatttatgagtatagctttagtgtcccattggagtaaatatagtgtgaagctacacaatatttggtgttttagagttcggttggagatggcctaagaccttccaaactactaaactattagcaaa

SEQ ID NO: 244893 - DNA, 3203 bp, Cannabis indica
gatcattgattactgggattataaaaatggataactgatagcgtatctacatcatggaatatgtagagagcgttctatataactgagagtgcaattccaagttctatgagtagatgcaacaaggaattaataagtcagtgaatttacttggtaagttctgggtctgcttattggaagctcagatatataggcccatgatccacatactagttgagacaatactacttgtaagactcaataaattgattttgattaatcaattataattctgaaattagactatgtctagtttatgaattttcactaagcaagggcttaattgtgaagaaagagtttctagggttcatttgttaattaagagactttgattagtataattaataaatatattaaatgacaatattatttaataattaatttttagttattaaataattagagttggcatttaagtggttaaattgggaaaagtgcaattttgagaaaataagatggaaaaatgacaaaatggcaaaattgcaaagtgtggtccaatccatatcatggtcggccacttatatagcaatttaccatttattttttcattattttaatgccaataaatctaacctaaccctagttggtttcctataaatcggtagtgatggcttcagcgaaaagatgatgcatctcattccttcagataaaattttgagccttcactcctataccctagccgaaacctctctcgctcttcctctcttctaaactgaagccacatagtgaaaagagtgagtgcccacacacatcaagtagtactcaatcagagtgtgtaaggctatcaagaatccagattcaagagaaggagattcggactcagatcttggtgatactctactatagaaaggatacaagggttaaagatctgagtggaatgagacattatattctaatgcaaccattgtaaggtttcttatactttatatgtttttatttcatatcgttttagaattccatatttaggatgttaaataacatacttgttagtaaatctaagatcctggtaaaataattccaacacttggctcgaagaagccgcaacctaattttctttaggaatgagctctttagtatgtgtgaggggaggagagtgagtctgaactttgttctcagggacctcgacgtcaatggtctgtgaggctcgcttcttaatggcagttgtcttcctaggtctcttgaggggctccatgttggcatccgaggaagttctgaggcagtccaccttttctttcccttcttgcttgaagaatgaagaaggtcctgaagatccatttctatgagagaaaacaatgtgttcacatttgtttaataacaagtaaaggggaaattgggaaattatttcccacctaagggatttatcataatcataagaagacgaagaaggaggatcataatattcactaacatctctacatcttttgatcctgaatatgttgtaggaattaattggttctaaatccttgctcgaatctatatgacctgacctatccagcatggtcccatacttctcggctatcccatagtaggagttagtatagctaatttgaacgtggaattctgggtaccaactatcaaacctatgtgtaatgcgatctatgaggaaggggttttaggtgtagaaattatactggcaatctcgaaaagacactaatgcgatacgctcggccctaagcactgtgggtgaccatccacattgattacctcgggatgttccttcttcggcttcccgagggactgtgttttgaaggtagtgcgccagagctgcatagtcctgagtttcctcatcagctaggactgaaacctgctgccacgatgcatacttgggatatttatcatcactagtatactcgttcttagtgaggaggcccacggacctcaggtgtacctcgttcaaaaggaactcaactgatcagagatcgtatggaagaccaagtaggagcctgcatcgctcgaccatcttaggagtaggagttggtcttttcgagaccactgtcaaagtaataagattacaagtcaccgaggctaacatcaaagacatggaataatttaaaaccaagtttaaggcagatagtcacttacgtgttatacgaaaggcatttatattgattggggagagaccagtcgtccaaaagaagtcctctttaaaatgtgtcttgtttggcaacccaacattgatcttacgatcacctgtttgagtcgcaatatagtaaaagcctcctgctgcattcttcctcgaagggactgccttgatcgaatagagatatactatttctaggggagtggggcactccaatcctaaaattttatacagaaccttcaaacatgcagggattctgtatgaaataggaaccaactggaatggggaaattataagatggttaaagaagtccttatagtaatcttgtaggggcagaatcgctccagccctaatatgctcgaggctccaagcgcctatccctgtcgagccactcgtactcgcctcaccactggtcccctcgggtgctttgcgagtaaatcgttctggtgggtaacagctaaactggggctacagacctaactcgacattttcaattttggtcaatgccacaagttcttagaatgccacctacataatctctgatggctcgtaccctcgactcgacaagttcaaccttgaaggtgacgttaggatcttggggagtctttgatttgtgaggcatggaagtcatgatttcaaaatctaattcacttggtgaaaaagcaattgtgagtatgggtaaaagtaaaggcttagccaaaggaatagatggtaaattggggggtttaggccaagcaacatctcgcaagaaacgacgtttaccttctcttatttcttgcaagaaacgcctatggcgactaacaatatcatcttgaagggtttttattaggtggtccctaatttttgcatcatttatctctaatttggatttgggttttgaaattttgggtttatacgagaaggcaagttcactggggcactctatttttaaattttctggatgataaacttttgaacaagattgggacattgttacaaaaagaaagcaatctgaattcttggatgatatttatcaaacaagaagcttgtaaatttgagaaacccaaaagtctacgctcggccttaaccctaaaatttacccaaaaaa

SEQ ID NO: 244894 - DNA, 851 bp, Cannabis indica
taacttcagagaatagttgatacaaagaacaagtacaggaatttaagtcttaaggatagaaaatgatgaagagaactgagttatgaagccataagaaagtgcaaaaactttgttgtttgcagaagctgtataaacatttattagataacaaaagagtgattatttcaatcacctcaaaatatcaaccaattcacctggtcttctattggatctttctgtgtattattattattattttaactctttgatattttttttggtaagcagaaactatcaagctggctattcgccaatcgccagcttctgcttcctcttgtaattgtagtttcttgctcatttcacttaacacaagtcttgttagatttctcattagcctttgtttgcttgctctctttttctatcttaatgcagtctgtcattgtgggatgaagtcaagtcactttcttcgaattctttttataaatacaaatctttatggcaaatctaaggaaaaagaataagagtgaaagagactagggtgtgggtgggagagagtaaaggctgatagagcaagggcgagcaagaaaaatctagggcgagagaccaagcaatggcaagggcaagaggggagaatgagcatggacgagagcgagaaagctagggaaataggagcaagagtggcgagaactaggaggggtgagagaacaagggtgaggacgagagagctaggacgaggatgaggatagaaatttttgaatccaacaatctcaatagttcggctgaaatttttaatctggaaaaatttgagggtacgaattggtacatgtcaaagttaatgagacaaaacttctaattagactagtataaatttt

SEQ ID NO: 244895 - DNA, 918 bp, Cannabis indica
aattattaaatactcaatgtgtcaccatttatcctatagaaaaatttaatgcatgcaataatacgaaaaaaattattttttaagtttaagaagttattgagagaatgttttttgtattgtctacaaaatttaaaaattttggcaacctcaggtgagtacagaccactttcaaatgactataaaattttatttttagttacaacttcaatagagagactagaaggagaaatagttaatatttggatcaataggtttcaattcataactccaaatttgactcatttacgtgttaatggtaacacagtattctcaggtattcgtattaaccatacactgtgattttaaaaaaaaataatagcaacaaataaataacattttatatatgatatattaaatattattattatattggaaggaaactcagtataatcatattatgaattcaaagagctatatgcaaatatatatatatatatatttattcatttacctatttatatgttatatgtatgaaattaatagagttagaacatagatttagaggtaattatatatgttcatataatcttaagatatttgtagagagataatatattaagtgacaaatataagtgagatgatgagaaaaattttaaatataataacgactacatttgatagttaaaatcattttaggtaattaatttatgatagaatattatatacttatgtaaaaaaataattacttaccaattattgtttgatttattataggtatagaataaactaattagaaaaaatattaacgaagactacaagtgagatacagtgatgacatcattaaatgtagtagggactataagtgaaataaagtgatgacagttattttaaaattatatgataaattttcaataaatttatggtcttctttttgtttta

SEQ ID NO: 244896 - DNA, 1735 bp, Cannabis indica
taccagcctaacaaaaaaaaaggaaactcctccttattcgtgaaccagtcaaaacaccctaattcaccaattctccattattttatttcaaaaatcagggaaatcagctcaaattaagatgtagatctcaaggaaaaagcaataaaatctcgaaaaatccaaatacaaaaagggaaaaataaaaaaacagagatatcaacctccaaaatttgataaaagtccttaaactcagcaatctcaaaaattcaagagtataatttggtacaggctaaattttaagaaacaaaaattttaattaaccaaaatataaagtgaccgtattagtgtgatatgtgaaaatagaaaatgttttgggttaaaatttaaagattaagactaagttagggaggcatgtgcaaatataaaagagactaattacgacgacatttacgtaacgacaggtcgtttcaagctcatcactctattcactcactacttcctctttctcttcttctctcttcatttacagagctctaatcctctctccaatggcaatgcaatccaaattatcacaccaaaattcatcacgtatttcctctttctccctattttactatcaaattcttcgtcttcatttttttccacttttttttagttccttactttgttttagcgatcatttcgacaactgcttgatcttaacacttcgaatcgaaaaacgtttttttttcttttgatgaattggaagttatgtcgtattatatttatcctttgtttggcttccgagaaaatgaaagaaaatattagaagaatgagacaattttagatacctacccatttttagctagataacaatgattaatgtcaacattgcttgtgttaatgattaatgctccatagtttattttccaggcacctttacctgtaatgtgaaacggattgaaatgacttcaaggaagttttttgcatcaattactgcagaagaagacaaaccctttgattttctccgtgctttatacggtatgaaatcactatgaagttcgatgttgagtcttccataatatgttgataatcttgattttcagtaatgcaatatttgacatagtttgttatatgtgtaaaaataacttgatctagtttagaattccacatatttaatctatttttctactggaaatttgactaaaatttgtcttttagtctactatgtctggtattgacttgtatgtgatacactataatattttaatataaatcaatattcacagtgttatacaaaacaacgatataaaacacaatatagtatatacaatacaatactatagtgtactaaaagaatccttaatgtactgattactgcacttgttatttatgttgagcattttcatatagttcttttggtactggctagcattgtcatatagttatgagaaagtggttgttgtttccaatcctatactcaactataaacttttgctataaagtacagcttgtagaagaaccattttgttgtgggatgctttttgagtcctgcatccacttccactcattcatttaagtttgaatgaatgactaaagattggtatgtttctctttgttatgtgtttttagagggtagtatagcaggagctgctgcaggtgtcattgtggaagcagttttatacccaattgatacgataaaaactcgattgcaggtatgttcagtgtgcctaatattttccaaccatccaactatctttaaggagacattctgaaa

SEQ ID NO: 244897 - DNA, 1255 bp, Cannabis indica
tatctagtttctctatttttcttcagaaaatccatattcaggtgtgtgcctcagagctaataatgcttccaatgtatctccttcacaactatattgccaatccaatgaaaaatgtctttccattttatgttatcattgtcattgaaatggtttctctgtcttattcaggatcggttaactgttagtcctgaggcataccctaatttaagcattgcaatcagcacaatttataaggatggtggaattggtgctttttatgctggcctttcacctacgctgatcggaatgcttccctatagcacatgttactattttatgtatgaaacagtaaaaaaatcttactgcgaatcgaaaaataaaaagtctctaagtcgtccagagttgctcttgattggagctgtccggtaagaagtttagccttggttataccatattcagctattgggaaataaatgacatcactttctggcttcttaggagttatatagtatttttatcttgattagtgattgtaaaacttcaactcaaaaaaatttagaaactcggcgtactatcttataatagtgactacaacgtatagttcataatatcttttactcatacatgaccaggtctgacagctagtacaataagctttcctttagaggtagcgaggaagcgactgatggtgggagcgttgcatggtaagtgtccaccgaacatggttgcagccctttcagaagtgatcaaggagcaaggtattatggggctctacagaggttggggtgcaagctgtttaaaggtcatgccatcctctggcataacatggatgttttatgaggcttggaaggacatattgcttgttcagagacttcctctctgacgataaacccgcaacattcggaatacattcacataagaaaagttttgttaacttaaatctacatttgtaacaaagcaaatgttcactagtgttgttaaagcctctgggtgattttattgtagacctgaggaggcttactgaatcccttcaagttatgttgggaagtttaaaatggccaatgtcaagacttggcctaagtgccccatgaatattaatatctattgatatttatttttttgacaaatgattgtttctcactaggttgctaaacaaatcccaacattttagatagttactagagctgttcataaagtattcgatccgatctaatccaattcgtaaaatgcagatattcgtatttgtgcagattaaattagattgaaaaatttaaaa

SEQ ID NO: 244898 - DNA, 769 bp, Cannabis indica
taatttcaaaaattatatttattgttatgctaaatttaacacactaaactttaatatttttatattctcgctaattaggcttgcctgtcctccaattgaaatgtcagtatttaattctaaaaaatagtcatttgaatttttttattattggcacatttgtgcttcataaaaataaagtaaaaataaaaaaattgaaatccaagatttaaatcttgttgtgaaacttaattaaccaaacataataattacttatgcaatgtatagaataataattataataataaaattttatgagatcacttacatcgttaatgagattatcaagaacagaagaagctgcagactcaatgaaattaattttttgatcaacaccagctttttgaatgaacggtagtccaacttcataggcttctctatctggatcaatggctgttatctacaaattaatccaaataatctcaaacctacttaccttattattaatcggtgatattcattttaaaattattgacaattaataaagaacccaaaatatacattatttaagattaataatattacaaataagattttactttggcatcatgaggaagagcaagagcggtggtaagaagagaataaccagtaaagactccaacttcaatagtcttctttgcattcatcacttttaaaaatatcgatagaaactgtccttcatccacaggcacgcccatgacactcctgcaattattatgtatatatagataaattaattaatttatatatatat

SEQ ID NO: 244899 - DNA, 956 bp, Cannabis indica
catggcctgaaatcaaaagaaaatctagttagaaacaaaacaaacctagccaaccaaaggagtttacttgctggccaacctcttagtggtgcagcgctagccaaccagaactccctataggccagacatcccttgtgaactcaacattttgagtaaaatcaaatatacaacttatagacgagatgtccctgcgggcacttgatgtcaagcactccaactcctcgtcctctagctctaggagctccccatcaacgctaggtaaagtcctaccactacagttctgagcggcctcaacaatcctttaactagttgatgaacaagctccccgaccagacctctaagccccttttcccaaaggtctacgtgggggtggatttctccttgaaggagggtccatactcaccggctgatcaggttgagcaggcctgaaggatggggaggcagtggagactgagtggcatcggaagatctggtagtccaggccaccttgacctaattaaggatgacccaaagaagcaccaccataaggctctcctactaaatccctcatcctaaaagccatgtctgcaaaaaataaaataacaaagtctgaatacaagttatcggtattgaatgcaagaaaaagtaaaaagttggtactatcaactaccatctaagagacaatcatccttgaagaaggaatcatctgaaccactatcattgacagttgccttgcctttgcctctagaggcaggtgatgggtgagcaggcctaacaaaaccttggcctttgggcctaatcaacaaagaggcatcaccaatagtacctccgcgtgccaaacgttgtcaaaaggcactatctctcttgtccatggtcttggcaagcttcgagaggggaacatcatcatctgactcaggtgcataccttcccccaagcaagtctcatctatcactggggtatcatttgggcctctaaag

SEQ ID NO: 244900 - DNA, 901 bp, Cannabis indica
ttttttttttttttctgttttctgtcttcaaaattgtattttttgaaatgaaaacaacaaaaaaaaatgtagttttcaaaatacaagacgtgtttagttaatattttttaaaaaattgtttttagacttctttttagtaagaaaagctttgatattccataccttgcttgattcaatcccaacccccaagtccattgcgacaccgactttggacatcggccttggtcccaaacctatacccagacccaaaccccggccctagaccccaactctagatatggactcgaaccccagccccgaactcagactcaaactcaaacttgaacccgaacttgaactcaaattcaaacccgaactcagaccctagctccagccccaaacccaaatctcggaccctaaacccgtatgcaaaccccgaaccccaaactcgggtatatgcaaaaaactaatataccagatttagacttcaactcggaccccaaaccccagacctagatccaaatcccagagctcgaacccgagtatatgagaaaatgtaaaaaaaaaagaacatatcagacaaaacaaaaaaaactaacattttgaaataggaaataacatttagattttttttaaattgttttctttaattcagtttttagaaaattgttaatgaaaaatttggccaaacattctctatttgtttttaaaagcaattttttatttttaaaaagtgaaaacaattttttataattttgattttttttttcttttagtgtagggtagtagtattaaaattttggattctaacccataaactctccctttttctcatcccatccaaaaaccatcttaatgattcagtatttgtaatttgtaaatgataaggggctcgtttggaatgccgtattaggtcgtattg

SEQ ID NO: 244901 - DNA, 2017 bp, Cannabis indica
atttccagcctctcaggagccagaagtgggggtcttaggaccaaaatgggaaggtccatatgaaatttaagataaaataagtgatcgaacctatcacttgaaaagaatgattttttatcgttcaaattgtgtaaactatttatatggttgcttggaaaaacttaatgatttattttaagtcatgaaaccgtctaacatgtgtagaaataggtctgcccaggaacaaagtctgaacaaattactatggtatactctggttaatttgtaagtgaccaagagtttaaatctactcagtcacttgggggacacctacacccatacaacataggaaagaagacacgggaatatacttaagtaaaaaactaagaattatgtattgtgcaaaaattaaaggttttattagataataaaaggttaaagtttgggattaaaagttgctgaccagccatgtgtctgtataaaaaatataagactaatttttaaagttgcttggttggctaaattgtatcatgtcaaaaaaagataaggtgagacaacttcagacgtccattggagtcacatgatttggggtactcgactggtgagacattatcttgctcctagatagaaaagtttgggtcgattgtttcagtttgctcaatgttcccaccaacaacttcaccagcagcctcatcggtatttactccaaccttcctcgcctcctctttggctttttccttttcacagtacttcagtaggtcggcatgttcctcctcagtatgaaagagaagtcacctttgtgattggccttctagaactcatagaagagttcaatgttgatagacgtgtacttctcgttatcatctatgcgagccttcttttcatcctccaaagcatcggctaattcttgagaagaagtagtcaaatctctacttttctcctaatgattgagcataagtcgccgaagatcctctctctcatcaataagctcttggactcttttttcctccttctccaggccagcctctaatttcgcaacaaaaggagtcccaataatcttcttctctaggtaatctatcttttggtttgcctcaaagagttgcttgttcacctctgcaagtttggcctccttcatctcgacctattctttggttttctccaactcgaaggatgaattcttggccttggacacataggtcttagccctgtagtagcaatgaccaagtctcaagttcacctaaaaaataaacggcttaagtaagaagatgactatttggtatatgaggattagaattcaaagaattaggaaatttttaccttggtaaactccctcagcaatcctctgaccaagacatcgaatgattggttgttagcctcttacaattactcattgttgtggtacatgactctgtcctggtagactcataggacctccttagccttttggctctagagtagagagggacaggtgcatcagaagattatcgggctgacattgaaggagcaaccaacaagaaagagctagatgtctgcttagatgatgttcggatgggagaagaggaagccagactctccagaaccacaacctcctcctctaagatgaaggagcaggaggttgagctaagggcaagcatcctttagatagaggagtaatttcctcatgccatgggactttagcgggagactcatgctcggatgtaccctcttctttcctcttcttcatgcagaggagatcttggctgacatagctgcaaagaaatagaaagacttagtaaaaaaaatgttgattatgtatgttggattcgattgaggttaaaaaaccagttgatgtcgtggagagatggctcccctacccttgttgtgcatacaatacctacagtgtagataaatattttaaccccttttagttgatctgtgttagatagatcttgtactaattagccaccctttggaagtaagggtggagtgggagtacgacgccctatttggcatggtgtccaaaccatgcacagaggccacttccagggttatgagctag

SEQ ID NO: 244902 - DNA, 1690 bp, Cannabis indica
gaagaagaagaagagtaaggatcgaggtgggtgggatttgggtattaattataggattttgttatattttcttagataatggtttttttaattttaataaaagaaaaagtaaaataaataaattttatagattttattttttattaatttctaattatttcaatttttaataatatttattaagtgtaccaataatgttttgacacgtggtaattgttatagcaattaacggactatttaacttaggtactaacggattaacaaaaatggtgaccttagggactattaccgccaatttttgaggttggggattaatctgcatcaaccctaactttttggggacttttaccgcaattatccctttcatatattgtgttaagttttcactgttgttctactggtgttttctaattgttctactgttgttttgaattgttttgttttgtgttttactggtgttttataaaaacacagtattttttttaaaaaaaaaatcatgtgtgatagtatttttgtaaaaattaaccaaaattctagtatttttgtaagttttccctaattaatgagacactcctcttaatccacttcttcaatctttcttaggcctagaaccaggcccagcagagatgggctttctatccaacccagttcgtttttaaccatattctgatattcacattattttagtttaccttaatttatgttttcgcttttatgtgattcctggaacctttggtatttttatttgcctaaatttattatctcattattctttggtttcttatacagaaaaagaaataaaccatttaatggttcaggattagaaacatgaacaaggcctgccctgtaatatatactaaatagtttatttatacaaaaagttgataaattaataaacaccaatacaaatttagaacaaatataattaatcaacttatttaattaagtgcatgtcacttttacatttgattcaataaattcttaaaataactattaaacttttccacgtgctgagaataaagagatatgtatacagataaatctccattattattattatcgaaaatccatgatcttccctcattagttatagctccacaatgtgccaaaaaaggtggaccccacccaaaatcagcatcataaatcgaaaatttagaccaactattaattccaaggtttggagatccaaattcaaacctacgctttgtgttgggatgaactttcagaaagtcgatcacagatttcaaatactcattttccaaattccttgtcaaagtttcatgaacaagattagatgcataccaaaagggtttggattgaagatcaccaaccaaagccgttgtcgtattttcaaaaacgacattgccaaaataaccaagtggaagtggtggtttaagtttcgaccttccattagaagaaaaacttaatttagtctcttcatctttagaaagttcacgtgccatgcacgtgcatttccatataaggccagccaaaatcgaaaatgtgctcaaattattattagctttgagtttcaaagcgttgagttgatccttagtgattttgactacaatcactttgatgaagttgttgttattattattaagatcatcataatcgttgtcttgattgggttgatgaaggagtcgatatccatcattagtgtggtcaaacaatatttgtggtggatttc

SEQ ID NO: 244903 - DNA, 3044 bp, Cannabis indica
atgcttaactattagacccgaaatattggctaaatataacctaacaccagccagtagtaaaagcttggaaaatcaaagagaaagagcctgttcaacaattgaaagttggaaacactttccaagctttagttgaggcttctacaagtgaggaacatgaacaaaatgagagtggaaatagtgcagcagtactagaagtaaaagcaccagtaataccgaaaattggagaaggtattgaaggggaaaatgacaatacaagaggagggggaggaccttctctttgtgatgaataaaatagtttgttggagcgtccgaggagcaaataaccagcagaaacaaggcgtaatcaagcaatttgttgctcgacaaaaagctagttttgtttgtctccttgagacgagagtcaaggcttctaaattgggagccttatacacaaatgtttttaatggttggtgtttcacttcgaatttagcttggtatccaggaggtcgcatagtaattggttggaatcctcatagtttcaacattaatactatgaggtgtactagtcagcttgtgcactgtcatattacaacaactggtgggaatatttctttttatgctaccatgtatatgcttacaatgatagggaaggaaggaaggaattgtggagacacttacaagagattgctacacaggacccgtggttagtgcttagggatttcaatgacattttgacaagagaagagaggatagggcataaagttagaggggatttagcgcctgaatttctgctttgtgtggagaattgcaagcttgaggatgtcaagtattgtggcaatttctacacttggaacaacaagcaacatggagaagctaggatctattccaaaatagatcgaattcttgcaaacccaagctgcattaataagtacacagggggaaaagtattgtttttaaatgaagaacttttttattatactcctagaattctgaccatccatcctaaaataagaagtggcaaaaggtcatttaagtatttcaggatgtggagttcccacccggactatggaaagaaagttaaaggagtttgggaatcaagtataaaagggactaagatgtatcagctggtttcaagactgaaaatgctgaagacagatttgaaggagataaataagcaaggatactcaaatctccatgctgcagaagtcaaagcttgagaggagctacagagctgccaagacaaactcaagcttgatcctttgaatcctctttgcacaatgaagagatggaagcaaggaaaaagctgattaaaactacagcagatcttcattcaatgctacagcagaaagaaaaggtaacttgggtgaagaatgggaatgaaaacactactatttttcactctagtatccgaatgagaagattacagaacagagtgtggtcaattgaagaacaagatggtaccagagttactcaacccgagcagataaatgaagccttcttagcttattacaagtcattattggggagcacaatgaacaataggaggaggctgctgccaaaattgatcaaacaaggcctcttgttaggctatttttagcctaagttctgggtcacattaataagtgttttctcagttattgtagcctttttgagcgattttacgcttgactttccttgtttcaggttcccggtgcattggagttcaaattcagtcaaatggcaaaaagacgggacaatctggtgaaaaatcagctgaagctgccaaaagtaatcagtggtcgcgaccatgacaaggcttaattgtgacccttttatctgatagcgactatggtcgtgacttggggaaattggcagaatacctgtttttcaagttttgcttgtggtcgcgaccagccattaagtgggtcgcgaccaagtacgaaacacgagatttttgacctaattctgatatttttccaattggaggcacaatcctaattcctatataagggactcgactcagattgccaaaggcatcagaaatcggccccaaaatgtgaatgaaggaggagaggaagctttcttgaagactcggagcgaaatcaccatctagtttctttctttcactctttattttctttatgtctatttttgtttcagatttaatcatggatgtttattttatttctatgaactaaattcccaattagggaggatgatgaatgttgtttaaagttttgcctagttaatgtcaattgccattcctttaatcttgacttgtgaaattatctatatttgtgtttaaattccatgtgtaagcttgatcaccttctacatgttctatgatctcaattaaaaatctgaaaagtgagaattgagaatgctaaaattggataatctaggttgtatgtgaaacaagagtatttgcacaacctatatgacacttagattattgcttaatgctgattacatgtgattctaattaagagattaattagagaacatgtgatttagaacctaaaatatctgaaaagagttaggttaaatggtataatctgttattcacatcaagaaaaggatggcaattaggcattaacaattgggtaaacaaaataacaggattctcttccctattttctcatcttgattaatctttaattgtctatttaagtttcttgaattcttattctgcttataatcttaaaaattattggtttgccaaatagaatcataaatctagtctagtggtattcaatccaattccctgtggttcgacctcacttgtgtgattttactacttgattacgtgcacttgcgtattgtctataattttcgtaatacctctagtcacaaatcaacacgctaagctattaatgagtaaaatcacattggaggaagtcaagaacacaatgttctctatacttggccttaaagcaccgggtccggatggatactcgagctatttctttcaagataattgggagcagattggagtcttttctgtcctcagggaagattttgaaagagataaactcgacaatattaaccttgattcctaaggtaaaatgccctaacactgttaaaga

SEQ ID NO: 244904 - DNA, 1061 bp, Cannabis indica
ggatcaccctccccacaatacaaaccggggttaatattagaccttctaatgtttctagccagacaatccgctatagtgttctgacttctaccaatataaaagaacttacaatccattaccgaatcaattaactcactaacttctaaagataaattaaaaaaattccagtccaagtgacacttctttaaagagcaggctctcaaaacattcctacagtccgataaggcatgcacctttctccaagaattctctgcaataaggctcaaagccatgcgaactgccaaggtttccgcctccatggcactatcagccgccagattctcaaccttgtaaaaccaagaattatctacaagattgataactaccaccgccagaccacttcgaccttccttccaagatgcatccgtaaagatgatgaactctgcatttgccaaagtctcaatctgttggtctgcaggagggggagtatcctgaatggaaggccgagatttgccttcaagaaactcaaaacagatgcttttaattgttcctagagttacattgatatgaggcattcctcctttgaatttaaccttgttcctccacttccaaatatgttggaaaacacagccaacataagacaatatctccaattttgaagtatcagcaagcatcggaactaagatttccaagaatcgaccaaactattgcaagtgatacgatctaccgatacaggaaagaggcctgcaaaccaaatagccttagcaaaggcacattctttaaacagatggatagtgtcttccacatcattcccacaaagacaacaaccaaagcttgtgaaagtggccagtctgtctccagtaggcagagcatcactaatagccttccaaaggattatagataacctgggatggattccaggttcccaaatccagttcaattggattggagtgaatgatatccacccctacttacaattacacaaacactttaagataaggaagtgatgttttcgcctttactcttccaattgagttgttcatttactaatttctatatttttttccttagataattttttt

SEQ ID NO: 244905 - DNA, 1750 bp, Cannabis indica
ttcatcatctcatgttcgctgatgatatcatgctattggacagcttctacaaggaagctaacgctttcatggattgcttggccacatactgtaaatggtcaggccagtcgattaacccccacaaatcttcagtttatttctcttgtggggtgccccgagggcggatcaactcaattaaggacatcctgggaacgaagcaaatgaccgacaatgccacctacttgggattaccgctattcaatactcaaagaagatcgagtaattataacaccttggtcgaccgggtcttatcgcgcatcaaggggtggaaagccaagctcctttctagtgcgggaagagcctgtcttatcaaatcggtagggtctactttgtcaaattatgtcgcttcctctgatgtcatgcccaccaccactgcaaacaaaattgacaaagctctaagagacttctggtggggcgacacagatgacaagcgagttctccatactgttgcttgggagaccctctgcaagccgaaaacccacgggggccttggattcaaaaccacagagacaacaaaccaggctttcctcatgaaatgggcttggaaagcactgacagatgactccagcctctggaaacacgtcatggatgccaaatacatcaagaaccacaacttcgttgatcttgaatcccatgcttctgactctgcactttggaaggcaattatcaaagcccggaatcaactccataaaggcatatgccggaaaattggaaatggagaatcaacttccatctggtttcacccctgggtcccccttggcaatttccaacctcaaccgcggcttgatgcaactcggggcatcagcttagtgtgcaacttcatccataattccaactggagggaggaccttgttaatcaatggttccaaccagaagatgctagaagaatattgaatatcactttaccaaacaatccagtggaagactcgtggttgtggacaccggaaagcaatggcaaattcaccatccgctcagcctatcgatctttaaaaaatctcgatcaaggtaccatgggaaatgaaaaatggcgtatcctttggggatcgaagatacacccgagactgaaaatgctttggtggaaaatcctatcaaattgccttttaactcgaggtaaacttcaactttttgctggtgttattgatccctattgtcctctttgttccatggtagtagaggactcgttacatatcttttggaattgtcatttggctcgctccctgtggtttggctgctgttggagtattaggacttctttgttcaacttctccaattgggaagattggataaattggttcaaaatatctgataacagaccgaaagacaccagcctccatgcattcctagagggagctgcaataatttttgaaaaaatttggagcgaaagaaacaaggtagtccatcatcgtcaaagcacgcctgcaacgataatccttcatctgattgacaatcgactacatgaagcacttcactctcctcaatttggctcaactccgattacacaatggctgccccctcctgaaggatggctcatatgcaacaccgatgtagcaatcggtcattccctttcggctggagcggcaattttcagggatgacaaaggggagatcaaaaccatacacacaaccaaaattctgcattgtgagcctctggcaggggagctagcaacaatctgctggggagctgaaaatgccattagccttggccataaaaa

SEQ ID NO: 244906 - DNA, 556 bp, Cannabis indica
agggcacaaaacccaacaagaaaaggaggggcttaactaatcgaatcgtggaggaagacggggacccttgcacttggccaagacagcttccagtttcttgttcttcccccaaaattgagctataacagcctcaggatcgagaaagaaggggaggtgaggttcgaacttgttggctttccaacacataaacactccatcctcaaagcgcttctcacaatgcttataagtaactagagccagtaaatcatctctcgcagccttggcggcctccttgcgggttcggtcccagaattcgcgaaggtcactgacttcaacaatcatgttggtcgttgtctccaagtcagtctggtgcagctcctcttgagatttgagcttcacaataagttcttgcttctcctctttggaatcccggtggtccttcttgcgcgaagcaatgatgtcatccttagctttcagtgccgcctgatgattttgctccatgagggccttctcttctcgggcctcactgtaaagggcttccatccagttcatgcgaccgaactctgacacggtgaac

SEQ ID NO: 244907 - DNA, 1009 bp, Cannabis indica
ttgtacaaattaaggaagggtataaattttgatatggcttgtattattaaggccaaaacttgaaatttccctatatatactaacctattctcactcacaacaaaagcactcccaatacattgacccttttcatttattctcttattctgtattctattaacttggggcctaacaagatagcaccactttcattgaattttcaacttagtacaaaagaaatgtttggccataatatagatttttcttgtaagtactacataggcagccaagagggtgatcaaattctgaaattgactataaaagcgataaaaaagctagaaaattctgtaaatactgttgttccgtatattgatacaaagacccgggatctttgtagatacgatataagaaacagtagcatgtttgattggccttgtaagcaatgaacaactgctttttataataagtcccaactaggatccttaaataattacaacaatactataccaagattgagagagaatttagaatagaatattatggaattaactagtcgatctagtgtttgatattatatgaaggaaatgataagaaaaaagtgatacctcaactctctctagagcaaaatctcaaagtcaaactcaccctccaccaaccccacaaacccagcaacccaaatattttaaagatccctaaatttgatgagaatgagagcctagccaaacaaaaccactagggtagagcccacaatatactgaaaaacagctttaaatttattaagggaaacataccttatcactgaaaccaaacatcacaaaagaacccacatcccgatattcatactaacaactccaaatcacaatattcatactcaagcaacaaaacataatgagcttaatcaaagtttttcttatacaaattgaataaacagaatataggcaactaatataagaaaatctcaattatctcacacaacacaattgaaaccaaaagaaatcataagaaaatattgctcaaactgaactaacct

SEQ ID NO: 244908 - DNA, 1751 bp, Cannabis indica
gccaaaaatggaattaacagtaggatatgaacaaaaaaatccctaacatcatatcaaaatatgtataaaatatgtccttcgggatgagatgagctatccttgttagaatggttccaccaccgattacagtgtgctgcattgttaatcatgtgtgactctgttcaccacttaaaaaaaactatgataaaagccatattaccattcatgattctattaattataaaaccaacaatcatatatataatgaaatatataatagattaaatatgattaaacttaaatatgaaagaaatatacatgtagaacacgaaagaatataatttttactaaattatatctatttatataatagaatttttagtttaatgttaatttttggttttttatgttaactatatatactattacttagcagaatattttttattaattttataatattattatatatatttaaaaataaaaattatgtaaatattttatctaagaaatttttaatttaaatttaaaaatcctaaaatattgtaaatattcttaattatatttttaattttattggtttaactttgaatttgaataagaaataattccactcaattaagcacacaacaattcacacgatatcttattgagttttattgtacgtatttttacctatatataattatattcatatggtacactaatgtagttgcaatagctaaaaaaaaattctcaaagaatcaaaatctaaccccacttcaattttttttttaaaaaaaaaatacataaatatagagcattgctattgggcacaagtggtgcctaacaccttctagatgtgtcgccttgctaatcatactccataaaaattattatattaaactatatggtacccgatacttaattacaccaataacaatatttacaagtaggagtttgctaggcaccagtggtgccctttaacatttctcataaagataggaagaagaaagaatattagatgtatttatgaccttttacaatttttattaaagagagttttatttagcccataaaattataagtataacctattttaataattttattttatataaatatatattgtactattttttttttattttttcactttcttgtgatataattataaaataaatataaaatatattttaaaatattaatatataaaattttattaaaaaaaatcatacatgattaaaaaaaaatgtgcaaataaaataaagtttatttttttaaaaaaaccaataaagctaactatttgatattaaaaaaaataataaaatgttttttttttatatttcactcaaaaaaaaaataataaaatatctaaaaaaaaatattcaaaagaaaaaaaaaagtaattattaaaaattaatttaagttaattttttattaatattaaaaatgtacttataaattccaaataaaatttctggtaattgtaaatggtgtgccagaggtgattcatctcatctttccaaactcgttctttcctttcaattgtcaaaaaggctgtccacgcctcccaaaaatcctttatatcaaacacaatgtaaatccatgttacaatcgagaccccgtccctttcattgaaacttcttctacgattctcttcgatcaggttttctgatctaagaaggttagggctctctctggtatattgagttcgtttttagtttgatgggttttggttctctgatctaggttcttcttcttcatttttagttttggttttttctaatgaa

SEQ ID NO: 244909 - DNA, 846 bp, Cannabis indica
aggaaagttcagctgaaagtgcaactttcctaacaaggaaaagagcaactacaaaccgaatttataaggcaagaaatcgaatatgaatgcacaacaatcttaccatatacggaaaaattattttgtcaactaacttgccaaaaaaggactttacaaaacttccatctcaaagctcccgaagacaacctaaggacaaggctaggtacccctcctaggttgactgcttggactcgagtctactaacctccatgatgtcatatttcttgccacgtgtcaaacattgatgtccacgttaccaaggaaagtttttgggttaatattttcccttaagtcagctttgcacttgtgtataattgacttgatgacgtgaacttggcccgtttctcttgaaacaagtagacgtgcatcgattttgacaatcttagtcaattgtttctattattcaagcatttccaatagaattaagactttgcattccctggttcttgtgtagggaaattttgaaaattaaacagtcaaagaaaaagaggaaaaacctatcatttttcactcatcttttatctttttctttaaaaacgtgcaattttcatgtatttcttgtggaactaagattaattcgattcaaatcttaattttttttttgataaatcaatgaattgtattgcataatacgaaattttttacaaactatgcgcacccaagaagggccgaaatctatatacctctatatacaatggtataatctttcccttttcacattgtgtttaaactctataatgcaaaaaaccattctttgtcaatgttcttaattttttttgggcaaaattctctcaatccgagcctttg

SEQ ID NO: 244910 - DNA, 1117 bp, Cannabis indica
caaatttatatcttaaaaactataaaataaaaaaagtacatgcttaaattttataaaaacatttaaaagaatatatatgggaaaatagtatatgtaatccttgttgtgactacaatttgggagaacttgttgaacagtcagaaaaggaagagagaaaagctttaggtgtaataggacttaccagaccatagctgcagagggcagggaaagtttcaagtttgtgaggatgtaggagaaagattcagttgaaaatccttgccatgttagatgaaactgcctggccaacatgacatatgcagccagcataaaaaaagaaatccatagtgtgattgaggttgctattggagctcctttgaagccaagaggtgttaaatggaccaaacaatatgtaataccaatgtggaacaccagtggtattgctgataacaaaaccgcaggcctaacaactgattgtgtctgaagaaacctcaaaatattttgtatataaccaaaagcaaatatgctaggaatcagaaacttggtgtaaatgcctgcagtctcagcaatctcaagatcttgaccaaggaaaactaatattggttcagtgttgaaccatacaaacgaaatgaggatggagaagagaaatgatgtgatacaagaggcttgtagatgaatgcccatcattctgtataagtttgcaccaaatccttgtccacaaagggtctcaagagcaccacttagcccaatctagatatgtaaaacatcaatgattaagtatgactactactaccctgcgtttttcgtacattcctctctctctatatatatataaatataaaaatgtgggaattaggaagaaattagagaagagaaaaaaaaaagtaatatgtaccaagaaagcatagccggtgacagtggcccatgaattggcgagagtagcacctgcgagctggagagggccaaggtggctggcgaacatgaccgaaatgagaggtatcaaatagtagaaaccattggtgagaatcaatggcagtgaaaacaaaacctgttgtttggcttcctccacttcttgttagagattttattacaatggaagaaaatcaagatattacaactctattgtaatacaatacaagga

SEQ ID NO: 244911 - DNA, 601 bp, Cannabis indica
atgagtaaggcttttgacagggtggaatggttttttcttaaagcggttatgcttaaaatgggttttcatgagacttgggtggcgcttgttatgcgttgtgttacctcatcatccctctcttttaatattaacggagctactagaggcttggttacaccaatgagaggtttgtgccaacgtgatccattattgccttatctttttctgatatgttcagagggtttgtcagctttattgcaactggaagaacgtttggggaatttatccggtttatctatacccaggggtgctcctttagtttctcatctgttattcgccgatgatagtttgttattttgtgaagctaatgagtcttcttgtctggcaatcagtcgtgtattagatgtgtaccatcgtgcttcaggacagctccttaacactgagaaaacggttatgtccttttcccctaatacggggtgagacccattattaagtgatatggtaatttcacctacactaaaaaatataggggtgagacccatgaaattaattaaaatatgtttgattaaatataagtacaaagggtaataaactttacatgtttggtgtttaatttgcattt

SEQ ID NO: 244912 - DNA, 1190 bp, Cannabis indica
aatgggttttatttagggcacaaaacccaacaatgagctattataggcttttcaggatgaatgtcaatgccaattgagtgtcatctgacgaccatggttcaaactatccaaattgtagtgatccaatggtcatgatagcctgacagaggattgaaaaagaaaaagacagttgaaatgctcgagtacccctttgacaataacattaatgaagggctctatcgaactggcgagaatcgaatcgttacttgcgaaaaatgaggtagaatataattataaataatagatagcccacacccgtgtagactattgattacttcactccctgaggccaaaagcaagtctcaagtctcattttacaaagctgtaaaataagacttaggggtaaatgtttccctgcttttgtccgaatatacgtggcaacctcacgatcggcagcatggcaaacgagtcttatgatcaagaagtatttatgatatgacttaagtaaacttatttggattaagtggacatgcctgagaggtccctccaggagctacagctgggtctggaggaagagacgttttgttcctctccgagagctaagcaaagccttttggatcgagctcaaggctctggagatgaatcatatgaaagcattaaatgcgggatggaggaagtgtctgcagatggatctgaaaagacatgtcacacgcattaaatccattcttcgacaattacaccctaaccgaggggattagtgatagctacataataaactatcaccttaatcaaggaagaataaaggcttgtcttacctaacacctagcaaaaacctatgtaacctactatgcagacatgcatgccctactattcaaatctaggaacttgtgcaagccaaaggaactcttgcgacaatagagaccttttggttctcttcataaggctataaatactcccaaccacattcgaagagggggatcgaaaaaaatagcataaaatattccttgtaaagaaacaccactatattaaatagtactgacttgtggactaagactgattaatgtcccaaccacgtaaaaatacttgcataaacccttctaatcattttgcacaactttaattaattagttgttgaaaatctcagttaacactttgtaatacttttttttgtaaataatttttggtgccattattgttatgtgacaccttaa

SEQ ID NO: 244913 - DNA, 1668 bp, Cannabis indica
tgtagctgttgccaatacttgcttcttaaacttgctgatttttgctttgtgaatccactttatcatctgtgttaactcagtagtctgagccccctaagccagccattctttgactttcttcaaacagctgagtgaaaaaaagcagctgaagaacagatgctttgttgtctcaatctgttgtgagcaaaagctgcaatccgagacagtaacaatgtggaatttctgtagtctttccttggtttcaatctatcttgtatggaaaaccatagtataaaactatgtttaggtgtgttaaacctattccaaacttcatttctccaagtcaccctgttttgaatggggcaaagtagttcatagccgtgtgaaatcttgtacctggtttgagagaaactttgtgtgtcaaccagattgctaagttgattctttgctgccactatttgtttccaataccaactcccattgctaagagtttggtattcccaccactcttcatctttaagatacacattgtgtatccatttgacccaaagattatcttctttgttagcaagggcccacacatatttgaagagagcggctagattccattcaactatctttttaattcccgaacctccttctgttcttgattggcagaccttgtcccaagctagtaatcctgctccttgcatcatgaattggcctttccacaagaaagccctacaaatagcttcaatctcacgaattaccttctttgggagtttgagaatttggcaccaataagagtgaatagctggaagaactgaattgatgagtacagttctgcccgcaaaagagatatgtctagtgctccatgtttgaattcttgctatcatcttttcgatcaaaacattgcattcctgctttgagatttttttggtgcatataggaacaccaaggtatctgaaaggagtttgctgccttgtgaacccagaagcttctaagactcttccaatctcaaattcttccatgttgctgcagaaaatggcggatttggccttattgggctgcaatccagaagttgctgagaagagtttcaatccttgtagcaaaaggatgatactcttgaagtctcctctacaaaatagtaggacatcatctggaaagcataaatggttaagtttaagactatcacatctctcatgaaatgcaaaatccttcttgcaacccactttcttcatgattcttgtcaaatatttcatgccaatgacaaaaaggagaggggatagtgggtctccttgtcttattcctctctttgattcaaaaaatccatggagggatccattgaaaaaaagagagaattttggtgttctgatacaattcattatgagggaaatgaattgatcaggaaaaagtaagcccctcagaacttcttcaaggaaatcccagtcaatggtgtcataagctttttgaaaatcaagtttgattagccttttttgagttcctcccatagtgtctaaccaagtcttgacaaatcatgatgttgtgcgcgataaatcttccttggacaaatcctgcctgattttgagccacaatgtcaggaaggatatgctttaatctggagcaaatcacctttgttgcagctttatagattacattacaatgtgtaattggtctataatcaccaggattattggggcatctgacttt

SEQ ID NO: 244914 - DNA, 969 bp, Cannabis indica
gtttaagattcatttcactaataataataaaataaattgttattaatataaaatgaatattaatatataaattgaaatatatcaaaatgtaataaagaaaaatggaacgatgaatatcgcattttttactcaaaatattatttgattttttatttataacttcaattattttaatgcactaaagtgtagaataatttataaatcattattaaacacctaagttacatactttgaaaattttaaaaattatttttctgtaactcctttcttatacaaatattatttattctacaaattaattttgttataactcacttcataaataccttattataaattatactataccattacatactattataaataaataatcaaaattattaacaataataaattataattaataattaattataactacgcacaatttatatatatatacatttaaatatatattatttgtaatggctatatagctataaaattataactataattatcattacaaatatatattaataaaaaaattaatatagattattttacatgttatatactgttacacctaaaattcgactgtacttccaaaagtgacacgtgtcaattttttggaatatgaaccaacagatataacaacgattatatcattaaatacaaaatagaataacttattaaatatagaattaatagagtatattcataactcactgactgtatagttgtaggcgagacaaggatacacaaactataaattcccttattaacgagagaccatcttgccttggaaggcataatcccaaggaaactacgtgtaatgtatagcgagacatacacctcgctaaagataagaaaatatcggtgagacgaatcatcccttcaaacacttagcgtataatccacacaataataactaagtgtaaacaaacttaaaaatatgcaagacatgattgtccagtctgcgaggcc

SEQ ID NO: 244915 - DNA, 613 bp, Cannabis indica
ccatttttttcaaccacttattcttctttcaataatactatattttttaattcaatcctatatatgccaaaattatttatttaataattataattaattatcaaataaaattgtgcaaaataaatgagttaaacatatacaaaagagaggattgaatatgtgtccctccaatcattaatgcatgcaaattaccactaacatgtagaatttctttctatagatataaaaaataaaagagaaagaaatcagtggagtatccatattccaaacagagggctacctatatattcatatagctacgtattaattttcatcaaaaactttatcacaataaatggttagagtataataatcactatcaatctattaattaaatattgacttcatatataatcaaattaaaattaatgaatacaatatttttaataatatatatttatatttaaaatatcctaagtacttttaattaatttttaatacaattccaaacttattttatatataggaaaagtttttctaaaactcttgtatatttacaaatacttttataataaaaaaaatacttttacacatcatattctattaataatttaataaaaattattagaaaact

SEQ ID NO: 244916 - DNA, 4008 bp, Cannabis indica
tgaaggctagggatgtgactaggtgcgattcgagaaggcgccttcggggattctggttttttctatatatagttagactcaggtatggattctggcacttctctttcaccttttcaattctttggtctgcttgttatcattctgcgtgtgtctgctttgttttagctttctcaatggatgattttcttaataccgtctctaataccttagtttttccctctgatgaaaacacaatatttacctatgatgctagttcttcctcttccacccctgctgccattagtctccttctgaaactccatactattagaccttataataggccatccctgatgaaaaccctatctggcatttggtcttcacagtgtagatttcctgtttctgtcactgagcatgctgatggtcttttcctgtgactttcggttgtgagggtgataaaggtagaattttagagggtcagccatggcactttgctcaaagtgtcaccatctttgctgccccagaaagttcgttccctatcacccttgatacccttcactatgtccctttctgggtacaagtttatgggataccgtttatgtgtaagtcctttgatttagcccgtttcattgcctctgaggttggggatcttattgaagtggataaggacactgtcaaggagggaactgggccttatttaaggcttagaattctccttgatgtcaatcttcctattaggaggggtatgaatattagattcatacgtatgggtagagagattgtcaaatggattgactttaagtatgagagacttcctgacttttgcttcttttgtggtaaacttgaccataccaaaaggtactgtcatttttatcttcaaaagtgtgatgatagtcaaaccgagcctttgtgtccttacaccattctcctgcgtggtaaggaaaaaattgtggacaaagctatgccctttcaataccctcacccacctgctattacggttgttgatcatgctcctgttagccttactcttcctactaggaactttttagataacatcatctcttttccatctttcctgactggtgctggtaattcggggtctggttttctcagcccttatacttcctcaactgtcatgatgcctactcctattaatcccaatagtaatcatgcttttcatactggtcttaatccttttggttgtcatcctttgaggccttcagctttcacctctttctccactgattcatgggtggtggcgaccacagttggtacaactgctatgcattctggtgatatgagtatctcgactactcctgctgctgaggttgtctcggctagtccagttgaggctgttggggctcgtactgatgttggccaacctgactcgttggttcgtggaaaagggctggcctcagcttcgggtgttaaacgcccatctttccagccccaacaggtagtcgttggtggttctgtcaggtctcaattgaagagagctagagccggggatagagaggaggaatcttcatctgcttcaacggacatggaacaggcgggtggtgcaatgcacacccgcccagaaaaatgagtctcatgtgttggaatgcacgtggtttggggagtacacgtgcattccgaaggctctccctgcttgttaaaactcactgtccggatgttctttttttgattgaaacccgtttggttgttggctctgttgataggtttaaagctggtcttggttttgaccatgggttagaggtccctaggaaatattttggggggggggacttttacttttgtggaatgacagtttttttgtgaatattattaacttttcctgtaatcatatagattgtaatataaatattaatgataatgaactatttcattttacttgcttttatggctctcctatatcttctcaaaggccctttacttgggctctccttgacaaactcttttataatgcccctaatcttccttggttaattatgggtgattttaatagttttctttcttatgatgataaactaggtagttcttattatgataataaggatatggataacttttctaattttgttcataaattcaatctttctcctttgacatttgagggtagtaaatttacttggcataatcactcagttaaagagcatcttgactgggctattagttctactacttggaatgatctctttcctaatgcatccttgaaacatctttctttctttgggtcggatcatcgtgctttaaagttgattcttaatgataatgattctaactctcattttcaccataggaagagatttcattttgaaaacatttggcttgagaatcctgattttttctctgttgttaagactgtttgggatagccatccactcaataacaatactttgtcctctcttcattcgtttttgtctactcaggacttgtgtatttcgactcttaagtcttggaataaggagaccaatctctctattaaatcacgcatctctgatcttcaaaaggaaattgcctgcattcaggatgctccttttgctgatcctgagtgtcgttttcgccttaaatgccttcattctgagcttgatagccttctttataaagaggaagtctattggaagcaaagggctcgaactcagtggctaaaggctggtgatagaaatactaagttctttcatcgttttgcttctaaacggaagaggactaatactatcaaatttctcaaagatgataatgggaatattctatctgatcaattggatatgggaaatctggtagtctcttacttttctgatctttttagctctgatggtagtgatgtcgatgcaattagcctcattcttgattgcctaggtcctcctttggatgatttagattttgagttcttggacaaacctttcaccatgaaggaagttaggaaagccttgtttcttctctctggggataaggcccctggtctggatggtcttaatgcttacttttaccaaaaaaattggtctactttgggggctgattttgccaaggctgttttgtcttgtcttaatgagggggttgatttctcggcagttaatactacccttatctcccttattcctaagaaacaaaatgctcattctatgaaggattttaggcccattagtctttgttctactctttataaagtcatatctaaggtcttagctaatagattaaagattgttttagataaaattatatccccttttcaaagcgcttttgtctcgggtcgagttatttttgacaatattcttattgctcaagaattagttcatgccattagtttaaggaaaaaggggaagcttggttgggctgctctcaaattagacatggctaaggcttttgacagggttaattggcattatttagagagtcttatgtttcactttaactttcctcctagatttgtttctctaattatgaaatgtatttcaactacctctctttcttttctggtcaatggttcagttcagggcttagttcatccatctaggggtcttagacaaggtgatcctctttctccctatctgtttattctctgtgctgaaggtttttctgctcttcttagggcaagccaagcggctggcttactcaagggtattactgtttctaggaatgcaccctccttatcgcatctgttctttgctgatgatagtcttcttttctgtactactagtcgttcttcctgtgctgctcttcaaaatgtctttgatatctattctagggcctcgggacaggtcattaatttctctaagtcttctattcttttttcccctaatacacagcctgatattcgtactgtttttttctcctcttttaaccttgaagatagaccttttatctgtaaatatctgggtcttcctcagtgcttaactcgttctaagtatcactcttttgcttttttaaaagatcgagttaattctgttctcaggagttggtcttctaagtgttttctagggcaggtaaggaggttttgctaaaggcagttattcaggctattccggctta

SEQ ID NO: 244917 - DNA, 1710 bp, Cannabis indica
acaaaaaaaaaggtagacgtggcggttaagcatattaggatgggcagtgaggttgttccttagcatctccatcaacggagtttccatggccatggatgggtctatccatgaagaagaagaagaagaataaggagatagaaacaaataaaaagaaaaaaattaaaaattattgtttttttttttttagaaattattaatgttttatttatttatttttagtaatttttattatttaaattattttaactaaatttattatttggaccaataaatttttaacatgtggcctttttatccgcacttaacattagttaacttggtgactaatagacttacacgaccttaaagactattactaccaattttggaaattgggactaattacatcaagcctaaatttttagagactttttttacaattctgtatgccttaattatggtggacatgatttgaaaatcccgtaacgacatggttcataataattcgaattgtaatattaagcattgcataggttctatttctttgtgttacacagattatagttcttgaatttttccttcacgggtgacggttgagcctcctattcggcctttttccttaaaagattgggtcaaaatcaattatgacattaaaattggttgtgattcaatgtgtgtagtagcgctagctagagacttgagtcaattttgtggttacttaccagattgctcaacttctttgatccacttattggggaagcaacgacctatcagttggctatggaatcagcagtctcctggaagtattcctttgtgttgatcgagagtaactcaaagacggttattaacgtgctaaaagaaacttttttcgtttggggtattagtaactatgttcttcaatgcaaataactttctaatttgtttatgagttgtaatctaatggtgcaactagtatggtggatcgttctactatactatgtaatgacattctttctccatttatttcctttacaaacaaacaactacaatacaactaaggacattctttctccatttatttccttttcattcatattagggtttattttctttgctctaacagtcctcaagtcaaatttttatggctgaaaatggcgtggaagaaaacagtcttcgtcccgcggagaagaaaaggctaaaaacgacatcatcatcatcatcatcatcatctgctgaggacgatgaggacagaatttcgaaactacctgatgcactcattctacacatcctctcgtttcttcccaccgtggatgccgtttccacaagccttctttcaaatcgttggaaacgcatgtggtatttagtccccaatctctctttcttcattactgcttctagttataaatcgacacaggaccgagaaaagttgtgcaattatgtagacagttgtctggaacaccgaaagaaagctatgttttataattgcaattcagtcttaactagttttaagcttcaaatggattgctatgaaagaaccaagaatcattatctagataaatggttagcttttgcggttgagaaaaaagtaactgaagtaaatctttgcttgagcgaagaggtaggcggagatgaagacggttccatttattacttctactgcatacctgaaacattactcgtaaaagcaatatatttgactattttggagttgaatacagtgttgttggattctgattactcatatagttttcc

SEQ ID NO: 244918 - DNA, 1380 bp, Cannabis indica
gtagcgtgccttagcattagggcgttacacaaccagtcctccaatcacctccgcactcctagggaacaaagtaacattctgagttgggttgttgccgtgatgatcttgatgtgtttccccccgtaccgtcgctcctgaacggagccattgtgccccgaatgtcgtctgccacctttgtgtcgaggctctcagttccaaggtgtaagttttttcttggagatgaaaaggcttcaagaaaagtcttggacaaaacctctccgcgtgcccgatgattccgcaaatgaaacaaaaggtgggcagtctttcgtatttgaaattcacccagtaccatgatgaatcatcaatgctgatcttcattcttcttttaatcggtttatcgacattgatccgtacccgaattcgcaaataatccctccaaactcccaagaagttattaggatccaattcaagaaaagtgccaatgaaatttcctagagtcgtaaccacactaagagtcatattcccggtttgtagatcatggagttgtacccacatgtcgacatggttgattttcacaagccttggattatccccttctttcaatctagtaaaaataaaaggcttacgatcatatgtccaaggactaccatctataaccctttggatgtcaacctcgtggtagaattggaataaaaacaggtttggattgacctgtcaaaaggaatgccatcatattctgaaaaacattaaagtcggaaactcgacctgtcaaaagtttgcccaccaaacaccacctggtatcgattatcacctcctctgttctgttcactagagcccgtagtacctcttcctcttccttttccaatataacaatatcacctcttattgccatgtcattccctgccatgctgctagaggccataatcgcacaaacagccacaaacaaacaaacacactctcaaacacagagagacagcaaacgtatcagctgatacgaccttaacagtactaatcggttgaagatgaagttaatgtaccacaaattagagctttgagatttttaggccttttcaaaaactgagttttttatttgctcaattttcgttaatcttctatggaggggattaatatatctattattttaatttaaaaaatgagactcatttggaaacacaaatcccttgataattaaactcaatttaccaaacatacgttaagttagagtagatattctgattcccatcaagtctaaacctcatagctctattctactcttctttttgcggttaggaattttaggtcattttgttgcattttgctttactagatgtacatgcattacatataaaaaaaacgaggttacttgattgaaaatctccatccttatattatgatgaccaa

SEQ ID NO: 244919 - DNA, 821 bp, Cannabis indica
cggtcaactcagtcaattcttaaaaaaaaaactatatatccatattacataaggtctccaaattagatttcccccctaatttttcaagataataaatttaaatttaaccaaaaaaataatgcacacaattttaaatttaataacctaatttgcatataaaaaaattaaaaacataattctgtaaaaaaaaaattaaaattaatatattataatatataattacatattacattttaaataaaaataaactaaaattaattatctacatataaaaaaataataaactgctctcccaagtctcacctgcctcggctccgcccgtcggtgtacggtggtggtgttgggcttagactcgggtcgacgacgagaagagggaaaggagggaggaacgacgacgaacgatgaagatgaggagaggagcagaggtgcgtgtctggctgcgtgcggctgggaggtcggtcgggcactcggggagaggtcgacggcggtctgggactccgacgagtgcggtgatggtctgagactttgagactttaggatttgtgttggttggaccttagtggactctctgtctctggttcttcgtgcggcagaaagacagtggtagattgttaaggtttagtttgtagggttttttttatttttaactagtgtgagtagcacatacaaggtatgtgctgcaattatttgttgagtgttgtatttggtaccgttttatctaaatacaagtttaggagtttgtatttttaataatgctattttaaaatcatacttattaagtactttaaatttaaaattttttaataaaatttaatcaatac

SEQ ID NO: 244920 - DNA, 749 bp, Cannabis indica
aaagaatataaaaataaaagtaaaataaataaaataaggtgggtatacaaaataatttcctcatattaaaagatcccttatttaattttcaaaaatatcatattgttaatttttactactatttgttaaaagaacgattgtttttcgtaagcaaagacccaatttattttttaaaatactatatttaaatattttatttagaaaaaagagactcttttttttttcttttcaaaataccaaattttagatatttaccactatatattaaaaaacaaaggaaaaagttgaagaatacaatttttttatacattaaccaaatttacttctaaataaaatttaattcaaatatatctctttttaataaattatctttacacactcacataactaagacataaattcaaacataatagatttgtgttctttgtaaatggatgtgtaagtttgtggaaaagttagggtaaaatttttattaaagaagaatgaaaactatcgtgaagtacgataaaagtaaaatttgtagaatgattaaaaaaaaaggtaaatataactgattttgattttttttttcttccttttatgttgaaaggggttagggaagaggattgaagatgaatttaacagagttttgcttataaattttttgagttcaaaatgctcaaagagtattcaaattgccgatgattttttttttttgagtaatttgcggcaaaaccccctcaactatcaatttacttgcgaaaaaccat

SEQ ID NO: 244921 - DNA, 1873 bp, Cannabis indica
tggtcttttatatttttgttggacttgtggacttgaatgaatgtgacttattgagaacatgtgtttacttctaatgaaattccacccaattaatctcatgatcaaaagggtcgctggttgctcaagtaaatgaaagcgtgttaactttaatggctgcgagaaccttgcaacttaaggtattttggatattaaagaggtatttataattattgattattgtaatttaatgtacctaatgttgatgcaaaaatttgatcaacattcgctagctatattgacgagaaaaaaatataagttgagtaaataaatactaaatatagagacaagatttatagtagttccgtccccgtgttgcaacgttaatgcaattacgtctgcttcgaatttttattgctcacgagaattttaagaagttgactaaggtaagagttctatatttttagagagaaactggagagaaatactttaactttatgtgctcaatataaaaaatgaactagtggacttctctttttatagggaatgtgaaaaatgaactagtaaaattctccttttatagggaaggagattctattaaaataatacagaatatatgaaaaaatcactatgggttgatcttggccattggtgatgatctactggctaaaattgacttttgaatctcgtatgttagattgtttttgggtaattagaaaatagcacttgtcttggggaaaaattttagaattgatttttttttggaattgcgatatgagtatgagacatgacttgaaaaagctttaaaatgaaagttgaatcgcatcaatcagatcaatattgagggaattatggtcattttacaaaaggctattcaggacccagcgctcaggttgacattccaacgttaagctggacgttgggtgagtgaaaatacgtctagacttgtattttttgatgtctaagtgatatgttgacactacataatcaatttcctcattttggtgaagttattcaccagttctcagatatgtcgcttttttgtgaaatccggtagacttgaaactcttcgaatttgtcaatattccaccttaccgaaaaggtgaaatgtcaaagtgtgaatttaacttgccacaattcgtagatctcatttactacgacaaactgttagatgctcgagacagaatcaaaatcatataagcaaaacctagcaccaagccacacatcaacctgggtgttgagtgctcttcggggtgtttcccagggctcattttgatacttttatgacacttgagattgcaaacgaggtctcctcctcaattttttaccaaaataagaagaattctcggagcagaatttgtgtttgaggagtagaaacatgcaaactaggttgcataacaacgagggtgtagggcctaacatccatgtcaacctaggtgttggggccctgttttggccccaaaataatctaaattatatgtaaatgtcctatacttttgtggtaaattagacataatttacattaagcatagaaatcctaattgctacacagaccatacaggtacttttgtccaatatcaaaatctatgtctattcaattatagcataatcaacactcacttttcaaattttgtattgcaatcataaataaatatttggtgatcaagctattataagcattaaacataaatgaaatagatgcacgtaagaaattgagaatgaactaaaattacaataaaaccatagaaaaatctcaaacaatatccattaacacactaattagaaatttagctactcattatcattctagacaattgattaagactaattaaaaatataaaaataaagatacaagaaaaaaaaactctttgaagatcaatggttgtatagcctccaa

SEQ ID NO: 244922 - DNA, 625 bp, Cannabis indica
tctctttacaaagccctctaagatctgtaatggggggtttgaacccaagacataacaaacaatagatggcttccagtaactcacctcctcttcaatatcttctggttcaatttttactctactgctatggtttggagaatcaaaagccttccccaaattttgaacaacagaagcagaatgcagaatagggggaattgtgctcaccttgtgcgagagcactgttgcattgctcattggcatgaattaacatctgaaagtcttgtcatgcactttccatcctttgtagctcctgtagtgacgatctaggagacagtggaggcttgaagaggtcctgcatcgaagcactccttctccctgttaggtcatcaatgtcatttccctcctcctctgaaaactccagtggatctactccaatggcttcttcaatggattcagttcttgtcgcctttgttacagatgtttctcctttcttcttcctagtcgcgatagccttcccacgcccccttccccttgatttcgccatggcactagcaagaagctgcaagcgaaagagagagaagcggctgtctttctttcttgcaagtgttgacaagttcttgcaattaattattttaaactttatttt

SEQ ID NO: 244923 - DNA, 1194 bp, Cannabis indica
ctaaatagttacaacgtatgcgattataaaaagaataaactaaaaaagttttataaatactgaaacagataaaggtttatcaaaacgaccctttaggaattctactttaaaaatttcctataatatatatgaatttttttctttaaaaaaacaatgtaatatattattattttcttaataaatattattgaaatgtagcaatattttgatggaaaaaatatatttgattgggattattttaggtagttcaacattgaaagattttggtggtttccaaatagctaaattttatcaatacaaaatagataatagaatgttaggtctctatttaataaacaaaaataactacaatgtaaaataacttacttgtacattacataattttgttattaaagtattaaatataattttagataacttatcaaaattagaattgttaacgcgcataataaaagtatgacctataaaattgggtactcaagcgatttcataccttattcctcctatctctatttgcaggcccgtctcaagttaacggaagctttgggtaaaaaatctaattgaattttttttatatgaaaaaatttatgttgtttgtatatatagttgtaaaaatataaaatatagtattttgagaatataattagactttttttctttataaaatatcaaatataatatctttaaaaataaattatgtatttttttgtttaggaaattagttatatattttaataaataatagtaaaaatataaaatgtaatacttttaaaatataaatttggggctttttattaatgatttttgggtttgggttgggagcttaaggcatgggcccttactgtcctattcttgagccgactctatctatttataacaatatctacttcaatttctttctttttttttttaataagtatgaatgaaagtggtcatattttctttatgtacttgtaaaattgatttttattatttgtaatttgttgttttttttttttttttttataatctattgaatctacggttaatttgaacagttaaactcttttttagtaccataattaaaaagtgaaaaagagaaatttatttcatgtttcatagtaagtttgtattcttaatttattcatggttcacactttaattttatagagttaagtaaacaaaactcatttacataaaatgtttcacatttat

SEQ ID NO: 244924 - DNA, 611 bp, Cannabis indica
aaaccccctcttaggcctgagttatgcttaggccttcgagaatttctggaagggctccctttggggtaaagctctacaattttagtttaaaatattgatacgtaggaagatgcttaacacactagtgttcaaaatgttaaaataacgtgtcatcgtcttatatcttatatatagatatatagagtaattatcatataaagtttaaataataaataatttaatatttaataaattaatctatttaaaaaatatatatatatataataaagaaataatagtttaattatgatttttatcttgaaatttgaaatttgacatggatcaagtcgtgtctctcaaattttcaggttgctaaaagttttcttaggctatattgagattattggattcaaaaacttgtgtcaaatttcgttaaattttactaacgtgataattgtctatataccaaaatgtgttcctaaacttctatcaatgttaggtttctgttaataaattgaacgaaactctttaaatctaacaatctcaataattttaggataattataaatagtttgaaaagtttagagaaaaaaaattataattagggtcgttgtttaattgaaaataaaaag

SEQ ID NO: 244925 - DNA, 732 bp, Cannabis indica
aaataaaaaatttgtaaaaatataaaatatatatatatatatattagatatattatataaattttccaaataaaatccaacgtattatcatttgtaaatgtaaaaaaaaaaatacacattagttattgcgtttaaacatttccttaaaagacattgataattggtcaattaattgacacacaaaagaagaaagttaccatttattaaaccaagtgacaattaaataatttaaatcaattgaaagcagccgcataccatatgtcccaattagagggattaaccgtaaatataattataaaaatatatttttatataaaagggttaagcaaaagaagaaggcaaattaaggggaatgaagtggagtgaaggctaatgggttttactagctgctatagaagaccaagcacaataataataagtagagatttcttgaataagaatagtatttaattttatttattcatttactatagcgaaaaggtcaagcctgtgagctgagtcttattcaaacaaatattgttgaccacatcacctaaccatacatcctctctctttatattctaatctctatatatagcatcctttctactcccaacattcccataaaccaaaaccttttcttctttaggaaaaagctaaaaagccaaaaactgatccccacacacacaaaaaaaaaataaactacacgtacaaaccagaactaaaaaagaaagaagagagaagaaaaaaaat

SEQ ID NO: 244926 - DNA, 743 bp, Cannabis indica
accatataaattagtcttgagttacaaagtactaataataataataacaataataataataataattctatagtaatacagttattattactattactattatcattattatatagattaatattttgttgatcgatggaaaaggaaattgttgagagggagagtttgaattaataagtgtgtgattgatttatcatgtaatatgatgggtgttatgggagttggcgtgaggagatggaaaaggcagcaggaggctcacgtggtggagcagaggagaggaagcgaacaaggggagccaataggaaggcgccatgtggcgtgtggctggagcaaagaaaggccacacaggcgctgattgggacagtttggacgaatagaagggcgccgcttggacctgacggggcaggcagactgggcctcttagatgggcttttctctttattttcttcttttccttttttctttttgggctccttttttaagctttgtcacttttttcttcatttaacaaaaacacaccttaattcctacaaagtaacaacaaattaaattgcaatcaaatatttttaatataaaaatatatcttatttatttcatgaaaatattaatttaaacttaatttattttaaactttaagatcataaaatatacattttttcaccattaatcatttttaaactgtttactaaatatatttttatcacaattttttcaaaaaataacttttaatttttttttaaaaa

SEQ ID NO: 244927 - DNA, 1323 bp, Cannabis indica
cttcataggacccagcttggctccctttgcttcagagataatgagccattttgctgccagcctgacccaactcccaataaaaagatatgcagcctgtgcctccactaatctcgtgtatcaaatccaagacatgagcgcagccctcactgcagtgagttcttatcttttagatttctcaagtctctttcatttttgataccaggttctaatatatatattatttgttgactgccagatcgcagcaaaggccggccgtctctcgaagacgttaattgatcatagatacactatgtccaaatttgggggtatggaggaggtaatgaaaagattctgggagttagaggagcagaagaaggcaatccacgatgaaggccaaaaaaggagtctcttatggagcagaaccaccgggaggcattgaaggccagggatgaggttgttgttgcggcgaggagggatcttcgagattctaaggaagaagtttaagaactaactaccaagctgaaatctttggaggagttgcaccggactgatttggaaacaacagctagcttgattgttgaagtgaagaagctctgcgagtttaaagagcaggctcgtaaagaagtagctaaggcaaaaagggatgctttcctggccctagtcacctgtcagcactgtcagaagcattttgacgatggggtttcatctgctagacagctaacgactacaaccttcgtcttcctttttatcccaaacctgaagaggttctagtccgcttctgggagaaaaagaagaggcttgatgtagtgctggaagagcgcaggggtcacagtctttctccccatgctgactaagtgatttgcttgtttatgtatattttctttttttttatcttgtccttgcccttactcataagacaattctattttctttcaaggggagactttttatggcccgtccccaggccttttccttttttggattttcttttctgaacaatttgcgtctttaaatctatttatccttttacttctcatgtttatcttgtttatgtttgtcctgttcttgcccgtatgatatgccttaataccccccctaagtgacatgaaaagaaattttcaggtcacttagtcaaaaaattacataagaggttgcatatatttgtctggcacaggttcttttacagaatacaaatattgtttttaactattgatagtattttcgaaggtggtcaacattccaggccctaggcattgtggttccgtccatttttttttagcttctagggcccagagccgatttcatccttactttcgtaaggtccttcccaatttggcccaagta

SEQ ID NO: 244928 - DNA, 1724 bp, Cannabis indica
aggaagcacagaaagttgaggatgttgattctaatgctggtgatgtggctgagagtgaagttaatgagactcaaaaggatgaaaatgtggaacctggaagtgagaagactaagaagaagaagacgaagaagaagaagatgaagaaaaagaatgtgaaagaaactcaggacaatgatgaatccatgcctggttagtgatttagtgttttgttctatgtttcagatttaaggtttattagcatctctattgtgtgttttttcttaagtttttattcacaggcttcatgacaatttaatttttcttaccaaaaaaaagaaaaaagacgatcaagtcattaatcctctttagagttttaacttaatgttgtcattgtgcttgcttggtctatttgaaatttgaagccctctctcactatggtaattatttgatgctaatgtttacatggtgaacagtttgtggtgaataattttccttttccaaaattttcatagatttcaaatttttgtaagttatgttctcaaacttatatggtggatctttttgtgccgtagtgatgaaaattttgataattttattgagttgaggaaaggaagaaagaaaataaaataaatgatgcccttaacttaatgtgtgttgcctgtattgtagtaagcaatgtcgatgatgatgctgaagcagagcctgttgatgaagctgattattattcatggaatgagttgagactccaccctttgattatgaaatctatatacagacttggattcaaggaaccgacacctatacagaaagcttgtatacctgccgctgcccaccaagggaaggttagttaagactcctgttcaatttttcaatgtggacatgacagcagcaggtttatagtcagcgtgctttcatgacaggatgttattggtgctgcagagactgggtccggaaagacactggcttttggtttgcccatttttcagcgcctcttagaagaacaagagaaggctgcaaatgtactcgaagaaaggaatgatgaaggagaaactattacccgcaaagggtttttacgggctctcattattactcctacaagagaacttgcacttcaggtactttatcaaatttatctaatgacttttgttttataatttctcagttgaatggataggattgctgtaaatgtagggacgctgttagcaatttagaaaagtttgataatttctgatattaaattataatttctcagttgagtggataggattgctgtaaatgttgggatgctgttagcaatttagaaatgtatgataataactgatattaaatacatataacccagtctgattatcatacatcaatatatgtaataatgtttttcttatctataagattgaattcaatgacttcaattagtcaaattgaaggtgtcatgaactatgttttcccccatgaatcagctatgtatctcccatattacgccttctgtcatgtttgaaaatttacagtacgggttgggagagttggttaaaatttcataatctatgtatttatcaggccagcaagtagcttattcctgggttaattgctttgattttgattattgatggttcgttttaagccttatttttgcacagatgtgaggattttatctcagttgttagatatgaaaatcaccactgtttgggtttcgttttttccttttctaggtaaccgatcatctaaaggcaattggcaaggatacc

SEQ ID NO: 244929 - DNA, 853 bp, Cannabis indica
aaaaaatgtggggtgatgcttgataaaggctattgtatttgtggtcaatggcaaattaggggtattccatgtgtgcatgcatctgcttgtataaattacataagagctgatatatattcttattgttcagattatttcaccacagagagctggaagaagacctatgaccatgtgattcatccaatacctgatgagacaatgtggcctcaatttcaggatgaacttttggtaccccctcaagtgaaaaggccaactggaagaccaaagaagcatcgtcgcagaaaagttacaggggaagaacgatctttgaaaccaatttcaagcaccaagaaatgcaagaactgccaccaatttggtcacatagcaaaatcttgcaaagaagagccaattcaaaaaaaaaaatcaaaggaaaccactagaaacaaagggaaagaaaaacaaaacttggaaagtcaagggagagcaagaggtagacctaaaggtgcttctacatctactcaaggctcatgcgcaggaagagtaagaggtcgacctagaagtgtttctacatctactcaaggtcaaggcacaagccatctggaagaatataaattaacggaaaccactaaaagagtaagaggacgacctaaaggcatgggtcgagacaaatctattatggtattgatcagttatggtaaaatgctcctcatatttgttctatttgttgtctaaactttaatatgtatttattttggtattatttgcaggtctcaacacaaactaatcatgatgaggtgaacacatcccaagcccatcccgatatatttccatcacaaccaatatagtgaaacttaattagcaggatatatgtaat

SEQ ID NO: 244930 - DNA, 965 bp, Cannabis indica
ctatatgagttatctacttttcatatttgaattcgaataatgaagtctttgggttggtcaatacccatagataggccataaaattgtatatgaaaataaacaagtgaggaccatttgaccaaacacaatgggaagagaatgaaagagctctctttctcttatcacttaatgcaaaaccaaaaactgttgtagtatagtttaatatttaatatatatagattattttattctaacgaatttcaattaaacatataatttgacaaatattttttaaaattccaaaataattaatcattgttattattttacaaaatatattatattaactataatctgtcaaaaaattattattttaataataatcgaaaagagtgccatattaagaaaattcttgactaaaattaagtggattggttaattttaatagatttataaaatataaatactaaatataatatttagttaaaataacataggattctcatctctttataataaacttaatatattttttaatttattatagactgtttaaatggaatttattataaagattctctataaattaaatatatacaaaaagacaagaacaataaataaatagaaatagaaataactagtatgggcatgttagggaaggcctttggtttttaaataaaaatattttaaactaatcattcttatcctttctagttactttcggagtactattatatatgcatttattcagttaaaaatgaacactcaagatttataacttgatatgcttcaaaaaaaaaaaaaaaataaagttcacaacttaataataatttagagtcacaatttgcgtttattgtatatgggtgaagccacagaattgtcctacttaaaatttagcttaattataagtatttaaaacttatggctctaaatcaattttttttttttagattttatattctttgatcaaatattattaaataata

SEQ ID NO: 244931 - DNA, 1908 bp, Cannabis indica
atgatgctttagctttctttctttttacttctgagctttagttactaatggtgtaatgaaggccaggtgtaactctcctttgtttgagaaataaatgcaattagtcttaaaagttgtctaaattaaaatgcattacatgtttttaaatctcttaattcagattataaaagttagaattgtaaattttattgtatttttttttaataatgaacatatcattgtacaaataaattcatctaaacaagtttctaatggtgaacaagcagtaagagcatctttaaatggggggcaatactatagctttcaaaatacaaatattatcttaaaatatataattttttattttctctttcatctacataaaatttgatacattttcttataaaaattactctaatggtggacaatttcaaaaattgtccaccatagtctcacataccactttttaattattttttttttattaaaggagaaaaatttattaatcagaacagaaaaaatgctacataaaccaatatctacaaaacaagaaaaggagacttatttacatgttacaaacaaaatcaaagatttgttgatccctcttagaaagattcctcttattaacaaatagtaatctcgctttaagtataactctaattaaattattcacataagaaatcaaaaaaatattttgctcaaaaatacaaccatttcgattccaccaattaaaataagctgctatcgcacaaacaaccgcaacaaccctatgaagcatattgcgatctcgattagcattcaaccacaaaagccaattcggataagattctagccaaatagcaataccaaaccaagaatggatagtgtgcatgagatgcttggaaaaagaacaatcaaagaaaagatgattatgatagtcaacactaacctcacaagctgggtagctagtagatttcatggcaattcctcttgccaaaaggtgatttcttgttaataagttattatgagaggcttgcgagagaataaatctatgttttggtatggataatctacaccaaattattttgtaattatctactttagcataaggagtaagaagagaattgtgaagtttactaacctgaaatcttcccccttttccagcatctagaattgtgtctcgagtgaaaacacttttaagattaagaagtttacgccaataccaactcacattacttttcttatcaaccacctaaaaattttagttttttaaataaatagcattgatccatttaacctacagaacatctaattttgttgaatagcccaaatgtatttagcaatcgaagctttgttccacttggttccttcctggaaacccaaacctccataattctcaggttcgcaaacaagatcccaagaagttagatacatctaactagaattacctttcacaccccacaaaaagtctctgcagagtttatcaacctccttgactattttctgttgaagcataaagatactcatccaataacaacgaatgtccagtaacaccgattgaatcaattgcactctacctacgagaaatgcctgcttgcccagctgtgaagtttcaattgaatcttcttgagaaaatgattacaatccactgctttccattttgtttgcctcattatcacaccgagatactttaaagggaattgaccctcataataaggaaccaaatctcgaatagccagtttacttgcttcatcgaccccgccaaaataaataccagacttgttcgagttaattaaattttataattatatatattctttcaaaaaattggtcggtgataaaataaatttttcttagaaaaaaaaattaaataatgtcacatgatcattgcttattttagacaatgatattcataaagttcacttgaaatgttgatcaaaatatgcatgt

SEQ ID NO: 244932 - DNA, 1002 bp, Cannabis indica
atgcaaaaatacagtactaacaataaaggtaacaaagcaggaaaagcaaacattacacttttccattcttgccagcagttgacaaggccatggcatttggttcttttaatccagcacccactgcttcctcaaaccatttgcggaactgcaagttacctattagttttattgatataccaggctaatttttgcaacaaaatatataacaaatatgtatacatgatgttgaacataaattataagtactcgagattgaaaatgtaataatcatccggcagtggttatcaattattatacctgatttattgggtcagattccacatcttcctcaaggaactcaggcgaaatgtaattctctctcagagctgacacatcaatttttggaggctttccaatacgaacacacatagaagttccactatatgatggaagatgaagtttgtacttttcagcaattaaaggaggtacaaatctgccacccagaaagtggtgtgggccagaaaattgttttgcacacaacttcggagcagtcaaagaaacctaaaaaaataactgaaactatgaataagatagctcacactttcacttatcttcaaatgattagctaattctatcacattctcataaacaaattttgaaataaaatcttctaaaatggtatgaaaacacaatggcagtttctatccaaagcctaccaacatgtcaggtttgatgccttcaccaccaatgtctccttcttcaacatgccacccagatggaatgtccacggagacaatagcaggggttttttgacgtgttccatcataattccgtagagaaacaagcatttgaaccaaaccatcaaaaggaggtcttggggaacctgatcaatataagatggtaattaatttaaggtgtatccaattgaatgcatcatcaaaaaaaatatatatattaacttatcaccttcaattgacttattacctaaagatctagaatgaatttaaagaactaaatttgatg

SEQ ID NO: 244933 - DNA, 682 bp, Cannabis indica
aaaatttctagagcattcactatactaagatagacgtccttggtcattaacgcgcgggcttgtttgaatacatcgttgaaagattggtgtgtggtacgatgttagagatagagttcaagactttgaataactcttgtaaaatctaaattgtattcagtatgcaatattcaaatcgaaagatctttgtttaagcactatcttatagttgtctgatattgctcgaaaaaatattttttaaaaattttaagtgagggattgttggagctttgtgaaattttatagaaaagaaaagtgaagtgtgtgagtaaatggagtcccacatgagataaaatcagttcaatagaagtgcatataatgtgcaagtttggaacttgggttggcgcccgaagggtacctaattttgtgcgcatgggtcaggactcacacaccggaccaccacacacgggcacgccgtcaccacctgtctgaccgagtcgagttgggctagccggcgagtgagctcactttattttttaaagaaaaattatttaattaaataaagaattattttttatttatttgttaattaattatctttaatgttaaacctccatgattatattaccgttttcttatcgtttaatcttagatcgacttctctataagttgatcagaacaacaaaagaatacatcatttcaataa

SEQ ID NO: 244934 - DNA, 1177 bp, Cannabis indica
aaggttaaggatgtggaagatcgggcaaacattgttgaagctgctcttgaggaaaaagatgtcaaactaaattcatatataaaccttgccacaaaggttttttatgagttctgggcgactaattctaatgctgacttctcctatataatggagaatacccgaaatacgttgcttggaggatgaaaggagataaaggttgtgtgagaagctaaagcagctgaagaaaaacagtctgaacaaccagttgaaaggactgttggtgaactctctgagcaggtggatgtagaccccaatttctcagtgaatgatcaagataatgctttccctcctaaagatgtgaatctggccactcctatggagtcttcttcttttttttttttattatattttttatttttttattcaacctttgggccttaacttttagacatgactgatcatgcgatctttaatcctaattttatattataagaaaaatagctaaccggatatcttttaagcccaaacttattctgcttcttttccttaaaaataaatacttttgtcttttcaatttttttctaattttccatgttttacatgctttctaccaatgcttgtgcgggtgtaggtgcccccaagtgactaagtagatttttgactcttggtcacttgaaattaacaagtttcttatttgtctgttcggccattaagtctaggcagacctcattacatgcacgttaggtagttttgtaaataaaaatataaaattaacataatttgaacgataattaattgttttattcatttattggtcggtatgtgttgtcacttaaaagtaacttacatttactgaataaaaagatattagatgatctactcggatcttagctaattaaaacaaaaaaaaattgaatggtatattctgtccaaaagacattactgaagaataatttttaagatgaaatatgctttagaagtggtcattggaccttagcatcagccatttttctaaacctttgaacgaggtccactcagaaggccatcactcaagaataatgtttaaccattatgcaatcatgtaattaggggtgaaaatcggtcggttatggtcgatttttacaattttataattgaccggtcgcttacggttttattttacgaaaaccgtaaccgaccgtttaaaaattataaccgt

SEQ ID NO: 244935 - DNA, 1531 bp, Cannabis indica
ttacattcagataaaaatcccataacaaaatttccccgaaattgtaggctttaactacgctccatctaaataaatgcggttattatttgaaaatcatacaactgtgatttacacctcttttaatgggtcaacgctgatgtggatttagatacactacaaagtgtatgtcgctagggcatctcgctaggtacttaaatacccaatcgcaacaataaccctggcagcaaactggagcttttcccatgtctttccgaggttgataatgtaaatctagtcatttctgtgcttgaagacataacgctctatctgacaatcgtagttcttggtgacaaggtaaacttcagtagccaacatcatttgaatgtcagcttctttctgagagagctgacgcgacgtagcaatggagctcattgaaagatgtctggagctaattagtgaaggtaccaagagtatgtcttcctatagcgagatggatgtctcgctaactgttattaggtccttcaagctgttatacttaattagtataatgtatattatacgctaagtattctaacaaccaattagcctcgttaagtcctttttacacaaagcgaggttaatgcctcgctatgtattatcgcgaaatagtttctcatcaatacatgaatcaatagtttgtatatctttgtcatgctaaagactatacagtcagcgaattatagatatgctctattaactccgcatttaatgagttattccatttaatatcttttaatataattgccattatatttgttgattcgtattctccaaggttcacatgtgtcatcctctgaagtaccagctgaatttcgggtataacagtatctgaatgctctttgaattggtacttgttgatggttatgatgttcttgatatggatgcatattggtaggaattgaagtgaaaatgggtggtttttatgttgattaagcttgtaagtttatgagatatgcatctagattattttgtgtatttttgagattgaaattgtggtttgaaattctagaattgaagcttaatttctgggttacaattctaaaattttagggtttacaattggggttttgatgtttgagttttcaagctttggattagtgtaattttggtatggatgatttggacttggaatttcttgttcttatcttgattttaagctttgtttagcctagaattgttgttaatattacagttgtaaatagacgtgtgagagaaacacataggtctatactaaatagaatgtagatgcggtggcatcaatattaatttgcattgagaacatattgtttattattatttatattgtcttgctgggcttggctcacgggtgctctactgtgcaggaaaggataaaactattcatgatcagccatgagttcaagggcttggtggtgcattgtacatgttcgagccatactagaccacgcaggttgggtctaccagctgctgcgcttctgtattctcagttttatcacttaggtcgacatgtaaaaattgacttgtaatattttgt

SEQ ID NO: 244936 - DNA, 1361 bp, Cannabis indica
attaagcttcttttgtggaataatatttcttagtatatttgaaatattttaaaaatattaaaaaaaaaaagtcacccccatgaatttctcataaactaagaatttagttatataggcacactttatataaaatagatatatatatatattaccatcctttatatctttcttttttttttttttttttttgtttcttaaataacactatcaaactatcaaatatgtactaaaaaaaaaaagaactgcactttaaatataattagttttcattttctacaatattattaaatacaattacattactaaaacaaacaaaagaatacaaagccatatatgataaactaatataaatgcaagcaaaattattacacttttttttctctatttttttaaaacaatgctcactcttaccgaatcacaagatcatcaattaaggtgacatctgaggcatcgaaatgaaaaaacaaaaaacgagtgtttgcatagcaacacccacacccactttcaaccatgaaactagagatttttgttgccaataatcttcctcttggggaagcaattcatcaacaataaattccgagaatgtatttctgtggtggcagttgagtcacgaaagggctgtaactttctcatgggatgcctttactgagggttcatttgatctgtccaaatttagaagaatgtcgttgttgtaatcgtcaagaacattattgatttgccatgagtgaagaacaatctcagaactttcgagtttagttagatgtggagtttggctaggcgcttcagcatgtgagaaataataatccttacagctctatggtctgagctataaaagtccaaaagcaaaacaggtggagttgtaaaacagcaactgtttttacaaaaactcggctttccaacaacattctttaggtcgagctggctggctggctggcaaggtagaaatcaccacaaccttgtttccatggtcatcttcatgacgaacgtgttggcgatccatttttggagtagaaataacttacatttgagggattaattttccagagaaattttagagtagaaatggcgagacttatctaccttggcatcaattttcgatacaaagttcatcctctcagcaagtcaactgcagtatacactaactgtttctttgattttttaactttactcaagctattagaatttgatcttgaatccctacacaactcacaaaactaatcaagacacaccagccgatcaatcttgatcttgcagcaatagatttcacaaagcaatttccaaaattgcataaaacatgtccattgaattgtcaatttgttaatgtaattcaaacattgattttgatcaagaccacattcgaa

SEQ ID NO: 244937 - DNA, 1105 bp, Cannabis indica
tttaattttgggtttaattattgggtttatttattaacgggggatcaaacctaatcgttaaatttaacagaatattcttttatttttgagtatattctgttaaaccaataaatgttaaaccaagaaataccgttagatagacactatataaagatatatattttatatatatatatatatatattgtaatggtagtttgattccttacaaccaaatatatattagttgatgattattttagaacttaataatgaattatgtttaaatctcaagtggtggtcatgaaagtgtgcatgttcaatatcgttaatttgatgtggttccaatgagcaattattcgttagataatttatggctcattacttaaataataattttgaacaaataattaatttcacgtttacatgtcatttttcaataattgaacatttacctaatgaattagttggtatttgtaactttagcttatgtacattaattattgttggtgtgctttttgtactaattagaatattattttaaatatgaatatttgcagtaaaaaactttaaccatttgtaattgtcaactctaattcaaaaattggtgataaaaatattttatcttataattttattgcaatcatatccttttagctgttaaatatttgtttaattaaagaaaaactaatttaatttttccattccaatttatatatttttaattaaaaataagataaataataattatttaatacgtgctctacctacattgaagtgagggttatagtcataatattaattttgaaataatggcctgttaaactagattacatgtatgttagaggcaaatgtttaaattctaccaatatatatatttttttatttttaagtttacttttgcctcttctttaccaataaaataaaataaaataattatgccctctctcaccttaaatcctagattcgccactccaataatatatgtttttttttttgaaactaaggaagctgttgaacaagaagaaaacaaacaccacaagcagcgaagagggagaaaaaaccaatccctctagctaacttctcttggcctgagggcttcttttgcaaggacatgggcgtccata

SEQ ID NO: 244938 - DNA, 2371 bp, Cannabis indica
gtgagagcttcaagagagtgaacaatgtattctttgttcttgagttaatacaaagcaaggggagtaggctattaccgaactaaaggggtcgaaccctttaaattttgtgttcttaatttattactcatttgtttatacttcacgttatttacattttctatcacttactatttggctcattgttgttgactaaaagcgaaatcaacattaataattaatacaatataatattttagccatatattattacttattatttaatacaatgcaacctcaaactgtgttgacagagattttcggtaaccaattgattagagttgtttaaataattagaagaaatttaatgcaggtatttttacatgatttgggcattaatgagccttggtccacgagtcactgctgttttatatagtaatttttttacagagggtgtttataccatttttctgaacccttcttcagaatatagttgggatatttatagtgtcataaagaaggaaaaatagtttctattgtcgcaagtgtagaaccattacttgcataagtttctagattcggataataaggtatatttgtatgtctggtagtttgtataaagtttttcctaggtgtttggtgatataagctcttaacctttcttgattaatgcgacagttcaatatgcagctgtcataagattcatagatagagtgtaatcaccgaataatgggcttaatgcctctaacacgtcttttcaaaacaattcatagacatcttccccatgccacatttaatatccacatatcagctcaggtctagggtctaacgactggaccagaattttttatctatctccttgaggtgggcataattcctgacttagcatgacacgattgaagctcttagaggggcttcccggacatgaccattagatctccgactgttgctttagaggtttactttaattactcttgacatttagactttctttccattccaccgacttcgggattgccacgtgtattaggaaaaatcagggcaacatttactcccaagtttcgtttttcaccttggtaaaatgagacttactacttgcctcaaggagtgacgccactagacatcattctgcacggcacgcacgtgagtcatttattatttataatcatttttctcatttttggcaaaaatgatttgattctcgccttttcaatagaacccttcattcatatcagtttcaggaaaatactcgagtattgcaattgcccttttcactacattttatagccacgctgtcccgaccattggattattggaatttggatagtttgagccttgagcgttagatggtcattgattagtatattccctggaagatctataaaagctcgtgccttttccttctaggatttttaaccactcatcatttttcactttcaaagttttcctaatcttttgcaaatattccagactctccagactacctcttggttttccattatcactagtaggcgaagtactaccagcgtacagtggttttgacaacctctgcattctcttcaacacgtaagtttcaacttttccaagttttaacttttgaattattatgaatgcatcagtagacattatcgttctctttctctttttttttaggttttagaatgtcactagagatttcctctgaaccgccatttttctaggttgcattttttgtaacttttgtcttaagactatgctaggaatttttaggcttagggttcatagaaatcgcagtgttccccatttctttccttttccttgttctattattatgtcaaagatttcttgcagctgatgtatggcaataggaattgttgatttttgccccgcctagatcaagaaggggccttttcccagcaattagaggacctccattcccctttatgatttagggtttaatgtgggggataactgctgtgtttcttgtctttcatatgagtaaagttctttgggaccttcacaagtacgatttctatggttttgaccaagaaattctcaagctcctttcagaaggcaccatttcaaattctaaagtgccatccaatgatacccctattggtacttctatcccagccacaacagtccaaaggttcgtccctttggatgttgttatggaaggcccaatgtcgtacacttgtccttgacgtgcactcatcaattggagaagatcgtagctgagatcaggatcaagccaacttgttctagagtgtaccatcattttgttgggttttatgccctaaataaaactcatttcaatataatcagatttacttattaatatagatcagaaataatatttaatgttgcatggttcacatgatttgtttcatgattatatgtacataatgtatagatt

SEQ ID NO: 244939 - DNA, 790 bp, Cannabis indica
aaaaaaatagaaaaagcatgacaagtatgtatcgatttattcggtatatactgagttaaatgaaactcatgagaacatattccttgctaataaaaatagggttgcaatctgcaaacctaagcccatggggcacgcgaggcataagcgagattcaacgaaatactgtcgattctacaaagatagaggacataccactaaagagtgccgacaactggaagatgatatagagagtttgatctcgtgaggatactttaggcagtatgtgagaaatcaaagaaacaagcctaaccagcctaataacctgaataaccagagaatgcaacctccccctattgagggtgaggatatcttggtaatttcaagagggccacacctcaatagaagtagtaataatgcccaaaagagatatataaatgaagtaaagaatggacaattgacatttgctccaaaaccattgaaaatggcaaaatcaaatgaaccttcaattatcttttcagagaaagatacaaaaccatgtaaaaatatctagtgtttattaattatatatttatttctgtagtatatttattgaaaaaaggctatttaatttggttaacaaaaatctacgttgacagtacaaacccacatgttgatccccttgtcataacagttcagctcgccaataaaagggtgaaaagggtgctggtagacaatgagagtccagtcaacattctctacaaggacacattaaaaaagatggggttagaggatgtaaagttgaaaccatgcatggtgagcctatgtggattta

SEQ ID NO: 244940 - DNA, 539 bp, Cannabis indica
caccggatctctgtcactcactatagttcgcggtaatccatggagcttaatgaccatattgctgaataattctgccacttttgtggctgagtattgacggggcaaggcaccaaagtgtgcatatttcgtgaagcgatcaatcacgaccaaaatgtttgtgacgccattagagttaggaaggcctacaatgaaatccatagctaagtcctcccaaactctctccggaatgtttaacggttgaagaagaccatatggtgccgaagttgaatgtttcaccgtttgacaaatagtgcaagtggccacaaattgcttaacatcagatcgcatcccatgccaaaaaaaattagctcctaagcgcaagtaggtgcgctctatgcccgcatggcctcccattggtgtatcatggaactcatgaagcagtttttgtttcagattagaataagcactaataaaaagtttctggcggtagtacatgaggccatctctctgagaatacacagtagcatcaagctgtcgctgctgcaattgagtgtgaagaa

SEQ ID NO: 244941 - DNA, 1664 bp, Cannabis indica
tttagggtagaagaaaggttattaatcttgaacttttaaagtatcttttgttttgttaaatctataatctcaagtttgtctacttgaagggttatgtcttagtcaattgtccatgttttttcttttctcttttttggttctttggtgtatttagttttgttatatgtaatgcttaattgttaacatgtttgcaatgcattgaaggacaccatgttttacatctatacaatgttatgtaatttttaattgttttataagggaattaaataaaatgtgtaaaattcataaattgcattctacagcagacaattatatccaaaattaagacaaatgcattataattttcaaaaatcatgcttccactaatttaacacaaccaagtctcaaatgtcactaataggaccaattttgcgggtttggtcggagcttcaacctaatagggagactttcgggtcgggtcacgaccccccgtgtcctgctattaaataaaaggatgtcgcacatggactcaccttaattatttatttattttttcaacaatccctattttttttttatttagtagtagtattttttaaactctttctcattaaagactactgtttacacattaaaagattagtctttttgtacaacaaacataattagttaactaagtttaaagttttttttatgatctcacatgaaaaaagagtaataatactacatattagtttttaaaagttattttaattttatctatcaaagtattcttataattaagaagataaaataaaaatattttatctctatgattaattaagctattaacatttttttgttgaattaaatggctcaaattgactcaattttgttcaaggttggtcttgaggggaggtaagcaagacgtgcgccttgagttcccgaatacttaaggcccaaaaattatcattgcaagatttatatgtaaatatttgtaagtgcacaaatcaacaaataataataatggtcaagagattaaaaataattgattatagcgaataataaacttattttatttaagcaatcaatttcgaatggtttcagtgttactatatatatatatgcttatatatatggagaacaaaataaaattaataaaaacttttattgcttgcacacttcaattcgtacaacccaaagttctttatatagagtttctaactcttcacttacactaagaaataagaccactaattactcaacatgtaaacatgcaccacattctactatctcctagagaataagaacttaccaaaccactactcacgtaattatttagattatacataaaaaatcataataacataattttttttttcagcattccctctcttaaactgatgtgtttataaacactcaatttaccctctcttaattttgatcttccaaaacacatactccaagcatcttccttagtttttaaattatatgaaatttgagaggctttgtgaatatatcagcaacttgctctttacttctgcaataaataagatcaataacaccttccacagtgcgctcccttaaataatggtacttcacatcaatgtgtttgcttctaccatgaagaacatgatttttataaagttagttgagctattgtcacaataaatggctccctcttgcttgaaatgtaactcttcaag

SEQ ID NO: 244942 - DNA, 1060 bp, Cannabis indica
aaagaccccaacactggaaactagcaaaacattggctgcgaaaggtcccaaatagaggtcaaaggggacacatcgtaagttatttttagttttggctcgcttttcgaaccgacacattttgggctcacaatggatcacaaactgctctgaaaccatgttaaaatttggtaaagtgtggtttaagaagcatgagattacatctcaaaagggagatttgattatctatgcatacattaggagtaaattaattcctaaacttatgtgtaccgatattgggggaataggtcaacttttccttattctaaaaataccctctccattttgaaacccctccactcatgtcttttcactcttttctctctcactctcttctccttcttccctaaattgaaaacggcaccaaaccaccaccaatatttcaacaccgagcgccaagtagcccaaccacctcgcaccaccaacggaattccccaaccaccgagcgccacccacgaactgagaatgtcaaaggttataaaaaaatattatatatacaaaatattgatgataaaaaaaaatgagacttttattataaaggatattgtgtaatggcccaaactgccatatgcttgggtcggctttgcatgtcccaagaaatggacccacgtagagcccaaggtaggcgtccaactccagaaaaaaaatattagaaaaatgaaaatgagtttctttaatggttaaatttattagtatgtatcgatttaataggtatatatgcttgacctaaatacaacacatttatcagcgaacctgcttcgacttaatctatttataaatgtatattgtttaaacaactcaacttattaatctattaattacttgtgtaatacttttatggtataatcaatacgtttatattaacctatttataatctcttaaagtcctaatgttactttaagtaagtcattaatatatgagttagtttcgtggtattatgtgaactcaaacatgattcgtatagtaaacggataagagggatgacccaaacttatttaagacaaactcaaactcgttaatttt

SEQ ID NO: 244943 - DNA, 1851 bp, Cannabis indica
atatagtgaaaaaccaactactggtgagctgattcaaattataccagccaataactttgcatattcaacaaaatatcttacagtttcagtaaagcttccatgaaacaatacagagcacccaaaaatttctacaaaagatggagaatcttcctgagcatataaaaacatctatgagtggattcatcactatcgaaactagcacacaacttgaatcacccccacacaaagaagtttatgatttaattccaagtcatggtgtcaacgatttatatctcttgaaggatcatctccacaagaggttcaatctactttagttggtctaccatcactcaaaaagatatagaaaccaattgtataaacttaattcactctaacgattttttcaagtagattgaaaagtattcatgaaagaggagcctatcaagtagatccctaaaactctttctaaaattgaaataaaaattgcatgtctcaatgttattaaataaaagcctcatttgataaatttcttaaggacctatgtccgagtaagaaaaaattgaaaggtgatgagaaaataagtgtggaggagaatgtttctattgttctccaaagaaagttgttgcctaagaaaaataacattcaatgcagaattggtaaaatcaaatgtgatcattgcatgataaatttaggagaaattaataatatgatatcttattccaattttgcttctttaatcttcgtccagcaaaagaaacttatgtttttattcaattgactgatatgactaatgcttatcccctaggaatagttgaaaaggtttttgtgcaggctattgaacttgtaactccaagtgattcctataaaattgagatagaagatgagggtgatactaatcctacatcaactctattcaggagacccttcttactcaatgcgagtgaaaaattggatatgaaagcatgaatacttacaataaaattttatggtgaagcactcaaatttaacatgttagattccattgataagtacataaggaatatatctttattagaagactacacgtgaagactacgtcagcgcaatatatagttgagctaatgacattaaataaagcaaacttacaggatttttcttaccctttctttttatttttcattgatgttatttgattgagctttgaggacaatgcttatattaagggtgggagagaaaaattatcatgtctatctagtttttttcttagttgtttatttatttattttcttattatttttttttagtttatattactttttttaaaaaagaaatagtaagcatggtttgaattctgttgacaatggttgctcatgtttgatgcgtgcctttaattttatgtcttatgcatggtcttttataaaataattgggttgatgatacaattcttgattttgcgatggatatgattctaggaaaaagatagactctacatgatttgtgtgcttaacattgaattaattactgctcaagcttgatttttaaatttttttacagaaaattgaatcatcatatttgctaatgtttacagatataaatgcatatttgattgttgatctttttttatctcaaacttgtttgataatcatttaaggagaaatgtataaattacacataattttgagataggatatatgcaatttctttgatacgattgagctttcaagcctaccctatttgttgaatcccttgttacccaattttagcttaaatgatgaaaatttattatttttctttttaaccttgtactaaccttttgagaaaaaaaaaaaaattgttcttcatcatattttcacactatagtatattgatattttatgtttataaaagtgagag

SEQ ID NO: 244944 - DNA, 1814 bp, Cannabis indica
aaaatacaaaaaaaaaaatacttctatattaaatattataaaatataaaattcaaaaaataaatgtataccatttctaatactttatattgctttaatggttagcattatactttttaattaatttataattttcaaataatacaattaacttactatttaaataattacatatatattagtattattatgtcattaactataacttctaatttttcctttaattcttcttcaaatttattagggtagggcaattcgtgggtaccctatacccgataagaaaatacttgtatcctacccacaaaaaataatggataaatactattttagactctgtgttttgcaaaagttactaatcggactctctgtttttttaaatgacaaaatagactctataatttccaaaatggtaaaaataagaccctgacttaatttttaataattttagtttttttaatataatcaactttaagacaatttctaacacgaactgatacaaaatattaaataattttgtcataacatctctaaatcaaattattattaaagttttattttagataaaaaatcagtttagggtcctatttctacaattttagaaaatacaaggttcattttgtcaatttaaaaaaaatagaaggtccaattgataacttttcaaaacacaggattcaaaataatatttactcaaaaataatagagtaacatggtaaatatgagtagaactttttcatagagtagggtcgtagaataagcataccctacctacccataccctactcgttgctattcctactacaaaccaaccacatatgattaaagtataagggcttatttactatcttaagctagttggaatcaattttaatagttttaaaaatttacattaactctaaaattaagattttttttttttagattttatcgttaaaatattgtctatacaattattatttgtttaaactctcgaattatagtagactaactttagttcaattttacttcaagcaattgttacagaaatgaacgaaataaaactgaaagaaaaaatttgcaattatttttaaagtttgagaataattatagtatattaatcaaggatcgatcttatattaggaaattgtttgcaaaattgaatgaaatgcaaccaaaggagagcaaatttacaattttcaaagttaagaggggattttttaaaagaaaataattcaagaacaaaaattctattagtatcacagtaagaacaaaaattatatttttttctagtaataactacaatacacaagtcatataaaataaattagaatataattatttaaatgtcaaatattagcataataagtgataacccatatatattaaaattattaaaaaataaatgaaagacaagtaatgcttaaagattgcaagtttattcaaatgtagatcttaaatttataattttgagtttttaaatgtaaacttcaaattataaattttattttataattttataacttttttctaaagaaacttcaaaattaataaataaataataataataacttatcaaacaaaaataaattctgtaaattttaattttattttcattagttaattttatttaaattaagtccgaatccgaatctaaacttgaatccgaatctaaacttgagtccaagggcggctctaagtctggttcgatgcagggtcagagtgcaggtgcagatccgagttcaaggttgaggtcaagatcagaatccgagtcaagaatcaagtctggattccgagtctggggccaagatccaagttgcaaaatattaattaagaaagaaa

SEQ ID NO: 244945 - DNA, 440 bp, Cannabis indica
cacgattaaaactcaattaaaaaatatactaaacttaatctaaaattaataataaaaattagctaataccctgcagaagaacttgcttggttgtcttgtcctttataagacaagacagttcatcaaattcaagaatgacatagttatgcttggtaaattgagaaatgctaagtaggtttttggtgacactaggcacatgaagtatgtcttgtaaaacatatgaatgattagggaaattagtgcaaaccaaacttgatccaatatgatttataggaagagaggatcaattacctacaactattttggctttgcttttgttgtcagctgctaaactgagatgatctacatcatttgtcatgtgatgagtagctctagagtccaaataccaggcagctaaagcatttgatgtggaagtggatttagatacaagagcttgagga

SEQ ID NO: 244946 - DNA, 1377 bp, Cannabis indica
caaaaaataatagtagacaacttacatccttaacagatttcgaagatttggttctctttaccttacgagcttcaaccttagttggaagaggtctttttttagaatgaaaaggctctgcaacatcagccattcttttcttcgcaatgcctttcaaacccattttaggaccacctttagaggatttcgaaggagatttcataggactttttgaaatattttgagcaggtgaaggggacttgaaacctgacctagtggtggccatttatagaaaaaaaatgatagaggaaaaacgaaatgcagttatggaagagaggggatcgtgactgaaatgggaggttggaaaatagtgggttagggtagaagagttgaggacggtttgcagttcgtgggttatggacagagagaaaaaaaacgaaaaagaaagaaagagaagaagaagggaaatatggcgtgtaatggtggaaaaaaagcatgacattagcatgcataggttaatttttaattaataaactttttaaaatttacaactgaaaaacaaatttttttaaaaaatttaaataaccgtattaaaacataaatgtaaaaaaaaaaaaaaaccaattaggcaccaaatgtaaaaaccccttaaaaattacatgacccgtatacttccaactatataaataaggtattcttaaattcgcttcaatttatcgaaatatattattgattgataagttgatcttgcccgatttgttataatttttatttatttatcaaataaaatctatatatttatctaatatatctatatattaataaactaaaaaaactaaaaaaatatgaggcagcattttattattttaggattcttattttttctattttgttttttcttaatttttttaattatttatcttttaagtgatattttacccaaaagaaaaactatatgcaagaataaaataaatataataatatatagaaaccaaataataggtaatcgctttatttatagtaattaataataattaaatgaagcaataagtaaaaataaggtaattaataataatatgttgccggttgcttatggtatcgttgacagtgagaataacgactcctggacgtatttcttacagaagttgagggtatcaattggcgtggttgagaacttagtgtttgtgtcagataggcatcaaagcattgatcatgctgttgaactcgttttttccgaagcagtccactgtgcatgctatcaccacattgttatgaacgtgaacgccaaattcaagactgatgcttttcacaaccaaatatataatgttgcttacgcatggtcgaagactgaatgcgatagagagttcgagaagcttagaaagatgaatccggccattgctg

SEQ ID NO: 244947 - DNA, 1429 bp, Cannabis indica
cctttaaagtcccttgaagccttccattcatcattaaagtataggaggttccctttaagcacaccataatccattttatgaacctagtaggaaaaattcaaacctgctagtaagtgttcaagaaagttcgagtcaaccgtgtcataggtcttacttagatcaatcttgaaagcacatcttggggagacatttttcctatcatagtttttgattagatcttgaaaaattagaatattatgagcaatagatctatgctcactacatcaaaagggactttttatcccactttttacacttcaaaaattataaagtgggataaaacttttgatcccacttttacttttggagccttaaataaaagtttggaacaagggccttatttggaaaacggataaaaacagtgttagaaaggctatttttatgcatttgccaaacgcaacttagcattttaagtgagactttttatcatctaaaaattgggataacaggtcctcacacatttgggctttttaattgttgggtcggctacacatataaaaggaactactaacgtttagggtttttttttattaggttactattatttcctcccacccaatctctctctctctctcctatctctctaagcgactgcccatggtgtatctcattgcaatctgctcttctattctcgtgcatcatcccacgccagcggcctttttctggtgaaagacgagtcaacaaagtttagatccgagctccatgccctctgaaacttccaggtaccattcgtgttctttttcttttatgttcttgagatatctgtgctcctacttcgttttttttttttttttctaaaatgccgatcaactctctctccttctctctttcctcaggtgtgaacgttcgtggtcgacgggttcatggtttttcatggttgacgaagctttgtggttgctatttgtggtcgttgataatgactcacggttgtcaaaggtggttcgccgctattcgtggttgtcgaaggtggtttgtggcttttgttgtattgagtttttaggatttaaatgtgtacttattgtatattttgtcaaaaatattattaaggaaagaaaaatctctgtagtggttcattgcttgttagtattagaatatttttttttatttttttttacctttaatactcgttattataggaaaaccgggataaaaaattacttcttatcccagtttttaaagaaaatctaggattaaaaatagtttttttatcctggtttctccataataaccgggattaaaagtgagtttttatcccgatttttataagagcttttatcccacgtgcatgtatcccagttttcattttagcaaaaactgggataaaatgcccctaaaaatcgggataaaaagcatatttttgtagtagttgcttgatgaaggcaccttggtt

SEQ ID NO: 244948 - DNA, 1130 bp, Cannabis indica
gttttataagtaataattaattactgaaattattaatttatatcaatctctatttgtatcgaaaattcctcgcatgtaattattttcatcatctaaataagaatcttctctctttatcaatttcttcatcaagttttaaagctttctatctcttttaaaaagctaggtagtacgtattttgtacttcattttctttagtacaattctcaaattaatcatttatgttatataatggttcacactcacataacgaacttttcataataataattattaaattaaagtatataaaatctaatattcaattacatttataattattatttttggtaccaaaaaaatagaatacttaactatgtaattaaaataaaatatttgatagcaaaatttaatttactctatgatgccaaatttaagtgttatataattgactagaataacacgacattagctcaaaaataattttaattctaaaaatcaaatgtaaaagtgactttgattcgaagaaattaaagcttttcttcattaatactgacgaaaatatggtcattaataaatctaattatttatactgtatatatatatatatttttataaaaattggttccaaacttcttgacctttggctcaactagtgcaggtttgtaatgggaaattttattttttgcccttaataatatatctcatatcaaattttataccccttattaatttatacaaaacaattccactattttcaaattctacccaaaataccccttacatttaattttcccactctctctttccctctctctgtctttcccactctctctccgacttttcctcttcgtccctgcccaaaaacaaaacaaccgaacaacgaaatcgaacccgacgacgacgaccacgcatacgccgaacccaacaaccctcttcttcccactcgatttttccctctctctctctatctatctcggtcttgaattcgacccgtgctcgtggaaaccaccacgaacagtcgccaacacaggccgtcgccagtacccgtgctcgtccaaacccaacacaggccatcgccaccacaaccacggaccgtcgccaccaccacaaagctcagtcaaaggtaagtttttctttttcaaaaaaaa

SEQ ID NO: 244949 - DNA, 1084 bp, Cannabis indica
cactccataagtgagcattccaatcctgcctacctctcctttctagactcttctaacaaatccatccaaaacaaatagaggtggattagcacttaatacatagcaaacaattgaggatctccgaaattcaatttcatcctcatatcctccaatgtaatcttaacttctggccgagtttcatgctttgaattcttaaaagagttttccaaattcctcacaatactactagatctccatataggaggagttattatattaccttgagcaatggaggagttattaaacttattaatgctacaaattacttttaaaacaatagtgacatgacaaataatatatagaatgttatatgaccccttttgactaaatccaaatccaataatttaaggtaacgtagacaagagagggaacacagccaagtaaaacatggaagttagctatatttaacacgtgaatatgtgcccactccccaaagtacttacaaaacactacatatatacataacaaaataatatataggtaaaagtcacgtacatatatagttcacatattcagtacggaactttattattatttttttcaaaaaagaaaaatccaaataaactaaataacccctcaaaacatacatgtacgtgaactatatatgttcctacatgtacatgtgaactatatagttcacacatgtatgtttatgactaatatctttaattttgtacgaaactttttatcacaatatataagaatgatcaatgatttataattaattacaaatcttttacatttagttacacgttttattgtgactaaaaataatatcttttgtagtgtcaaacaaatatggtcttggataattttacaaatacacaaaaatgacaaaaaaaattcaaaatgtgcggttgtataaaatttttaaacattttttacgatttttatgattttatttataaaaaatacggttttttatgttatatattttttatttattgttattttttattatttatgtgttattttttgttgttgttttagattattactttttttgttagtttttactataatttttttttttattgtttttcgt

SEQ ID NO: 244950 - DNA, 671 bp, Cannabis indica
tggtctcgaatgtgtaaacacaaacatgctgggggtttaggtttcatatgcccgagagatctaaatttagctctgttgggtaagtaaggttagcgccttctcacacatgaatcatctttggttagtcaagtttttaaggctcgctactttccatctggttcatttttaaatgtaaaattaggaagcaatccgagttttgtttggcaaagtgtgtttaaagcccaattcctagttcatgctggtgctcataaaattgttggtgatggttcaacaatctcaattctccatgacccgtggttgccttgtaaggacaactcatatgtttcttcatatcatcctactttgtcacaccaacatgtcaatagtctacttcggttagatgttaaagcttgggatttagagattcttaataattttttatagctcgtgatcgtgacctcatcacttcaatacaattaagctcttcacataattttgactgttggtcttggaagtttgaaaggaatggattctacagtgttaaaagtgcatatcattttctagaagaccttaaaggtgcttggtctgaggacaactatactggtttttggagaaaaaactggaagttaaatatcccaccaaaggttagtaattttctttggcgagcaatttctcgtattttgcctacttgt

SEQ ID NO: 244951 - DNA, 713 bp, Cannabis indica
ataggctatatatgttgcacgtgtagtgtatatatatgagacacttggaagaaataataataataatatataatatcactttctttattcaaagcaaattaaaataaatttttaaatggcttgagacttcaaagtgctataatataatatacctagtcagaaaacacaacatatagtttattaataatataataagaacaatatttgatttgataagtagtggtggtatatagtttaccagaaagtcggagattatgtaagattaattatatgtttatatatatttgaccaaatcaacccaatcattgtgttattaattattactaattgaggtttaaaaataataaacattttaagtaatatcacattctataattattgaggtgtggaattgttcatatattagaaaaaacgtaattattattattattattattattattctcttaacgtggcagatgtttgaagtttgcgtaagagaaaagtaacggagcatttacctaagaagaaggttaatttgactgaaagtgagaaaaaaaaaagaaaacttattagaagaaattcgatcaggcatatttattaatataaataagacttattagtcatatataattattttaaagaagagtgctacaattaactttatttaaataattttttaattgaactctatgcgtaaaaatatatgtcaaaatttatttttttttaatttt

SEQ ID NO: 244952 - DNA, 2720 bp, Cannabis indica
gttgtcaagacaaacaaagttcttattttcctgcaaatgacatggaacactagaaaacacagatgttagtgcaatattattagattcctgttcatcactacttttagagtaagtatcattctaacttttttggtttttgcacattcagattgcatgtatccaaaattatgacattttctgcattgtacacatttttattgttgaatgtaaaatattttgaataaatacaacctctcgatgacttagacatgcctttcttgttgccaacctttgaagaacgagatatagagccactttttgcaaagaaggacatattgcacagaaaatacaagaaaatattaaaggaccacactaacactaagagtttagtgtctcgctctgataccaattaaaaaattatatttttgcaaatgttaataattttctttaataacacgagtaaagaaaaaaaaagaaataacagtgcaaaatttaaaacttgacccaagagaattgtagtggtatcagtgttctttcaaaaacttgtagtcaatggggccacgcccagagaatgaaatcaattagtaaagtatcaatgattacaaaagcaattgacttaaacaaatttagactccctctaatgatttgtcgcaaccctttgtattccaccttgctaatctaatctctgaaacacaccaagtagtgaactcccttcaactattgatgtgtgcttacttcctcccgaagtaaatcttctcccgaagatatatgctcactttctcccgaaatgagacttggaaaagtcttctcatgcacgcgaggacccacacttgttcgaagtttctcttcaatctattttatgaatagtatgagatattcataacaagaaaaccaaaacctagttgaacactctaggtttttagaaattaaacactcttctcacaaggaaagatatgaaaatatgagactagaagagataaaatcgtttggatgctctctaggtcctatttatagaacatagtaaccctaaagaagccacaaaaataatttcccagttgtagaaaactttcttaaaaaatttcctaattttcagtatcaaaatcgagctctacagcagcagataaggaccagaatggaaacttttcaaaatggaccaacataacgaatttggacttcaaacctgcaaaataaaatttatttgatctgttctaataaaggaaaaaccgaaatcatcaattagaaaaagagaaagtcaagttttccaaaattagacaacttttcataagaaaatttcttctcttacaacaagttttctaaaccaaaacagaccatctgtgaaagaatctttccttagaagaaaagagtaattagaggagtaaaattaatgtaataaaaccaatttaaatgctaaataaaaatgtacattaattaaaaatatattttgacaattaaattgccaaaaaaaggcctaacatatttaattgtaataatgagacaaaaatatatagattgaatttaaagtgcaaatcaaccaccatacaaaacatattagtttaaactttatatttttataaataattatataaattatatgatatataaaattatataataaaaatatataaatatatataaaaagaaatccttttaatcggattggtcgtgttagtttagtttaattgggcagattagtattattttcaactcgcccaatataatgatggggtaggttataattttgtcgagttttttgatttgtattttttgtctggttatctctcggtttgatttagacagattattcgggttgagcagttaacaaaaatttatgtacaaccttattatgaatgacgagaagaatgcagtagagcaatgaccactagataatgcatcaacaaaatcaatgaagaaggagctctagagtataaccgtcaatctcgataacaaatccaaatttactggaaaatttagatctaatattttttagaattaatagcgctcataaatataataaattccatattgccattaacaacttattgtttaccaaaaatattaaatcaaaatcataaaccatatataacagaattaattgcctttcttttctctttatattaattccaatccttaattaaaccatgtaatgattttagaatagagtaatatgaaattgtgagcactatagtatcattacggtggtgtttttgcacctactctctatcattacggtggttatggtgttaacagatgaggtgtacttatctatggttaattccttttcttttattattggtttcggcccacaagactaaataagccctaaaagttttaaccctaatataaatggtaacgtctcaaaccctaacacacggcagccattttctttcaaagattcaaacttttcaaatgccttttctctctatctctctaacggcagaagctaaagaaaacctagggttagggttttctttatcttctctttgcagccgcacttagggttagggttcttcaatattatatttttcttcaagcttcttcttttctctactaatggcagcaactaaatggtaaggttttctatcttttcttcttctacttacatcaactaagaattctatgggatcttctaatattttccttttctttctagctacaggttctaaggttataatttttctctttgctcttcttctttacagcctctactcgaaccaagagcaacccaaacaacccacaaagct

SEQ ID NO: 244953 - DNA, 1680 bp, Cannabis indica
ttgacataattttgttagtctaagtgatgatgttgaagaagtgcatccctcaccacatgacaaaagtttgagtcttcaacgaatgatctgcgagcaaggctgaatgagaaaggaaaaaaggctaaaactgaaaagttagacctcacagagacgactgatgaaaccacatcaacgattgtattcacagaagaaaatcgccagacactacaactcaacatttagagcataagattgaagagttagcaaagctcagaagaaagatctctcagaagcaaaatgaaactgtgtctaacatggaggaagaggatataaagccatgtgtgaaaataatcatagaaacttagttattggagcatttcaaaaggccttacatggaattgtacgaagaaataacggactccagggaccatccatccatgtacagtcgaatgatgcatgtggaaaaagctataaatgatgcaaagcgccaatgtttttcattaaccttgtcaaaattcgtggaagaatggtggaaaaggttatctttaggttcaatttgtaattggaagaatttacagacaatgttaaaaaaataattcatagcagtaaaggattttgacttggaagttagttcattgatgaacattaaacaacaataaggataaagccttaagaactacatccagcgcatgatgaatacaactataaagacaaaggttaatgatgatatgaagattgtggctttgacatcactaatagctactggatccttgctatggggagaacttcaaaggaaaatggcaaattctttatttgacttcttatctagagcctaacaattcataaacctagaagattcctttgcccaagcttatggagcacttcctgcacctacaacaactgctcaaactttgtagatgacttctctggctatctttcatttggcaaccacatttacaactcccacagtttaagggccaagtatttccgtgcaaccagctacaaaaatgagtttttttaactttggagcagcaccaactagatacagtgttgttcctagacaaaaaaaaaacaaacaaatggatgttcaagagtaagacacgagtcattcccaaagcaaaagaggttataaaccaccaagaaaaaaagagtctacaaagaaagggaaaacataagtatctagatactctgagcataccagggtagttgatactcacgagaatgtttacaagacctcttgtaatatggtttattataaaagacctccacctatgtacaaaggattagatggccacatggatggaaaccatatatggaggcccacacattgttgtaagcactataaatgcacaaaagagataattgaaagagctggaacaggatgacacatgcaatctattatagtcacctatgcaacctccttgaatgatgaatctcccaatatcattcatagaagacgatgccaagatgtgcacattccacacaacaatccactgatgataaaaactcaaattacaaacaagagactgtctaaagttctcgtagataacggaagctcaataaaaattctcttcaaagaagcttttaaatccataggcttgtggaaacaaacctaacatcttgtccagttcagctccaaggcttcaatggagatataattcagccaataggaaaaatacaacttccaattaaacctaatgg

SEQ ID NO: 244954 - DNA, 909 bp, Cannabis indica
tatttgtgcttgcacaagtggatcaacttagttaggtcgtagactgacttatgtcacattaagatcttttggaactagatcttcggcatagttatttggcttgatggctggtcaaatgttttgctcatccaatccccttttacaattcaggtgattcttgaggtcatgtacggtacctaatcgattgaacactgaagtactaagtggtatattggtctaaccaacctggttgtgaggttggcctgatacctctgtctaagtatagttgtttaattaagtacctcctctcagggggcggtctggcaaaatctagtcatctaccatttggctcaatatttggacttgaggtcttggattggatggctgtccgttgtaagtttttgcagtatgaccagcagcatactaatccatcctagtcaaggggatgctagaatcagtcactagttattgaacggtaacttgctaggcccttttgatcattacgatgacttgcctagaaagattatcaatggttgcttgctgagccctcatgacttccatctcccaattcctccattctatgaattgacatctttgctcgtcaaaggcaaggttgatagccatttggagatcttccttgtcatggtgcaacatgttgttatggccttgcataagtccaagcacaacttgcagattttggagtttagtgtcatctctaactagcctttgagtgttctcgttgccagaagtggtttggtcgactactgtactggtatttctagttttatgtacgcctagtgtgaacccaaccataggggaagtcactccatggtgagtcttttgtgtttctaggagtctgtacacttggatatctgttaccatcaagtcaacttgatcagtttgaactttccccacgagttacaaccatcc

SEQ ID NO: 244955 - DNA, 1115 bp, Cannabis indica
cgtgtcgatctgttttttgactcgtgtctaattatatcaaccctaacccgacccgtaaaaaattgtgtcgtgttcgtgtcgacctactgtgacccgttttgctattattaaagctaaaattgtagagaaaattaataaatttaagctccattaaaaaacttatatacatttatgtatatataatttgttatatatatataataaaaattaaaatatttttaatttcatgttaaagaaaattaaatttaaaattttttaccttaacattgaatcactaaatatatatttttatataattatattattattattattattattattatttcttttttattttattatatttaaaaatcgtgtcaaacgtgtcacattcgtgttaagcgggtcgtgtcgacccgttttcgacccgcatctaattttcaaaaccaaacccgaaaattcgtatcgtgttcgtgttcgtgttcgtgtgccctgtcgaaacccgttttgccacccctatgccaaagtttaggtaaagcctcaagagaatcaaatcaagataaatattgatcatgcattactccttatgactcatcagtttggaatcgatttagtagctcatttgagcgatcttgttaaagcttgtaacatttgttgttgtggcgatgtggaacctcagttggttgaagttatagccatacgggaggctctcaattggatcaaggacaaagaatggttggcattggtacttgagacatattatttagtgggtgttaagaccattcgctgtcaattaatgatgaactctctttttagtttagttgttaatgatagacatttgattaattattagagtagagtcgattttttgtttgtttatggttctactaacaaagtgattcataattttgctaaaacttcttattcttttccaaatcaaatcttcaatgaaaatactgtttttagtgagtttatgtctatattgttaaatgatttgtcttcttaatgaaattctatttccattcaaaaaaaaaaatatttccttctatataaaagtatatttgtattaagaatatttaactcaaatttaacttttatctttctcaactgataaaacaactctaactcatata

SEQ ID NO: 244956 - DNA, 1099 bp, Cannabis indica
attattttattatttttgaacaattaagacaaaataatatagttttttgggatatttatttttgaattaaataaatataattgatattaagtttgaaatttcaattcaagtctataacaatattaagacaaaaattgtcttaacctaaattaaaataataaatgttgttattttaagacaataaaaataaataaagttgtcctaaataaagaatttatttaagaataaattaattaaaattgttttaattaattaaaaggatttaaaaaaatatcttaaataaaaagtttatttaaaaataattaatgaaaattattttaattaatttgaggcttacaacgatcctaaaaaatcataaaaatgccctagcatggatggaaattagttttgtaatttatttttgaatttttacaaaagttgtaaaattagaattacacaattatttcccagttcatcatcattctttatttattatttttttaaataaatgttcagtaatagttgattaataacatgctcatgcattagtgaataaaatgtcatagataaatatttcacacagttatattatcatgcatctcatagtagaaacatgatatattaagattgtcctatagtttatgtgtttaccatttttaaaaccgaaaacatgtaaattggctaagattaattcagaattaacttggtaatttttaattaaccttttaatttaaaatagttttaaattataaattaaagagctaatttaaatttaataattatggcgaaaaattatatataatttgaatcttttattattaattaattaatcataattattaaagtggttaataaacacattgacctaacatagttagtgagagaaggagtacatgtcaacgtaacttacgacctccattattggtcaacaccgaaggagtatagactggcctcgagatgacttttttttcttcccctaaagaaggtatgtgtctatattgttgttcaagattgatctcttgactaaggtaagagggagtaatgtattttagtaaaatacggacccttaaagcgacattactaagttaattcataagatctgaaataatgggttacactc

SEQ ID NO: 244957 - DNA, 1199 bp, Cannabis indica
tttatttctcaaaaggctaaacttaattgggctaaatatggagatgagaattcagcagtctttcatgcttcattgaaaactagaagacttcaaaacaagatattctccattgaagatgagagtgggatctggagagacaatccagaaggtgttcaaaaagcttttctagactattatatgggattgctagggatgaaattgactaacagaagacaggttcatcagtcaattgttaacttgggacctaaactcaatgacatacataaaggaattttatctgctccatactctgctgaggaagtgaaggaggctgtattctctatccctggagacaaggctcctggaccagatggttttggtagtgcgttttatcaggattcgtggcaaacagttggtagagacactgaggaagcagtattatcctttttgaattctgggaagatccttaaagaaataaatgctactaccatcactctcatttccaaatcagtttgtcccaagagtgtagttgatttcaggcctatctcctgctgtaatgttctatataaggttgctaccaaggttatctgcaataggcttaggaaaatccttcctgatcttattgcagaaaaccaaggaggatttgttcatgggagatacatagcacataacatattggtttgccaggatttagtcagattatatggaaggaaaaattgcaagcctagttgcatgatcaagattgatctaaggaaggcatatgatactattgattgggactttttggaggagatgttaactgctttggagtttcctatgcaattcatacacttaattatgaattgcattaggactcctaagttttctcttctccttaatggctccatgtgtgggttttttgaagcaaaaagagggttacgacaaggagatcccatgtcccctcttctttttgttcttggcatggaatatttgtctcggatatttaggaagattggggaatggccaggtttcaagttccatgatagatgttcatctctcaaattgaaccacctctgctttgctgatgatttgttggtcttttgccatggggatttcatttcaacaatgcttatgcttaaaggtctaaagctattctcttcaacatccggtttggaaccaaatgttcagaagacttcagtgtattgctctgggatgcctgaattggaggtgcaaaggatttt

SEQ ID NO: 244958 - DNA, 686 bp, Cannabis indica
tctaatataatttaatataataattttttaaccaattataaaaatgacaagtttagaaaaaactaatctaatagctaacatatacgtttaatatataagtaataatatagattagactccaataaaaaaaaaaaataaaaagagagattagctaggtctggagtaatcaccactctcacttttgcaagtattagaatttatatgattgagtgtatattaaaagaacatgttttattcatttatgtgttcatcactttacttagtaattaatatactaaaatgacatccatcaagtttgcttattagataaattaaaaagtcattagaatgttacacttactgatataattttttatttttcactcttgtttttccaagctatacttaataataaatcttattaacaaacttttattgagaatatatatcacaaaataaattggaaaaatgtacaataatgataataacagaataacaataaaatagttctaaacatgtggattcttgcaggcttttgcattctattattactattattattattattaattatacatgatatataattagtttttaagtttgtttttttataaaagaattttgaagtgttaattaaccaggtaaataatatatatatgtataatattgaggagcagaatcggaacggtagaaccttctagtatgta

SEQ ID NO: 244959 - DNA, 1793 bp, Cannabis indica
aagaaaattttgcacagtcctcacaatccaactggcaaagttttcaccaaagttgaacttgaggttattgctggagaatgttgcagtagggattgccttgctataacagatgaagtatggtagtgatacaaacattcaagttttagtaagctttgtagtttccctaaacttatttcgagtaagaactaactgtcactaagatgacttcttataatataagaagacattccctgtgtccatttttaatttgaaccctttggatgtgtttccaggtttatgagtatgttacattcgacaataacaaacacacatctcttgcttcactttctggaatgaaagaccggactatcatcacatcttccttgtccaaatcctttagtgtaacaggttaagtgtgttaataattatctttgtgaaaactattgcagccttatggatgattacttaaagctttattgtattttcaatcaggttggagggttggatgggctatagccccacctttgattgcctcagcaattaaaaacattcatgtcaaaatcacggattccgctccagcaccattccaagaggctgccttgactgctttaacaaccccacaagaatactttgaattgctgcaaaaagtaataaggagaaataaacaccaaaaactcatactacaacatgcatttattcattaccttacttacaaattgacactgaaaataaacctattgattctcaggattatgagtacaaaagagatttcatggtcaagttgcttgaagggattggttttcagattgcatttaagcctcagggctctttcttcttatttgcagagcttcctgaagatttcccatttactgatgtattctatcttgtttacttgtcatgtgtaccttctaatggttctatgtattgagttaaagtaaagtatcaccttttattatgagtaatatctgaaatttttcgcttaacagatggaatttgtaaagaagatgatagagaaggtaggagtggtggctgtgccagggcgtggattttttcacgctaacatgtatttggagaagctttgtgaggtggattataggtaccagaatagatacataaggtttgcattttgtaagagtgatcaaactttggcctctgctgcacaaagacttggatccatcaaattttgaattatgcgcatggttttatcatgacactgttagacatttatatggatgatatgaaacatatatgatcatgtatgaaatgcgaataaattgaacatatatgcattaaaagattgaaatacccccagccattgattctttgagctttaattctacacaaactttgaatctgcaaaagaaaaagaaattgtttagtgtgggtaatcgggcttccaagtctctctactctctttagatagatttgctcggggactgaaactctatatttatataggtgagatcttccatcaaagtctctactacaattaattatcataatattttgacaattaatgaggatatgtaatttgggcaactaaaaaaattaaattagtaactaaataatgttgacaatatatagaatattttgtcaattaaattaaatattgacttttaataaaatcaattagaattaatataattaataatttcaatattagaaaatattcttacatactgccacttggtcgacattatattaatgtacgactcaagcctaacgattatccttgctaaataacaaacgtaaaatcatggcaataggtcctcattatatggcgagtattatcttccatgtattacgatatattt

SEQ ID NO: 244960 - DNA, 828 bp, Cannabis indica
ttttttagtatttttcaaaataaaatactatatttttaaataaaaagtccaataattttttttctttcttaagatccaaaactaattatatgtgtattttgtgagtaaataatttttgattagtgttattgttattattattattgtagattatgagtaatggaaggctgagtagtggtgaacacagagttgtgacaaatcaaaaggttgggagaacaagtgtggggagcttcatactgccttctatgaattgtcaaattaagcctatcatcaatgatgatgataatgataataataataataatagattactctttaaaccaatcatattcaaagatttgttggctaattatgtggctgatactaaagacacaaaaccaccacttgatcgttataaaattacttcaactaataataataatattacataattattattagctacacagatttcttctctttttattggtttgatgatttggtttgtaataatatacaattaatctttgattataataagatggtgatgaattaatgttcaaccaatattcaacatatatattagcaacaattatcaacttgattaattccagagattaaaacaagaatctgataacaaagaccaatatttattcatattgtttgttacactaagaaatagtgtagtaatatattaataatttacaaaagggtttgaaggactataaatatgtaattgtatagctattaatgttggatacagactataaaataaaattttagttcaattaaaagattaatactatttcgaagagtgcattctaaaaatttatctatctcgaagaaatt

SEQ ID NO: 244961 - DNA, 1953 bp, Cannabis indica
ctaacttagttgaggagttctcattgtcaataatttggcgccatctgtgggaacgacaaactttggcaaagcggtttctctacacataaccatttcaaaatccctagacgctcacactgcctccgagatgttgagattccccttgacggtaatcagttggatgccgtaggaaaagatccacctccccccattgctagaggggaaggtgttgataatcacatgcttcagtcactagaagaggatgtgaacatccatgagcctccaccagaacaagaaagttctcgccctgtggaagctctgactggcaatcaacgcgacagagcaacaactttgataaccattgtaggagaagacatgtcatagaggcagagaatccctccacttatcagacatccaccacccctgacaccgaaagatcccgagactacacgtccaagggcaaggaaggaaaatgagtctactttgtcacatccagctctcgcacccaagtgaacaatgaagaaatcaacgagctgaagatggataacttacgattgtcagagaccatggaaaatatgcaaaaggtattggatgaactcttaaaggggcaatctgatgcacccttattcaaacatagggagcctagggtcaccgagagaggtaagggcaagctagaggatgaaggactgtcaaaatactcgaccagtaacacaccggaggcatcaccgtcaaggaaaaatcctagagaaatctgaatccatcttcacaaaaaaataaggccaatttgaaattagtcctaggagacttaagggagaaactcaacaaaaaaacaactattaagaagagagcgccgatgttatccacgcatcaccacaagggaggtttgagacgcactccacaagacctgcaagaaaatttgaacaagaggagacaagagcttgataaagagatggaaaatctctgccgaaggatagccacaactgcattagaggagggtagcttggacaaagatgagtttgatgatgagttgccattttcaagagaaatctagtccaaatagctacccctctatttcaaagagcctaacatatcactgtacaaaagtatcactgatccaaagtaccacctggatgctttcattgaaattatgaaaatgaatcacgagcaaggcaacgtgtaagggctttgcggtgacgctttagggtgcggcatacaaatggttcaagagattggcccctgggtcaataactttgtggagacaatttagcgaggagttcgtatcccaacatcgtgcttcccgagattacgtcatccctaggataagcctagacaacatcaagcaaggggaaactgaaagcttgaatagctacatccagcgcgttaatgctgaagcagcaaaggtggggaggttatctaaagatgaccataaaatgaccattgtcgccgcggttagaccaaaaagtaaactttggaacaacatgctcaagagagagctagatgaccttgaagacttctatgaaagagccaacatgtacatcttggtggaggacgtgcatgcgaacttaggagtgggaaaagacgaacaacccaagaagctctaggttgaagggttgcataaaaagaggggattcagatacaaagatgataggaaagacaagaaagccgaaagagagttagagccactgcctcacgattatactcactacacgaagttaacccactcaagagagcacatcttccttactaatgagcactgagtacccttcaaaaggccactgcccttgaaaaagaaagatccagaagggacctaaacaagtactgctgcttccacaaagatgttggacacctcacggaggagtgcaagctgttggaaattattttaccaggatcttagatctaatcacaagtatgttgattaacaccctaaatatgaactttctaaaacgatgaaatattaaacacatataaagttta

SEQ ID NO: 244962 - DNA, 788 bp, Cannabis indica
tttccttaattagaaatattctaataataagctctataatatgtctacattatgatcaatagcaagcaacaaagttttttactactaaattgttcctaagaatgcaacacttaatagggcttggaaattattcacaaacaaagaaaaaagaaaagttaaaagcaaaatttctagaaatgtatgttattgatttggacatagcccctgagttaaattctatgataggctcaacatatatatcaacataaaaggaccgattcatcaaaaactagaaaagggaattttcattaaaccaaatttgcatgacagactcaactcaacacacaatcaatatttcaaatattttattaaactatcagattcctttcatgccatacatagtttaaatatttggatcttatcattctcaagctttttttcacaaactttccattagcaaacaaacccatgagttccatgagttagattgaaaaaaataatgaacttgttctaatttctactcataattcatagattctataacatgcccaattaaccaaatccaacaaacataaaacaccactaatacataacgattaaagaaaatgatgatgaaatgggtactgacgaactagaatttataagctctctccaattaacagaagagatatttcaaggtctggacacataaaatgcatacgggtgaatctctttttctgttatagctaatcaatacaaaaagagaacagaaccacagaagagaagaggattaatgccacaaaaatattcaggaaatgtattcacctaat

SEQ ID NO: 244963 - DNA, 990 bp, Cannabis indica
ttggttccccttgaacatactccatgtacatcgcataaaatcccagtattatgcggtgactatttggagttaactagaagggagaaacgtcgtaatgtctatggatagccttcacaaaagaatgaaaaggtagtgtcacctcacatcggaggataggaattgagaccaccacatcttacgtagggatgatcggaggatttgtgaagggaaggtgaggtcactgggatgttgaaggccttaaggtgcttatgggaaccaaattcagccgtgcaaaagtatgctagtctgattttgtgactcccgagaccagatcctcgcatgaaaacggttcatttagtcgagtgttatcgattaattatgtctcacttccttcaaaattcccctcttccttgaaatcgtgatcaagtacctcaaaatcctcacccatttcttcaacttcggtgtcaggggcatgtgtcgagtgaataagataatcctgaggtaacaccgtggactcactgtcgtgtatttcaaccgttattggttcagcaagttcttgaaccatccaatccatctcatcaatagatagcgagccctgacaaattttgacagtaggggcttcgtcctcaaatatcgaggtggggatgaagctgttgcttctttctatctcatcagcgaaggcacctcctctagaatcgagcctctggctatccgacaaatcactcatctaaaagatagaagatcttttcagtatggtgaaagtgaaaatttaaacaaagtgccttcacccgtataaagttcagaacacaagaaaaataaaagaactgacctaacatctcaagaaatggctgggcgtatcgcagtaacataagggccatgtcgctacatgaaaattaagtactgcaatgcacccaccattttgagtatacagtcacttctagcgatagtaaatcacaaagttaaaactaactatgtgcctcaagaggctgggtgtcctagtatcctaagggg

SEQ ID NO: 244964 - DNA, 537 bp, Cannabis indica
tttttttggttttttaatttttttttagtgtaactctatttagttataacctcccaattagaatataatttacttggtcccaagtgtattcttgaatagaggttctactgtactttagacagcacaaattcggtaattattagattgggttgaatcatgtggacccaccccaacgaaattaagcaatttctcacttaaatgatatagtgacacattttaattgggtatatggaaggtgctgactggtgaccgtgctatactatcggtcggtcttagtgggttttggtcttgtcgcaacgacgtagttttgaagtcaaatcctctctctttttctatttgagttttcgggaagagtgaaccagaatcgggaacggagctggtccggcagccggacccggttttgttcagagaaacatagtactcttgtttcgttaaagtacggttgaactgtagttgatttgattcactctaccaccggacaccgtccgtactttgtcaacttcaaatgattgtcacttgttccctggagcagttcgc

SEQ ID NO: 244965 - DNA, 996 bp, Cannabis indica
acagttttatagaacataattttcaaaaatattattacttttctaattgaaaaaaaaattgattaaaaaagtgttagtacacaccttaagttaatttattgtatcaaatttaaatagtaaactttaaactttttgttatatattagatattaaatattaatttttgttagaaaaatatatttattattatgcttttttgtggttgaattattaattattatgttatgtagtagtggtattctataggaagtggcataatagtagtgtagtagtggaaaatgagtttgctaattgttagttcaaagcctacttcagcatcactctgttagtggggtgcagtttgttttcggaaaacgaatgtagttgctcatgtattagtcaattatgctttaacaaataaagttagtgctatgtagattgaggtttctctcccttgtgctcgttacgagattgagcgtgacttaccatttccttataatcgtttattgtttaatgaattgtctgttcctaaaaaaaaaaaaaatgttagttatcctatttcttaggatttatctgttggttattagctctatataaagagcaaggtattgtactgaagcggtgggaaaaaaaatacaataaagtactattagtctcttgtatcctaggtagtgtgttatatacataaactattttacaattttgttttatgaaagttaaaattaaattataataagaaagtatacatcacaattagttaatggtaatgaaaagaaaaattaatctaaagtaaccaatttaatttgtatttttacagattgtattgaattaattttgattaaaagtgccgattagatgcactatgatcaattttgcagattcataattttgtatcctataaattggacacaatatgaaaaaatcttttgtaaaacacatccatccatccatccggggagagtgatcgagggacatggacataaagatctttacgagacaatcaacaactaaattcat

SEQ ID NO: 244966 - DNA, 683 bp, Cannabis indica
caagtactctgaccttgaagaggtagtggctttcatatattttgattctaattaccatatacttattattttaacttaaatataagaaaaaaaaaaaaaaaaaaactttacatgataagctatacaatcacatgctttaccaagatctcaaattaaaactatgaagagaatataatgggaacatgataaatttggtatggtatcaaaataacagtggacttgattggcttctcatcattccatttttggggctaatgagaaccaacctaaaatatcgtttactctatactatgattcaaggttggacttgtcacgtgtgtggtgatgatgagttgatcagttttgttgactgagtcacaagattagtgtcctcgtgaatatgttgttggaaaatacaagaaatattttatgctgtgggcgaactgtatagaagtaatgcaaaatgcactagaaatttcattgaagtggagtagtcaatttttggtgcaactacgttaaacagatcaaacttaaatacttggagcaaatatttttgccaattgcttgttacttgttatatgaaaaaaaaatcaaatatgtgcaaatggccaaaatggtttcttctatagtttcagtcaatttttaattcttaagaatatgacgtatccattacttaaagactatattaatggaataaagatagg

SEQ ID NO: 244967 - DNA, 1000 bp, Cannabis indica
aaaaaaaaacaaaaaaaaaagtgttgaatacttaccttagtgtacaattgactccaactcacaactaattcagccaagaagaagatgaattgtaagagaatccttaggctgcagctcccctagggttcggccaagcataagaagcaaaaccaccaatgcttctaacaaagctaaccccctttttactaaccaaattttctattttctttttaaaagcagccactaatataaatatataatatctaaatcataaagaccattatacccctttaatcttaaaataaacctagggtattttagtaattctagctaatccgccacaccgattttctaaaaattaatctagaatatttccaaaataatccatccctaaatgtcgtgacatttcggatcacaccgtccagttccacagtcaccaagcccaaaaagattttatttcagaaatggtatccatgatactcacatattctaaaataatctccgtaattaattaattacgctttacttaatcatttaataaattatagttgtgtacaatcaactataatattgtagctaggttgtggatttaattagcaaggattcattttacaaattgaagtgaagtttgtttggtggtttatcaaaagaggtgtgtacaatcactcatttctttacttaacgacataatatttttcatcttagaatagtttgaatatcttaaatattcatccatagtgaagtaggttctcaaaaatttgtgtactgcggagatataagaaggaaacttattgtgtgatatttgtagatataataggtgttgggattgtaccctaaataaaactctatttcaattgaatttttaccattcaattatcaataaagaaacagaagtattttcatcacttacttagtatgtcatttggttcatgtgatcatttatatgtttatttgatttagaaattcttttaaatccttatcacgttgatgttcttgtttattgtgtcgtcagcacagtgga

SEQ ID NO: 244968 - DNA, 1403 bp, Cannabis indica
aaattgataatttcataattaaagctacaaaattccttgaagacacacaaaggcatgatggttcatggtaattatataatctttcttttttcatctacattactattaatatacagatgatatttttagggtaaatattattttggatcttgtgttttacaaaagttatagattggacattttggaccttgtattttttaaaatgatataaatagaaccctgaactaattttttgtcaaaataaaacttaataattaatctaacctataggtattataataaaactagttaaattttcggcatctattcgtgttaagaattatcgtcaagttgcttaaattaaaaaaaaaattatcgaaaattaagctcaggatcttatttataatattttaaaaaaatacaatgtctattttgtcatttaacaaaatagatggttcaatctgtaatttttgcaaaataatacatggtctaaaatgatatttatcttattatttagttggtatgatttcatatacatgtatatttgaaggtatggaaaatggggatgttgctttacatatggtgcatggtttggtcttgttggattagcatatgctggcaagacttcaatacagtgaatcaatacgcaaaggagtcaaatttctactaagaatcaaaaatgaggatggtggttggggtgaaagttatctttcatgcctaacatggtaatcatgtcaattttttttaatcttgttcatcttattatttggcttatataaagaagtaaatattatatatgatcatgatgtaggaatatgtaggtcttgaaggaaatcgttcaaatttggtacatactgcttgggcaatgatgggtttgattcatgctggtcaacaagaaagagatccaattcctcttcataaggctgcaaaattgttaattaattcccaaatggaagatggggattttccacagcaagaaatggttggagcttttttgaggaattgtatgctacattatgctgcatatagaaatatattcccactttgggctcttgctgaatatcgtaaaagagttttgatatgatatacgtaccttaaatatgtgttgtagttgtaatgaccaaaattctagtgggtttatattacacttagtagtagttactaagtcttaattaattgaggttttggtaatttaataaatgatatgtatagtaattttataaaataataataaaaagaatcctttgttgttgtagtttaattttttatacttcttaggtcaagtaattaaagatatatatattataaatattataacatctcagtctaaaaatctctcaatctaattattttatttatttatttattattaattaattaagaaataaaaagtatttataatttctataactattttatttttt

SEQ ID NO: 244969 - DNA, 595 bp, Cannabis indica
tacttaagtttcttgtagtgagattaattaaagttgatatgattatattatttgcttcaatattaattcctgatggaagacccaaaattcagaatatataaatggtgttattctctatattaatttctatttgacaccaaaaatgtattaattaattattggagaaactttcatctcaaaattaattagttataattaagtatatatgaagtaatattctatgtttttataaatataaatataaaatacactccttttaatattcttttaatattgatacgtgtgagacattaacatagatttcttgctatgcatgtatgattcatttttgggatgatcaatatatacatggtatatagtttttgcaatgaattataaacgaatcagcttctaatagtgtcccctagaaaatctaatagcgactaatttgacctacgcctaggaatgaaatataaaaagaaagaaatatatatgacgctatacaaataaaatgtccagtgggctgctaattaatatatatatatatatatgatatataaatatatatatcatcttcgtattgacaatggctagcttgttgattttattaatcttt

SEQ ID NO: 244970 - DNA, 500 bp, Cannabis indica
tttggaaggagactttatcaaagaattcatcataataatggtagtagttgaaagaaaagcacataatgacaaaaggaaaaagtagcaataggaggagcacttcttacttcctacaactcagtcactagtcactactgatgcatattgttaattaatattttgttcttttaatctcaatctcaataataatttatagtcgttttgccatcaaatcgttatacacaatataatttattgttatttatgtgacatataagattattttactaataaatctttttattaagttagtttgttaataaagaacttcatagaaactatttctagacagcactcggtttgatgattcaacataaaagtccctatataaataaaagaataaaagaatttaagtgactttttacactattttttttttctgtttttcatattttgtgaggcattcaaaatttgtgaaaagaaaaattataatttatatatttaattattatattaataaa

SEQ ID NO: 244971 - DNA, 829 bp, Cannabis indica
tatattttaatttaataatataacgtcatatatcagtataatatcaaatactttaatatacttaatggcaacgttcacaccatgcttaagtattaaattcaattagtcaaagacgttaagctgtaacttgagtgatagtctaaactatgatttttcattttctttgtttcattctgaataagtgagctacctataatatattctttaagaaaaagaaaatcagctacctagctatctaattaatatatataaattaaaactgcatattttacctaaaacaattaattaattttgtactcgtatattatcaaagaataattaatcaaaaaattaatatagacaatataattattgtaactcacgtcatttccattaagtatagatctaaatgcatgtaattagataatgcttgaggtattaaaaatgattttatatatagtcatttaaaaaaggagaattaccttatatactatttttttaacctttttttttaaaaaaaatttacggtttgagtttccaaagtggttgcagcgctagttgcaataggggtttttgtacgattttttgttgcagcgctagttgcaataggagattctatgtagaattccgtaaaaatgcaagaaaaaaaaaattgttttgaagtgcaaaaatgaaaaggcccatttttttaatggggaattttcataaatatgggaacataagggtatagtttacttttttatggcataaataaataacacaaaagggttatgaatttttatttttattttttttacatttatatggtttttttatgacatttttgtaaaaaaagtagaaaatcccatat

SEQ ID NO: 244972 - DNA, 579 bp, Cannabis indica
tatatatttgtctttataataagttcaaaactgtgcataaaaccagttaaaacactcttaactagtctcaagaaaaaaagaatcttaaagtgcaaaaactgagttgggacacaaggatttaacgagttcgagcctagtgcaatgctctacatctcggggaacaaaatctcttcatccttattaatcaccagctagaattacagagaaagtaatggagttcaacaagaactcaatcgagttacaagaatttctctcaagtcttttactcacaagtgtttaacagaaatgaattgactgactgcattacaagataagtgaaggtcttttatagataatagatagtagcttatctaaaaaacatagcattatcaacagactcaaactcaaaatcacagtttcagaagaaattttcagttcagaactcagaaagagtgtcatcatacctatactggcattgaggcgcatctcggcttaatagcgttcgccccgcttctaacatgtgatttactacaaggaaaagattaaaaatcagacaaagaagatactgtcaatactgaagactcaagagggtaatgtttc

SEQ ID NO: 244973 - DNA, 1059 bp, Cannabis indica
ttgttaagaatttttgctaaaatatgaccgttagtagttacataatcatcttctttctattaggttctttctttatctttaaaaaatataatttttattttttgaactttatctaatagaaattaaaaatttacaaactcatatttttttttaaaaaaataataataattagaaaattaatataaatataaaaaaaaattaaaaaaatagaagttaaattaaaaatatattatgtttacctaaataaatttaaatttttggagaaagaaataaactcaaacttgtttccgtagaatttaatttttaatactttttttatatctaaataaattttgaaataaaaataatttatcttttaaatcgcttaattagttttaaaattttgatttctttttaatttttttaatcattcaaaacatttgttattaagatctaaattaatttttttagatttaccaacaaaaaatgtttaatctttcttatgtttatttggagtgtgtacgatgtgatagttatcaaagtttataggacaaagttgttaatttataaaaatattaaacggaataatgagaaagaacctaacggaatatgtaaatttctataaatgtaaaagttgagggagaatgtttagcatattttaaaaggcatgattaaatagtgtcaaaagttaagatgacaaaattactaattattttaaataaaaacatagattattatagggaagactactgagtagtggcatattctaaagcatatacaatgaacagaaaagataaagatgaaacaagaattttaagctaccagttctcaagcttagtttttgtcaacattttacttctctataaatatcgcactatgagcttctcccgagttggaccgttagaatttgtgccacaaacacaacatattgaactgagatattacaacttaaaattcgattagaaggtgaaataataaaagggagtatatttatgtataagtaaattactttatattttctaaatctatctaattaattttatctctaggcgtggctccgtagactagtaacaatctgca

SEQ ID NO: 244974 - DNA, 1510 bp, Cannabis indica
gttttttttttgaagaacttagtaaaattaggtaactatacatagaaataataaaataaaataatatttttttttctaactttaaaaaaattattacaccgctaatttagtcttaaaaattatactattgcgattttaatgttgaatataatcattttgagatgtgaaaactatatattttcttatcttctttagaattaaagtaattatttaattgcttacaatactaattatatactcattaatttttttttgcaagatatatactcattaattaaattgcaataatgtatacaaataattatagaagtaaaaattttataaacaagtaattggtgtataggattaacttactagttaaaatatcattagtccccactaaaaattccaccatcacaatattttttaaatcatttttgtgctgtgtgtagaaaaaataacatcatagttacttctaagtgtcattttagttatcacaagcaactaaatagttgatttattagttgcatattttttatatgtcaaaatgtctatattcaagagtagattatttctctatttagttaaccaaaaaataactaaatttttaaattaaacaaaatttaatatacaaaccaaattcaaaggttgctaaaatatacttttaattcaaaagatttattaacttaataactaatttatatattaagatgtttacgaataattttttaaagtaattaaaacgaattttggataatatgatataaaaataaagaaaccatttttttttaaaaataaatacataaaaaatggataacaaaatgtgtagttttaatatgttgaatgactacaaagtaattttttgatagcatgataatttgtttattagttatgaaaggttactaaaatgtactttaaataatataagatacataatataatttaaatgtaactaatttttaaaataaattttagaaataactaaaatgtatggcaaataatataaacataaaataaacttttataattgatcaaaaattagtgacggtgtatatactatataatttttttataaataaattatgtatgataactttgtgaattatataagtatctttgttattatatattgtaatttattagtttctaagtttgaaaagaatacaaaaatcaaacaatttataaatttaagcttcaattaattaattaaaataaaattgcttgtatagatgtaattatattattttattgatataataagtaatcaattggtttattttaattttgaaaacaatgataaaatatatactttctacattttaaaatgatgaccttaaaaagcagattatgaaagtatcatttttttagctcaaataataaataatatggtcagaattattttttgaagttttaagaagtgagaaagaaagaaaaaaaaatctggatggcttgttaagataacaaacaaacactaaactcagggatgtaattaatttcatttaagtataaaatagttgacgtgttactgtaa

SEQ ID NO: 244975 - DNA, 1268 bp, Cannabis indica
ttttaaatcttctaatataattatcattatatttgttgatttgaattctctcagtttgacacgtgtccccatctgaagtgccagccaaatttcaagtataacaagaagatttacaccaatgagaacccgactgatatgttcaccaagagtgtaacaagagtttatgcatttcttaaacttgctaagcattgaagagtactaaaagtcctctattttcaaaggaacaacagatggaacagtcaaaggatatcttttaccaagtgattaaaataggtgagtttgtgagaaattttaataacttggtgtaatgctactgttaatcttatttagtgacatattagatgttgtgggtttgtctagtcagctcctgatgagttagttgttttttagttaactaactagggcacccctcttattgagttgcatatataaagttttgtgtactatttctttaggtgaagatctagagaggaattgaaatgattattacatttataatgagtgaggagggttgttaaagaggatgtgtgtgtttgatcacatctctctcaagtgaattgatttgtaaggtgcaagacactattgttgatgagttcaacttttgtattcctccattattgaagatcgaataaaacttgaccaaagggaaattcctcccggggattagttaacacaaaaagagtgatgaacctcgttatatcttgtctctattttatttagtttattccatatttattttctaattttgtgattgtttgattcaaccattctaattcttcaattcttattttgtttgattcttgataggtattaattcaccacagataaaataatatgaataagacacgtaaaaaagaaaataacatgaataagaagaaaaaataaattaagattatatttattaaaataaagtatctttataaatttttagggtagaaataaaattcactttttcttttcaataatctcattactttcaggattattcgatggaccaaataattaagaaaaagaaaaaaagaaaatacattcctaaaattcataagggaaattatcctatgtattattttttaactttttttttttctaatttacgtttgggttgctctagtgatttctccagtggtttctacatgggttgtaatacaaattttggttgcgatttaggttgctccgttagttactatagggattttcatgtagaatttcgtaaatgatatatgttgggattaaactcacttgacctgtcaagtcagtatgcccatcta

SEQ ID NO: 244976 - DNA, 1857 bp, Cannabis indica
cttgttgttttataagctttgtttttaaatgtctcacaaccgctacattttaatttaatcttaatggtaatgtctttggcaatgttattcccacaaggggtatttgtcaaggcgatcttttttctctttctttttgctgtgttttgaagatttttcctcccttattcatcaacaagaaagaagacatgctctcaatgggtacaaagtagctaggactgcccctattattttccatctcttcttcatggataatagcattctcttttgtcatgcttctattaattcttacaatgctatcaaggaggttctccatctttatgaaaaagccacgggacaacaagtgaacctccaaaaaatttctttatacttctccccaaacacgactatcagggatcaaaaccttatttcgaattacataggtatcccagttaaagcctctttaagaaatgcttggggcttccttaacattttggccgttctaagaaacaagtcttccaatatctcaaagataaggtttggaatcaccttagtaactggaaacacaaggttttttcgaaaggtggcaaagaggttttggtcaaatcggtcattcaagtaattcctacttacataatggcttgcttttgtatctcggtagctacttgtcattccttggagtccatcatggctaatttttggtgggatttcaatgctaacaatagacctaaggtccatggcatagctgacaaaaactttgtaagtcaagaaaggatggcagattaggtttttgatcattattcattttaaccaagcaatgcttgctaagcaagcttggcgaattcttaagcatccaaactctctcgtggctagagtctttgcagccagataccaccctcgaacccctttcaccaactgctcccttggccactccccctcttttgtttgacgtagcattcaccgaagaaaagaattgctgcataaaggtctcatcacaaaaataggtaatggacaaaacacatccccaactcatgactgttggattccctctttcaaccaagtccctccaaaccatcctatccctagccttgttgcttcttttataaaggacaacatgacttgggatatcaatcgtctcaaccagagttatcctccccatattgttcaagatagtctttccattcctctccctctattgcctactgatgacaaccttatttggagattcacgaaatcgggaacttactcgatcaaaactggataccacttaagctattcaaccagttcccctcctgacatccctccgtcctcatccccctctccttagttgaaatccctttggcatctcaatctctcctctaaactaaaacactttgcgtatagagcctccacatccaccctaccaaccaacaagaaccttgcctatagaaaaattacctagtcccccttgtgtgtccactgtggtagagatgttgaatcggtttcacatgccctattcttttgcaagtaagttagaagagtttggaaatgtgcaattttctatccttacttatctttttcaaatactgtctcttcatgaaattatttttaatatttttactaacatgaaaaaagaagaggtgaaatttttctttgtatagcttggtttgtttggcataacaggaacaaggagattaagaaactgacaatggatcaaactcatgctatcctcaacctcgctgaaagttacttggccgaatataaagcaacagttgttgttcacaatgcaccacttccagaagccaagcctgttgccacaatcagctggacacctcctccaccaaggcctcctcaagctgaatatagatgtggcttcctcgaagaaccaccttaaagtcggtc

SEQ ID NO: 244977 - DNA, 1295 bp, Cannabis indica
gattacccatggtagtcaatttcctttgcagatcagaacttttgggattgaagctcaagaatcaatgactggaggtatttcgatccttagattatatcgtgtctatattggttaattccgcatgttatacacacacacatatagttcagtttatacatataaatatctaacatctattgcattcactctctgaagaattttctttggaataattatcaataaggcccagtaagaatatattgacataagcactgagtttactaaagaaaagagatgtaatttgcatgaatctctacatattgaatttgagcaacttttcattctccactagctctttattaattggattttgctgcaaaaccatttggcactgcaatagattgtgatatgcacgagcttctacagcctatatatctctaaaatttactcgattaattctctttaactcgttcttcctttgctttaacttttggaccatctaaaacattgaagaacctgctatcttcttcttccaaatctccactaaattggtatgaaacttaaggtcccgcttaggggttggcaacatctaatcaaatccaattgaaccgaactaatccaatccaagccaattacaaaaaaattggatattcaattacaatttgattgagtgttaaaaattagattctaattagattggatcagttatgggatgtcattctcaaaatttaattcaaaaatgatcaaatccaattacatttatatacataaaaaaataatttatattgatttatgtataataaaaaatacatattttaattatatatttactggattacttttggtgtgtgtgtgtgttgaatttgtaacatttgcctattttgtttttttatttcatcatgatgttttgttctattttattattggtaatattgttgttttagtcatttcaaaaatttggttgcattgcacttgtaataatgatatttttatggagtattaaacttaaataaatggtgatatttaatttttatgtacttttcttcatatttttaatttaatattaaaaattagatgtgtaattggatatcctattaaaaaattaatccaattaataattggatcagattggattagattttgaggtctaattggatcagatcagatgataagttttcaaatccaattactaattggactggatcagatgaggagaaaaatgttgcattgaattggatgcccaaccctagtcttgctgccacattctgaagtacctaaaaggtttcctgcccatgcttatctagggtaaagcgtaa

SEQ ID NO: 244978 - DNA, 1445 bp, Cannabis indica
ccaatccaaaaaaaagcaaaaagagtcacttgtgaatagaatatataagaggaacgtgctattcttccgattgctaatgtcaattgattttgaaataaacctcattcatcttattctaaattctaaaagcttctcttcatgaagtctatccataactctttttctttagttattattatggaataaacaatcatacacaaaaaaataccatttatacttagtatgtagaagaaaaagaaatgatatacttaccaagaaccatcatccctttgtgtgtcttcaaggaattttgtagctttaattatgaaattttgaatttcttttgttctatgttgtggatataatttgttgaataaaactaaaccctgaattgttgctgaagtgcattctacatattcatgctcaatcacaatgtccgcgaaaaattcagttggattaaatatctgaaattaaattgtagtattaaaaaaaagaaggttaaatgtgatctagaaaatttgtgattaagaatatataatatatatatatatatatatatatcttattattttatttattttcttacttccatccacttttgtcctcttactggctcccaagctggtacaccgccattcttactctgcatttatcaatataaatgagattagtttaatagtttattataattttatattagtggtaggatcatgaactaattttgtgacaattgttagtaaatcacacattatctgagcttcatatcttatatataaatatgagctaatgtgatagaatcatactttacattatgcaactcacaattccaaaatgatatatatcaaagtctaaactcaagcttttcgtgaccactatttagtcataatataatttttttgtgattaaatgtaacttttagtcacaataaaaaattacttgtgactaaaacataatatttagatacaaactgttattaatttaattttagtcacaataagtattgcgactaaaaacgtacaacagaattgtaatttttgtgacaaatatctttagttacggacattttagtcacaatattagaatgatgatttataattagtcacaactttttatatttagtcacaagttttattgtaactaaaagtaatattttttgtagtgactctaacaagcatatatatagtaagtaaaaaataagtcatctaaaattagtgagtaaaaataactacagtcttataaaaagatgtcagagagttccgcttttataattaatattataggctactctactcatacatatatatgttgccatgatatagtataataatttataattagaaagtttgacatgttacagaaaatattacctgtaaagagagtataacattaacagaatcatacattctctcaagattaatcctctcaccaactatattgttggcgatcaatgaaagacagcaagcaac

SEQ ID NO: 244979 - DNA, 1086 bp, Cannabis indica
ataaacaagcgctgtaattcccccaccattttcttcatgatccatagtcctttaacgattcgattcacgatcttgaacagttgatttctaaatgcatcgtcaccgttaacgaatcggtaaagaagtgaaccaggagagataggatcgtctgtggcgaagtaaaacacagcgccgacaattttcccctcacgatagctgccgcagctttcggattcaacctcttgaacggttacttgcaggctagatcggtatctcattacagcgattacgacggagatgagtggttctagtggagattcttggtgggagttgtgggtcagacaaaacttatagtaattggccatatccttaaagtagggattcaatggtagagttgaaccttgtttggcatgaggccctaaccacacataaaatccacccacagggttcaacgccagctactcgggactaggcaagaatgccttaaccttctcgaggataccttcctcaaaaagattttttaatctcttgaaagtgagtatggatggaggggagacccatcgaggacctttttccttggtgctcatgggctgggcctccttgtattcctcttcaacatactcttggcccgccccaagatatcgcctagcttggagacaggtctccgacctcgttgtaactgccaaaaggaagtacttaggttccatcttattcttcttatccttcaatgtcagaggaggccagcagggacaaaacctcgtctttatcttcaatctctcagactttaatgtccccgattacaactttagcctcctcgctcggaggcctaacctgctctactcgcgccattgcaaacaaccgagcgaaatgggggtcagactccaaagctttcctcgtggtttattttgtccttgccattattctatgtgacacaatcacttatccctgtgtgccttgtaacaataataaatattctggtatgacagtatgcctagccgatggagctgattgaccttctagtaatgtgtcaacaacaccaagttggaccctatacgtccaggaagcaggaagatagtgtctctaacttttttcagttcctaaatagat

SEQ ID NO: 244980 - DNA, 1411 bp, Cannabis indica
tggttatattcattggggtatatattttcattttttatggtatatgaaaaaatgaaaggaaaaaaattgtagaatattaaactaaatttttggtatttttattaatattaaactaaatttttggaattttatttctcactatgatgttatattaatttttgaatgtgattacgttaaaaaaaatgtgatatatctactttaaattgtggtatataagagtggtatatttttttatatgaataaaaaataaaaataaaaaaaatggtataggtcttttatgaatattaagggaaagaataaaaaaactaattaattaattggtatattaattaaaaagattggtatatctattttccgtgatttagtatatcataaaggaaatgaaaaaattaagtgcatcactaatattagttttgtggtatatttatattgctataaagtatatctcttttatgtgatatagtatatattgagtgaaatttaaaaaaaaatgtagaatcttaatttaagtttgagatatagatatactggattggggtatattatttccatgttaaaaattatacatatatacgtatagttttttgggattttttccttaatagattttttaggcccaatatttacatttttatcttgttaagaaaaaataaacaaaaaaggaaattaaaaactttatttttcaaatatacggactgaaacaaaacagcccacatcttcatctctctttcttctttgtttccagccacaccaaagcttccatatctcctccattttcgttctcaaccacgatttcaagcccaaaaaaatcgtacaaatgagaagggcgtaatgaagatctcaacaacaaaacaaaataatcctgacaaatttaaaatcaaaaggtaaaccaaaagaaaaaaaaaaaaagattacaacctctattaatttgaaatcacacaataacaaaccaaaaataataattcaaattcaattatgcagagaatttaataacaacccaaaaggggattcaacttggaagaatttgaaaaaaaaaatacaaggtaccaatactttaaatgtttttcttcataataggttgttatttagtgtttatgaagcagatcaaagcaaattcataccaaaaattggttgatctaaataatttggtgtaaataattcacatttgaaaaaatactgatacatttaaggtcatatactgaacactgttatggaatagttgtttatatgtcgttctcgtgtattaaaatggttgtttaataatattaaaaaattgatacgctagtttcatgtatggaatctctgcaaatttgggtacaaaacaatggtcattgggatgacaacaagtactatgttgattgcgaatcaagtgaagaattaaaattaatagattgcacttttgctgaactag

SEQ ID NO: 244981 - DNA, 1331 bp, Cannabis indica
ctttcaaatatttaggtatccctgtctgtgctaagcaaatatcaggaaaagaatgcatggttttagctgataaaacgatagcccgaataaaaatctagagctcacggaatctgtccttagcaggaagggctattcttgtgaactctgtactcatgtcaattcattcttattggagtcagatcatggtattaccaaagaggccaattagagatattgaagctatctgccaagcttatttatggaaaggccatcatgtgacacagggttctggacctattgcatgggatcatgtatgtcaaccaaaagcagggcatgagatattggtttgaagaaaattgcagaatggaacattgcagcaatgacaaagtatgtgtgggcaattgcgaataagcaagataacttgtggatcagatagattcactgtgtatacatcaaagatgagaattggtgggattaccaagccccacctcaagcaagctggtgttggagaaaattgattgttgtcaaaaatcaagtcaaagctactatggatatacaaaagtttgttgcgggtaaatatagaatatccaatagctacaaggctcttttccccacacaatccaaagtttattggagtcatgaggtatggaatagacttaatatacctagacatagcttttacttatggattgctatacaagatagacctagaacaagagaaagattgcataagtttaatatcattgatgaagatttctgtttgctttgcaagaaccaaactgaaacttcagaacaccttttcttctcttatcctttatctttgtctatgtcatgtgaaatcttggctgtgatggaatgttgaagctacagaacataacaggttgttaagatggctagaaagagcgaaaaccagcaagctccgtaaagctatttttactgctatagtagccgcattagtgtatcatttatggaaaaatcgaaatgaagtcttgtggaattcaggtcaacaaacacaggaacaagtaactcatgctataaaagttgaagggaagagcagagtggcctgcactatgccaagaaaagttcagccgattgatgtagagtggttctcaatgctgtagctttgctctttgtattatatagagttaatttgttttgttatatactgaaatcattgtatagatagagcattcaagtcttcaattgaagatgctaaattggttgtaaatcgatattttggagtagtgcatttcattgattgaccaaaaaaaaaaattcaaataaggtcaatttataaaattaattaaataatttaaatataaaacatctgaccttaaatttaaagaataaga

SEQ ID NO: 244982 - DNA, 1695 bp, Cannabis indica
tcctttctcctttgatcacattgctgtcatcattattctgcatgatctccattcccatctccgccatggattgaacgatgttagaccacgagtgatcctcatgatagtgttgtcttgtattctgtcccatcccgatgtactcagtagttgactgcttttcctgttcattctgtctccacagattcttgatatcaccaataatatcttctagctcttcactatcctcggcctcagaatctattccttccccctccgaacaatcactctctgaacttagtcccaacatttcttcttcaaatgaccctacatcagcctcctcctcctcaaaataaaattcttcttctgctgactctgctgtttcaattctggtatgtcccatagactttctttttctgatatagaccttcccaaacggaacaaaccccttttcctcttcttgttctacctctgccattttttccagaataggagactttactgatttttttattatttcaaaatctgcccaaaaccatatagttgcagctctgaattcttctcgagactttggtttgagtgattttaatctcccttcaaaaaagtccttgataatctgctctggattcttttttacacaaatagccctcttttcttttcctttgctagcccacggatccaatcccttactcttggggttataaaataattttatctcaggccttatttcaactcttttatgggccaaaaaaatactaaaaggcccattatgataataaatcaaaggcctcaactccctattatccccagccgaaaccaaattaggttcaaaaaccctattttccatcagtccctttcggcccaaagacaatctagggcccaaaaccatttgagatgtacttccctcatgtgtacacgtgtcctttatgagaagaaaaggacaggtacgaggaataactaataaaggtcgtttcaggtcttccaaaatacgagagaataccaactttaaattaatcgaccccctaacttcccctctgccgattttgggaatcgcaattccctgcgaatcatctctcaaaattcgacttccagccttggttcttgaactctcattaaatgcctcatacctcctctgttctggcttttccacttcagccggccttccttcttccccgtcgacggccgccacctcacactccacctggacaaccacgatagagtcatctttgccgcctgcctctccgtttgaatccaccctattttctttctcacaagtcattgccacacagttctccatgtttgcctcactcccactctcctcttctattcgatcatcatctccagctttttccttttctccttcaattacatccccatctccaaataccttttcattatcaaaatcttggtaccagcaagtattgaaccatccatggaacctgtagcttagatcattgagcttgaaaagctttaattcgtaattcttatcctcatggttaattgataatgattccggtacaaaaccgaactcatcacccatcaattgaagtcttaaatgggataaaacactaacttcagccgtatccttgtccacatccattaatccaccacacatctctccaattttcctgaaaattttcatatgccaaaggttcaaagggagcccatgaacaccaatccaagatcctttgcattccacctttacatcattcttttggt

SEQ ID NO: 244983 - DNA, 712 bp, Cannabis indica
tcatggtaatggaagtaacagacatcaactgtctcatacgaaaaagtttacttacatgcaatcggaatgactaagaatcaaattaactcgaaattgaattcatccttaattagattggtgaatcagaaccaaaatcagaataagttgtttatttaacttgtaggaatcagaatcgaaataagcagtattccattaataaatttacattactctagaatcgaaataaattattttaagttacaaaaatgtcctttattaaagttttatttggatttttattaaaaaaattaaaaaagagtaaaaatgacacttcataattttaatcccctcaagctcatgagattatcaataatttttcaatcctaaatttagtgcaagactcacatattcgattcgcattctttaacaaaattagagaagtaaataaaataataaatcttattctttattatcattcgtaaacacacaattatttattcgtttcctattttcattcttaatatgattagaatatttttaattttatttatttattttaaacacgtgattaaaataaataattagattttatatatatatattttaatatttttatagattttttgtttggcttttgaaagaaatattgtttttttacatttacttttgcaacgtgaaaaaaaaaataatactatacatttttgtaaattaaaatctgtaaaaatgtgaaaaa

SEQ ID NO: 244984 - DNA, 1264 bp, Cannabis indica
caaaaacatgtctcactcagctcaaaaaggatttttgtagcaaagatggcgaggcaggaccgaagaagccgcccacccccttattctgcattttcgtggtggtgcttgttcttcgtccgaataaaaaaaaaaattcttaatgatagttaaattgggaaagaaagaaaaaaagtaacaaggaaaaaagaaatattttattttaattctattttgctgccttgatctttgttcttttaagtttgtatatccaattctgtttttccatttttgtttttcatagccagatatctattttagagttgtgtaatattttggctctcatttctggttgtttcttttttcattctcatttttatgttttcattgattaagtaggacaaaataaaacctttgttttataaattgagaaatgttataagtcaccgctagtgtttagtatttttttcggtgtcatattattattagtgcaattaaatgttgagtttcatataatttattattactttttaaatagagtcatataatttaagataataacttttagaggatattgctaatcaataataggacgccataggtacctatggctcgttctaattattcttcatgttttaattcaataagcttaccttcatattttttcttttaaaataaaaaattggttgagattgtgatgtggaatatcatttttcttttttgtttttattttagttctaaaaaaaattgtcagtaaacctttgattagtaaagagttgttctcatcgcctacaccaactccaattcatgctatgggtactgaagttaattttttttttattaattagacatattttaaccttgaaatttaacttaatacattctttttagggcttaataatgaatgaaaatggaacactagacccttgtctattgttgggaattttctctaaaaaagggtcatctacttttttctttattatttttcctcttatgggaatcctgtacccaaactttaggatagggtagaccattattaaaatatatattttaaaaaagaaaaggaaaacttatccttatgtaaaggaaacatagtacgagcactgttattagacacaaaagaatcaaaaacataatatgggtattgctattagacacaaaaggatcaaaatatagtatgagtattagttattagactactagtagtagtactcaacaccacctagaggtggtgttttgcaattagttaatgatattctataaaatgtaatatcaatttatataagat

SEQ ID NO: 244985 - DNA, 1138 bp, Cannabis indica
attatcaaattaaaaaaaaataatttaattttttaaaaggcaatatttttgctagtggggactatagcccccacatcaaaacaattgggtccgtccctggataccataaagataattttttatttgatgatgggctaaattagaaatagtaaataaaaattagttgttgttttgccagttattaataacaggtaatggtccccaatattcatcatatcttttcacttttgtatctccatcattaaaagactaaggttccaaagaaagttttgatgtaaaattagaagattatactattctaaagtcgattctatgaattcgcttccgctaatttttaattttattatttgattcttatgaattaattagggttaaatacaaattaaagttttccaacaatcttaaccaaactattttatgttccatttgtggaaaccctttattgctcttgaggtgtctatttcatccccagataaagcaacaactacttcgccttttgctcattcatcactgaatcctttgagactagaagaggtcactatagcttattttcatgctgagtcttctggagttggtttgagtagtgtattaaaaaaagttaggactaagaaaagaagaatattgaataagtcaagaaagacacattcaataataggaacttatcaaaatggtagtagtgtagcttattctgtgaaaactattggattagaaaaggttagtgtgaacattgctgctgcaccagagaagaagaaagaaaccgaaaactagaaaaaatcgatattatactttcgcagacgattaaagaaagaaaaaaacatactttaggccacattggatcaagggattcattgtttgtgaaagggcattttccctttttcatttctttgtagctgatcaaattttagtaccttgaacttgtagcagtataaattttttgtgcacctcatatataatgccttttaatttgttttgttttgaacattgtttaactttttcttgtggaagtatatagtctattacaatagtcatatgcatttatatattatatgaaaaaaaaaaaactagcaaatgttttgagaattttggctagaaaaatgatgccttcaagttcaagtaagatgtagtttttttttttttt

SEQ ID NO: 244986 - DNA, 686 bp, Cannabis indica
tttaaaataaatagcaaaaatcaaaatagtgtgttcggccatgccaatgatttttgggccaatttatcttatgtttatttcattaattaatttagtaagatttaattagaaaaataataattttttattactaattaaaagatttaaattatatttttaaatcaaagtaataatctaaatttaatagaggactatatatagaaagatcatcacaagtcagacaatcaaaatctgatcacaaaaggcttttttcactttctcaatttctcccatcatagcatccattagtgattgagtatactattcaacccacactaatcaaggtgatactcaagaaattatgaaagactgtatagaaatcaatttgcaattcagaaaaaagagaaccaagttcatcactttacaataccttgttacagaaagagattcaaaggctagagttattaaatagaaggagctaattaattttggtgtattctcaatgtgagaattcttaacttttatgtgtttgaattatcgttatagaaaaaagcatgttttaggaatataattattaacatacatgatagtaaataaaattatggtaaattaagttccaacagttgttgcgactaactttgataataataatagtagcaataatgtcgcttttcagtcaataatggggtgacacaagcaaatttaac

SEQ ID NO: 244987 - DNA, 724 bp, Cannabis indica
agcaagcttggcgaatttttcaaaatcctaatactcttctaagttgggtcttaaaaggtcgttactttcctaatagtgactttttggatgctacttatggaggtatgccgcccataacatggcaggtcattcaatggagacgtgaattgttagttaaagggctaagattgaaggttggttcaggtgttaatatcaggtgtggcttggatccttggatcccaggtattaccactttcactcatttgctttacaggggtgatggtatgcatcatgtttccgattacatcaaggataatcgagaatggaatttggagcaattgtatatgaatttttcagctgttgatgtggatcacattcttaccatttctctatcttattttgcaactgatgatatgtggatatggcatttcaatgaatcgggtgaatatacagttaattcaggttaccatcttgcttatactttggatgaacaaagtcattcttcaagctctaccactcaattttcgtggtggaaaaagttttggggatttaaactgcctttaaaataaaaatctttggatggagggttattcaatcatctctctcagttgcaaaatctctttttcatcgtaaagtcctaaattttgttatttccagcttatgttccaatgcttgggagtctataggacatgccttgttttcttgtaaacatgctaaggctatttggaaagaagctgggttttcg

SEQ ID NO: 244988 - DNA, 2026 bp, Cannabis indica
aagttatggtttttttttgatgaaacaaggtaagattatgtggttcactcttttacggggatatagctagcaatttgcttgattttcctgcatttcaaggattctaggcctttatttattttcaatcatattgtttggaagattgtgattaagctgatgtgatttccgttctagacaatgttcgtaaaaacttagttgggatttgaagggtgtcttgctaaagtgaggagaggcataagccagaagccttcaggcggaatatggttttacttcgaaataaacaaaaataatagtaaaagtaagtaaaagagaaacacagtcatacactactttaagatactctcactatactggtaaccaagagagtctagagtgaaaaggactccttgaattctgaaagtttagaatcctagtctaatagtttggcagagtatagaaagcggagactgtgtgatgccttcatttctcttagggtaatgtttgatgacctgtgttatggtatgtggaatattctaattttttcagtttccaactataatagtcttttttttttctagagagaaattgatcttacaatatcgacagtgctttcctttgacatttgtattattgaataattatacacttgatttgaattttctctaccggtgatttagtgtgatggatctgtcttttttttaattagaattatcttttagggtagtttattgtttttgatagaaaaatcattttttgtggttgaaacctgaatccgtgcttgtcccaatttgattgtttgaattggtctttggaatcgcaatgtctgaaagctgaatgagttttggctttaataggtgtttcacagtaatgacagatattttatacagcagcatacttcaaagtgttaatgccaattgccaagtttggcatttctgagctctagataatgtgtccaactttttctatctgtgttgattatcaactcttacccttgtctacgctcgttgttgtatagatgtaccaggctagactgagaattaatcttattgtttttactgacttaaaatatttactctcttgtgtaattccagtctcgtcaattaatttattttttaagttgaaggattgagaattgaggccgtctctaattgttaatgactagtttttgcatcaaagtagtcaacgttgcctgtctatatgagagaattgagtatgaacaatcaattttaattatatttgtgtgtgtagctgggaatcttttgcaatttctatgcctacatgcaatcttttctttgactttataatgagctgataataactagtactgagacaactctattttttatttcagcaacggccacatcctcccgtccgccctattccttcacagctctggtgcaagaacttcggtacaaaagactacgagtccgttaaaggcccataagcaaaagacctagtggaggttgggtatacattagtcttgctttacgggaaagcattccttgaatttgttatttgcagtgaatactttgaacagctatttaggacttttgctgttcccatgttttggaagtgttgacactaaaactcaaggattgagttgtatctcatcttacactcagtgacaaataagtcgccaagtctttttgcttgcttttcattaataaaagaaaatgtctaatcttgtgattttagcttcttaaggtattgatttaataacagtgacatggatgctattgctatcaagtttatgtatagcctttcaatatgatatgcctttctgtaataaaaagtaaaaggcgtcaaacttttttttgtttacaatttccaacttgtttggttaaaaaaagaaaaacaaatagaggaaagaatggctttaatttgccgcagtggtgaggaatgaggataatctaaagacttcgttccaaattgcaggcacagctcaggtgccttgcatcacactacaagtggaatcaaattccgttcatgtataccacttttagactcactattctcgcatataattattttattactgaaatcggta

SEQ ID NO: 244989 - DNA, 1031 bp, Cannabis indica
tcgggttagcaggtgaatattgctaaattgtctatctttttttagcactaataccccagaggtaaactgtgtttgagtttaggaaattttgaggatgcatgttgcaagtgatcaaagtttgtatttgggtcttcctaatactatgggtaggaataaaaatgttactttgggtttcctcaaagataaaatgcatgtgtaaacgagtggaaagttgggatgaatagtagctctctaagtcgggaaaggaattccttttgaaatatgtcgctcaatttctccctagttatgctatgagaatttttctgcttcttgttaagctttgttctaaaatagagtaaatcatgtgtaagtatttgtgacaggcaagtagtaatggcccaagtattcattggttatcatgggagaagatggcagctcataaaaataatagcagaatggggttttgaagtttacataatttcaatctggctatgttagggaaagcaagggtggtggcttttaactcattcttgttcgcttgttggtcgtacatttcaagcgtggtattatcatagtggatcgtttttgtctgggaagttggggtcaaatcctaattatgtttggagaagtattcttgcttctcaatagttattgaaagctagttctaggtggtgcattgttaatagttcttctatgaacattctggggcagtcgtggcttccgtgcaagaagtagtccaagattacttatctccatcctagtttggagggggcaaagtttaattagattatggtgggaagggcccaggtgtgggatgatgaaattcttgaggatttgttcaatgcttttgacaaacagttaattaagagtattgtgttgaatgataatcttgggtcagatgattagtattggtttaaagagacttcagggctttattcggtgaagagtgctcacaagcttctctaggtattgtacggtaggtggtcagaagataataatataagcctttggagggcattatggcaactcaaaattcctcctaaggttaaaga

SEQ ID NO: 244990 - DNA, 790 bp, Cannabis indica
gtaatgggttttatttagggcacaaaacccaacacaaagtgccctagattgcggaaactaagttactctctaagttactatctaggtattgataaaattagaaataccttgaactttcataatggcattgaagttcctaggagggtcttggggtggtttagtgttattatagaaagataatgttgatgaaactcttcttaaatattcaatgaatcatattttttgctatataatgtgtgacgatggacctaaatggaattgttctagattttatggtgcttctaaaactcacttaagacttggaacttggaaaattcttgaaagattagttgatgtatctcctatggacccttggttggttatgggtgattttaatgaaatatttgcttctaattttaaagagggtggtgctcctagagatttgactttaattgataatttccattcggctattaattatggcagccttattaagcttgatcacaacgatgacaacttcacttgaactaataaatctcctgacaccttaaatattaaagaatgtcttgattatggttttgccaatctcccttgacagcaaacttttgtctctacttccttccatcatctagacttttatgcttcagactatagagctctcaaagtagaattctccaataggccaacccttgagcagagcatccctagacttgtggctcaaagattcagaatgtcatgatattgttgctaatcaatggaactcttcaagacataatcctatactccaagttgttaccaatattcaacgttg

SEQ ID NO: 244991 - DNA, 1090 bp, Cannabis indica
caaaattgtttgtgctgtataaatatttgttctcactaattccatcctcatttgctatcttcaatcgccacatttttctaatcaaccttcttccactattatatatttttagtcatatgtgaaaccatgagtatgtgtatataaatatatatacaatttatatcaatttctgtatacgtggcatttcataactttaatacgtgtgtggtctttattattatttttgccacgtacattaattagttattaatttggtgaagtctttaatagccgaccttaatagttagcgtccgtacgataatcgatgtaatcaagacagaggtacattagagggtggggtggccttggtctcctacaattatttttttctaattttttgaaaataagaattattacataaaaaatataaattaatattttatttacaaaaatatttctataggtaaagtcaacatctatactttttatgtaattttaattaccaaaatacacatcatcacttacacaatcagatgatggttgcagagtagttgctgtgtggttgcgcgatagttgcatttgacgatagttgcaggatggttggccgaaggttgcatcagatgaaagtttcaattagacaaaagtttctgggtggttggccgaaggttgcatcagacgaaggtttcaatcagacaaaataactgttagcaaaatatttgtgcagctataatgcaactgttgtgatacattaaaaatcagaacattgttttcacgtacgtaactctttctacatgtctgtttatgatttaatatgaacaaattcaccattagatatttagaaaacaacaaaaatacaccaagataaatattttactatagtattgatgttattttttttattatacttgagttagattatttgggaactccaattcaactttttgagatatgcctttcatagatctaaaaattggagtctagacattagttttatgcaaattaaaatggatttccagttgaattttggtttcgtatagtagtttttctacacttttttctatgaattcgaaacaacccttattttgattgattctggttgtcttctcaggtg

SEQ ID NO: 244992 - DNA, 944 bp, Cannabis indica
gtgttaagtttttactgttgttctacggttgttttttagttatttcactgttgtttttagttattatgttttgtatattactgttgttttataaaaatatagtattttttaaaaaaaattgtgtgtgtatttttttgtaaaagctacctcaaatttcagtatttttgttagatgtttaggcccaggccaacaaagttttggtccaataatggtgagccctacgtggaagcccatttcacggctctctttcagactatttttcttccttgaaaactctaatcgattagccagccacaatcctagactcatcgggactcgccgattcttccagaacaaacaaaccagggtttggtattcgacagccatagccaacaactccgctgagaaccacagagtaaagggggagacgaaatgtcttcgattttgcaatctcttttgaatccaaggaagagctggttggctgctcagcacatgaaatccgtttcccaaagcctccgtaactacggtctgccctctttcccccctaaacaaaaatgaaaaaaaaaatccctgattcaatctatgtataagaattttgtatttatgatttcatcttaatggttgatttgatcatggttgggttgacaatttgatgaattagggctccgatatgatgatctgtacgacccctactacgatctggacgtgaaggaagctctcaatcggctgcctagagaaatagttgacgctcgtaatcagcgtctcaaacgtgccatggacctttctatgaaacatcagtacctccctggggatcttcaggttcgcttttttttttttgcctaattaaaattgttgggctaatcatgtgggatttagtctcattgtttgcaaatctgattctttacattaaattttcgttttacttattttgttctgcaaagacaaacgaattgtttatgtgaata

SEQ ID NO: 244993 - DNA, 1504 bp, Cannabis indica
tttcttgatcttcttccaaatcagaaaaacttgtatggttccaagtgatctttttgactaagaaaactcaattcaaacatcattagaggagcctaaaacaatctccatatgtttattaacatcactcaaatacttggttgaattgtactcttctgcatcaaaaagctcttctgaatatgtccgccgcattttagactttttgtcgcagttttacaatctccgaactgtcctcatcgcctttcagaatctgcacaacctgcaaatcagaagaaaaagagaaatggctgcaaaatgagtcactttttttctttctttctttgtttaagtaacatggcatgacaataagttcaagacacataattgttgttattattacttggctcatttggggtctgttggcagaagattgatgaatgcacatcgaagcaatcaagactatgcggctcatttgctcgacatcataggcttcactgaggcacggatcaacaagctctttgaaacttgtcttggagagcaaaggtttggcctgcaaagtaaggattgaattgagtagaatgaagatgttttgatattagttgctgaaaaaaaatgcttacatacccacataacaagacttttttgtgagctatctaaagcttggcgtccagtgatgagttctaagagtagtactccataagcatagacatcagttttttcatctactataccatgcatgaagaattcaggaggaaggtaactgtttcatgtttttgtaagaaagatttttagaagaagacataaaacaagaaaggaagatcatcaaaagaaaaagtctttgatttacaaacccgaatgtgccttcgaatttcgacacaatatgatgagtccattgatcaggtagccactttgaaagcccaaaatctgatatctgaatccaattgaagatgagaaaagaattatttgattcaatgcttttttaagtgcaaaatatgagaattttgagtgttgttttagtgtacctgaggttcaaaatcctctgaaagcaagatgttagaagcctttatatctttatgaataattctcctttggcaaccctcatggagataaagaaggcctacagctgtgcctaaaacgattttgtatctgactccccaatcaagtttctcccttgggcctaattatatgaagaaattagctaaaagttgtgatgatttttaaatagagttagagatttataaaggaagacaaaccataaagaatagatgaaaggctcccatgtggagacaaatcaagaacaaggtgcattccaccttcaaccccatatccaataagtttggctatgtttggatgatcaacatgaactataatcccaagctcagataagaaatctgctgtcatttcttcttggcttcctcttgtcaaacgtttaaccgcaacgagctcaccatcttccaattcccccttgtaaacctcagcatagcctccctcaccaatcaaattcccttcacaaacacacaaatgagcc

SEQ ID NO: 244994 - DNA, 1635 bp, Cannabis indica
aaaaaaatatatatattatgtaattattcctaatgtttattgggtgagccagaattatgggctcgttgacaggatattgccaagggcataactacttaacatttaataaatcttctaaataaaattaaggaacccatttatgtctatttatataagaatgccaaggtacgtatgaaaatactatatattgactacaaacgatagatgaacattaattaattaaaatgaaataagaaatttctgagagagatgtcccatgcatgcatctggagaaggtagaaaatatatagctattaatttccagtcccacccataatcccaagtccacctgagccagatcctgcgcctcctagttgtgcacatacggctctacaagcctccatacattgagtttcagatgtaccagtttggttcttacaagttggcgcgcaatcctcggcgcaatccgccattgcctcacgtgtttgaagaattgccccagtaagtagcactagcatcatcaaaaccactgaactcttctccattttttattgggttttcttccttctttgatctgtattgtgttttgttgtgttaagtgttgtgttttcttttgaattgaataatggaagtttatatatacatgtatgtaagaaaagtagggaagagaaaggttttgtgtcttcttttttggggctgttctattgtgtggtatggagaaaaataggaaatagtttgaagtaattaagttcataacttatcgacttccacggtgaatatatccactatttggggtactatgtgttcaagtggaccaagttagtgagttttacaccattaattaattctaagtatagttccctccttatagaatggatttgattgtttggtgaatatgtacacttaacatattcctgtctttttttttaatggaatagttaagtgtttcaataaaagaaataaaaaacattttcttgttatgactcacccagtcaccctacctacgtgtgacttaaataattatatatatatgaaaagaaatatataaaaatatatgttagacatttcttatatttttagtgcttaattgctaaattatttgaaattttttaaaagttgtgtaaaaaatgtttataattacattataaaatattttaatgatgcactctctaaaaataggtgtcgaggtacattttcaatactttaatgtaatcagtagatgtattgtattaatcatgttatatgtaagtagaatgatacttagactgttagagtgaagggtatactctctagaccaatgtatcaccaatgagtggataacttacccttaaaggtggcgactgtctgacccaccttcagggatagtcacctatctcatcctttcggaaggtgtactcaccttaggagtggttgctcaaacatacttttgggatagttactcactctaagagatgattgcttaaacatacctctagaagataattactcaccctcatgtaaaattgcttaaacatgaatatatatctcagagggtataacaattttacatatttttcattaactgagtctcaatattctcgtgtgtcattatacttgttacatcatatctttgccaattaaaatttaaataaatagtagtgggtagagaagctctaa

SEQ ID NO: 244995 - DNA, 925 bp, Cannabis indica
gatcatcaaagaaaaataaaaacccatgtctcaaaaattctcattttctataacccaaaattactttccccctcgtattttgtaactatgaagttttgatataccattggggtttttcattgagattgacgaggtgctccggtaagaaactatcttctcctcccaaagttagaagaacccattggctaaatggacttgaagaaaccaatttttctcgatgaaacataacaacaaaaagaaaatcaaaacaaatgtacaaaacccaaaaaaatataaaagaaggaatttgatagaggagatgcttacctatgccattgacgaatctgcatgtgtgtatgcactttcttggctcaaattggaagttgaagagacgagagaggggattgaaggaattgatggaagcgatgagagagggaatatgcttcaggtatggctagtgtcgatgatagaaaggaacgaaggcggagtgagtgtgagacgtcgatctagtttggctggggtcatggaatagtgagctggccttagagagggaaggaggcagctggagagtatgttagggttgttggttagggttagggatttgagtttgtaagatttccttatatataaaagatattttttttattaatagagacacacgggttgggttgggttcgttgggccacaaaaagcccagcccgattccgacccatactaagcgggttgataagttttacacccaatgaaatttcggcccataataaaacaggctggtcggcctattttcgggttgggttggccgggttggtcggcccagcacaacccatgcacagccctaagcttacctagtctaactaggtggatgcaaagaattaaagtgagcaaattttagaggaaagtcatggtagcagcccttgccagccttgtctacaacatctggaaaagc

SEQ ID NO: 244996 - DNA, 592 bp, Cannabis indica
caaactctgccagaatttagatgtaaccttcggatacctatcagaaataatagatttcggtacaccatgtaatcttacaatatcgttgacatataagtctgcatacttatccactgaaaatgttgtcttaattggtagaaaatgagcagacttcgtgaaacgatctactaccacccaaatagaatcaaataaacctgtggttgtaggttacccaaccacaaagtccaatatgatgtcttcccaattccactcaggtagtgtgaaaggctgcaacaaacaagtcagtctatgatgttcagccttgatctgctgacaagttaggcatcgcgatatgaattctaccacattcttcttcattccgctccaccagaagtagggtttgagatgttgatacatgttggttgtgtcgggatgcaaggaatatggagttgtatgagcctctttaagaatttcatttctaagttctgcactacttggaacaccaaaacccttgtcttgaataacagcatcccagtatctgataatgtaaaatctctagcttgaccaactaaaacctcttctctaatcttcactgactctggatcggttaact

SEQ ID NO: 244997 - DNA, 1730 bp, Cannabis indica
taaacatactcataaaaaaactaataatttatagaaaaataaagaccaaaaaagagacatcgtcatttatcataacatgaaatatatatcttttttacatcaaacaacttttgttaatgataatatataaaatattaatattatagggcaagtctacactaaacctctctaaataaatatttcggtagaatctctatctattttagcatacaaaaaaaatttttagtgtaatttttttcatgatcgtacattataattatttaaaatcatttgtaaattttcaaaaaattccgaataatttacaatggtgaaagtaaaatttatgtattttattgcacgcgcaattattttttttatacacgtggtaagtaattatttaaactttattttcaagagtataaactatttagaattttctaaaaatttataaattgtcttaaataactacaacgcatacgatcattaaaaaaaatagactaaaaaattattataaatgcgaaaactatatagggtctacaatttccaatactatatatgcatagcagtgcagatattgtagttttttaatctttattttgcttaaccacactaaaccacaaataaaattacccaaaccaaaccatactacgtagtgcagctaataagacagatttcgtagttaagcagatattctgctcccccgtagtacataacataatggagtaaatttgaaaaggaacaaaatctaattttaaatttatatagagcaaaaataataagggagaagattattaaatataccaaacaaaataacggccaatttcacaaaatcaatagacgttatttatgtcttacttcactatgcatgctatatgtagtgagagttgaacaaatttagaacttaaaatgaaataatttaaaacgttccataatcaaaatttttgtaaaattctaattctctaatacgttgctccaactatcaatagcaattcttgcacataaagtgaaccatagagcaacaagtttgagacacaagaccactcaccccatcacgctcgctactttctttcaagacgctggctcatgattttcttcttctactttttcttctgtcttttgacgcttggcatcatgttgttcaccatctttgtggttaagaaggttactcttggcattgtgttgttcaccatcttccttgttaagaaggttattcttggcatcgtgttgttcaccatcttcatggttaagattattcttggtatcgtgttgttcgccatcttcctggttaagaaggttattcaccacatctgcccctaaaagggaaatatgtttggaggtgatttgacgtcccgccctaagcttaggaccccaatgcctctcaggatttggaaggaagcgagcaatcttcttggcctgtgctttgcttagagaggccacggctcgcgcaaaattagcctgttgaaacagagaggcaagagaacttgtttaacaccagagcccaaataaaaacaaagtgttcagtgaaacatttgtaaacgtacttgaagaactggttcttttgaaagtatcacacttccgggttgctctggtggttgagctttgactggatggtttttgacctacaaaaacaacgcatggtacatcattcttccattagcagccatttatcagctactatatctgaatcacaggaagtctttctgaacttcaatttttcatgattggcttggtttggtaactttactatagca

SEQ ID NO: 244998 - DNA, 1517 bp, Cannabis indica
atacttacttttagggcataaatactagcaataggctaagtcttatgaacgagactttccacataatgcagttgtagatcgtagagatcacaacatcttcattgaacaaacatacacaattataattcttttatattcttacttattcttttatttcctataggttcactcttcttgattaatgatttaatattctttaatattaaatattcttttattcaaaaattgatatttttgaaatttactaatcatgaaccttctattaatcacatctaattaatttcaataatattgactcaaaaatttagactagagttctaaaccacgcccactcgttaaattagcgagaataaaaagtaccatttaacttacttgttaattagaccttacaaaactcttaattaacaaataaaccctaaatctttttttcttctcaattaagtcctagcttagtgaaaatttattaataagacattgtctaatttagaattttacttgattaattaaaaccaattaactgagtcaacaagccaatattatgtcaactagtacatagaacatgagcctatataattaagctcccaataagtgaatccaaaatttatcaagtaaatttcttaacttattaattcctcctgactccactatagattcagaatcacactcttgattacatagaatgctctatatacttcaaatatagacacactattaattatccattgttataatccaaataatcaaagatcctctatagataatttacacaatgtagggacaaattatcgttctatccttcaatgtattttatccctaacacacttagattccaataaataatatttcagtaaactaatattattattgaaataagagctcttctatttatctctattaagcgaagctcaaaggaaattatcatttcacttctatatcattaaagatgctacaaatttgatatctatgattagcgctctcactcaattgtactatcatgttcccaagatgtaagtattgggaagatccatttgattaattttaatgaacaagtaaaagaacacaaaggatacagttaaggtacaacctaaccatctcaggattaagatatattgatctatggttaactaagtgatattgacttagaaagatataacggtaagtttataatagtttttccatgttcaatattgctccagtccaatgtataatccatatatccgatattagtatactttaccaatgccctggaaaggacataccacttatccaagtgtaagtaaactttatcgttgattatcatctcagtgtaaatctagtatactgataaatcatgggacttaaactttgaagcatataatcataattactttcaactgtgatgatatcactgtaatttgtaaataactgtatgttctggatttatcagaaattatatgttaaaccatacgtaacacgcaaacttaaatgacttctaatcttctattgatagcaaaaaaaattatattgaaatgagtttt

SEQ ID NO: 244999 - DNA, 690 bp, Cannabis indica
aaaatattcatttaacatatttactgaaccactgtatcaagtcatggtgagcctcatctgccttcttaatagtatatgtgtctgtaatattatatcttatagtccatccatgtcgaactccaggatatatcttcacaaaagacttgatctatatacaaaatgaaacaccattaatgaagaaaatttcttgccatgattaaggagacaagaaagaagaaaagtaaaaataatatcgtacctttggttttcttcttaagactttctcgaattgtttgacaatctctggatggtcaaactctgctccaagtactgccagtggaaccttgacctctgaaagcatttgaatcatgaattattattattattttttgagttaagatcattttaatgagtcaatagtttaacttagaatgccaaaattggagtttcaatggtaacaaatattcaactgaatctaatatattgttcggttattttgttatttaattttaatgagtgaattttgaagtttaaccaaaaattcacttaccctttggaagttgaatttttgtgaggaaaagaaaatgtaggataaaaaaagtgtcatagttggcatggaaacaaaaacttctaacaaaaaatttcataccaaacatgaaaaattgattctttttttattctctaaaccttttttttcctctatatttttct

SEQ ID NO: 245000 - DNA, 1147 bp, Cannabis indica
tatgggagttagaaatgtggttgttagaggaaagatagtcgaagtagtcatctataaagtttgagtagttattgtattagcaataggtgctgaaagtactctataagccagagcataggcatcttctaggtttatgaatctgtgggctctggataagaagtcagataatgaatatgccctcttcctttgaatttctccccataataaggatcaaatggttaatcctaatgtcaaagccaccatcttcatattattagtaacatttatctttgttgtcgtatccatcatgtgatggatgtacttcttgaggctttctcctagttgttgtttaatgttcgtaaaagagctttcttccaagtcaaaatcctttgttgctaggaattatttcttaaacatgttttgtaaatccttcctgttacgaattgatccaagagataaccttttcccccaatcctccacggactttgatagagttcagaaaagtagaggtactttgcatcatcagtagcttttgctacgtgcataatttagatgtacttggatagatggtccctgaggtctattcttccttcatacaattccatctgaggcattctgaagtgttccaaaaattgtgcatctatagtctttttcacacatggttccatgtctttctctttcgagtcggatagagttcaattttgcttatgggatatctttttcgtgagctttgttaactcttcaattttacgctgtagacattgacttgtagtgtctagtgattcttttccacaaatgaaatccttaatatggtttcttaggtcatctctataaggtgtggctttctcaattttgaccttttctcttttggcattcagtcttctctgaagatcatttgtggaaatacttccaattttgtcaactgatggcaaatacacctctttgacgtcataactctaactagcaaaatcatcttagtgatttatgtctttacatgtagtaggcttcttagcttttacatcagatttaccatcatgcgtagctttaccttgagaatcagtttggtcaccttaacttgaagcatgatttcatttctttttcatttgaggttggttggcagtttagatttcttttgttgttcagcatgggcaaccttctttgaagtttt

SEQ ID NO: 245001 - DNA, 618 bp, Cannabis indica
gacgctcatatgtatcggtacgttaaaactaaattaagagtattaattacaatctctattattttatttcaccacgaaaacatatgctatagtattcgttactgttataacattatttttgtgaattttttaaaaaaatccaaataaatttaattgtttaataaactagaatatcgagagttaaaattttaaaaatttacaataataatattataattataacaaacaccagcattaaaaaaaaaagtacttccacatatatttttaaacacaatgatgataaaagcacttctcatcacaattttaaatcttacataataacacctatagtattattataagaaatactaaaggttatttatagtacttaatattcttgtgatgtataatattattattggtacaatttaatattaagtttcatttattttattttaataaatattaaaaataattgttaactaattataaaataatacttgatataatagtgctaagcagcttggtttccatcagttattatagaaatgcaatagtactaataatacatagggatacgattttgtcccgtgatgtactttcacagaatgtattccgtggtacattagatgggtcgtc

SEQ ID NO: 245002 - DNA, 1740 bp, Cannabis indica
accttacccaccaaaactaatgcacaagtagaaagcactatccatcaaaaaaagaagtccaactagaaccaatcataagaagcaggacacaaaagaagaaagactgttcagtgtttacttacatttcagtttttaatataagcataacaaaaaaaaaatgatctgtagtgtagataaatcaacataacaaatttctttctataatactgtcttatttggttatccttcaacgatagccaatataacaaacaaacaaaataatttagtcgtccaaattacattcaaaaaccaaccagaaaatcccaatttgtactccctttcttttggagataggatcacctggaacagcaagaatagttctggtttttctttgatccatttgcaccctcgtcgactaggcttaccctgtttacagataattctgctttgtaagtgtctgagtttaggactttgcggctgacattgttgtaaatttctcgaatgacaagctcgaaagcctttctaacatttgtggaatctagtgctgatgtctccatgaagaacagtccttcggcttctgcaaggcttttcccttcctcgacactcacatccctaatattctccaaatcacttttgttcccaactagcatcctagccacagttgtatctgagtgagctgcaagattgttcccagaaaaaaggggtcaattactaagatctcacatgtatttaataaatgtcaatcaataataattcacattccccaaactcaagagtatgtgccgcttaataattcatattctccaaattctgtgatttccattaatcagaaatactcaaagaacccaatttggttaggtatcattaatgatatttgagaagctttataatacgaacttaaatgagacacacacaaaaatttattcatttttcataaatgcaaaatatgctttgttgtatacggcaaagaaactgagaaaaattataaaacaaaagaaatataagagttttgaaggagttcccatactactgagtttgcttgttataactctttggtatgaagtttagacttatgggaataaaaatgtcaaatttaaattaaatttaaatggtgggtttgtgtttacaagtagttactttttaaattaaaatggtgttaatcccctctaacacttgggtttcatattccctccaactcaaactcacataaacaaacactccattaggtgacgtgtggttggaagaattgaaaacatacttagaacaggaataacatttcaatactataaaataaaaccaaataaaagaatggaataaagttatttcctttccaattctattttattaccttcaaccaaatgccactttaaagaccagcattcactttttcgagataatgtatctgaatgttaaacactcatcaaagacattgtatagctttatatcactttaattgctatatacgtggacctctttcataagaaattgaaagaaactgcttcttccccttcttcatactaagattcccctgtctctctctgtatctgggttccatcccctctccttttcattttcctgtccaccccgaggtccaagcctctctaaatttatcaaataccccatcaactaatcacaattaggctttaattgctaaagacgaaaactgagagaatgcataagggtataataatataaggtgggtttggttgggaggaatgaaaatataagaataggaatgggaataggaatggaataaaattt

SEQ ID NO: 245003 - DNA, 1105 bp, Cannabis indica
taaaattatgtattattcatcttgtgttacttttatctttaatggtaataaattcaactcaaacaagcatctttaaaatgatcaagaataggaagaaattaagaacatacattccatttacttctatcttcagaacctaacgtagactcaagagtacacataagacttagcattgcatttgtttcaggaatgttaagtagtatcagaataatttatattaagaccactttataattctatacatagtgatgaagtatctttcttgagaaacattagagattacatttatacatatgttatatttagatgaattgatattctagaactatagttaaccacttatattcaaatttcactggttatattgattcatgtatatcaagtttttattacatccttaagattatgagtaagttgtatcgtggagaaacttaattgttatttttattatagaaattagattcattaattatttttaatttgaggatacatcttgtatggtgcattatatagtttcatactacgtatggagttataattatattttcaagatattaagaaaattttgggtcaaattcaactacaatatttatggctaagaactacaagagtgctggttgaagctagcatattgacattaattatttagcaataaagaggcttgataagtggtcattaagcacgtgaaactgaattggataatcacaatatccttaactaaaggtatgccacaatataaattcaagggtcataaaataaacatgggattatgttttttttatatataattttttcattgtacaactgaattattcaatgaaactctaattttgatatttctcatattcacgtgcattttaattttatacgagaaaattatctacagaggactagaataaacataaggtttaaaatttattagcttaagtacgtatacattgtcacattaattatattgttatataataaatatatcgtaatacataaagataatattcgccatttaatgaggacatatcgtcgtgattaattatgtttgttatttagcaaggataatcgttgggtgtaagtggtacattgatttattaaatgctgactaagtaag

SEQ ID NO: 245004 - DNA, 1866 bp, Cannabis indica
tattagagagtcccacattgatagtgtgttaaaactaaatacaatattatataagatgtatgaattatttctcttattgtcaattaattttgaaatgaagcggttcacttattacccctcattacaaatttttttacttttagtttacaaaaaattatgactagttataaattatattgtgactaaaaagtccgttggctaaaagtattagttataaaaattataatttgttgtgattaaatataattttagtgacagtacttgttttgactaaaactaaattagtgacaacttgtaactaaaaaaaaattatactgtgactaaaaaattatcataaaagtagcaattttttgtaataccttacttatggtcttgatatcacaccttgcatatatatgacatggtaaaatgtaaatattcacatcaacaggattaagaatacgtactactaagcactaaatacaacatttggagcaaggaggagatgtgggtatcacctgaggagagtactaccccctttaagcacatatttttttcgtacgcatcgaaccaaagtgtagtattatgtgatttgtgctcaaatttatatttttacacgcctaatcgtactcgtagcattcgaattcgtaccaattaatttcatactgccttaaaaaaattgaagctgcctcaattatctggatgcatgcagaagcaccttttggaagtgccacaccacctgatgacccctgccacgcgttggagctggcctgagggctctctatgacctggcaaagctatataacttgtcatttcaatagttaataatagccctaattaggtagtcaaaattaaaacgttatttataagattattatattaatatttatagtcacacacatatactcaaattcaaacatatcctaattataatatgtataatatgtagaagatctttcatcaccacaacatgcaagctatatatatctagagttaattagaaagagagaagaagtaaatttagacaaagaaaattaaaatcattatcaaacgaattaagagttactatactatggcaactattactactccaaaagttatgacactcaagcttttgatctatacaaaggagaacagggttttatttgcggaaggaggaaaagacttcactgatttcctcttctctcttctctccatgccagttggtaccatcataaggctcttgtccaccaatattggcatggttggtaccttaggaaaactctatcaaagcttagaaaatctaagcgcgatacttacatgcaatctaatgtccacaaagatacacttctcaaaccaaaatctacagttgaagttggctcttcaacctttttctccttgactaatgttcatgataccacctccaaaaaaaccatatactcttgtagctactgttcatcaagtactggtaattattattggagtgatgccccaagtgttatttgccctaattgcaataatacttttgggaggattttaaaatattatgtggcacccaaagcttcaggacccaaagtgggagcatcatcattatcatcatcatctggggctgaggtggaaggtgggttgtgaaaggagtggttacttatatgattatggacgatcttcaagtgaagcccatgtcaacaatctccagcattgctatgcttaacactttcaatgttaaggacgttggtgctcttgaggaaaggactgtttcacttggtatcaatgaggtttgtgtgtatgcttagaattgttattatatatataaatatatatatttatatatatattgttattattgcgttcttgtttttgattgaacagggtttgaagttgttgaaggcttctcttcagactaaaatg

SEQ ID NO: 245005 - DNA, 784 bp, Cannabis indica
aataattaataaaattaataatggatcaataatgtttttcaacttccaaactagtgtattaaaagtggggttagtaataatatataatagtggaccataaattaaataaatgcagtgggagatgtggccttccctcgtgatcgcaaatttcagggtcggttgttgcagctaagctcttcttaatactcactcttttgctaccaaaattattatattagaaaaaaaaaagtaaattattatattagaaataattttttttaatgataaatgctaaaagagattattagtacaatgtatcgttattattattagtccaactaactaagtattaaatttcatatagtttaatataataattatttttagagagcattgctagttaatcgcaaaaccacatatatttagaggtgctaagcatcactataatgctcaatagcaattaacaaataaatattccttttaagatatatatattattgagagaaactaattaactataaagcaattttattataggtgggtgttttggtagttacaattaagttctcttctcgagtaataataatttttgacctagtaattaaaaatataatcacaccaactatagtacatgcatatgtttttgaaatagatagaatatacgtaacagaaatttgagttagttgaattacgatgcatgcaccgcagtcgtatatgttctgattggttacgtgtcatacatattaaccaagcaaaaagaagaaaaagtattgggttctgcttaattaatatgtattatattatt

SEQ ID NO: 245006 - DNA, 779 bp, Cannabis indica
gccgggtcttgagcatttcacagttaatagtcttttccaagtcaataatagaagctgggatgttgatgtggtaagggatttattttctcctgaagatgcagctattattcttggaattcccttaagttcggctggtgcagacacttggtactgggttgcagagaagaatgggttttactcagttcgaagcgattaccatctgctccaaacattgaaacatccgccgggtttgtcagaaccaaatgatagttggaagattttatggtctcttaaggcacctctgaaagctaaagatcttgtttggagggcggcttctaattgtctcgccaccaaagttaatctgtgtatcaaaaaggttttggccgaaaatacttgccccttgtgtggagtgttcgctgaaaccgaattgcacatcctggtttcctgcaatttcgcttgggcgtgctgggagtttgctggtttggcggctgcaaaccgagaagcttcttctctcggacagtggctaaatgactcatttagccgcctgcaagctgatcttcacagcagagttgtaatggtgtgttgggccatatggtgtgctcgcaatgatctcatatggcagcagcggtctcgtagcatgaaggacgtggttacatttgctaattcgagtcttgatcaatggttgaaagctcaaggaaagggtaacattcccttgttgtctcctctcaaagatggagatggttcggagctttggttaaagccgagtataggtatcaaactcaatgtcgatgcagccattt

SEQ ID NO: 245007 - DNA, 1140 bp, Cannabis indica
gggttcaccacccacatgccgatgcactggtcatcgtcgctaacattggaggagacaatgtccaccgcatattagtggacaacagaaatctgtgagtctccttaactttcaagcttttaagcaagtgggactacaggagaaggatctgtgactagtggttttgagtatctatggttttaccggggacaccattgcgttaaagggaatgatcaaactctcaatcactttaggaactgcacctgtcgtggccaagtcgatgggtgacttcacccttatggaccagtacttagcatataacacagtgattggtcgtcctatccaaaaggaaatgaagattgtgacatccatctaccatcttatcataaagttccctacttccgttggagtgggatctgtacgaggagtccagtcggactcgcgagaatgttacaatgcagcaataaaacttgcagagaagaaatcagttaacatgatatacatgttagaagcaccgcctcctcgaaaagaagtatttagaatcgaggagataccccatgaagaaaaacaagacctggatccaagggtcctcgattatactactaccgcccaagccgcggaagatacaatcgaggtacctatagatcctatagataataacaaggttttaaaaattggttctagattaaatatacagttgcgagaacacttgacgacttttctaaaacaaaatcttgatatttttgcctggaaacattcagatatggtcgggatatctccacaggtcatgtgtcatcgcttgaacattgaccccgaagtgcgaggtgtccgacaaaagcgccgcaaaatggaccccgcgaggtaccaagcgctgaaagaagaagttgaccgcctccttgcctgcggctttatacgggagtcattttaccccgactggttagctaacccagtactcgtgccaaagcccaatggctcatggcgtacatgcgttgactttacagatctgaacaaagcctgtcccaaagacagctttcctcttcctagcattgaccagcttgtcgatgccactgcaggtcacgcacttttaagcttcatggatgcgtactcgggatacaatcaaatcccgatgtatgaaccagaccaagaacatacctcgttcattac

SEQ ID NO: 245008 - DNA, 766 bp, Cannabis indica
ctgcattgatgagctccatagtattgacagccttgagttcaatggaagaagtgaaggtttgatcacaaaccatctcaaaagaattgtaaaaaccagtctgattaagggacaagtactccctggctgatccatgaccaagccacagagagaaagggtccatacagttaaggttagttagttagtcaaggctgctctagtagctgttttggttgtttatgttgtaatataatagtcttctgtagtgcgagtttataaatacttctatcaatgcaattgctcaattactgagttttgttatttgttatgatatatatccaaactcttcaatctatattacttcacttttgtcattttctaagtcaaatcccactttagtgagggaatcttttactcaaaacactgacagtgacataacttttgtcttttgcctaagtcaaatcataaatatggatcgatttttttgacacaacataaaatcagtatgagcttgagtgagagacacgagtacgacttgataggaaaaaaatatgcttagacatgataaaaaaaaaatatgagcttatatgaaaaaaataaatttagacatgacatatgacaagttcaaaaatataatagaaagcatgaataaattaatattgaaattataattattataaatattttttatatagttaattattattaaataaaagatataaaagtatctaaaattataaaaatacacatatattttaatatatagttcatcatttgtaataaaaatata

SEQ ID NO: 245009 - DNA, 1354 bp, Cannabis indica
attaagctaaaaaaattaataattatgacaagaaattaatgtaaatatcacttatatatttacaattatgtttgcacattaacaatattaaactaatcatttattatgttgtttaatattatatatatttacaaaactttagtttacaatcttagtttaatcattaataacattatattatttaaagattaaaatgtacaattatatgtaaatatgttttcaaaatatataaacttttaagactatttttgtttgcgtatctgtacttactaattatgttcttgttctccacttaaaaaaaaaaaaaaagcccttttcatattttgattttaatggacccagaaatccagaggttctttttaagggaaaatatcgagagatttttgaatcagccgaattttgaactcaagtgtgtacataaattactttagtggggttaaagataggagcctataaatacttttctcagccaaaatcagaaacacacaaatcaaaatttatattcatagctgtgactgtgaggagaagtacttccactccactgtacccaatctcagtgagtcaggtactactggaatttggggattagggttttgggttctctttttagttctacacacaataatgtagaacacagttcaatcaatccataattaatctttttactctttccattattgcaaatctaatcctttattctcattctaaattatccttttgtaagtacatattttttaattttggccaacaaaacctaatctcaagcttgggagagagctaagctagcctgtggaaatatccttttctaattacatattcaaaattgtagcctctgctgattgctgttatggtctgctctttgtttgttccttaattttacagaacacctattcccatctttctcatacgtacacaactttcgaaagaatccaatgttatgtcgattcttcttatgtagtaagttacatttttattttgcaagatattcttttagcaagcgagtttctctttaaacttgcatatatgaccatgtgaggctgcaatcctaggtgtgtattaggattcatgaacttgttgaacatattcttcactttttcttaaagggtgattcactcttaccattgttttattcactttaatatctcttgtagagtgtttgatagaacgaaaggtagaaggccttattttaggctaatataaaatcataaaattgagatgtcttatctattttgctgaagacaactgaatttcacaaactgaaaggtttatttcgttataaattgacatttgctagtaatagaaatatcactgtgttaatatgtttggcctcttctatttgatgttcgataaagtg

SEQ ID NO: 245010 - DNA, 671 bp, Cannabis indica
ctttcccattaaattggagtattatatttatttggtattcaattatatagacgtggttggataaagtctatatgttcaataaagatatacaaagtcaagcttattagcttggttttacaataatgccaatcagaaaaatgaagtgaattataatgaaatgatccatctaactaacccaatattaatgtcccaacaaattaataaattaaaacgaaaacattgaaaggatgccagttcctaaaagtcaagcctaaaacaaaatattaatttctgaaaatggacttccatgatagggacctcattcatcacaatatcatacatatatatatatatatttatatagtataataatctcaaatatattataaatcatatatatatatattactattactaatttatatatatatatattttgtatagaattatttacagttatgtatctaagtttatctcttaattgtaaataattaatatttaaatttaatttttaacgataataatacttaattttctttgtgaaaagtgtcatttccttatggtatatttaaattaattttttaaaaaataaaaattcgtgatctaaaccaatcaaagattgccgcgtggcaatttacttaacacttatcagtcaagtatcaagacgttccaaaattataatttaagtatta

SEQ ID NO: 245011 - DNA, 810 bp, Cannabis indica
aagaagaagagaagaagaagacacatcctattacgggcacctgctagggtggtcgctgtagtcagtcctgctgcggtggaacttggggtgttgttagtgtgggagggaggggttcagagtctgatagggtttaataatattattttttttaaaaaaaatgggtcgatattaaaaaaataattaagtatggttgggttttcgggtgggttcgggtttgacccaggtttttaggtgtcacaatttcaatcttgaacctggcctgttatagtaccgggttgaacacaaacttgcctagtattttcataaccaatttttttggattttgtaggttcaaattggcgtaatttgttaatttaaaagtatttaaaatttcaaaaacaaatttaatcaacttagtattttagtacttgaacaatttaagtatttttactacgaaatgaaaatattaagtgtttgagtcgtaactacttaaatatttttaatgtaaagaaaaaatgaaggcttaaatatttaagtgcttgaaaaaaaaatttaggcatttaagtatctaaattataacggtttaagaattttaaccgtcaattacctgatgtctttgtagttcgtttgtttattgtaatcattggcgtgaagtgtctgtgttagtactgcttataaattgttgttttattttttaataatgatgtgattttttcttttaatctttcaaataataatcagtgtttaactaatattgtcgaagttgaaaataatgttcccttattagaaatatttaaaaaatgtaattagtgattgagtaaatagttctac

SEQ ID NO: 245012 - DNA, 3995 bp, Cannabis indica
tacaaaaatatctaagttatttaaatatttaaaatataattcataggcgtgcgtgacctctgtttctctctcatggtgaagaagaaacgagtggttcgaaagccagtggtggtgcggccgggaagtccaggggtgacggaagagctccctccgatccaagattctgatttggttcacgaggtatttcatgacccttgcgaagtgttggagttggagcagatttgttctgcgactgaagtgcaggtcgtttctgcaactcgcgaagaggcggaggttacccctaaatcgttgagttggcctgatgatgcagagaaggtggacttccgatccaatgctaaggatgtttggagcaagttcaaatccaatcaggtattgtccccttctacccgattgaattttatggaacccttaaaaataggagatcagattgttgctaaattggacttggaagaagtagaaattgaagcctcctactggaagaatgctatagtatgtatagttttgggtgctaatcctcctttcaaagtttttgaagggtttattaataaagtttgggggaacctagggatagaaaaaattgtaaggatgcattcagggttcactttggtgaattttagagatgaagcaacaagagatttagtcatggaatctggtgtaattcagtttgatagaaaaccagttgtgttacgaccatggtcgacagacctagattcgatacgtatggtaaaatctgtccctgtgtgggtgagattaaatgggttgggactacaatattggggaaagaacaacctaagtgctcttgttagtactataggaaaaccaatcatggttgataaggtgactcaaaacagaacaatggtcaagttttctcgtgtttttgtcgacatggatatctcggataaccctctgaaaaccatttgattcattaataagcataaaagactagttgaacaatccgttgaatatgaatggctgccatccaagtgtgctgcttgtggtatgttgggacatattgttgctaattgcaacaaggagaaaagggttacctggaagaagaaaatggaggtgggagaaaaagcctagaagaaggaaaaagcaggtgttgaagataatttggctgctgaaaaattagagagtatagatgataaggttgataagcggaatgagaatttggaagggaaaagggtcagggaggataagcagtgtactgttgctgaattgaatctgaataatgaccaggttgtgtaacatggagtggcgaatgagactaattgggtgacaccaaagaagaagggttctaaggctactattgttgagtcccaaacagcaaaaacaagcaatggttttactattttacagggagagaatgaagagactatggttactaattctaatccaaaaaattatggaagtttgtaatattttgttgttggaatgttaggggcatgaataaaaaggataaacaaagagatatccttgatgtttgtagagagaataaggtaggttttggtgctctctttaagaccaaagtgaagcatcaaaaagtagttgatgatgttgtaaataattttccaaattgggaaatcttttctagtgagataatttcgagaagaattcttctgttgtggcaaaggaagtttgttagtgtggacatcttgatagaggaccctcaacttattcattgtaaagtgagaatccgcgggttgcagattgctttttttgttactgcagtgtatgggttcaattctataaatgaaaggaaggacctttggagcaagttacagagtcttggacagaatgtggaaccttgggttatttttggagatttcaatgcaatgttccgctataatgatagaactggagggaatcctgtgtctgctaaagatattgaagatgctcaacaatggctctcgaatggtgaagttgaagaatttaaatgtgcgggatcccacaacacctggtccaataaacatgatgctggggataggatttactctaagttggatagagtgtttactaataatagttggtatcaatctttccccaatacagatgcaatcttcaaatgggacaatgtttctgatcacagtttctgcataatcaaaagccatgaaataggtcaagttggttacaaactatttcggttttataatcactggatgctatataatggctttgctgaaacagttatgggaggatggcagcgtgaaactaagaaggagggtcttgatgctgtgaacataaagctgctaagagttaaacatgttttgcgtagattcagcaaggattcggtgggagatgttactagagatttcaagagggccaaagaggatctttaccaagctcaagaggcgcttgctaaaaaccctacagatatcactttacagcagaaagagaagctcagccaggtaacttttactacaactcatgctaagtatattagctatctgcgacaacaaagtaaaataacttgggtgagatgcattggtgagaattccaactatttccatgctagtatgaggaaaagaaaacttgagaacagaattactaccttctctattggcagccatgttgaagatgattgtgggaaggtggtaaatcattttcttaatcactttaagagatttatgggcagcaggagctcagtcatagctgagattgatttggactgcattaaatatggtaacttactgaatttggagcagcaagttaatctcatcagacctttcactagaaaagatgttaaaaaggctttgttcagcatacattctactaaaagccccgggttagatggttatgggtcaggcttcttcaagggcctttggaataaaattggaggggaagtctcgtctgctattttgggtttatttcagaatgggaagttacctcccttccttaatgaaacagttatctctcttgtccctaaagttgaggatcctaaagcggccattgactttagactgattgcttgttgtaatatattatataagtgcatttctaaaatgctttgtgctagactttctgatgtgcttccgatgcttgttcacagcaaccaaggagcctttgttaaaaacagacttcttgctcacaatgttcttatctttcaggacctcttgcagggttataacaggaagaaaatttcagcaagatgtatcatgaagatcgacttaagcaaagcctatgatactgttgactagaacttcctggagaacttacttaaacagttgtgcttcccttcaagatttatccattgggtaatggtctgtctaaggggtactaagtacaatctcttgatgaatggtagaatccaaggctctttcaagggggaaaagggtctccgacaaggagatcctatttctcctctattgtttgttctgatcatggattatctaacaaggttgttggctcaatcttcaaagaacaagggctttagtttccatcctcattgtaagcaactgggtcttatcaacttgtgttttgctaatgatcttctgattttttgcaagggaaacattagctcggttaagggagtgcaagaggcgttcattaagttttctgactcctctagtctctccattaacaataccaaatcgcacatctattttggaggagtgaaggaagagtccaagattcaaattctgaagttagttcaaatgcaagagggttcttttcctttaaaatatctaggggttcatcttagacctactagatgcaaagcttctgattgtggggttattttggatagcctaaacagaaattgaatggctgggccagtaggaatctttcttttgtagggagagctcaactaatccattctttccttcttggcattagaaacttttggatgagcttattcatattacctaagaaaataactttggttatagacaaatgttgtcgtgatttcctttggggtgtcaaacgtaataagagtaagcttcatcttccctcttgggaaaagacttgtcttcctaagaaattgggggaattggttt

SEQ ID NO: 245013 - DNA, 700 bp, Cannabis indica
tatttaatatttatctattattaattaataatttttttataatttcggggccctgagtggtcgggcgcccgaggatcacgcctagctcgcctaccctcaaggtcagccctgacatccaacctaggtgaccgagaggttaaccttgataaacaacatgatcttgttgatgaagaccgatatgttaaagacacggaggaggacgatgatggagaatacatcaaagatgggtactacaaagatagctaccactatatgagcaggaccccaaagtgatttaagtgtttaaggaattattcgagactcgtcaaaaactagcccatcaaaataagatttcttagaagatagaaagaatgatggctcaccttcgaagtaagttttgagacctaaacgagggagattcggaggaagaaccctcaatagaatgtgacgaaggaaacaaggggaaggggaaggcataagtaggtgaccctcagaaccttactgctcccgtacctcctcgcaaaagcacaaatctggccgccaagctttctcaggcgcagaaggccactgactccgttgcaccaaaaaggactggtacaaaagtaccaaagcccaagggatagaaaagttgccccagtatatttattggagtgtatttataattttatgggctgtatataatttttttaaaaaaatactagtttttttattttaacatttt

SEQ ID NO: 245014 - DNA, 1361 bp, Cannabis indica
taccaaacttgtatttagataaaatatagggtaccaaatgtgtagatactcttctttatattgttctttaaaacacaacacttgttggaccatcatgatttttacactttttcacctcctctctttttcattttaaagaaaaactagttttgaaggagttgttgggagtggtctaatagagtgtcttttgagtttgggaaagaatgtcttgaagcttttcaaattcttgaggaaaaattaatgttagtaccaatagtcactacactagattgggagctatatcttgaaattatgtgtgatgccagtgactatggtattggcgcagtattgggacaaagggttgacaaggtatttcgtactatttacaatgcaagtagaactttgaatgatgtccaactaaattatgctactacggagaaggagatgctggccatagtttgcaagtgacaaatttcgaccttacttgattggaaacaaggtgataatatacacacaaactattcagcaatcaagtacttaatgactaaaaagaatgcaaaactaagactgattcaataggttcttcttctacaagaattcgatttagaaatcaaagataaggacactaagaatttcgtaacagaccatttgtcaaggttgaaactagaagagagccaaaaatagtgagtttgcaacttaaaatgttcatctaaatgtatttacttataatatttttagttttaaatcaaaaaaatttgtaaactattttcctagccacttactagtgaaaattacacattttatggatttttaaacaatgtgcaaaaatatgggtttttctccaaaaaaaaaaatcaagggaaaattcaaaagtaaatatatatatgaaaaaaatacgagtaacaatttgtgttggcgtgtcaggttcgggtcatgtcgaaatcttattattgaaaactgctcaacccgaacacgacccgtgacacgaaaaatttgtcgaacccgcgaaatctcgtgtcgtgtttgtagctagttataagttaaattattatttttagtgttatcgtgtcatgtgaaattcttaaatttattttagatggctgacacgaatatgacctgtgacacgaaaaaaatttataaagggaatttgaatttccatgcttaataaacccataaattgttcccctaaactaatactatgcataattagttatatatgacactttttgtgttttccccataataccctccccacctacatctacccactccaaccctttttctcatcaatttcacatgagaattccccacccgaaagcttccacaaccaccaaatttttttttcttctcttcactcatcactagaagctacaaccttccac

SEQ ID NO: 245015 - DNA, 1570 bp, Cannabis indica
tcagattaggattttttataaaagataagtacaacgctatagcacctaaggcctgacactatagcgccaagagatatatcttgaaataattacgtgctgaaattatttttattttccttggcattatcttttttttttctaaatctacactatagcaccataaacacagcgctatagcgccaagcaccaattctacgtacttttgcttgtttcttaactcgattgctccttgatttcagcacttcgctcaaatatgtacggttcacttctaatttgtcataattccatctttttatgcttaatactgcacactatagaaaacacatcaaatgtacacaaaacttaagaaataaatactaatttcactaataattgactaggaatgagtgtataaatgtccactcatcacatccccaaacttaaaatattgcttgtcctcaagcaatgaaaaagaacaaaactaaactagaaactaaaaaaataaaaactaacaagttaattattggatggcaaatcaaaaaatttagaccaaagataatttatctcaaaatatcaaattctctttcagttattcaatatgtacttcaaacaaaggactagaatttcaacctatttaatctaactttcaatattgtatttttattaagaatgtgtgtatgtcaattctactaactctatatacatgtaatccatgtgcataaatactttccttaccactaaacattcaagataaccatagacttgtataaccaatttatctccattaatgtaacccaaagtcgtgtagatcaaaaggactttgtaggcatgtaacgttaggcttaggtaaatagtggataagaatgtcattttggttagtttcacaccataagcttacaagtctaatcaaaaatacaaaacctttatcataaatttccttttctcgccataatatttttttcatttgatacctatttgttcacacaattagagttataatcctatcaaatgtatctcttgctattattttttttccacattatgaaatttttttcttttactcttcaaagctgtttttttttttaataacaagagacattttcaacataatatacttagattataactctttatgtacatacatcctctctaaacataattctaaaagaaattatctcatcccacttacatcatattttcatttagtacacaacaacctatgtttatggtgcaaagtagggtaagaataatttatttaaattcatggctcataatcaaggataaatatgcattttaagaataaaaattggaaaaattaagcttaaaataggacaacggagaataatgtattaagattagctttttggctcaaatgattcaaaaaaattaccttaatcatctctacacaacaaagatttaagattttgcctcaataaattaatcacacaagttctagttatcttaatatcaatcaaatctacatatacacattaaatcacatattatataaaataagtagaagaacacataattcatatcccaatcatttgaaccacccatgacctctatttcaaattagtaataataataa

SEQ ID NO: 245016 - DNA, 1147 bp, Cannabis indica
agcaataatagtatagctgactgtacaaaattgtcggccataatagtatagccaatggttttgcatagtcggctatacttggtgcaaaactatcgcctgtagtgtaggcaggcgactgtgaaaaccgttggtaattctacccagtattgttgacagttttccagtgtcaaaaaaatcttttaccaaccttgttttatcgacgtctaatctactcgattttagcgatgatcgaatagatgtcgatctcaaagactgacgaaaataccatacccgactgttaataatagttagaaaatcccaatttttcttttttatgaaataaaagataaaggtcttcaaaaacttgacacctaataggtttcgtaagagaaaacaattctccgttcttcattttttgtggtttaaactatttattttatatgtaatatacagtataataagctaattctttcaatattatctattattaggtatctaccaaaactatacaaaggccattctattttttttagaaaaaatatttatttatatcaaaaacaatattacttatttcattttacttctttgtttttactttataagctttctaataaccttttgtgttattgttatttttttttctattttgtaaattctaattttgggaaaaagttaagagattttttctttcgcttttataagaacagtagatatacaaacctctaattgcattatttttttgaaatgtaatgaaaactttattaatcaattgcattattaaaatatagcaactttaaaaaaaaaactccaaattcatccttaaatttacattaacttgttgataattggttattttattcgctccatatatattaaaaattaatttttttttttgttacttttgatatgtttggtggatttgatatgtttggtggaaatgttatgtcattttaacatatctcattggaatcacataaaatttatcagataagtctttctttaaaattttaatttaaaagtttttttataatatagtttatttatttatttattgaattcttcttaattaatagaatgtacttatcacattttggcaagagtgaatttatggattggaaattagtagtaggtcatagaaccatcaaaggcggtttcattgtttaaattt

SEQ ID NO: 245017 - DNA, 1512 bp, Cannabis indica
atgaagatttttttattgtagcaaaatattgaaaaaacgtaagcaaaaattcttatcgagagagagaggtggcgtagtttgaccaaaaatcaaatagtattatcatcacaaaaaaaatgattattatattattctttattttgataaatttgttattattcttttattattttaagaagctgccaaatatgatttttctttttctttttgtctagagaaaatagaatgaacacacctaaacctagctaatatagaattggagaaaggagtgtcttgaagaatgattcctattacttaattttatacgtaattaatctatctaaaaaaaaatatttacaatactaaagatataaaagaagaagaacctaagccagtaactgtcaaaaactatgaacggcgtgagagacgaaatttgactgttttgatttgagatttttttcaaaaggactcaactattattaaaagtatagagattgttgaaaaagagaaaataaaatgaaaaattaaaaaaaaattacaaattagaaaacatgaataattaaaaagagaagataccacgtgacctccttgtgattctcctttatatatttattatatagatgtgtcttttttttttttttaaagatgttttgattcattattattaccatcaatatttggaaaatgtctaaaactcattttaggaagataccaaacgcacaaacaataaataagggttgctaatgtataatacaaaagtaggatgttgggttttgatcaatttaattaacttagtcaaaactagcagtgtttagtattcttttatgtgtcaatattgttattagtgtaattaagtatggaatcccattaaaattaatataataatttttaggaagtatagctaacaaactataagataacacatctagaaggtactagacaccaatggtgcccaatatcaatagtctcatattatatatgacaatcctacttatattttaggttaatttgacctaatcttattaattagcggatgttggtgttatattacttattaaataatatgatatttaaaattaaaattataatatattatatattattataaatataatatataatatcattaggagttacatttacttataataatcacataaagttgtaatatggagagacgaatttaaaaataaaatttgtaacctatgaatcgataatgtgcaactaagagagtacacatggaagttaagaattgatgtggggaagtttctcagagttagaaattattacaaaacttgtttatatcacataaatgacttttaacacatttggaattggttcggaaaagagttttgaaaactcaaaagaatttttttaaaacagtttcaggcaacatgtcaccccgtaccgggcgacatgttacctagatgaagttttgcatggtttttgacgttaaacatcatatctcgaggggctcaaagtttcactacaagtgacatattgcctagagcacttttgagataaacgttgaaa

SEQ ID NO: 245018 - DNA, 491 bp, Cannabis indica
aataaataaataaacaataaatagttgtacataaatctattctataccatatataaactcgaatttattattctttcaaaaagttaataaataaaaatgagaattcgttaatagtggttagactgagtcaaagaacttgattataaaaagaagcccatttaatacaatttataatttgctgtgatatttagtgtgaaagtgacccataacatagaagaaatttagaggaaccgattttctaacctttcaattcatatcacatctttaaaggtatttaagataatataaaatcaaaacaaagacctctagaaaccttgcctttataattaatttcttttgctagacatatatgtttcaaaaccactagcaaatatcaatacaataggttaaattaatttcatcacaagcaataacctatgcctcattctcatatatactttacatttatgtataagttgaaaaatattacatacattgtacttttaagaaga

SEQ ID NO: 245019 - DNA, 1412 bp, Cannabis indica
gttttatcaatatttcctcttctataatcataagaaagtaaaacctcagaaagatgctcataccaagcttggggtgcttgtttcaagccatacaaagcctcgtctaacttgtaaacatgatcaagaaggtggggatcctcaacaactccattttgtttaggaattttaggagcaaaaaattcatgaaaaataccataagattcatcctacacagtattttcaaaatcttttccatgatcactcttaaaacgaactatcttactaatgctgcaatttttttgaactttcaatttaaagcaaacatacttaaaagtattaaaagtatcaactttttctctaaagaaattctacccatgaaaaccaagagaaatcatctatatacatagaaaaatatctttcaccattcaaactttcaatctgaattggaccatcaggtccaggtgaagaatttcaagaactccaaaagtgtacatatcagtaacatttctgtgagatgtttttggttgatttccgaactgacatggtccgcctttgcctagagcttctttatccaatgtaggtaatcctgtgaaaatccctacattgaataattcttttagattttcgtaatgaatgtgtccaagttttacatcagtggtgttatcaagagtagagtgacaagtagcatatgtaatgatggtgcaacaaatatcattagatttgaacccttgcaaaatagtttcatcttgattattaagaaaataacaatgactactatcaaaattaatagtgtaaccctgatcacaaatttgactaatgccaaggaaattaaaacttagtcctttaaccgacattacgttcttaagcctcggtagaccttcaaaattaagagttcccatccttattacttttccaacaagaccattaccaaaagtaacatctccacattacactggtataatattgtcaagatagtctttttcacctgtcatatgcctagaacaaccactgtcaaaatgccacatttgagaagcaattgatttaaaacaagaagaaacaatcaaacatttatttttgacagtccatttttatttttgagaaacatatttatttccaaaatattcagaattaaacatgttttgcattgtaatacatctaggttgaatgtgaccttttcttccacaaaaatggcatataggaatgaattgattcctatttcctttgggattgccaattaccaaactgcctactttctgtaatagtagtacattttcctgtagaatcagaatcctacaaagtaatgtcggaacatccagaaaccaaaattacagattcgaggaatttagtatttgatttagattgagccttaagaaaacccaaaccaccatgactcgtttgtcttgaatttcaaacctcttcaaaaatgttagaac

SEQ ID NO: 245020 - DNA, 625 bp, Cannabis indica
ttttttttttttgtcattttatttctctctttatcttttttcttattaatgtcaacaaaataataatttagttggtattcatattgctattagacattataatgtgctcaacattattgatgtagcgtattgtaagcagttagcgatcttctatattatttcttaatcatgatggggagccgagatcgataccacagaacaaaaaaaaaagaagatcgctattattaattggttatggtttttcggtgattcttggttgcctgcagagtgtcatctattgaaccttgtcaaattaaaatgagtttttcttatttttttttctttttcgtatgtaattaatagtttgatggtatttttattttgaatgttcatatctcaaataataaatgtttgtttctcatcgtaaatgttttttactttttcatattttatggaaagatgttattttgtttagggtaaattgtagcataaatacttaatgttttagattttaaatatttaaatattttatctttattttttgagataaaaatatttattgttacaattctctaacactgtcactaccatttcagttaattcatgaatatggacacgtagatggtccaaatgcattatatttatt

SEQ ID NO: 245021 - DNA, 2045 bp, Cannabis indica
ggttggaacgaatgaaaacacaataatagaaataaaaataggaatatgaatggaatgtatttacttgaaaattgaccttgatgatgtggacatcaatgtttgacgcatggcaagaagaaaattgacctgagaattctcacatgcattttctctatttttatcaacaacaaagatacaagtgttctcaagaagcaaacgaaagcatttgcatgccaaaatagggacccaatgcctaggttgacattggggttggtccatgcgcccaggttgacgttaaacctagttcgcatggttctgctgctcaaacgtaagttcttttcttgacattcttcttatcttggtccaaaatgaagtaatagacctcctttgcaattttgaatgccatagaagtaccaaaacgagtcctgggaagctcagtaatgagcacccaacgcccaggttgacatgtgatatggtgcgctagatttttcttatccgatttgagttccgtctctagtatgtgactatttttttttgtagtaaatgagaaatacgactcgtgacaagtcaaattcaaactttggtatttcacctttttagcaaagtggaatatcgacaaatttgtcgcaaatcgggaagttttgagtttgcccgattttgcaaaaaagcaacatctccgagaactggtaaacaatttcactagagccaagcaattgattaagtgatgtctaaatatcatttagacatcaaaaaatacaattccgacacgttttcttaccatacaatgtccaggttgacgacaaaatgtcaacctcgacactgactgttacatagccttcaataaaacgaccagaactcactcaatattattccgattgacatgattctaagtgtgtttgaaatatcttttcaagctctttctacacacgtacgtctcacacttatatctcaattatgaatattttaagtctaaaattcatccctaagttgaagtgcaattttgtccgcaaatatcccaaaaagattcgacggacgcgattcaagctccaaaaattaacgatcatccggagtcattttaaccattagatcaccatcaatggtaaagactagcccaaaattattttttcaattttttgtaatattttattattattttaatggacatccttgactattaaaggagagctccactagctcgtttttcatattatgctaagtctccataaggtcagagcatatccctatagtttctctttctagaaatatgagctattcccttagttaattctcttgtaattctcatgagtaataaaagcttgaagtaaatgtagctccattactatcgtgatatgtctctcttatttaatttctttcatctattacttttcttgccaatctaacgagatgatgttagctaattttcaatattaatattttggtgctttcattaagagccacaactcgagttccttattatcgtttgagttcttcactaggagctttattccgaaaatattgtctatattttttaccaaaatacgtggcaagtagagaatagaacatatatctatggggcacacgtagaagagatgacagatcaatatttcatgttaaatttcaaaaaacattctgaaagcacggggacattcgagactgcacaacgattctaaaaggattgttgaaactaggttctaactctgtcctctaggagagtgagagcctcctggatcatatagcgtctaagagctacaaaggtgcctgactcctctcccaagacgaagcactgtagataactgtttcagcgcagatggtaaagtaaacctgccctaaaaaagaagatatctttaggatttagaccatattgttctgacattgtgttttcctatgaacgctaattgaaggctaatcctgttgctgtcccataagccgtatagaagatagatcttgtctcaccaaactcctactttggagcttagcctatccacacataacaaacattatttcctacacttacagaaaatgccatatagagcctaaaggtatgaggatgtaccaatcacacaaga

SEQ ID NO: 245022 - DNA, 3469 bp, Cannabis indica
gaagaatccagtttcaagagaaggagattcagactcagatcttggtaataccctgctacagaaaggatacaaaggttagagatctgagtggaaggaaaaattaaattccgctgcaaccactgtaaggttcttgaaactttatatgtgtttatttcatatcgttttaaaagttcatgtttatgatgttaaaaacatacttgttagtaaatctagatcctggtaaaataattccaacagttccaggcataggccggccagcctaaggacatagtccctatggctggatagaccccatgaaggccacctatggccagccaagcttcaaacaaggcctccttggctggccaggatctgcacggatcagagcacgtgttttttcaagaactcaaacatgttcttcatattcttcgtgttctttgtgactcaaagaggcaagaatcacaacaaaggtcaattttagttctttttcgtctaaaaatcacacattatctatcctaagtctatcatgtagatcaagatatcgaatggactacaatctaacataagaatcaaagaatattctaaacatgaaaaatgttcatgcattcatggcaaaattaatcaaaccaagtgaaatggcaggaatagaaagcttacccactacaagattttgttggagaagaaggtgggaagcttggatcgttgaaacagcgtaaaaatcttgggaagaatggtgcttgtgggttcgaccaactagagagaatgaggagcttttaaaagagcaagtttctagtgagagaaagtgaaaagttaaaattgagaagtgaaaaaagggtttccccccaaaggtcacttatgtagcacatgtgggtcccttttcttcacttacatcacatacacatcataaaggcaactaaagtagttatttctctactgaggaaatgagatcagacaatgaagaaaaagtgttttaaaaatgcatcaacttttactgggcaaaggctacaacaatcccgacaacatcaatatagctggtaaagtccctacccgtatagacatccgcacagggacttagaggaaaaatgttatcccaatttttgtcctcgcgatgtggcatgtttacgtagacaaaatcagggccacatggcagtacaattcaccaatatgaaggctaagtcaacacttgaacaaacggagacccgatcactcaaacgggcatcaattgatagaccagctccctcttagaagctagctggccctatggccagccagctatgggactacaccatggctggccaggctggcctccacaatggtctggctagccaagagctgcactacaggctttcctggacacttctacaggtggacaacaacacatggcttgggaattgggccctaagagcccaacagaatcgctgaataatatctagaatcatgagaattttagtcttttgtaaatatctaaaaaaactgcaagtattaagggatttgaactataaacttagggtttcaagcgtcctatgtaaaggccataaccttagcctagaaacctaaattgcatctaagtctgaaacctgcctccaaactctaagtgtttgataaactctctctctctcctcctaacttcctctctctcacacgcctaccttagtaacatctcaacacttgagttttgctcgtattgattcataccttgtaatctaaagggtgctatagcatatcccacccatagtgatctggatagtaactctctcggtataaatacaactaaaagtaggtcattactcgctatcacaaggggaccaaccctctataaaaaatcttgttatttattgcttttcattattatttgtgcaaacacgcggcaagcatcaaatctatacgacctcgctatcagttgatcacttttgagatcaacaatatttattattgtgtattaacagtttcacacatatttgttcgtgcaggtaaatgtttcagtagatgcatgtactcatccaaccaagtacacagatggtgccgtacttggattcagaaaatggtgacgtactagatgattagaaattcatcattttcacttaggttctatatccaatatcccactatgtaagtattttatatttataaaattatacatgctaactttactttttgtgtagatcgttcaccatatacaaccaatggataactcctatgtgtcatgaagaacctgacgactaacaatgtggatactacatcatgaaattcattgaatgttttatgaccatagaagatccaatacacatgttgacacaaccggtaaaataattaataagtattataataaatattattatatattaaatagcatatggtaatagctttctttacaattaatatatacctttattttacagggtaggttctccaattcgtacataaatgacgagataaatgttatgcgagatcgatgatggattctttacgtgaaagcggaagcagagcgacaactattgccttgttgatcagtgtgtatatatctcaatttattgttactatatagatttgtaaatatattcagatgattatttgcgttagttgaattattgatttttaaatggagtttaattattgttagtttaatgcatagatttttaaatatatttagatgatattagcattagtttaattattgtaactatatatatatatttagatatatttaaataatattagcgatagtttaattattctgactatatacatttgtaaagaaaattaaaaattaatgcaggggcaaacataatagaaaatttatattttctcctatttttccaatgtaatgactgtaaaaacctgtcgctgaaataaaaatttaaataaaaaatgtagcctgtactatatggcaaggtttaaaattatacagggaataggcgacaacagtttcgcactgttgtctattctgtccatttttcgacggttgtataggtgatgattatagaaactaatgggaatacttactgtttaaaaacatcgtaaaaaactatttttatagtagtgtcaaccaaaaaagagttacaagtaataacaaattctaactcctcttcaaattacaatatataaattacaaaatataagttaaataacacatgtgatacacaatttatttaccaaacactttatatattattctcttgataatatatatatggtacttcttaatgggtataacccattaatgagtaataaacaaatttaactataaatattaattttaaaaatgttaaaccattagattttggtccgatagcgaacaatgaaagagaaatttaaatttatatgattaatttagctacttaattaaagaacatataaaaaatactactttttacactatatcaaaaatatatttgtatgaaaaaatgtttaagtcaaattcaacttttttgtccgaaaaacttttttttccaattgaccaatctcagctcatataatgtaaaaatgagaa

SEQ ID NO: 245023 - DNA, 769 bp, Cannabis indica
ccgcccaaaccgttggtcagtttatagatttttttttttttttttttaaatttgggcgggttgcacttaaattttagcaacccgaactttagattgggttagaaaatatatagaataaaccgcccaaaccgaccgatgtacaaccctatgagatataatataattaatataaacaattataattataatatgaggagctacaaatcaaaatataagttttgtaacttatagaattacatttgatattatgtaattaaatgtatatgagggttatggattcaaaaatataattttttagctcttaaaacctgttacaatacaaatttatatcatatgaatgtttactgagaagttggagggtgagttggcttgaagaggagttttgaaactcaaaatatgtgtgctgaaactatctcaggcgacattttgcctattactaggcaacaagtcgtctaaacctgtgatagagggttttttaacgttattcaatgtatctcgaggattcaaatgttttgctactagtgacatgttgtcttgtgccaatgttagacaacatgtctcttggagttttttttttttttgtaatagaaataacaaaccaagaaatacaactctatgacaagaataatagaacaaaataattattaaataatgttacaacattacacaaaaggtacactcaggccggaccttaggctaaggcgggctaggcccatacttagggcccaacaattgtataaatccctataatgtatactgaaaaaaaaaa

SEQ ID NO: 245024 - DNA, 2230 bp, Cannabis indica
tacctcttttctgaataattttggatttaatagggagctgcgatcatcaatttgtcaactcatttgtagtacaaactgcaataattaaacaacaattatatgttttgtgatgcgatattaatgtatttatttcaaattttgtggcttcgatgtttaatacctgtttcaatttgaatttgaatttaatggggagctccgatcaataatgtctcatctatttattgaatgatctacaacattcaaatgacaatttttgaatgagtgatgatacctcagttctttatgagattagaattttgaattgttgatacctctgtgtaagcagatttgatcaatcagaatttgttgttgatggattcacctctgttgatgtttgttttttgtttatgtaagtctgattattagagtaggtgtgtttgttgttgattgttcattgaaatgttgttgaatttttgtttcagaaagctttaccgagcatcaatggttgctctggtttttttttcactgggacgaggatggttaaggtgtcgaagaaggtgacaccgtattttatgtaaattagattagccttaccgtaataagttgtaattagcgtgtaaccatatgtttatgaaacaaccaaaaggatttgtggaacctggacacccaaatcatgtctgtcttctccacaaggctctctatggattgaaacagcaattaatgtaagcagttgttaagatatcttaaaggaaccttgactaatggtttgtggctgtctccaacagactctctgcattttcatggttacagtgatgctgactgggccatttgtatggacgatagaaggtcaacgggtggctacgtgattttttgggcaataatctcatttcttggtctgctaaaaagttaaaagtagttgctagatcctccactaaaagtgaattcaaagcattagctaatgctgctgcagaagttaggtggatcacttcccttttgtctgagctgtaagtgtcaattactcaaccccatgttctttgggttgataatcaaagtgcaacatttctagctgctaattctgtgtttcatgcacgcaacaaacacatcgagatcgatctttattttgtcagagagcaaatcttagctcaataactctttgttcgatatgtaccttcgctggatcaagttgcagatgctttgacaaagccactgactacaaacaaatttctatacttaaagaacaaacttcatttagctacctcttcgtttcatttaagggggatataaaccaattaacaattagttagttaattggttaataaagtggcagttagtagttaggtcatgtgttgtaattggccactaatagaggaatagacatctttggctaatacattccaactgccccctaacggttttacctaactgtcaattatgacagttaggatcgggtcttaaataaaggctataaatagccaattgctacagcattcgggagcattagagagggagtttttgagtgctagttcagtgtgtaacagagagagattcttggtgagatgagttgttttgtaattgaagctttgcttcatgagtgaatgtgtcaagaacactttgtaaacaactttgtaatcctctcttctagcatcaataaagactaaagccattggggctgttctggccgaggagtaggcaagtgattcatcatcacttgttcgaacctcgtaaacttgaaatgaaggcattcttagtacatcaaggaatctcagaggtcattgatcgagaagagcttgctgctcttggagatgacaaagaaaaaaatcaaagaaattcagaagaaggcacacaatgccattttgttgagtctgggagattgaagttctcagggaagtgtcaaatgaggacactgcagtggggttatgggaaagttggcatcgatttatttgaagaagtcattggccaacaagctctacctaaagaagaagttgtacacaatgagaatggatgaaacaaaagatctgaggaagcatcttgatgagtttaatcgaataatcttggacctgagtaacattggtgtcaagatagaagatgaagatcaagaaatactactgcttagcacattaccaaagagttatgaacactttgtggacacaattatttatggaaaggaatctttatcaatgatagaggtaaaatctgccttgactccaaagaaatccagaaaagaagtgaagatagatcaaatggctatggt

SEQ ID NO: 245025 - DNA, 1558 bp, Cannabis indica
tattaaaccataagcatgtagaatacatgcttcaaaaatctaaattgataactaatcagattgtaatggttttatttagggcacaaaatccaacattaggttattcatggtggtcataagattgggcctattattccttttcgtgagattaggcaaggagcctctatctcccttacctatttttgacttatgctgaaggtttcttggtgttacttagacgatataagtggaacaaattaataaagaggtgttgtatggctaggggtgcccctttttctatttgttgttcgtcgatgatagttatctttttgtccaagctaatacaagaggggctcaaaaggtgatggagatgctatatagttttgagaggatgtcacaacaaaagattaatgtgactaaatctactactttctttagtagaaatgtgagtggtgccatgcgaaaggctatttgtgcaattttaaatatcaataaagctggggagaatagcatgtacttgggtctttggtagaaataaatctgctgtcttgggtttcttgaaaaagaagatgtgaaaagcgtatacaaaattaggatggtaaacttttgtctcatgctagcaaggagattttggtttgcaatgtggctcaaagccttccaacttattattccatgagcattttccttctttctgtgagaatgtgtcatgatttggaaaagcttatggctaatttttagtagaagtcgtctacgaattacttttagggcatttcttggatgagttgggagaggatgttgcatagcaaggaggttgtggggatgatttttttaactattcgtgatttcaacctctccatgttgggtaaaaaagttggtattttctgactaagtctgactggtttctaaggtgcacaagacccggtattttaaaaatgagaactttctttcagcacagcttggtaataatctaagttatgtttggagaagtctcattgaagtgcaagatttggtttgtaagggggcgagaaagggtattggtaatggagaggagacccttctattttatcaattgtggcatcctaatggttaaattttgagtctagttagtttagatcctggtctggataatgcaaaggttactagtctttttatggtgggtgagaagtcttgggatgttggtgttgttaaggatttgtttgatgagaggctagtattcttggtattcctctatctaatttgtttgaggaattactggcattggggttttgactcttttggaggatatacagttaagagtacttttaaattattataggcagactgtgatggtaacgtagatggtaatgttttgccattttggaagaagttttggaagctaagaattcctcctaaaagcaaaaaaaaaaaaaaaaaattgtgtggagagcggttagtgggtgtatcctgacaagagttcaattgaacactatacatgtggatatttatttgttgcacctggtttttcatgggacaagtgaatcaattttcattgcttagtttcttgtgattttattaagaattattggtgggtagctggttt

SEQ ID NO: 245026 - DNA, 1186 bp, Cannabis indica
agtaggcacaaatatttttaggagagttttatttgcaccccaaaaatttataaatgtactttattttaataatttttattttaaataaaatttacatgtgtaataatatattttttttttaatcaaaattccctccaattcatattcttaaaaaaataaatctatcaaaaaaaattaatttaaatattataacaaaataacattatataaaattctattaaaaaaagaaaaaaatgtataaaaatttgaaaaaaaaaaattatgaaactaaaattaatacagaataagaaaaataattcaaaaaaaaatattgagaatactttttaaaaattattttaaatttatattttaaaaatattgaaatgtaaatctacttacgactttgtaatatttttctagtcacttctctctttttgttctcttttttcttaaaagttcttaaaaaattgctcctcaaatgatctaaaattgtaaccaaaatggaagattttgatattttttttatttttttaaaaaaaaaattagagattgagactcagaagttctctaatagcaaaatttttgagaaagagatgtacaaaagctttttgtgtgctgttttttgactctaaagctttaactttttatttttcttttaagagaaaatataaatcaaaacccttacttttggatacaattgggtccttcgaggagcaagtttaagaaattttaaagagggaaggagaagaaaaagagaaaagtagccaaaagaataatagtatttttgacaaataattattaaaaaaataaaaataatattaactatgaatatataaagaaacaataacatatattaaaaaaataattcaacctaaaaagattcatatcatatttgataataattatagcatgcaaatgcaattagtcaacaagcgttattttctgaggcatgatatttaatttcccaaatcctaatcatcgtattataattaatgatatgtataattgtacatattcaaataatagagcttaaaaggtagctagtcatataatatatatatatatatgatattaatgttgaataactcaagtttgaaatattgattaaatcgttacctaattatgaaaaatatatctatattttattgtatttggtgaagaatacatgaacatagataaccttatatagaacaaaaaaaaaaaaaaa

SEQ ID NO: 245027 - DNA, 1319 bp, Cannabis indica
gaatggctacagttccagggagtgcattgctctgctctgctcttctctgcactgcactgcttttctactactgccaaagttaccagacaagaatataatagtttcacccaattttaattgcattccactaatgtcaattcttttacccctttaaaactttgtttctttctttcttttttttaattacatatgttaagtctgaggttatgctccctatcgtatacagaaaaagaaagagattatttgtactgatgcagggtaaaattacagtatcataatattaacaagtgaccttctaaaatcacatcatttaagtttgtatactccttttatgtttagctgaaccctttcttttcttttctttttttattcccttcaatgatgaaaaaagggatagctgactgaagataagagacacaaattttaaggataattatttatgagaagataactcagcattttaatttgtagttgggtgacatgaaaaatgtatctatatcaaattgaattgatgtcagcaataaatgccttttcaaaggcataaaccaaaacccaagcccaagatatgaacaatcataccatgatataccacatggttaaatattttgtactaataaaagatatgataaaatttacagtacagtttaatatttaagatagaagatcaacaataacaactaatcccatttaatcaactaaacaaccatttaccctaatcaatatatatattatttttttttggtattatttttaaaatataaaggtaaatgcaataaatgaagatgtaaaaagaaggtaaggttttagggtatgttggggggggggtccagtttcaggcttatcagtaaaaacctgaaaaaacacacctgctctgagtcacattttctaaatttcccaaattgaaaaaggtcaaaaatgtaagtgggagctattgggaaggaactgaggtatggaacagaaaaagtaaaagagttagtagtaagtagtaaaagcccaaaaccgtacacaaacctcatcttaagatcagaatagccacattggcttcagacaccaactcaaacacttctagttataaatatgtaataattttttttctttttcttttttttttaaataatatttttataaaaatcatgtctttttctcttttgattttgaaaaaaaaatattagtttattcacttttgctttatagtttatgggtttccgtagagatgtcagagacaagagctgccacagaggcagcttaggtgcagtctgcagaagcagaagcatcagagaggtgcagtcacaatatgagcagagagagaaagagagaga

SEQ ID NO: 245028 - DNA, 212 bp, Cannabis indica
tctctctctctctctcttccatcagccacctgcccccctcttcaatggaagccgctgtcctcacctttggctggcctgaaccctgttgctctctgataccgcagcttcagattactagcccccatgcaccaccgatgtcagccaagatcagattgcgattccttttcgaatgccctgtcttaggttccattttctagagttgatcttcgatt

SEQ ID NO: 245029 - DNA, 2756 bp, Cannabis indica
taaactcttatgtgtttatttcattgttttataattcatattaggatgttaataaaacatacttggtagtaaatctagatcctggtaaaataatttccaacacttacttggtaaataggtgtccctaaacctactcaaaggtttagttttaatgcctgcaatgaagtattggcctatgcttttctaacagccatagaactcaccaatacagagccaaactcctatgaagaagctattcaatctaaagatgcagagaagtggaataaggcaatgggacaagagatgacctcactcaaaaagaacaagacatggatactggttagaagacctaagggggtaaacatagttgcatgtaaatggctattcaagcacaagaaaagagtaaatgaaggagatcctattagatacaaggcaaggcttgtagctaaaggattcacacaaaaagaagggatagactacacagagattttttcacctgtagctaagtataaaactattaggattatgcttgctttggctacaaaatacaacctagaagtggaacaaatggatgtcaccactgcctttcttcatggagagttagaagaagagatttacatggactagccaaaagggtttgttgagaaaggcaaagaacacttagtgtgtaagttggaaaaatccctatatgggttaaaacagtcccctaggcagtagaacaaaaagtttgactccttcatggtcaaacatgggttcactaaaagttattatggtacatgtttgtacctaaaaggaagcaacatcacgacaaccacatacttattattgtatgtggatgacatgctgttgatcagtaaggagaaggccaagattgaaaatcttaaaaacttgctgaaaactgaatttgaaatgaaagacttgggggctgccactaggatactaggtatgagcatcaagagaaacagggaaagaggggaactaattctacaccaaacagattatatatagaatttgattgacaagttctccatgagagaagccaaacccactaagcaacctatcactaaccagcataggttatctaagactcaatgtcccaagacagcaaaagaaattgatcagatgagtaacattccttactctaatgctgtgggatctgtcatgtacttaatggtaagtaccagaccagaccttgctcatgtaatgagcattttgagcaaatacatggccaaccctggtaaagaacattggcaggccatgaaatggaccttcagatacttactaagcactcctaaagtgggtttaatctactgaagacaagataaaaatacaaaaatagaaggatttagtgatgctgactatgctggtgacccagataccaggaaatctacctctgcctactattttcaaattgaaggatgttgtgttagctgaaaagtacaacaacagccagtagttgcactatccacaacagaatcagagtatatagctgttactgaagctattaaggaggctacttagttacagggagtgatggaagaaatcactaaagaaaggaagacacctattgtgtactcagacagtcaaagctgcattcatttgtgtaaaaatcctatctttcatgataggacaaaacatgtcgagataaaatatcattttatcagagacaagatcacccaggaattggtgaaaattgaaaaggtgccaactgaggaaaaccacctgacatgggaacaaagattgtcactcttaacgaattcaagcactgcatggatttgttaggaattgacaaaggaggataagacctaggcacctatcgagctaagacccacaaggattactatgactttatctcaggttagcacatgggggatttaggtggaagtttgttgataaatccaccctgtcccaacctgtccaaacaagtaacatactttatatttatagtcaattaactatcaactaatttctctaacagtattccagctcaaacacaaagacagttagaaatcgttaccttaattctctcgaccacaaatgtatttaagcatgcctctatacccagaagaaagggaggttgttttcgaagttggttcacctcgaaagagagagaaaaacacagtgtaagagagaaagaaaaagatgaagtttttgagaaaaaaacaagatacagagagttgagagaagagagatctttgagagaaacaaagatagatcgattaccttctgagatgtggctggaatcgatgaactctaatgtaatcttggcatgatcagtaataaaattgactgagcaacagttgtggcgagcttgacagaggacgtaccccagaattttcgggcgaacctctataatctatttgttcttcttaatcttctctttactttgttgtttgtaagcattgttgattaatcttcttgcttgaatatctggagaaatattgctaagccttgtgtatttgatcttgtgtttcatcgaagtcagatctgaaacaatgaaatcaaaagcaagtttagtaaagtaatatgtgtgtggttaacgtgttctattgtctatccaacacgtggtttcaactgaaggtcaaatgaattgaccttaattcttctctaattgaatattgtgagttggtgtgagtgtgcacgtgtccaaaatcctacactatatttttacatatgttttattttgctgtttcggtcatatttaatttcttatattattcttaatgcggttttgattttttattaaataaaaaaaaactctgattttactaaaaaaa

SEQ ID NO: 245030 - DNA, 1186 bp, Cannabis indica
aaaaaaaagaacgcacccctcacttataaaaaaaagtagtcgctctccttaacttaaattctgagtccgtcactgcgtataagaacataaaatttaattactcattcaaactaaatgaaaatattatgaataattacctaaaacaccttatatatttgtacaatttttttaaattatctcaaactattaattagttcgattagatattaaatgtattggatatttaaataacgttcaatccaatctgaaatggatatttaacatccgatttaaattgaatacttaaaaataacatctaatctaattcggttgattaattgagcattgctataaggcaccagtgttacctagtaccttttcgacatgtcacgttacaattggttagcgatatttcctaaaaattattatattaaattatatgggacccgatacttagttggacctataacgatactaacggtgttgtaccctttagcatttctcattataattggatcgacattaaatttgatttatgcaccctaatttgaaggtcataacccaaggcaaacccaccaaccagtaatgcccacatctaacctcattccttccttccatttctctctctctctggactcttgttcattccagaacccttttctattcttctcttcctaaacaaaacccccttttcccctctctctctctctcatgatctcataatcttcaattcatctctaaacaaaaaccaaaaccatgttacaattctttttcacctttctctgcaatccctttgactctctacatccctcccccaagaaacctcaacctctttgttgaaaccatggaagatgctctcagagagtccaaaccttacactgatagactcttctctagagctcgccgtgtatggtcatggatcttatcttgggttctttgtggaccaagaagaagaacaaggtagaaaaaacacacacacaacagaattttcaatttcaaatcattacccttttgtatatacaactcaagtttcatttttttttgggttaattttgttattattgataataataataatggtgtgtactatggtggagtttacttcttgtgtcggcagctgtttgttttttttcttctttttattttgttaatgtaaaatttgcccacatatgaatgtgcaataattataatctggtttgtgtaaagt

SEQ ID NO: 245031 - DNA, 1795 bp, Cannabis indica
ttttgcagttttatcttttctgcatctgattttttcaaaaacgccaattttctaagcaggctgcattaggcttagggacttatgcctcttctcgtgttgagcctgcgccgcccttggcattgtgtccttttggaatttttcctcccgttttggcacctattgaggaagtcaaggaaggcccagaggtgtcagaggggagttcgactcatacaacagcagcttattatccagagcttgaagctactgcccaatctgagaatcttgaagaagtccatgtcttaactaacgcttcgccttcagttttttgcatatctacttcttcctttcctcaggagtcaccccgggtggtctctgagattatacaccctccttcatcttccaacggtcgagggtggattgcaatgcgaagagcttttcaacaacgcgaaagtttttctgtgtaaagggtttatttactttaattttattttctgtgtatttagtacttgtaagtttgtataagtgttttggtatgggtacctttgcccatgcatgacgttttgccctgccactacgcccccagttttggaatagagtgtacactctttcgaaaacttttaatatattgtaaggagggagtggccttttgcaaatgtaattagtttttaccattactaatggctcttttttttttattaagcgttgttatgtgaatttcaagctcgtgttgattcttactttggtgtcatcttacttcgtggaagctaattttattttctaataatgctttagttgctgattgtcatcttatatttgcgaatgtggctcgtttattctttcgtaaattgcctttcgtaaaaagtcttggatatgtatggtcatttcttgcctttcgtgaaaggtctcagatattcacggtcttgcctttcgtgaaaggtcttagatatacatggtcttgcctttcgtgaaaggtcttagatatacttggtctcgactaaagcttttcatcctattatttataatccatccttcccttgctattttttttaacaaaaaatacataaagcatagctacagttatagttaaggttgtagtcatagttatagtttttaaacgtagaactttttaagataccttgcgttccagcttctcgatatctcggctccgtccatagtagccagcgtgtaagctccttttctggtcgagcccaccacgtggtatgggccttcccagttgattgacaattttcccgctcagaactcttcggtgttctggaagactttcctgagaaccagcttcctagggagaaaatttctgagattaacctatttattatactgcctcgccactccggagtaatggttctgcatccgggataaggcacattctcttctctcttctacatcgtcagctgcttgtagcataaggaaagtgttgtcctcgtagtttaactcggttcgcgaagtgggtacctgtatctccgtcaggataactgtttcaattctgtatactagcgaatacggggtttcacctgtgctagtgcgcggcgtttttcggttggctcacactactccaggaaattcttgggcccatctccctttagctttttcaagccgcttttttatattgtttatgatgactgtgcttgcccattgctttgcggatagcgtggcattgagagcacaagtttaattttccactcttcggctcggtcaaggaaatcactcattgaatctatcagcctgttcttccttatatccttccagagttcaccgaggacttcgatgcccccaagtattgcagataactttccat

SEQ ID NO: 245032 - DNA, 852 bp, Cannabis indica
tgtcattttcctatatatggatctgatcatgctccgctctgtttgaaagtgtggggagatagagagaagctttgctacccttttagattcatggaagtttggacctcgagtacagaatgtggagaggtaattgatcgggcatggaccaacactgtatctcatcataatagacttcagagaaaacttcagaacactaagaaggatctcaaagtttggaatgtggaaaattttggctatgtcgattgcaagctgaaacaacttaagcatactctgggtttgattcaaggagccccgatttctcaacacatgctggaaaatgaagctggaatacaattggagatcctagagatggaagcaaagatggaaagaatctggaaacaaaaatcaagagaaaactggttgaaatacggagataataacacacggttttttcatgcttcaacggtggtgcaaagaaggcagaatcgtgttagttgcattgaaaggaatcctaactgttggattcggagcagacaagaaattgggctttatttttaggaaaaattccaagaactgtataagtcttccaatcctgagatttcagaagactttgatggacttttcaacaataaaattgcagaagaagacaactccatgttgtgccatatcccgggagacgaagcaatccgtgaagtagtttttaaaatgcatcctttaaaatcgcctggacccgacggtttctccggaatattctatcgaaaatactggagtattgttggcaaggatgtgtgtaaaatggttaaagagtttttcattcatgggaagatgcaggggcaaacgaatcacactctcatatgccttatccccaaggag

SEQ ID NO: 245033 - DNA, 1051 bp, Cannabis indica
ggcataaatccaataatctctcactttcactaaagtaattgcaacacattctataactttatagacgctatttttcattctactattcaagctaagtcttgtgaacgactctccacataatgtaatttcagatcccggagaccactacatcatcattagaataatatacagcatttgattcttgtatattttgcttatttattcttttatttccttgagttcatcttcttgattaattattttgttaacctaaaaactttccttagtgacgtggacattaatgtttgacacgtggcatgaaggaaaatgtcatggtattgagtagacccgagtcatagcagttgacctgggaggggcccaagccctgtgctgaggttgacttagagatttttgagatgaacgtttggactccaataactcgaatcaaacccattatctttcaatattctataccatgaagacatggcgcaacctaattcaagcctctggtgttaaaattacacgaacttctaacccggaagccaacctgggcacctagggtttcacccagtgccctagttaacaacctcaagtacggttttagttttcaggaccgtcgtagtgcaaagtggtcaaaactttcattgggacatcaactatacatacaacacacatatttgaggcatcgtaatcaaaatcagagcaagttaatttttgagcacctgggaccctagggccccgagcacctagcgcccaggttaacattgtgtcaatctaggtgccttttgagtgtccaatcagagatccaaatttttcatcgaatcaaccttcatcaaaaatggggaaatgggtccttttgcgaaaaaaacaacaattcctgggcacaaattacaaggcctagtgcctaggttaacacctggggctggccctgcgtctaggttgatattttgtcaacctaggcaatttaaattagagtattttaggcattctttcaagcatcttctccttctttagaaaatattgagatttaactataccacgagtcgacatctcttcgcagcaaatgtacata

SEQ ID NO: 245034 - DNA, 725 bp, Cannabis indica
tgacacgatagtaatttataaaaaagtatacacccttcaattaattatatttatccccttagaaaaattattaattttttaattaaatatgacataaatatgtgaaattgctcataaatatgtcataataatattgtaaagatgttaaacttgttataaacatgttaataagttaataagttcatcaaataatgcatgattctttatattaatcaattaatcaggtcgggtcatgtcaactcgtttataaacggattgggtttaggatttagcttttaacacgacccctccaaacaagcacaaacttattgcccaatgtctcttttattacgaagaccactgggccgcaaagcttatcccggagttatgttttatttgcattcatgctttttgaaaagagctgttaaatcatgttctagtttaggtgaaggaagtatgactgttttaccaatagttgagacccaatcaggagatgtttcagcttatattcctactaatgtattttcgattacagatggacaaatattcttatttgccgatctgttcaatgctggaattcgcctttatttagttaacatgtacctatttgaacaacctcaattaatcttgtctttctttgataagaatcaacacgctctttataaagttccctctcggaatgaatttcaataggatccagagaaacaatgtcttcatccataagatcccaagtacctggatcaatt

SEQ ID NO: 245035 - DNA, 545 bp, Cannabis indica
ggtcaatgctaaatgaaatttcactaccaaaatatttttgggtccagactgttaatacttcttgttatattttgaatcgtgtttttattaggcccaacatgaataaaaccccttatgagctttggtaagggagaaaatcaaacattggctattttagagcttttggatgtaaatgcaatattttgaacaccaaggacaaccttgaaaaatttgatgctgaatctgatgttggaatttttttagggtattcaacacatagtgtagcttatagaatatataaaaaagaaccattgttgttgaaggatctattcatgttgcttttgatgaaactaacctgcctacaagcaaaagtttagatgatgatgttgtaggtttgggagatgaggtctaaaatcttgatattggagaatcttccaatgctccttcacaaactcccaaagaggaaccatcaatggaaaaggtgaatgaaagccaaggtatgaattctaacattccacatgagtggaaattcaaaagttctcatcttatagaccaaattctaggtg

SEQ ID NO: 245036 - DNA, 1411 bp, Cannabis indica
ttttggattgatttgtttaaacgtttatatgaataagtgtgttgtgttaaaattttcaataaatcagaattaagtttgtgatccgcaagaagggaccaagatttatccaagataaatcgaaattcaaagatgagtacatcagcaaggtttgaactcgagaagttcaatgtaacaagagactttggtcttcgatgggaaatcttgaaatggattcttgcccactagaaagttgcaaaggcactcaagctaaaagaggaatcgactaataaattgaagaagggatagatcgaggatatggaggaattgggttactacacaattattgcaatgacgacatattttaggcacggaaattagcagcgcattagtgatttaattacaatttatgttatatatgtgtgccttagtgtaaaataaaacctattgttagagatttgtgatataatttcttatttatggagattttatagtaattttagtgtgtcatgtatgttagatatgaattttgatgtttttcatattttatgctcggtaacagtgaaatgtgacaatttgatcattaatgtcacaattattttggttggtagcttagtagctaagaaaagagcattttgatgatttagcctcaagtttgattttagttttttagtgggatttctagaattgggtttacgtctttttatgttcaagctgaatattttggttactttctttgaagaagagtgactcaagttggtagttgaagaaactaatcaatattaaagattgaatcgataaggctaaggcaatggctccaaatagaaatttaagaacaaagaagtcctataacactgtgattaatgcaaatgctatttggcatagattatgtgtctcgaagcatcacttcattgcttgacaaaccacgaacaaccagctcctcccttactcgtgacaatcttggtagattcttggagatgtagtcttcttcttcgtgtctagtgtgagaagctgccaatgaatctcactactacttgttatttgattgtgtttataccaagaaagtgagggtggagataaagacttggtttagctgtctgcagtggccaaattctctggtggagtggttttctcttttgaatttagtttttaatgctgtaatctttgcttctgtatattttaatgttcgttttgatagtgtttgaaattagctgctttataaaattagaggttttaaccatgcttttctcaggaaaaatgatagagatgtagctgactctctctctctctctctcttcagtttaaaattctgttttgttcggacagcttttgctatagcctttgtttgaataaatttttccattccagaaagaaaaaaaaacaaattattttttatccctttttattgagagaaaaaaattgataattgtctaat

SEQ ID NO: 245037 - DNA, 1203 bp, Cannabis indica
aaagataacaagcgtaaaaatgctccaaacacgagtaaaactaaattaaaaatatattaaattaaatctaaaattaatactaaaactaacctaacagttgtcatgagtttggaagaaacttagtgggattgtaaggatccgatcaacatcaattggagcaaagtgctcatttagcaaagtgaggttccattccctgttgtcgttgatgaaatatgacaccgttaatgtgggtggtccgatgtaagatagcggcttaaattcattatggcatgggacccacggatcactaccgcaagtgatgttatagccatttcctactttgtagcatagacctttaacaagtaactctcgaccccaatgaataccttgccatgttaaagacggtgagtgcccaatacttgcttctaaaagagagttatttgagaagtatgtatgcttcagcaaatgactaattaaggagtttggaaactcaaggatacgccatgcttgcttagctaggagagcttgattgaaatggataaacgatctgaagcccatacccccttcaaatttaaatttgtaaaattgtttccaccttttccaatgaatttttgacccattttgattagatccccaccaaaaatttgccatcatagactctaactggtcacaaaacttctttgtaaggcgaaagcaactcatagcataagtgggtatggattgaaccacttctttcagaagtacctccttctcaccaatagagagaagtttttcattccaagcgtgaagaagttttcaaattctctctttaatgttgttgaataattctgtactatctcttcctgcataagccggtaaccccaaatatgtttcgtgacattcacatataggcatacctaatgtttgagagaaataagtattcgcataatcttgcgtgttaggtgaaaatgacatgacagatttgtgattattgaggcactgaccaaacgctttatgataaatgtgcagtactctcctaatggccctttgcagactctttgttagctttacagaacaagaggctatcgtctgtaaataataagtgcaagactgaaggagcatgtcttgtgagcttgagaccttgtaggtttccaattgattcctcatgttgtaacaaacgagataatccttcaaaacatatgaggaataagtatgaagtaatggatctccttgacgtaaacctct

SEQ ID NO: 245038 - DNA, 1377 bp, Cannabis indica
ctttttccactaactcattaagtaaagatttactttatggtttttatataatagaaagttcttcattacaatgcttgaattaggtcctctccatgggatcccttatgggttaaaggatataatttcagtaccccaatacaaaacaacatggggttcaaaaagtttcaaagatcaagtccttgacattgaagcttgggtttacaaaaggtaacaaatatgttctgaatatagaagttgcatctatagaacattgatattctagtttatgactgtatatatgtgttgaatgaaggttgaagtctgctggggcagttcttgtagccaaacttgtttctggatcactggcatatgatgatatatggtttggtggtaggacaaggaacccttggaatattgaagagttctctacaggttcttcagctggcccagctgcctgcatctcagctggtattactcactagtcttgactagtagactagtaactttgtatgtgtgaactgaaaaatcacaacttggaacacttggatcaagaatggttctctcagatttttttcttttaacagggttggttccatttgctattggatcagaaacagttggttcgatgaccttgcctgcttcgcgatgtggggtgacagcgttgcggcctacttttggccttgttggtagaactggtgttatgagcatatcagaaagcttggtactgctcaactctcttttcttttttggcaggagagtatatatatatattaagtcttgttcacacattttcctctgtttaacaggataagcttggtcctttctgtagaagtgcaacagattgtgctattgttttagattctattatgggaaaagatccagatgatgtctcatcaagggacatttctcttggtgatccattttcggttgacattaaaaaactgacagttgggtatcttgatgatgctgatatggaggtagtgtttcaattttaattttttacttgacttggtaacacttaacatctgtaagcagatccaaactaagctgttttaggatatgattcattccaggttgttcaagttcttgcatcaaaaggtgttaacatggttcctttcaaactgaattacacagttgactcagttcaaggcattataagttttacaatggatgttgacatgttagctcatttcgatgagtggcagcgatcggggaaggatgatgactacgaagctcaagatcaatggccggttgaattgcgccgagcacgcttcttcctgctgttgactatttgcaggttttcctattctctttaagaaatctaaattggtcttattttatcttaatccatgcatatttgcttatattaatttgtatttcactcctatcttttttgaa

SEQ ID NO: 245039 - DNA, 1362 bp, Cannabis indica
tttttctttcatagtatcttatagattttactttggaaaaatgattgagatacacttaaattacacacactttatacacacaataatgtgtaattaatctcaactatacaattaaaaagtgatatggtctcccttaaaaatataaatagctaatatttattacatgtccaataaatatgtataaatagtgtgtatctagtattactttgtatgattatgtgataggattttgttaacaaaataaaattaaataggaaaaagaatttttttctcaataagagagctgagtttttcaattaataaacacgtgtggtattgtgatttttgaaacacagagaagacgggaatttaggggacacaagaattttattcctgaagttttttttttgtttctttttaagttcattcctacaggtttgattttcattttccaattccaattcgaagctccaaatccactccatctggaccatctctcgtattattgactgatactaaaatttcaaaattaaataaaggatacaagtatgtactgacattaatgtttgcaccagcagatccaaaaccctagaattcccgggtgagcacgctgacgagctcattttaattccgaaatcacatggtttcttactttgttttggttcttaaggctcacttttgactagttaggatacagaggagaagttgtgtgaatttcattgattcaaattcattcacaggttttaattctgttattgtttcttcaatttcagctgctaagaaagcgcagatggtggtttgataagtcttaactaggcagtaatgtgggttattttgggttattcggaaagagcggtgcttctgcgtatgcattgttgtgcgaagagatatgaagagtttaacatgagcgatggaggtggtgaggaagtcaggtggtgccaatgattttgctagagcagttgtgaaaggtgcagtagagcaaatatgtgcgagtgatggatttcaggctttccagagcaaataattgggcacttgcctaattggtggtttcatctacatcaatatttccatcaataggtatctcccttaatctctcaacttctcgactttatgagtaatgctagatgtcacaaattatcatgaattagcttcttatgacaatatatttattaaaaaataatctaaaaaagtgaaccataaattagtgaaataaaaaattatggcatgccatgttattcttgatagattttcatgataaattttgatgatgtgtaacatttttctatatatatataatctgtattttgtctgctttggtatccattaatattctattgggtgagctaatattaatattatgtacgttgctgttcattaagtgtg

SEQ ID NO: 245040 - DNA, 1189 bp, Cannabis indica
ctatctaagttgattcttagacagcaaattagtggctggttccatggagtttcaatatccagatctcgccccggcggttactcatttaatgttctctgatgacacgattttgtttacccgtgctaatgtgagcatggcgaccaagatcctggagtgtattcataattacgagtcttggtctggttagaatgaagtatggttaaatcaagtgttctcttcttctgggaatctggtgagtaccttaaaagctaatattctgaaagtgctaaatgtgagggagtgcgatggtcatgaaaagaacctggggaatccttttgtgttcaaaaagaaaaagagagaagaatacttgtatttgaaagataaggtattaaaaaggattgaaggatggaaaacaaagcttctttcctttgcgggtcatactaccttggttaaatatgtggctctctcaatccctatgtatgcgatgtctacaaacaagctcccggtctctagctgtcgagaaattgacagagttattaggagattctggtggacaggggatacagagaaagaacgcttcttggccctagtggggtgggatcgactttgtactcctactcttaacggaggtttggggtttagaaagcttgaggatatgaacaaggcccttttagccaaactggcctggcaaatggcttcaaaaatggaaaggccttgggtcaagtgtctctcggaaaaatattgcaagaaggcttcgttttggagtaaaaaagtcagaggtaatgatttagccttttggaaaggaatactaaattctaaagatgtgattcgcagaggaggcatgaccttggtgggtagaggtgacacggtggatatttggaaacaaccatggattccatggcttgattattgtgaatttattaaccttatggatcaagtaaggtcgaggtttccgaactttaaatcagtggcagacatctctaatgataatggcagttggaatattgatcttcttaaggaaatgtttggagatgcatagggtgaaagaattggaaaaattgctcgattaccttgcgagaatagggacatgatcgtgtgaaaggaggcgactgacgggaatttcactgtgaagagaggctatgaagctactcaagtgtgcagatgttaggctatttttagcctatgttttggatctaatttatgtgcgttt

SEQ ID NO: 245041 - DNA, 511 bp, Cannabis indica
ataaaacccaacacgaaggtcatccatctccattatccttctattgacatggaagagaataaaagacagatgggactccacatcattgtggattctgttattacgctccctccaaatcttttcgaagataatcgcggccccctccaggaagacattgaaatttatcccacttggatagtttgtgtccaccttaaaccaagctagccaagagtcccaatcatagatacttgggctatcggttctcaaatgctatacgcagccaaaccacagtgctctagcaaagtgacaattccagaagagatgcagggaatcctcaaccaccagggagcacataggacattcagtgtcccgaatgtagaacatggagagcaatttactcctagtgaggaggttattggagagaattttccaccagagcatctttagtctattgtggatgtgagatccccaaataattctccattttgcattgttggaatccaatgcatcgacatttttaaccacccgatat

SEQ ID NO: 245042 - DNA, 2243 bp, Cannabis indica
tttttttttttgtatgattttaagattagtagccgtgaatctagtacttctggccatagtaattaagagttaagtgagtagcggtagctagctggtttgtggggttctctaaataaatatttgtataattaatcagtacgtagtacaattaatgtcatttggtgtgcttttgtttaaccttttcctattattggtaatgatgatgatgatgatattatggttgttggggtttccttataggaaactctaatacctaagaagttgttaataataattttgttttgccaactacatattaatgctaacacgtattaatattactattgatttaattaaataatggtttcatataatttaacataataatttataagacgacacacatattttatttattttgttatcagtgtaattaatccttttgcactttgcaaattagtttgtacaatcaataataataacatggaaattagtagcaccaatgcatatttttttttcacattttagataattttagttttattttttaatatgacagtgtatattaatataattatttaaaatattttattaattttaaaaatttaaacatagtttaacaagttaaaaacatgatttaaataatttattgtaaatgtatttttttttattttattacacatgtaaaataaattattttacttaaataattaatatgtacaatatttatatatatatatatactagacagaaagtacgtgcaatgcacgtgatctttgttagttatttagatttttttattttgtattttaaatcactttgaccaaagtttttattatgaaagttcactgtagagattattcgaaatgtcaataacaacaacatatattatactaaatgataaggtacttgtactacttaacaacatattgttaagtctttcataataacaaattacatggttcctcaccttagtcaataagaagaaaaagtcttcttttcgttgaggaggtctgtttcaggctcttcaagaccttgcttcaaacctccacttcttgatttgaattatccttcaggagaaagaagaagctagattcattcccggcaggaccttagtgaagatccttactcttcagctgaagagctattctccccaacaaagatccactcataaagattcataagaataggaagagaacttaaatagaatagaggcagaacatagaaaaacagttggtcacacaactattttggtaaaacagttgctaatgaaagtataatagcaatgattcctagaaagggttcctcctggaatccctgtcaactttgttgggatcaatttaatgatggaaatttatttatttgggaccagattaatataaaaatatgtgttggatcatcatataaataaatcaaaattatgtaatttattttagagcataattgtcattagttactgattttttactattattaataagtattggtcctcattttgcatcataacatttcatattcataaattcccatcattaagacaataaggcttgagaaaagaagtagcaacaactatactattttgtaacactgcaatcttatcaccattattagattctaattttattgtaaaatctaccaataattagaagaagaaataaaagcatttagcatccagagtaaaacaatataataaataaaattgaataaaagacattctatttgttattttttaagcctcaaggtggtatttagaagcaagtgctaacaacactacataataaaattaacaaatataataatatctgctgctactcttgcagccaaaactgatggagtgacaacaagggcctccgaaattgcagcataattaattgctaccatgatattaaaccagttgaaaaaaaaaagttttctgcatcataaatattatagctaagaatagtataaattgtgagaagcattgataaatattgattgcataagggccaatgcaaaggccaacaaatagaaaaacagataagtatctgtttttttattattgttattatttgatggagctagtccaaccaatttcatggtactttgtcatcatcaaaacaaagtcaccaactaacccaaatacatagtatatatgtagttctgtataaggtatatagagactatcccagggtacctatattgtgtatataatatacacaatgccattaccttatctttgctcacaacatacacatcttttttaatacataacctcacatatcgaa

SEQ ID NO: 245043 - DNA, 2534 bp, Cannabis indica
agcttgactcgcacaaaggggaacaacccctacccacatggcactagctttgttaatcaaagcatcattggcttaaacatgtgcaacttggtttgcttctcgaaatacaaaagaaatccctgccactttgtcattttgcagcagccatttaatttgcgcaatgagcccatcgacatcttgacatccttcctcctctttcatcactaagttaactgcttgaaggcaatcagattcaatagagaaggaggacaggttgcgctgtataccgacctgaagacccatcagaattgcttgcaattcaccctacaatggcgtgatcttcttctgcacaaagctggtagcagccacaacaacccgaccttcatgatcccagacaactgaactaagcccagctatgtcttccccaaccttgacccctgcatccacattgattttaaaagagcctcgcctaggtggggtccatcttgccttttctctcagctgtccaacttgagtcgacacattactctctctaacttcatgaaggaacttactgcaccattccaatatcgcactagcttgaggcttgtgtcccccatgattaaccgagttgcgaatttaccaaaggttccaagataaaaccagaaaaaattcaaattcatccttagtgaaagaacttgaaattctcatgaggaatgcaagcacatcctctcagccttgtcgctgtatttttccataaaacccagctccattccaaacctctcagttaactcgacatccctatagtgcatgaaaaacattctcatacgcacctgtagaacacctcttacaataaggttctacctgaatatgtcgatgagcaagagccgaattagtaggaatccatgaatgaaccatcttccaaacaaagtgttttactttcggcggaagtttcaacttccaaagcttgctccaccacttctcaacagcctgcgtatcggactgtacatctcatacttgtaaggcagccgccatacgatatccactgcaaacagaatactccccatccttactataatgccatagtattttatcttcaatatcccattcaatagtagccattcccaaaattaattaagcatcagttggattgaagacagctctaataaactcctcatcccattccctattacgttccttcaaatcaatgacatataactgatctggtagaggcggtttatcatatatcttaaaagttacagggcgtggcagcaaggatcttcaatgactctaacagaattgccagtaacaattctccatcgataccctttctgaataaccttcttcccccaaaccaaacttcgccaaacaaatgacgcatgattcccactttttgcctccaccaccaccatttgggtaatagcttgctttcaacactcgactacatagagaattcggaaaccgtatgcaccgccaaacttgcttagctagaagagcttggttaaaaagtcccaaatcccgaaaacccaaaccacgttgctctttgtgcttgcataagacgtcccatttacaccaatgtatcttcgaatctttctccgaagatccccaccaaaaccttgccgccatgctatgaatgctattaatagttttcttcggtaggcggaagcaactcattgtgtaagtagggatggcttgaatgactgcctttataagaacttcttttccggcagcctagaaaaacgatcctttccattcctttaacttgttccacactttattcttaatgaactcaaagtgttgctttttcgttcttccaacaaaagatggcagcccaaggtacttcccataattatccacaaccttcacccccatgatatttgctaaatgagtccgaactggcattgtaacattacgcccaaaacacatctccgatttgtgaaagtttaccaactgtccagacgccttagagtatttttccagcagctctttaaatcccttacactcatcctcattcgctgcaagaaacaccaagctatcatccgcaaaaaataaatgcgacaccgacactccctgccttccgaacccaatcccatgtaactgtcccaagtgttcagcatgttgtatcaaacatgaaaaggcttcagcacaaagaagaaaaagaaaaggcgatagtggatcaccttgtctaagcccccgttgcggaataacttttccttgaattttaccattaatgagaaaagaaaaccgaaccgaagtaagacaactcataatctttgagacccacaaagcactgtaccccaatttcaacatcatcgcttccaagaatctccattccactctatcatacgccttcgccatatccaatttcaaagctacttttgtaccatttcaaaatcgatttttcttcatcacatgtaaacattcatacccaacaatggcattatcatgtatgagccgacccttgagaaaagcgctttgggagtcagacactacttggcctaaggaatgacaaagccgattagccaaaaacttcaagacaatcttataaatcacattgcacaagctaatcggcctaa

SEQ ID NO: 245044 - DNA, 1455 bp, Cannabis indica
gacaattttttaaatgcacatttcaatatgtttggacaaattaaatgtaagatcttaattcctaattaatttcttcttctttagtttgcataagaaagtaaatgttaaaggaaatgtaagcttttaagcacaatatttacaaagtttcaaatacactaatgtaattaagctttgatcacgttaaaaaatacagcaatttagtgtttgttggattttcagaacgtgatttttaaatctgaagtttaataaccatcagctcgtacactaattgggataataatttaggaatagtcatttttttactatatacaataggaagtaaaataattagtaaattagacaaaataaatatacataaaccgacatgacataacaatcgacacaagagattcattgactttactttttgttctttttacctttattttgaaaaattaaatgggaaaaaattgacagggattataagagatttttagaaagaatataaatgtagtgtgaaggaaaaataccttgtaagattaattttccaaaagaaagaaggtagagagaaaggatgcacccgcaatggtaaaagtaacaagttgttatcacttatttagtattgatatgagacatcaaagtgtttagcattactaaagtggtattttataattagctagtaattcattataatatttattaaattaagtaaaatatatatgtaacacttgatattaaattataccaataacgatattatatatcacaaaagtgttaagtactatttctccgcatggtatgaggataaaatctcttttgtttaattagacaataggggttagttctcccttttgttcttttttttttttccgtaacctatataaggtatttttaattatggtaattaataaattaatttcattttctgaattataagtatattattttttctctttctaagagtagcgccaacatgaaatatggcattgaaaatagttagtactactattattgggtaccaataatacctagccctatcaatatagatgatgttttacgattggttattgattgatattccctaaaagttattaaattaaaaaaataattaatattttttttcttaaactttcgacactacctaattttacctcttaaaacctacggcttgttaaaaaattcttttaaaatataacagttacataattatgtcattctgttaggttctgtttctattaccgttaatagcatttttactcgatgaccaatacaaaattttgtccccttttattaaaataattaattttaaaaattataatattttattaattttggaaaaattaataaaaattatataaaatctgatactaaattataccaataacaatataatacataaaaaaaagtactaaataccattaaaatactttaacatttttctttcataatagttattaaattaaatcgtattaaatt

SEQ ID NO: 245045 - DNA, 1126 bp, Cannabis indica
aactcggctgtcactgcaagaataaaatttttgtaagcctttgaaagtttagaatatgacatatatctagaaataggaaaggaagtggaagttttctcttccaacaaattgtagcattcgaaatcttacaaatagcttggtggccgaggtacttgtgagcttcttctaggcacaacggggaatggccggctgtagtaggtggtgcgtcatgctgctcttcaacgcccgctgctggagatgaattttctgctgctatgtcagctgctggtgttgcaatttgttctgctatgtcagctgctggtgaatgatcctgcaaaatagagttaggaggaacaaagctattgtctgcgattggataatctgcaataggggtgttagttacatgatcatttgaaaaaataagaggcaagaatggatcgatattttcagcagcagtattgagtttgtgaaaaggaaaaacatggtcatgaaaaacaacgtttcgagaaataaaaatctgcttagtgttaagatcatataaacgatagcctttaagtcccctaggatatcctaaaaacacacaagttcttgcccgaggttcaaacttagttctgtgggaagtaagttttgaagcaaaggcaagacacccaaaacatctcaaacttgtataatcgggttggttcttaaaaggaatttcataaggagttttgtttgcaagatttggtgtgggcgtgcgattgattaaaaacacagcagtgagaaggcactcagtccaatattgaatgggaattttggattgaaaaagcaaagctctagccacatttagaagatgttgatgttttctttcagcaacagccttttgttcaggtatctcaatgcaggaaaagtcatgtaaaatgccatacttagagaacaattctttgaaattatgttcaggagcattatcggacctgaaacgtttaaaaaacaattatatggtttgtatgtaagagataaattcaggaacatagtaataacatcatactttgtctaaggagataaatccaagtgaatcttgaatgatcatcaactaaagtaaaaaataatctatgattgaattgagaagtacatgataaggtcccatatgtcacaatgtatgagatcaaaa

SEQ ID NO: 245046 - DNA, 1916 bp, Cannabis indica
tcctagaaacacagttcaccacctcctggcacgatgaacttgaagctttgaataaagaagaaaaatagttaaccataacttgagatagaccatcatccaacccgacccatgcatcattttcattctttaatctcacaatctgattatgtcttcttctagagagagaaaccttgtgaaagtaactactattatggtcacattctttcaaccagagttatttagaccactatttccagaatgcctcttgttgatcaatcaccttgaacagttcgttcttgacttccatgtgccattggataaaggctgcatctctcttattcctcagcctttagagctcctttttacacggctgattctggctttgaaattaccagtcacatccttaccctatgagcttaatttctcagcacaaagagccaatttgcttgaaaaattacccacattatctatttcccaacaatcgttaacaatttcaaaacacattggctccttggaccacgcattctcgaacttgaatttgcagttatagggaaatttttgttgaggtttaggctctaagaatattggacaatggtctgaaattgagatgtcgagattcaatagagaggcttcttggaaaatctgagaccaagagcgattcaccaaattaagcacgatccaaccgaatctctacccattcactagtgcctcttcctttctcccaagtgaacgggtaactagtaatctccaggtcttctaagttgcagtcattgagggcttgttgaaagccatttaagagcctttgagggtatggacatccaccatgtttatcctcatgtctgactatgttattcaaatctcctatcacacaccaagggaggttcgaatctatagctaacacgcaaagtaaattccatgattgatatcgatgagctcgaactggttccccatagaaatcagttaacctccataagcccttcgtttaagaacctacaagaaaatcaatgtgattatttgagaaacccaacacccgctcttcctcttggtacttccaaagcaaagttaatccccttgaactaccttaggcctcaaccataaagaccccttcaaaccttagtatacggcccacacgttcaatcttccatttgttacactttgtttcacataaaaaaataaaataagaattcttttgagatataatctttttaggaattgaacagcttgttggtttctaaactcgcagcaattctaacttaaaacattcatacacagaacctgccctaaacaaattttttgtattattatatataaagatttaataataatttttcaatctttttagctataattttgtagtttttttttttggtttaaaaaaaattgtttcatatccttccatattattttttctaagttttggccagcttacaaatacttccgacctccatcctttataatgttaagggtaaatagtggcataagtacccaaagttttatgtttgtaagcgacataaatctaatgtttatttttagcggcataagtacccaatgtttgtaaaactgtaatttttctctaattttgttagtacagactctgttattgtcttaaatagggcacatataaggtttaaattcttgatcattgagtctaaatagaaacatgtagtttcagttacttctaaatattcttttttaggtacttatgccgctatttatcctaatgttaatcaacatataatgtaagataaatataatcgatacacaaatacaatatagataaacacaaaaatgcaatgttcggattaggattaaaatttattgacacaaatatatatatatatattaattaggttaaaattaattaattaaacatgtcaattatataacatgaacacaatacacacccttaaatacactaggtgaatgtacgtggcgag

SEQ ID NO: 245047 - DNA, 1032 bp, Cannabis indica
taaataaaacaaaacaaaacagaaaaagaaaatgtcaatacgaatttagatcatcatgtgtcaagttttttttatttattttttattttttatttaaatatttatatattacaatatatattttgaaattcaaaccttagacttccaataaacgtacaccctttatcacttgaggttctcaagtagttctttctgtgttaagttagtactccaaaagtgcggtatcccttttaaaaaataataaataataaatagtgtgctatgtattatgcaatgctttggcacataccataatttattgcgtaaatatttatatttaactttcgattgttaataaatatttaattttgattttaaagtgtaataatacttaagttatatttatagaacattcataagtacctctccgttaagtgtccagccattatccatgtgtcatttttttattaatttatttaaattatttttgtaaataaaaaataaaaataaaaatttaatgatctacaccaataaaaaaactcccaagtagtcattgacttcacacattaggtacttacacaaattctgaaaaaatataatataggtattattaccgttaaaaattaaacttaagtatttatataaaattaaacttaaatatttatgtcacaaattactctacagataaataaaaaatttcaattataatattgtaattagctattaatgattgactttagtacatatttttaattatatgtattgccattaattattttataaatatttattttatcagcaactatataaattatattttattttttgtattaatttaatttacagtttaaaatactatttattggagcagttgggagaaatggaagcataataataggaatgagaatgaaaatcaaaataggaatagaatgaaataaaatttgaaatgcataaaaaattaatataaaaaatcataaaaatttgctcatattacattggaattattttttcttccattcaaaatagaatagtcactctaccaaaatggtggaa

SEQ ID NO: 245048 - DNA, 885 bp, Cannabis indica
atctaatggctaaaaaaaatgtaaccatattggttacatatttaatgtaaccattgaaacctcctccataattatatatactttatatctctaatcctatattattacatattgacatcataactcaaataattttattttctctttcttcaaataattttctaaaacaacaaatgatcaatagataagattaattcaaattaatcttttcccgctccttctctctcttttggtgtctcaccagagctatggcaaaaagggcaaaaatgaccgggaaagggaaaactaaagggaataagactggtccatcttcctcggatagagtcatcaagactagatccatggacgcagtgttaggaatacaggaattggagattgaggaagctactgattcaatggaacagtgtcatgaggaaaacgaacactacgcagagaaaattctttcacctggagaatcggagctaagcatcaggaggcagagtgagattcgtaatgacttctcagactggctctcgatcgccaatcgaactgctcaagacattaatactaagaaaaaggtatcacccctattctcagatctaatattgtcagaaacctagaaaactcgtttgaactttcagataatgaggttgaggtcattggatcaaagaagaagattaaaattgagtttgaggatatagcagaggaagttaattactggaaaccttcattagtttgctatgtaattggagcgaatcctcctataaacattcttgaaggttttgtgtgtaggctgtggaaggaagaagtggttaaagttggcctacttgctaagggaatttttatcataagattccagaacatggagcaactagataaggtgatgcagcagggatatgttttctt

SEQ ID NO: 245049 - DNA, 508 bp, Cannabis indica
ggatcctccaatgagcatgattctggtgcaggactcatcttagtaactttagagagatttcaaacacacaatgcattgcaatttgagctcaccccaataaacaataaggcagagtatgagccactcctagtaggactacgattagcactagcaatcaaagccgactcacttgagatctatagtgattcatagctagtcgttaatcagattctcaataagtttcaagcttgagggtcaaacatggtatcatacttaaacaaagctaaggatctatagcctagctcaagcactactccatccaacaagtgatgcgtgaatagaatgcaaacgcagactcactagctaaactagctaatacaactaattctgacactctcggtgtaattctcatcacatacctagccaaacaaagcttcaacgaagattaggagcctatcgtcatgatcgaaaaattgtacatcatggatgactccgattgcccaatacttagaacaaggtattcttccaa

SEQ ID NO: 245050 - DNA, 1060 bp, Cannabis indica
aattgaagccgctcattctcgttgacttaaaatttctctatcatagttgaccacttatattcaaattcctcagctacccatgaattataaacacaaatgttgaaatctcttataaaatgttcatttgtctttatcacataaccaagtttttcaggaatcctccttaagatattccatagacaaaagcgatgtcttgtatatggaaaaacatcactaatggctgctttcatagctttgtcttgatttgtcaataaaattggagctttctcacccagctctaagccatgctttcattagcgaaacaaatgtcgatttagtctcatctacaagtaatgcacaaccaagcaatgaagtttgaaaatggttgtttacacctatgaatggagcaaatggcattttatatttatttgtgatgtatgtggtgtcaaatgagacaacatctccaaaaactttataatcttctcgactttttgcatccacccataagacatttttaaggcgttgctcttcatccaagtcaattgcataaaagaaattagaatcttcttcttgcatatgcataaaaagctcttgcatcgcactagcatccccggaagctagtgccaagcgtttttccttgtccaaatgatttcttatgtctttctccaaacatccaatgttttcatatccattatttaatttggccatagcagcaaagttttagttgtgcttaccccaactgcatgtaaagtgttaatggtctccttgtttgatggtttgatgcttctatgacatgagaaataaacataccactttccttctaatttccttttaagatccaatgttgctttacaatctatcttcaagcaaggacgtggattacatgaaatactttctcgttttgatcccaatcttgtacaaacaaacttaacatcaataaactcattagaaatctttgatcgacactagatcttcttaagatgccaaatcctataatcttagcatatttcaaataaaatacatatgcttcttcgtgtgagttgaatttcataccattgcaagcaggggcggagccaggacc

SEQ ID NO: 245051 - DNA, 1352 bp, Cannabis indica
tacttaataaatttataatttgaaaatttataaaattaaaaaatttatatatattaattaaaggataattttaaattttattttattttaaataaataaataataaaataattaattaagagttaaaaaaatatatataattttacatcagaatttatatatttttttaaaaaaaaaattagttaaaatttagtaaaaaaaaaaaactactataaaaatattagtttattacttaatttttatatctcagatttttaataatataaatatatatatatcatttttattaaataattattatttttttcaatttaaaagttaaaaactctaaccctactctcagtctcagccgcatatatgcctattacctaaccctattatcacatctcttcatcttctcatctcatcacaaactaatctcaaagcttctctctcttagttgcagtggacggtggaggagatctctcttggtcgcagtaggcgatggaggaggcgacgatttcaaggtcgtggaggagacgacgacttgaagggatggcggaggagacgaccacttgaaaggatggtggaggagacgacgacttctctttgcacagtgaaggttggatctgttatatatagtttatggagagttcttgaagtgcgggtttttattttttaggcagttttatgggggacatttctgagttttttcagggttttgattttgttttcttttgcaggtcgaaaatggtggaggtttggaaaaatcgatgccggcggcggagaattcaaaggaaatttttggtccccccgactccaccgctagctgatctcgataaatgtggtccaaacaaaggttgaggaagaaactttgggcattaattgatgtggtataggacgtgaatctagaacgaggttgcatctgaggacgtagttgtgtcaactccgatcgtgtctcctctccttcgtccacctgatatcggctccgagcattgtatatatgtattttactgctttaaaaaaatgtcactttattcttttttcagaattgtatatatgcatcttgtgaaatatgaacaattttcatattataagtgtaataattttttatcttgtataattttaatgaattattatatttaaatttaaaaaatatgttaattctatttattttaattaatattaattttttttttctgaaaattaatactattatatatatttaatatttaaaaaatacatattaaaatgtaatctaatttaatttacataatactattaccaacagttataacctgtcatttaaagtgatttttcccaacagttgtaaaccgtcattaaaagtcattttcccaacagttataaaccgt

SEQ ID NO: 245052 - DNA, 579 bp, Cannabis indica
cgaataacaaaaatagcccatgatatatggatctcaattatttggtgaaaaagcaactggaggaagctttggccgatctctatgaacattagcgagaagctttttgtcaatctccatgaacgctggcaaaaaacttatgtcgatctccatgaacgctggtaagaagcttgctttagaaatcaatcatgacagcgtgaccaacaaagggagatctccacgaacacaacaaaaaaaaaaatcatcaaagaacctccattaatgccaataagaaaaaatgagcaagggttctttgggtattttttttttgaaaaaaacaaacctcatattgtgtagtatgttttatttgattattttgttaattgttgttgttggttgattcacatatattagtgatgtttgtttgtgtacttttattattttttgacaattttcaaaatttggaagaaaactagtgaattgaatttctaggtcacataataagaatagtgaatgtattttaaaattttaatataaaaatatgttatttttacgttgttgtcacattttatttatttatgttgttgtccattcttgaaataa

SEQ ID NO: 245053 - DNA, 1147 bp, Cannabis indica
  modified_base (43)..(43): a, c, t, g, unknown or other
ggcttaaggaagggcatgataataccacctttttttcatgtanagttttttttttttcattacaaaaatgaaattttattctattgaggatcacagaggcaatatgatacatcaacctgaactagtgactgagactttcgtcaactgttacaagaatctattgggaagaaaacagttagcaaacaaatagtggctctagggccgactataagtaatgatcattccaaacttttaatggttgaattctcacatgaagatgtgaagagagcagtgtttgaaataccaggaaataaatcccccggtccatatagctttggtagcttcttctttcaagataattagaaaatattcgggtcggatgtgtgtgactcggtgttatccttgctgcgttcaggaaagctgctcaaagaaataaattcaacaacaatgacattaatttcaaaaggtaaatgttcgagctcagtcttggactttagacccataacttgttgtaatatgtaatttacaaaattgccactaagcttgtatgctccagattgagaatgatacttccagatatcattgctcaaaatcaaagtgggttcatccaaggaagattcattgcatacaacactatgatttgtcaagatcttgtgaaacactataggaggaaagggaagaaacccaaatgcatgattacattagatcttcggaaagcatatgataacaatgaatgggattttattgaagagatgttgaatgcttttaaatttctaaggaagtttgtagatttagtcatggtttgtgttcgtactcctcgatttagcctcatgtttaatggaagtttgcatggattttttgaacctaagaggggtctacggcaaggagatcctatgtctcctcttctttttatcttgggtatggaatatttatcaagattgatgatgaaagttggggagaaggaagattttaaattccatgaaagatgtgaaaaattaaagttgaatcatctttactttgcagatgatgctttaccattctttcatggtgatttcaaatcaatctatcagatgcttcaaggacttaaactcttttctcaaacttttgggttacaacaaagtgaatccaaatctgaaatttttatatgtaacatggaagaaaatgaaat

SEQ ID NO: 245054 - DNA, 2191 bp, Cannabis indica
aaaaatttacatagtctgcaaactatagtaccattaagctttccctcaaagcaaagagcggctcatcgggcaacccatcatttatttgcattttcttcatattttggctctcctctaattccattcttgacatatgatctgcaactaggttctcacttctcttcttatcttttatttccaaattgaactcttgaagaagaaagacccatcagattaatcttggcttagaatctttcttggtcataaggtattttatcgttgaatgatcagtatatactatagccttgttcccaattagatacggccaaaacttgtcacaagcaaacacaatggccaacatctccttctaattagttgcatagttcaactgagcatcattcaaggtcctactagcatagtagatggtataaaaaaccttgtcaacttgttgacccaaaacaactccaattgcatcacatatcaactcaaatggcagctcccaatttggtgcaatgattataggtgtcgaaatcagtttccccttgagagtttgaaaggcttttaatcattcatttccaaactcaaaaggtactccgttaacaagcaagttggacaatgacttaaagatcttggagaagctttgataaacccttcgataaaaaccagcatgacccaaaaactttgaatccctttcactgacactagagggggaaaattctcaattgtagacaccttggccttatctacctcaatgccttcttttgagatcttgtgtcccaaaacaatcccctctttcaccataaattgacacttctctcaattgagtactaaattagactccttcacatctttccaaaaccatctccaatcctcaaacaatggttaaacgacgagccaaacaccaagaaatcatccacaaaaatctatatacagttctcaatcaaatcagaaaaaaaaatagccataatatattgttgggatgttattggtgcattacacaacccaaatggcatccttcgaaaaataaaagtgccatatggacatgtaaacgttttctactcttgatcttcaggtgtgatagctatttggtgtacccaaagtaaccatctagaaaatagtaatactcttgacccttcaatttgcctaacatcaaatcaatgaatggaagaggaaagtggtatttccttgttgccttgttaagtttgcaataatcaatgcaaatcttccaactagttacatttcttatcagaatcagctcattctttactatcgtcatccccctttctttggcacaacttggactggactacccatttactgtctgaaattggataagccacccctgcatctaatcactttaccacttcctttctcaccacctccttcattggcagattgagtcttctttgtgcattaacggtcgatttggctccactctttattaacatccaatgcataactattgaggggttgatccccttgatgtcagccaatgtccacccaatggccttcatgtgtgctctaataactcttaataacttatttatctccacattagaaagtgaagttggcactatggaagtgtcttgttcttgcctagaaattcatatctcagatggtcaggaagtactttcaattcaagctctggtagcttctcaactgaaggtaagggcctttttggcactacccctagctcttcaaaacatttcttgtaaagaccgcttagtttaatttggaaattagtagttaatcatgtttaattatggaaaattatttatagatatttaaataattatttatactgttatttttgaattcagaatgcatttttatgtcatatagtgaaattccataattttgtattctggtgcccggtaacatggaactcggtgtttggctcagtaaaaatcaaaacttagtatgttagtatattgggacggtttattaaacattgagaatgtcgggattggccgggaatttagaatttcccaaaatacccctttagtgttagttatgctattttagtgagaaggggcaaaatggtcattttgccccattgttattttgtcctttagtggattttatgtgatgaaaatatataatttaaatattattttgttggctgaataaggagtggaaatgttctttttatcatttatttcaaaattggaaaaagttagaaaattaaaaatttcaaagcctctctctctct

SEQ ID NO: 245055 - DNA, 627 bp, Cannabis indica
cccacatattgccgaaagcaccagaaacgctcaatagagatatctgaatgagcttgaacaataagaaacatataatctcgtccacacacatgctcaacatccttaaatgataaatcttccaataaattttatagaagatgatgctaggcacatgtattttccacacaatgacccattagtaattgaagctcaaattaaaaataagagggtgtcaaaattctagtagataacgaaagttctgtcaatattctcttcaaatctgcctttcaagctatcagtttagtggaaaccaatctaacatcttgtctagttcaactccaaggctttaatggagataccctacttctacagtctaattactcattggcttgaccttttcaacctcatcctctacaagagatctcaaccattcttcaactgccatccaaacctgctcattcactgccttgagaaaggcactcatcttggtcctccaataggtgtaattagcaccctttaatattggagggcgactggtagaaccgccatccctaaacatatccatagaatacaagaaataaccttcgtgacactcttcgagatgaaactccaagatagttagtgttggatattattttaccaggatct

SEQ ID NO: 245056 - DNA, 2086 bp, Cannabis indica
ctttcataacaaagcgtcagaggaagaagaaaaatgctattactaagattatgacggaaactggtcaaaagttgtgtgttgaaagattgttggtgaagtggaacggtattttatagatatttttcaaacatccaacccgacaaatgaccaactctagcgtggtacagaagttattaattcacgtatttcggtggatgaaaatgtcttatggcaccatttactcaggaggttatttactagcgatgaagaagatgccgactaatgccacctacttgggtctaccattatttagatccctcaaacgaacttatgacaccagccatctagtggagagagtcttgaaacaggtccaagagtggaaggctaacctccttttgagcaccgagaaagcttgcctcatcaagtatgtgggttctgctatttctaactatgtggcgttctcagatgtcattaccatctccatcacgaacatgattgataagacactcagagacttttggtggagagacttggatgggaaaagatctatgcacacgattacctgggagaaattgtgtcgcctaaaggtttgcgggggcctgggattttgatcaacagaagccacaaacatagctttcttaatgaagtgggcttggaaagttcttttggacaacactagcctatggagtcaagttgtggatgccaaatatctgaagaaccaaaatttccttgatttagaaattaatgcatctgactcgatcctttggaaggccatcatgcataccagaagccatctcctcaaaggcctttgtcggaagattggtaacagtcgatctaccttgttttggttccatccctgggtcccgaatggcaacctccaacctctacctcggttagatgcttcagtaggggtgagcttggtgagtaattttatccacatcaattattgtaaggaagatatggttagactttggtttagccacgaggatgccaaaataatactcaacattacactccctaaccatcgcgctgaggactcctggatttggcttccggaacccactggtaagttcagcatcaaatcggcatatagggtggttaagaattttgaggcaaatgacaaccataatgagaaatggagaactatctagggaactcgaatccatagtagattaaagatgtaatggtagaaaattctctccaacagtctactcactagaggtaaacttctttcgatgcttagcttacatgactcaagttttccattatgttcttcgactgtggaagactcctttcatctcttttggacttgccattttgctagagctatttggtttggtagtatttgccagcttaaaaccagtggcccttgcattacagattgagatacttggctgtcatggttcaaggttgacgctaactggccagggggtgaggtttagtgtgttcttcgagggggctgcgatcatctttgatcatatttggaaagaacagaataatcgaatccacaatgcaagtcatacttctcttacggtgttaattattcaaatcaataggagactcctagagatggaaaaccttcacaacctcgatggcatgtcattgtccaagtggctcccgcctccacttggatagatcatatgcaacactgatgttgctattggtgatcgtcattctgttggagcagctgtttttaggaatgaagatgggaaaaccacgaacatcttcactgcgcgactgatctatagtgatcctttcgctggcgagattgttgctcttaacgggggtgctaaaactgccaacagtcaaggtctgtacaatgttgtgcttaggaagcggaatgatatcaacgccttgcatcataatgtccaggatttagtggcaaagtttcacaacaatgcaaaacatctaagtctttaggaggtttcttagatccctagaaggttaaatggtgtagcccatggtgtggccaaatggacaatcagttcaaatcaattcgagaacattgatctattttgacagctccctatttaatggttgagcatatggctgtgttggcgttttattgtctctgactttcttttttatttagtttgttgtcttttgt

SEQ ID NO: 245057 - DNA, 1151 bp, Cannabis indica
tttgagttttcggtattccacctttttgtttatctttcgccacaacccttttctccttccaccttctgactttacacctcaccccctaactcctttcccatagtgatccggatgtcaatccattcttccccctctttagttatgtgtagccccgaatccacaatctccccaacaccttctctatgtaatcgtttaccaggttcactgcccattccttcttccttgttcagcatctcccaaaaatccgcccgtcttttcaaaccagagccactatttttctcaaagtctttctctactcatttatccttaaaactgcccaataagttactaaaatcaaaaggaatagatagtttagaattcgatacctttgtgttaatcgagttccgattggtgatgttcggaatttgatcgatcttctggacttccccaatggagatgccttcaaaggtcttcctgcactcatcacctcctgcaacccgatctgtagtcctgtttcgaaacacttcattccccctctcctctgtaattgcctttctctcttttagccccattggcttatcctcaaccttcatccacgccccataggccggtgagctacatccattgccatccgaaatagttacagggtgcttctcacaggtcctaaagtcgtgtcctattcgtccgcagctgaaacacatgtatggcagtcgctcgtagcgaaacggaagccatatctttgccccagaatttggaaaaagaaaccccgggcatagaggattttcaattgatacccacactttgaaccagaaaaatccattcatagtaattcttgttacctcctctttttgtatttcaattacgtcgcccgccattgatgctaaccttagcatattgtttcttgtaatggatttggtaggaagattcaaaaccctccctgttaatgggaaacgtttcaattcttcctcccacttagttggaagttttgaaaatttctgaaggattagcattccattgttcaacaaccacggggatctcttctcaattcttgctagatccgcttcattcttgaaggagaatatcataaatgtggcatctgttgtggctttctttatcttcactccccagtcgacctcatctaaaccccagattcttcccagaatcgttctaat

SEQ ID NO: 245058 - DNA, 871 bp, Cannabis indica
cgaaacacactaaagattttacattaataaatggcggtggccttcttcatcttctctctttttcttaagtgtagtctcttgtcaactcattaataacattatatatgtacatatatacatatatagattcggataataataattcataaaagtttttttgatgagcaataattcaaaaaagttgatatcatgttcatataatttagatttctttctgtgtggtgttggttcataccttagccgattacttttcttttaatattaatttatatagatattttgtgcaagatacaaatacataattttatatggtaattagttatgtatttttatttttcaattgttacactaaataatattatatataatttaattaaataaataatatattttttatagaaaaaatgtttaatataaagagctatgaagtattaaaaaacataatagtaattaacatgaaaattaaattaaaatattttttacaaaataacaatgaatacaaattattaataaaatatattaaaagtaatgaactaattttttattttgtatagtcatcaactatataaagataacaaatacaaaagttaaaaatgaaaggtaacaacataatatacatggcaaagtatattaaggccactatattttatcatttttgtatttattattatttgggtcacaaaccaatacaccttttagtagtagaaaatcaccaacttttaactaaatttgttttaataatatcatttcaatgaaaattttattttaactaaatttgaaatataaaatagtacttcaattaaaattaaataatgaatttagttttactttaatcaagaacattcctgacctagttataggatcgtgatta

SEQ ID NO: 245059 - DNA, 1608 bp, Cannabis indica
ccccaaggatcgagaagtcgaaggctaatcttggaaagagttgtatatatatagtcaaagaccgcttggtcatactgcttctttccattctccttctcggcctccaagtcgcgagacatctcctcaatcttcgccttagagttcttggcttcaagttggacttgcttacagatgtcctcgagctctttttcattgttagtcgcttcctatttcagcttctcgatgttctcctgaagttggacattctgcttctttaaaagctcatttccttggaaccaggaatgaaggccttcgagaacatagttacaaactgcgaagccaactttgcagaacgaggcataagttcctcagaaggagtcctctcaacctttgacatgaactcctcgcccacgaacttctcctgaagagctagaaaatcgcgagctcgaacagttggatcggtcacgactttcttccccttgtcttgtgagggcctcaccagcttcttggacgtatcagcagctggagtaatcacgacgtcacttttccttttttgaggaacgacaggagaagtcgttgctgttccagtcttcggcttgcgattgagaacaggagcttgcttcaggaaagtcatttctgcgaagacaagaaaagataagttaaaatataagcaatgactcatatatatatatactgcatatatgcgatgtgttacctgatgttggtctagaagtctgtttagaaagacgcttgtctatcttctctctttgcttctcatacgactccgtgtatactggctcctgatgaaggctagcgttctctggaattagcctatgttcccacagcttcaaggtcgtgcacagtaatctttagtcgcgatcttgaacagggaggcaaccgagaacttcaacgacttctttgctaaccaagtccaatactggtcgagctggtctatctgcgaacaataagaaagagcgagttatatcataccacaaggtaacgtaaaaattaactaagtgttaaagtgtgcgacgtactaggtcgacgattaaaatcagtcctaattcctggtactttaaacacgtaaaaccatttagatttccaatctcccatattggaaacgatgccttccaccccgttgatttcagaagtggcccatttactgaaacaatagaagccgttgtgaaggcccacactctttatgtcataaaaatagttgaagccctccatcgaaggctccttatgtgcgtactccatgcacatcgcataaaacccaagggctatgagagaactgtttggagttagttgaaaaggggaaacatcatatcgcttaagaatagcagcgatgaatgggtgaaaaggaagcaatacaccacagcggagaatgggtatagaaacaaccacattctctgtaggtattatcgcaggattggtgaaagagagatgcggtctctcggtagggcgaagacgcatggtgctaaggcgtaacagatttaaccttgtaaaggtggttaggtcggatttggtaactcgcgaaaccgaatcctcgcatgagaagggctcgtctagttgagtgttgtccactgagtcagtcctgctcccttctgcgtcctcctcttcctctgactc

SEQ ID NO: 245060 - DNA, 2313 bp, Cannabis indica
acatcaagatgccagatcaacgcagccattacatgcatcaatgaatccatatttttgttttattacgtttattctaacatggtgttcaatttacgacaaaaagccatgttttgtgacctagaaatgttgaatgtatttcaacgtctttcacctttgctgtatgttggaagaaggtcaggtccattcctataactagtaatcacctcacagaagttgcttgtgattttttctacaaattgaagataaattagagagaaattatacttaaccgatcttctttatttgatgcttcccatttgttatattagatggcgtctccgtattagtctgcgagtcactgctgctctggtcttcttcaaaagccttaactgggtctgcatatgagcgagtacatgggcccctgcagaaacagtgccaaacatggattaacatctctgcacgcatagaaaatttatgtataagaacatcatcttcaaaaaatattacctgcttgattttataagctcgtcatcgattgtaatgttttcatcaaatatgttgcctacaagaaccacaaaacatcaagagcactttcagagctcgataatgaagctaaaatacactaccattcaattcatagcaaattaaccagatatggcggaccagggtcatatgaaataaacagaaacttgcaaaaagcagaataagaagagataaacaaaaagaaaggtcacatcaaatatggggggaattgggtcttaataagtattagagctgaaacttgtgaaaacaaggattaagaatggattaacaggataaatgaaactgaagattacaggaacacacaacaggatacaagaaataagacaactagaggattgtaacaaaaatattgtcagtgaaaaaactccgagctttactatttggataacaatcatcattactaaagtgctattatatctagagtatgtaaatgaaaatatgaagaataaaagattgtatgtagaaaatccacattgatttactaaatcagggaattcagaaaaacattgtggaacatggaaacatataataagaaatgtaggtactcctacctccataaagatccttcttagtgaagtattttgccattaatcggcgagtgtagtccgcttcatattgcttgaacttctcattgtgatttgcaatataaacatcactaaataaatgcagaaaacagaatatcatcgagtcaatgatttaaacctacccaactaaacaagactatccagagatagacagtcaaaattcagagaaataaagttgtcaaccttctaagctaggcagcataacaacatagagcctacaaactaatacctgtttttctcttttgaaaagcttccattctcaatttcacagaaaaggaactagaaagtgttgactaagggtatgtttggctggaggtaatggaatcgaaaccatttttattccattattttgtttggttgctttgtaaaactctggaatgtcattccaatagaatggcttttccacattctggcagaatggccattccatccaaaagtgggaggaaatgttatccaaaaattgaaaaaaatcatccttttcattcatattaagtcttattcccatttatattcctctatttttattactcacaaccaaaattatttaaaaatattctccaatcacagtgttaattattaaactctttcttcttattaataatattatattatacaaattatatacataacaaatttgttgggtaacgatttgctatacatttttcagaaagtgctaatcatcatacatcacaaaacgttgccttaggattgttctgtttagtatatctacatttaaaaaagaagaataaagaaaagagaattggataatagctaaatcatatgcctgtagaattgcaatgtaaaattctatacaaaaacagagagaatcactttagaaaactaaaacaaccagacaaagtttccatcgtcactttgtatttaatcctcattagcagcctcaaagtcgtaagtacaatacctgttgtgagtgaagtaattgttcatccggccaatgagtgaaagggaattccgacgctccgatctccgaccagtagtgaacgaggttgataataattctagggtactgggcgatagagagagagagccatgaagttgtgctatgactttgtaggtagaaatgaaacccaccttggtttatacccgggcttgggcttctcagattgcgtaactcaaaataatacaaatagtcaagcgaatcaatcgtggaaattgcacttataccctgtttttttttttttgtttgttt

SEQ ID NO: 245061 - DNA, 2908 bp, Cannabis indica
gttatatggtctctacatatgattgattttttccttctcatcatttaacagaatgattaatctagggctataatataccttggaagcaaaattaatattatttttatatatataatatatatggacgtatataatagattttagttatggtttttttgttatttatttatttttttaattgtaaatttcattcaactagatcaactcgacttcaacaatattagtaatatcaagaaagagattatactctaaaaaaatacgatcaacatataaacaagatgttttagccataaaatgatagcaacctgattagcagaccttttgacaaaatgtatagaaatatatccctgaaagaagataaaagttgtttacaatccaaaaatggttgacaaaactttcaaatttctaacaacttgtaccaataccagacaatcagatattcgataatactaacattcgaaaaatcgtgcttcaaccatgataacatttccttgagagctatgacttcagcaatcactggaagagcttgcccaatctgcagtccggtaatcctagccacgacccgacccttgtgatcccaaactatcccaccaaaaccatgccttcccctcgtcaaataacacagcatcaatattcacctttagttttttataacctagtttagaccacatctcagccccatctgatatcaaatatcaaacacgagaaacatacttctttcttgagcttttctccactgatcatgagtgatatgagttagattgacaacaaactccaacgacttttcctacccttccacaagagttgatttcgtgcgaaataaattacccaaactaacatcaccgcctaaacactttgttcctcacccagtcgtgagaacaaatgaagaaactagtccccaaacgaccctgcatcatcaattgaaatcatagccaaacctactacccaccaacaattctgcacaaaatcacaggcaactaaacaatgcaaaattaattcacacccatgacaaatcagacacaacaaaaagacatccacatgtttagtcttcaactgaactctcgtgggaagacacccactaatcgccctcaatacaccattttttgcctttgagagaagctttaatttccaaaatttcttccaaaaccccacaacctccccgtccacactaccctcacggttttcctataataatttaaacgcactcttaactgtatgttcaccaaaagattcaaacccccaatacagtaatccttagtaacagtagaaagggaaatatcaagaatactgactgctacttcctcatcaaacaaatctatcacaacatcaacatctcaagctttctcacccaccacaaaaatactacgaacctaattgtcattagtcaaactaggatctaaactatcttgactcgaaattgacccattcaaaagccacagggtatcaaataaaagaatctcctctccattaccaattcccttccgttcccccttatgaatcaaatcctttactacaataagacttctccaaatataacttggattattaccaagttctggcaaaagaacgttttcatttttaaagtaccgatctttgtacactctaaaaaccaacgaatcaagcttggtccagagcctcgaagcatctttacccaacatagtcaaatttaaatcatgaagagagcggaaccccactcccccaacctccttactacgtaccatcctctccttactcatctacaaaattccttgatgggaattcgtagataacttccactaaaaattagtcattaattgttccaaatcatgacacgttcctgtatgtaaaagaaaaacactcgtagaaaaagttggaagactttgagccgcattacgaaccatgacctccttaccaacatgtgacaagagtttaccattctaactttgtatacactttctcatcttctctttcagaatgcccaatacaatagacttttttcgactgattgtacttgtgagaaccaattacatactattctcaccagcttcatttatattcaaaatagcacaaacaaccccctgaataggtccactcacatttctactaaagaaagcaatagatttttctaaattaatcttttgtcatgacatcctcttaaaactatgtagaatctctatcactctttgagcccctcctttgttagcttggataaaaagatagctctcatcagcaaatgacatatgaaaaatttacgaagcacctctagccacatgaccctcctttattaattgattctgctcataccgacaatgtaatgccaaaagaccttcagcacaaatgaaaaatagataaggagacaaagggtctccttgcctaatccctcaagaaggaataataggccccatcctatgaccaccatgaacaacctgatatcttattgtggaaaaataacctgaaactagttgaacccaatgttgtgaaaaaccaagtttttgaagcataaacctaatataattccactacaccctatcatatgttttactcatatcaagttttaacaccataactcccgcctttccagtaaccttacgcttcaaataatgcatagtttcaaacaacaccaagatattatcgaaaatcaaccgacccagtatataagcactttgtgtgtcatagattacctgtggcaacaccacattaaattaattgaccataaccttagaatcaatcttgtagaccacattacacaaagaaattgaccttagatcccctatcttcacaatattcttattttttggaataagaacaatattagtgtcattaataccaattggatctcacccgaagagaaaacatattgcaccaattaaccacatctgcccacacaatatgctaaaatttttgataaaatctcaggcttatcccatca

SEQ ID NO: 245062 - DNA, 656 bp, Cannabis indica
gtctcctctccgatgtcggattagtttgtgaacgaggttgataatattcgtagggtagctttatgagtttgccacagaaccgaagaaaacccaaaggcccgccgatagagagattgagtaaaggagagagagaagaagaagaagttatgctactgctgtaactttgaaaccccaagataaaagcaaaattgggaaattttgaagggtgtattttttaaacattacttaaaaaatatagagaaatttttaagttagatcgggttcaaggcatgggtgtgtggatccgggtttcgtcgaggctcttggattgaaggaggttcttagttggataaagatttcaaacttctctaacgttacgatggagacgaacagccttgtcacggtccaagctcttcggagttcagtgattatggcctctccgtgtggtaattgtattaaggagtgcaaaggtcttctttctaatttgaacaatgttaattttcactttgttaaacgatctgtcaaccgtgttgctcatgcttttgctcgagactcatggttatatgttgatcgtagttattcgggtagttctatcccgagtaacattcttgatgtaatcgtgcatgaaatgatttaataaaattcatcttctattcaaaaaaaaaaatatatatagg

SEQ ID NO: 245063 - DNA, 1683 bp, Cannabis indica
tggcaagcatcaacattaaattcgactttgctgtcggttggccaaatttgaggtgaacaaaaggtaacaataattcctaatgctatttcgattaagaaaaaattggagaactaaagggcaaagacaaatgataagcaaacggacaaaagtgttttcacttcgtcatttctttctctattttttaatggcacatactaataggattaggattccaatgcaattaaacctaattccataacgaaaaataagaaaatttaaagtttttcaaagaaaaagataaaagataagtgaaaaaagaaagataagttttttacctctttgtctttgttatttatttttcaaaattcccaaggacaaagaaaaagtgttcaaagttctaacaaatttgagatttctttaagaatagatacaagtgcctaagaatgtcaaaattgattcccatatggtagtttcaagcgaaatgggctcggttcacatcaacaagtcaactccaaacaagtataaagttgacttggggggaaatgttaactcaaaaactttccctggtgatatggacatcaatcttttaaacatggcatgaaggatgacatcacgaagttgagtagacccaagttatagtagtcgacctgggaagggaacctagccctgcgcccaggttgactttgggatctctagaatggaagttcataattcaataacttgaatacaacccactatgattcagtagtctgtaccatgaagacatggatcaacttgatctaaggcttgcgagctgaaattacacgaacctgcaacacggaatccaagctgggtacctagggtttcgctcgacacccaagttaacatcttcaactagggttttagtttctaggaccgccttagtgcaaaagggtcaaaaattgcattgagacatcaactggacatatcgcatcaatatttgatgcgtccaaattagaataagagaaagtttatttttgagcacccggggcctcggggcccgagcacccaacgctcaagttgacaatctgtcaatctgatcaccttccaagtacctgatcagaaatttgactttttcatcttcttcattttcattaaaaatacggaaatgtgtccttttggagaaaaaacaacatttcacgggtacaaatattggacctcatgccatggttgaaacttggggctgaccttgtgtccatgttgacattttttcaaccttatccatttcaaatggagtttttcaagaattatttgatcatcttcttcgttttcagaaaatatttagattaactatttatgaggaccaaacaaaatttttggagggccaaaactgggacccaacacccatgttgacacctggggctaggcctaggggctaggttgacaaattttcgacatgcattgtttctgatcaagttaagaaaaaagtgttttgggcatcttttcagtcagaaaaaataataaagattgaagcagacttggggagaaaaccacaaacctgagcccttaaaaattgggcccaacgcccaagttgacttggtgctgggcgtagtgcctaggtggacaatcaacgtgggaggctgccttcaattggtcaaatgccaaaataaatgtgactgttgaatctggaatggtcacaaacggggtaggagacctcatcctcaactttgcatttctcatttcaag

SEQ ID NO: 245064 - DNA, 1920 bp, Cannabis indica
ttatttataatttttttttaattcttaagaagaaataagttctctcaagtgtagggactgtagcaaatatgcccatttgattttggtagttgtatttttatcacgtcttaaaatgactatcttgaatgataaagcacgatatataataccactcttaaatccaactgcccaatgtagtgaaaaataatttatagcatattgttagccatatagttaaatccgttagttagttaactgaatcagttggcttgttttctcttttctgttattttcagttgtttctttcttttcatcttgtactgtactgaattcttctatataaataacagaatagccaactgtttagttgagctctttttggcatttcaattctttcttccttctggtttttacctctggttttgtacctttttgcttgccaatgttcaaagtctcacacatatatatgcaatgcaaaatgtgattcaactttattatatgaaagtaattctaattgatttcaaaaaataaagtaattctaattttgtaaaattccaaactctaaatttttgtcataattcccaagcaaaaaatagggcaaaaactcataataataataaaattatataattattcaaagctcctaataaattctaataaatggaccacagtgatagcacaatttcatccagtatcaaaaaccccaaaacataaataataaacaatttatatataagatataaaatattttaaaaaagagtttcgaatattttaaaatattcttaccgttttattttgaaccaacttaattattcggaagaagaagtagaacaagaatcatagtcttgatcactcttcataggttgctcgttctgaaacaacaatcaatcaaggaatatatacataaaaataatatccaaagagaggaataattcataattgatacgcatacgatttataataaaaacaaaaataattatggttgattgaattatatatatacatacctaattgtttgttttcctcccaaatcattcttacggttgttttgagatcacccttccaaacctcttctatgccatcttcatacatcactaagtaaagggatccatgctctaactttgtaattattttagccaacttagaagtgattacatttccagaagagaaattctccatgtgagggcattcaatcacaattactttttctaaattaggaaactgtatctcactatttccgctgttgaagcttttcagattgggtaaacgacgaagcattaaagcctttaatttggggaagaccatcacattctcaccagcttcctcctcatccacaattacttgtctcatttctttacacttgctaatagtcatatgctgaagttgtactagacttctggcggtggaggaattcattaaatttatcattccacatgcactgatatacaaatctctctcaaattttggaaggacatagaggatggcatgaacatccacttcaaactcacttcttctaaattagggaccacaacctaaaattaattattattattgttattaaaattaaataaaactaactaaaacaataattaatcacaaagaatacatatatagcaatacaattcttttcgtacaagttagtcaataagaaaacaagcaatgattctaaagttataaaacatttgacaaaatatgtgaacatccatgaaaatattggtttatatatgcatgtgtatgcacatatatacatggtgacatcacaatgagatgtaaaattttctttttttcaaaaataaaacgaataatgtaataataaagataaaatatgtccattaaatagatccaacttgtttaattaatttttttaaaaaaacatatattgatcatatatatatttaggttatgtgttttaatttttgaaggttaaaataaaatattata

SEQ ID NO: 245065 - DNA, 780 bp, Cannabis indica
gggagggcatgttgagtgtgcatatagggtatctctcgagcatgctagtcaattgtgcatgcatatgaatggccgagtcacttcattgtgagcatggtggccaagtgaattcatgattagcatgccaagtgacttcatgatgagtatggtcgagtgacttcatgatgagcatgccgagtggcttcactgtatgcatgccaaggggcttgcatggcgagtgaaatgttctcaagcatgttgagtgacatgtttccaagcatgagtgaccttttgtgttgtatgcatgtcgagtgacatgctcttcaccatgcctagtgaccttctctattgcatgcatgttgagtgacatgttcctcaacatgccgagtgactctctctattgcatgcatgccgagtgacatgtttccaagcatgtcaagtgaccttctctgttgcatgcatgctgagtgacatgttcctcagcatgccgagtgacatgttttcaagcataccgagtgactctctctattgcatgcaagccgagtgacatgttcccaagcatgccgagtgacatgtttctaagcatacagagtgattctctccattgaatgcatgccgagtgagctttcaccatgtgtatgccgagtggatttccactatgagcatgccaaatcacttcggatatttggaggagcaaatacaactaagcctttggagcaactttctggacatgtttctgctagttggctaatatcgagagttaatagtactaatttttgggtttaatagttagtttcagaa

SEQ ID NO: 245066 - DNA, 3784 bp, Cannabis indica
aggatgttaataaaacatacttggtagtaaatctagatcctggtaaaataatttccaacatctttctccttatgtaacaaaccgtttaaatccctttcaagacttcgagcccgatctaattgagcgttagtgggacgagggatagattgaacaagtttgagttgagattgaatttctcgaatttgagtagcaagaggaggtctcaaagattgcttccaatgattaagacgtgaagaacaattacgcaatttttcagtgaggccaaccaaaggattagaatgatgagtttgattagtaagcgtgcaagcgtcacgaaggcaatcctcaaaactaggcttagacatccaaagcttatcaaagataaatcgaggggcaatcttggtgcgttcagcaggattatgcaaggtaagaattaaaggtcgatgatcagagccaagaaaatctctgtgacaaagacgagaagtaggaaaaattgcatcccaatcactgttggaaaggcaccattcaagtctctcttgggtgtgagacggttgtttttgccggttagtccaagtgaagggacatcccaaaggataaagagggtgaagctcatgagtatcaacaaaagattgaaaatgagtagacggattacgagacgtgtcacccccaattttgtcagaaagcgaaagataatcattaaagtcacccataatgagtcaaggttgtaactgagaggcggagccaagacgattaattaattgccatgagtgaagtttattctgagagtttggtgcaccataaaaagcaataaaagtaaaatcagtaaaattaggaaaagcgatataacagtgaaagtgacttatattataagaaagtaaggttacatccacatcatgtgtccatagcaacaaaagaccaccactaagcccgacacgtggaacttcgagatcattaggaaatttaagacacgaagaaaatttatttaaagctccaacagggagtttagactccattatatacaaaagcgttgggcgatattgcttcactaaaagggagagataacggaatgctcgtttacaccctaatccacgagcattccaactgataatactcatggctctaggcggatacgctgagcgtcacccgcctcttcaactgtcttttcatcaagggacttggctaagttgcgtgtgcgtttgagcattcttctgaattcagcagcattgaggcaatccggcctcttgggtctgagcttgcggatgccaaaagcagtgggagctaggtaagaagttgctccaagagcaaactggagcggatgagatgagttgaggtcagccaaaatggtggagaaagcttgggacacaggaaccacatgttgaggtgcaccatttgtggccataatggtctcggccgaagttggtatggccgtgggaaggggtatagtaagttgctcaaccgtggttatggatggagaagggaaggaagtagtgggaatggtattgctttgagtgagaaatttggatgcaccttgggtattagcatgttgtgttgcggtagcagtagcttgagtataaagccatgtggaagtggaaagagggggctggttaaggttaggggtatgggaagtgagcacattggaggaggagtgagccatatagaaccccagaggagtagtttgcagctgactcaagtgttgaaccccataagcataagtaggctcattaaagaggccttccgagataattggaagctgatgaggacgatactgagaagcgggggccagagatgttgggtgagctatgtgtggccgcagccgagatcttgagcaagcaatataaaagggatttgaagtgattctaattttggcgcctaaagattgatcataacgaagcaaaggtggcgccgaagaggaatcacatttggcaagaaattcatggcaatgattcacaatgtggctaagacgtctacagtaatgacagaaatctgggagattttcgaaacgaaattcaaaccaaactggggcagccattccatggaaatggaaacccgtaccatgaggaagtggctgagatacatcgatctcaatgcaaacccggagataaggaccccaagtctcctttagagaagcagtatctacttcaataaaacgccctaagacttcgcctagcctttgagcaagagcatggtgaggaaaggaatcccagaaacttggacccagaaaggtgtgaaggtaagtgtatcaacagtcacaactgagcccgcttctagtggtgtcattacaattaatttataatcaaagtgccacggctgaccgataaggacacggtgacgatcaccaaaataaccaaactcgacagtatagaaattggggtctttttcaagaacattgattgaaaaacgttcaggccacatttgcttgagtcgtttcttgaaagcctcagagttgtagtgacggttggttaaaagcttgacagcaagaaacgcagagggttcatcacgttcatcatcttcaggatggtcaggggtttcagagaaggaatgaatttgagtttccaaagcagtaagattgagggtggcattgaaagtattggataagtcatccattttcaaataacagcagggtaattgagaagaagacaaagaaaggaaaacgtgtgcagaacagatataaaaaaggaaagttgactgagaattactgggtgtagggagatatagaggataatcagatatataatggtctgggcaaagaacaagcatctctagggattgtatggtagcaagtgagaacttctccatgtcaggtaatcgaatgattattcctgcaacattgacagtggctcctaagggaattctagcgttctctacaaatgtagagttaatcattaaccagggcggtgcagggggttgagagctatttaatagagaagcaggaaaggggtttttcttatggttaagtttaaagaggataaagaatcgatataatggagaattaaacacagatgggacatcaacccagaagttattacagattagaagtttacctgtgaggaagaagacaagatgctttaatagtggattccgtctgttagcatcaaacgacttcatatgtggggagatcgaaccgtcactcgatgggaaaacccacggacggacaggaacgccgatagacggcgacgacaacagcaacattgacggcacaggaagaatcgcaaaccctagggcactctctttcttcaagaagagctgtccagaagcttctaatgaattttctctttctattttatacatcatatgagttactctaaaattttattttgttttattattttttttaagagttgtgaatatattaatagttggattcttaggtttcgaaccaattatcaagatgtttaacattgatattttgcatatatttaattttaattttttttatcatgaaaaaatataagataacagtaccttaggcacaaaaaacaatgaattatttttttatatataaaattactttttttttaagattatttaaattcattagtttaacttgagtcataattattatttttatatattcaatttttttaatatttatcacataaaacaaagttcttctaaatttaaagttaattcttagagaactaatttctcaagtgaataatgggagatttctacagtaggtagtagcggagggacatgggtcatgtgggggaacatgatcccactcaactttttaaaatttattttttgtatgtatttttttatatatatatttatatttttaccccataaatttaatttttgtttt

SEQ ID NO: 245067 - DNA, 1308 bp, Cannabis indica
aaccatgcaacattaaatgttatttccgatctatattaataagtaaatctgattatactgaaatgagttttatttagggcataaaatccaatatagtgagcttttgagagagaaaagaaagaaatggagggttgtaatggcataaggtgtgtctaatccctattgccacaagttaggaactttgtaatgaagttctacttcatcgagcgattgagtccgagtactcattaagagaatcaacttgtaatccaactctgttcatagctcaatgaagctccaaagttattgggttgttctagccaaggggtaggcatcaaacctcgtaatgttcatgtgttgatgtgtttaaatattcgttgctttgtttattaattcagttcatcattattagtgttagtttacttaatttgttctaattcttgcattgcattattttaattgtgttgtttttgatcgaggtaccaaattatttagtgcatcaaaatatggatttaaataacttgttgctcaagtatataataaaagaaaaatattatgcatgcaatagattataaggtgttggtagttaatctgcactatttttgtttatagtgcattcaatctgcattaaatgtgaattttatattttggatctaatacaatctgtaaaatagctcaaatccaattcaaccaattattttggattgattaatttttaattttaaattatttaatattattacttgtttgatctcttaaaaaaagttcttcataaatttcctttagtgtatgttttcttcctccgttatggtgtacactgtgtagtcccacttgacatttagtagtggtattaatttttttttaaaaaaaaatggatgtttttgcagaactacttaaacaaatagggatttgatgataattggcataccaaattcgttattaacaatttttatttgggaaatttgaatttccatgcttaataaatccataaattggtcccctaaactaatactatgcataattttttaaaagagataactttttcctaaaccctaaaatacccctcttatttttcccaaccgtccctctctcttcctcttttttctctcaaatttcccaagatccaaaacccataccggccatgcacggcgagcaccacccacgccgaaaaccaacccacgcccatccatacccatctcgaccgaactcacgcatgcacgccgaccgaacaccactggagaagaagaaggtccgatgccgcacacaaagactaattttttgggtttttaaggtcgggtctgatgggcccatctgttggaattattttac

SEQ ID NO: 245068 - DNA, 1097 bp, Cannabis indica
ttttagagttttttttttttatactaaccaaatttatttagagtttttttgttctaagagaaaaattatttaaagtttaggcctactatactattgatgccaaatccagccacactaatatctaatactaacaaaccatgttaaaatcccctaattaatactctatacatatataaaaagaggtaagtacctcattataactcaatttattttttatataaaatttggtaactagtaagtaatcaaactattgttcatttttgacacaaacttgatccttttaactcttaatttttcatagctttgaatcgaagttagttctttgaggatatatctataaatatatattttcccctagagaactttgtgatgggtgttgaaaaaaaagaaaaccacatgatcaagtactgaaaaaatgttacttttatagtgtagccgcctggcggcgttattaaagtggccttattatatatattaataataatatgaataaacaaaaaccatttagatatacaaacctttgaatatttccaagccaagcaatataagaacaagttggagaagagatcatgagaactaagtggcttattattataattagaccaaggccaaaatccaaaataaataaataaatcagatatatgatgaaggccccatgcacatttattcatatatggatttgtgtctatatatatgaatgaatatcattattctaatccaaaataacaatgtatagggtctactttagactttgtatagctagttggatttttcatttctcctagactacgcatagttacacccaaaaaaaaattcaaaatgaaaagagtttaggataattaagtgcagtttaagataattaagtgcatataattaaaaaactatttttacttttaaaatagaaattattttttaaaacaattaaacatgattaaccttgtattttgaaaataaattttaaaaacaaagttacaaaataagaattttaagactagcaaatgttgttttgtgttttaaaaataattcacttttagtcaatattttttcttccactttatctcatatcattatacttctcattttctctctccttttct

SEQ ID NO: 245069 - DNA, 535 bp, Cannabis indica
attacattattcgcaaagcataaattaatggtttatttttaaccctctatgtacacctttcatggaacttaataccatccttcattcccagtttctccatgatattcttaataaatatttcataccaagcacaaacaataacaggaacattgggtctctttgtcgtaaatctcttttggcctcaagaaattcattcattgatacattcatcatcaagctaaatttgggagttttaatacagatcataataatatgtattccattaatcgttcttatagttatgtatatttatgtgtatatatattttggactcttggatccaatattttttttctgactttggggatgggagattcaaacttgagattttttcgtgaggagaagtgtgaaactactatggctatgaccactcttgaatcctattagattaacgtatgttacgttaacaaattatttttaaaaaataagcaaagtataattaaagtgatatttgcaacaattttattgtcttggagaaatttttgaaaaaaaaaaa

SEQ ID NO: 245070 - DNA, 1334 bp, Cannabis indica
gagaaaggcaaacaagtattggattccacaaacatcattgaatccaatatcaagaatttacactttttgcgactcactggtgtatcttctcaatctcccaaaaggctctctgttaaggatcaggcttcttcatcttgttctaaagaaattccaattgataagttatctccttcaaataacagtggatttcatacacctgcttctgcaattgaatatccctctcggagtgccgccatcagccccacggtatcacatataacacctaatcttaatccatcattagcctctactccagtggccacatacccccccccccttacctccactcacttccaaaaaccagtatctctttctatgccaatccctccagcctatattcacatgtcaactgaattcaatacacgatccactatgtcttcttcctctgtcatctcaacgtctactgctgcaaattcaccaccggttactgagaaccgtatgtcctccctcttcaccaaacgacaactttcaacctcaagagggaatgttcgtaatgtgctaaaaaaatttcgcacaaggggttcaccactagctgatactaccaacatcaacttgcttcaacaatcagattcagacaattcagacaattcacggatagatgaggattgtgttgcttccttggtgaaggctgttccacagcctcgccaattgccatgaatatcgtctcttggaatgctcggggcttgagtaacccgagagcattctgtcatttgcgtttactcacctctcagtgtcatcccgatgttatttttattatggagtctaagttaaagttaggttctattactaagtttcgaaatgcattaaagtttcctaatggtattgaagttcctagagtaggtctaagtggtggtattttatttctgtggaagtccaatgtaaatgtatctattcttaattatggtaaaaactttgttgactgttatattggctttgttgatggtccatcttttcatttttctggtttttatggtgctccatgttcttctcaaaggcacttcacttgggaattactaaacaaactaaaagatacagcacctctctttccttggttagccattggagattttaatgaagtcatatctaaccaagataagcttggtggccctttgcgtgatgagcaccaaattgatgccttcagatctgccattgatagttgtggtttacaagaaattgatttctctggtgacagatttacatggcataacaagcacactcaaaacacaaatgtcaaagaaaggcttgattatggttttcttaatcaatactggtctgatgtttttgttactccaaca

SEQ ID NO: 245071 - DNA, 1260 bp, Cannabis indica
cacactttctgggaaaacttcccaggaggtcacttatcctaaaattatcccaggtcaagtacctcaggacaatgcaccttgttttctggtagcccatcatgaaagaactccacagttaagtatgcttggcttggggtaatttcaagatgggtgacctcttggaaagtttttccaagaagcgggcgagtgaggacaaagcacgctagccatgaaagactcgtgttggtatgtagagtcagtcgttagtccaggaagcagccagagtgacgtactcatgtataaaagccatcattttgtgggtgtaagggcccaatgaaagcttgaagagggaacgttacaaatggtatcagcgccttgacctaaccggaagtgtgatagatgaggacgtcaaacccccaagggggggatgattgtgacagtcagagccccgtgatcctaaggagaaagagaactccacagttaagcatgcttgacttggagtaatttcaggatagtcatcattccgtaagtgtaagagtccaataaaagcttgaagcgaggacgttacagattacttacgtgcatttgttctttgatactctagttacgtgcatagtttttattttgtttctgttagtatgagatatttacccaaaacatatactaaaatattgcacacatcaaaaaatgtatacttgaaccatacacctaaaaagtgttggagacatctaaatctcatcttaatcagagttgagtaatcagaaagggtcagatgtgaatatggtttttgtatttaattagttcatcttaatcaatggttgagtgctcaagaacggtctttggacacaattttgagtttgttgacacttgaagatggtaatgagcattgtactccaaacgagaatatgattaaagtaaatactgatgccgctattttcacctctactggctgtttcgatttttaatttctgttgcatgtgagttcagttagttgacctatgttgtggttgtctcgtcgtggtttaaaagattagaagctcaactgctacgctttcatactttagtagtattattgaagagtgcaagtgtcttttcaagactttggttactaagggtatttttcttaattttacaatatagctcattttttccaaagtttacttgttctatttttgaatgtattattcgagcgaaagcgaacaatgcttcttcaaagttcatttttgtattggtgaacaatttgaatttatgaggttttatcatttatttaaaaaaaaaacg

SEQ ID NO: 245072 - DNA, 1355 bp, Cannabis indica
gtcactcttcaaagtttttcatttttctaggggcatagataggggacctcctctccccctaccttttttctgttgatctctgaaggcctctctactgccatctgtgctagtatgaaagccaaactttaagagtttccccatatgcagaattgcccttgtgatctcccacttactttttgcaaatgatagtttgctttttgccactgtcacagttgagaattgtctaactattaggaatatccgtgatacttataataaggccactgaccaagcagttaagttctccaaatcctccatccttttttcaccaacactagcctcgctaataaaaatatcttcctaaatcatctcagtctgtccaataaagagttcataagtaaatacttaagggtccctcaatgtgttggcaggcttaagagctcttccttccattacctttctcagaatgttagtactaagatcaattgttggaatgataatttttctttagggctggtaaagaaactcttataaaagctgttgtccaagctatcccctcctatgccatgtcgtgtttttgtctccctctcactacctgcagacacctcgagaagctcatggctaaattctggtgaggcttgaattccataaagaattaaatacattagaaaaattagtcctctctttgtgtctctaaattttttggaagcttgggtttcaggtctattattcatcataaccaggccatgcttgtaaagcaaggttggaggatcttcctcaatccctcctcccttttgtccaaatttctcaaggcaaggtatttcaaaaataatgacttccttcctgcctcaaaaggtcactgtacttcagccacctagagaagtattttgtggggaagagatctactcctcaaaggcctcatctagaaagtgggaaatggcaattccattctagctattgattcttcctgggttcccaatgctaggtctctccaattcaaagatggcaccccacctcataactctttggtctcacacttcattctggataatagatcttagaacaccggtcgccttaaagattacttcgatactaaaattgtggaaaatatcctcaaggtcgatccctacatgcccttctacggaggacactctcatttgagattgtcactcggggaactttactgttaagttagtctatcatctagctaaatccctggtcttttcaccctctccctcttcctttaaccctccaacttataaaacttggtgaaagtttgttaggactatgaaaacacctccaaaattaagcattttatttgaaagcgtaccatcatgtgcttccctgtaataccaatcctttaaaaaaaaaaaaaa

SEQ ID NO: 245073 - DNA, 1435 bp, Cannabis indica
ttcatatttaggatgttaattcaacatacttgttagtagatctagatcctggtaaaatattcccaacatacaatcccacattgtctgggaaagtttgtatgtgatgattgtgagactatgtaggtatgggactacctatattaacaaggtacctcttgttttcggtagcctgacacgaaagaacttcatggttaaatgtccttaacctggggtgatttcatttcaaaaagtttttccaagaagcgtgcgagctagaacaaagcacgttgggaacactcgagttgacctgaagggtcagtcattaatccaggaagcagccagagtggcatacctatgcataagagccaatagtccatgggggatggtccaatggaggcttgaagcagggacgttacaaagataacgtgtaacagaacgtcagggagagtagtggtatcactaaggtaaagaaaattatttgaattactcatagtgataaggtaatgatggagaatacttttatatttgactggatggtcaatcttgtatacgtggtgaccattgaaattccaagaaaagattgtcttattaagcattgataaaaatgtatgtcacctagaatggaaaaagcttatcaactgagatgcaatttaatggacgtgtattcaagtggttggtgaatgttggatcacaaagtaggttatttattaagcaacaaactatataattgagtgtaaaataagttttagagtggttaactaagtataaagatagtgatgattgcaaggaagcaatggtagcgtatgaatcagggagtgaaatgttagtggtaaagatggaaaaagaacacgagagtcttagatattgatgaattagcattatcaacggaagactcaccataagttggtgtggtagttcataccaaaggattttcagtaaaagagagaatatacttgaggtttgtatatttctggatgtgtttgaaaagattatcaagatttctaccaaacacagaaaagaaacttcaggatcgatgaatgatttttgattaattattatcagttgagaatttgagaaatggatacttctagtttagtcatggttacccgatatgagtaatgttacctctaccgtatatgttgaatcaatttactttataacggtggttaaccgtaaatgattgagagatttaaaagttgtgtcagttcaagataaattgatacaagttaaaataagtggagatgatcaagattcaagtcgataataaaattgaaatttctcaagtttaagtgaacaaaactgataaggaattgtaagatgctaatgaagggagtgatgaaatttagatttaattaacaaagaaatgaaagcaagaaatacaattaggaacagcaaggaagcatttactttctaataacccaccatgagcttaccttggagttaatcatacttaact

SEQ ID NO: 245074 - DNA, 1251 bp, Cannabis indica
tgttgtctattgtcctttaaattccacaccttgtcttatatttcacgtcttcaacattttggatggcctgttctaatttaaattttggacccctataaaaaaaatgcaatttataaataatattttttaaatattatcattcagttacatattttacaaaacacaaaagaactcaaactagttgttcatgataaagtcagtaatatatttaagattactggtcttcttactagttctaatacacaaagtcaacgatcaattatgtattagggttcattactatttgatcgtaacagagtcactaattgatttaagattaatgttcttcttagtagttctgagacacaaacacaacgatcaattccgtattagggtatcattactagctgttcacgacaaagtcactaatatatttaagaatactgctctacttagtagttctgatacacaaagtccacgatcaattctgtagtaggatattattactaattgttcacgataaagtcactattaatacatttcagattactgctcctcttagtagttctaatacataattaataaaatttcaattatgaaattacatgtgtataattataaattataaagaattttgctataataaatttcaataatttaatggcaaaaagatgtctaaaagatccttatttaataataaatataattaatctttagtaaagttttataaggaaataaattattaggtgactattaggttataatttaattattatttatttatatttaattttaaaattaatcacaaccatttaatgataatgtaatggctaaaaaatgtaaccaatgatatttctaaaccacttttataataaacaaaaaaaaattattaatagggcatttagaacataaatcataataatatataatatacaataacaacattattattcaactaaaaaattaataataaacattttaaacaaattattattagttgtatccttataatgattatggtttgtaactactacccatatacaaatttagttattttgtctgcttcctcatgaataccatacaaattaggcatgaccaaatgataatgataaacattgctacaaaaatctaattatggtaatttgactcattaatacatccaatataattaaactaacaatttgtatgatttatgtaaatgtgtacatttttaattttttttttttcatattttttgtaataaaattatttttactctacactaatgaaaaa

SEQ ID NO: 245075 - DNA, 1219 bp, Cannabis indica
agtacaaaagtaatgaaattgggcttggacagtacaaaagttgtttttgccgtgtcccagtataaatgtaaagttttggtcaaaaagcagtatttttgtaaaattcccttcttattttccatgtcaaaatattaattatagtttagaaaaataccatatgatttaagcccaaacataaaagcccaatacaagagcccactaacagatattagggtttcagaattcatcatatttacttctcttctcttctcttacatctctctctctccctcactcactaccttgctatcagcctcttcttcttctggttagtaatttaatttcattttatatgatttcttaagtttgattgatcgttttaatcttctgtaccaattattgaatttagtttttgtattttttagtgactaaaaatccaatctttatctgcttttaagaataaaaaaccaaactttatctctctgagtaactcgtttaagtaatatgtatgagaaattctgttgtaacttcaaaattaatctttttgatagtgtgaactacaatcccaatccaatttcattattcccaccaaacaattctgctgctgaaaaaacattcaaaaaagaacaaatgattaaacaatcattaagccagcaaagccagccatgtaatgaacctgtgtgattgaattccaacttatcccatgtgagaaaatctgttaattgaattgggttttatgaaattacattaaagttttgttctttcttgtcaataatgttaaattatttcaggtaatattggttgtagatcaaattgtggtccattgtttacacttccatgagctttgggtagtaataactttcatttggtttttgttgtttccttagtttcaattattaaccccaaacaaacttgagtaacattgtcctttgtttgcctttaatctgcccagtgttagaatatgtaaatactatgaggcttattagtaatttggaaatagtgtgaaagcctataaatatgtaattgtgtagctattattggggtatggattaagaaaatagaacttcggtttaattgggagattgacactgtctcaaaaagtacatttcggaggtttgtcctgtttcgaagaggacccgttacctatcattggtgcttttgatagataatagtcctcttcaagacgggacaaatctccgaaatgcactttttgaggcggtgtcaatctcctaattgaact

SEQ ID NO: 245076 - DNA, 1276 bp, Cannabis indica
attatcccatccgtgtgaaaataaaaaggtaataaaagtttttttttatatatttttcatgtaaatttttctaaaaataaattatccattctcttattttaaaacaataagaatattctttcaaaaaaaataacagtaataatattcattcaaaaaaaatgacaataattatattatgtaataataagttatttgattgttaattattattattattagggataattgcgccaaaagtccccaaaaacttagagttgatacagattaatcccccaaccttaaaaattggcggtaatagtcctcaaggtgacattttttgttagtccgtaggtcccctttttaactgatctgttaaactcaaataaaatgccacgtgtcaattttttattggtccaaataataattttaattaaaaaaataaaaataaaattaaaaaattaaaaaatatattttaaaaacataaattattttatttaaattaaaaatatacattaataaacaaaaatgtttataattacatttcgataacatgatatatatattagttgtacgcacatacttgttacataaaagagttgtaattataaaagagtaccttttgtacatatatatatgttgttatatacagaacatgtagactaaaaattaaaaagtaaccagtaacaaaatatacatactaagcactgtacaatgaaaatatgattaacttaataaattgttatcctaatttttgcactctaatgtggcatcatacgatgatgacacgttgaatcaaccttatgtatatgcgcgcaagagatatgccgaacatggcacaacatacattcgctcggacgaagtccaataagcagggcagcgagcaattcgcgcagcacgccaacacttagcaaattcagctttcgcattatgagtcatcaaaaaaatccctataactttgggatcagatcacagagatatgacaagctgtttgaatcccacaattagtatattctgtatttactatgcaatctttctacttatatcaattgtaaccagaagagaaatacttccctcccaagcttatagccctataaatagtgattcatatatgggcaaagggttctaagaattcatatttagagatactattgtaagagctctaagaaaaggaactattctccttgctcttaagtcaatacaaactacgaggattagactattaccgaactgctcggggcagaatctctataaaattcttgtgtcttactttgctttattatattacactcgtattata

SEQ ID NO: 245077 - DNA, 597 bp, Cannabis indica
aaactgaaatacagccaaacaagctctaagtgtgcaaacgaaatttttttgaccgatgtctaaagtagaataaggggagaatggggccagcaggaagattaaaataatgggaaatttacggcataaatactttatgttttttattttatacacttaaatacaagactttttttagtcagattaaatactaaatgttagtttccatctatttctattactgcaattatgtaaaatgctgactgtgattattaaagtgacacatgttaatatataattagtccaacctcatgtataattaaaatttatataatctaatttaaaataataaaaagataattcaaaaacatttaatctgtttctaaaaaataaacatcaaataaataaaccctcacaaaaaatcttatttttagtcacaacgaaatttgtgactaaaagtgaaaaattgtgactaattataagtcaggattcctgtgttgtgactaaaatgtccgtgggtaaaagtattagtcacaaaaattacaatttattgtaactaaatgtatttttagtcacaatacttgttgtgactaaaattaattaaactagtgacaacttgta

SEQ ID NO: 245078 - DNA, 662 bp, Cannabis indica
atatcccacaattcttggccttatagataagcctccatgtgcatcaactacgtgttgtaacttggtgttaagtcttttaatttcattgacgatttgaaagtcacccatcgtgcaagctttgtagtattaaactacatacaatcactttgattagaaactcaacaaaggaatctttcgaaatgaaccggatccagcttcaatactacttgttaaacaccacaatatgtgaaaacgtaattatttttattattgcaacgtaattacaccaaaacttaatacaatacttgaccacaatatacactatgtactcactattattttactaacacttaatgttcacactcaaatatttatacacactctttggagtacttagactatacacactttactatacaagacacttagttttggaacactcacttatgcacacaccatttgaaatctaacactaaaaaatcttatttctagtcacaacaaaactattgactaaaagtaaaaaagttgtgactaattataaatttttatttctatgttgtgactaaaaagtccgaagctaaaagtattagtcacaaaaattacaatttgttgtgactaaatgtgtttttagtccacaatacttattgtgactaaactaaattagtgacaacttgtagctaaat

SEQ ID NO: 245079 - DNA, 1590 bp, Cannabis indica
aatacaatgcaactattggaactggagagtcaaataaaggagaaaactatcgtgttaaagtctttcgaggatctagattttgtatgcaaatggcaattctactactgcaggcttatgttttctttatagttaacttcaattatgttatctcttgtttatgatttttgagatgtgccttagttttagtaattttatggttctacagcttatcttgtacaaagtcattattatatcccctctatatgagtatgtttaatgtttattaattataatgaaaataatcgtagctagaaatgattgagaaagagtaaacaaggaatcaaagattttgtttccttctgctaatttttgttatacatatgaatggatggagaatggaagaactctccttgattcctttccaatcctatttatcccattatggaacatggtctatgtgtgagagcctgcactgttgtcttcattaccatgtcatctcaacatttcaatgcaatttcgttaatcttttcaaaaggcaagtcctaattgatacatattttacatatggtgtgtttacatataaaattaacaatacgtggctagccacgtaacatctacctagtatatatatatatatatatgatgttaaattctagttgtttccatttcacacacacactcacataatactagttgtttcaatttttcacacacactttatgtttcttgttcccatttaaaggttatgttgttgttagtgaaatgtttgttgttcccattacaacaatatcagtaaaatagttctattatctttctatttttactgttctaagaatgaatgaaaaaagtttaaaacaacaaattagttataaaagaaaagaagttataatctggtgtattcttttcaaattttcttttttaggataattcttcaactgagtagttatatatatctatagtatataatgaaaattcacttaccatgtaagttggcatatgaaaataaaatatatgggtacaataaaaagctgaaatcgttaaaatattattttttatgcaacaattaatattcaagagtaaaagaaagaaaaaaaaagtcattgatgaagtggtactttaaatagtaaatagctcctcctgaataaatgagatttgcaacctcattgcaattgagtaaaagtaatctatcaaatcaatccaaatctatctttataaagcaacaaaatcaatccaaatatatgtttgtaaatcaacaaaatcaaatcctaatatatgtttgtaaagcaacaaaatcaaaatcaaatctatatttgtaaatcatcaaataatatttgtatactatactgacttttttagccaaactaaatgatgtgcaattttgcttaatcaagcaataatcaagttttgctagttttccaaatttctgcaagtctttttgttatgtccaggttgattgtattttccgcatttgatttgctttgttcgttttttgtttttctgttataaaggtttgcttcttcttttctttggtcttcccactcttactttttcttttggaggctgaacttctcatgatttaacatattcaggtacctcccatgtgtcttcatt

SEQ ID NO: 245080 - DNA, 939 bp, Cannabis indica
aaaaaacatttttcatttgggatattaaaaccattacaatttagaataagaaaagtcaaaatagactttcagcttcggagtccgtagacgcggttcgggaagcgaaagagaaggtgccgttttcttagaatgattttttctcttgtttttttttccttgagaaaaagacacttatctcctttctccgtcaataaaatgacaaatatacactaattagtaggtatgtggtaactggtaactggaaacacagtcccttaaattttttgttttttcttacaatgatttctttagtaaatgtatgtagttgagattgtgtactataaatttgttataagaaaattactcaataaaaaaacattaaaatataattattttgatattagttgatctatatgaactacactattaaattacgtgctgatagaattattattaattacacaagaatggatcgagattttgtctataattttgtttttgatttttactttcaatttttctgcacatgttgatctattgactttgtcgttttatagaatcataattcgcatagcaatctagttatatatatatagctcaatgtcatcagcgccagagaagctatgaaagttactttcattaattcaccaaacacaaacaaaaccgttattttccaaacacaagttatttttttattatttttttttttaaaatcaagctcaatatatatatatatgtttagttggttaactatatattcagagttaacagatatatattttttaatttatcttaattctatcatctatgaaaaaaaaataattacataattagaacatatattctttttatgattataataggaaactctttaaacaaataaattaaataagagttgtgtcaccggccttattaaataatctaacggctcctcaaatataaatcttccaaagaaaaaag

SEQ ID NO: 245081 - DNA, 626 bp, Cannabis indica
agttcctggtaaaataacttccaacactttgttcctccaatttcgagatctagaagtgtacaacgaaatcttgataattcttttatgcaatatgggaaagaaaaggttagaatcactatggaggacataaaggaagagatcaatttttggaattcatcaattgtatgctacgtattgggagccaaccgtccattatccataattgatggatttgctaggcgagtgtggaaggagaaggtggacaaagtgggaatgatttcacatggaatctttctcattaggttcacaacaaaagaaattaggaatgttgtggttaatggaggatacattttcttcaacaaactccctgttataaggaaagcttgggacctgaatgtcaatttcaggaaggaggacctaaatgtcatacctatttgggtacaactggagaatcttgagctaacatactggggaaagaaatcgcttttcaaaattattgggcaactgggaaatccaattatggtggactcagttgccgttatacctaaaattcagctgtatagtattaagcgagacaaggatgtacaacagatacaatgataattatgtcattaatgcaaaaggaaataactcattaaatatataat

SEQ ID NO: 245082 - DNA, 681 bp, Cannabis indica
aataatttccaacactaacatgtctggccagccaagagaggcctataggtcgggcaaggtgagcttgtttggccggccaagatttgggcacaagttagctggccaaaaggtgacttttagaccaagggagcctttgtttgaccaagggtacctgacctccacaaggaaaaggtgtaaaaagctagcctccacttgccaaaggctggcctcctcttggtaaagctgataggaacattacctgccagatcctggcaggaacatggcttgtcagaccctggcaggagcatggctggcaaggattgacctggcaggagcatggccggctaggattgacctgacaaggtggatgataggacaagattaacttggcaggattctctgtacagtctgatacatggactgcaagctgcctgcgacttgagcccttaacagcccaacaaactagatggaaaatatctactttcaatgggcaattaacagcccttaatagtcttttgtatttaatcaatttagtatgtaaatatctaagggtttcaattgtaaattagggtttagacaatcctatataaaggccttaactctaacctagaaaacctaagcctaattctagcctctaagtcagaaaccttagtctctctctctctccctctgctacacgccccaagggctctctctctctct

SEQ ID NO: 245083 - DNA, 1677 bp, Cannabis indica
taagacaagaggattcttctctttttcagaaaaaaaatatacctacatttaatacctgaacattagtttatctaatactatatgcttgtcgagccagacttgataatggattctgattgttgtctattgcaggaaaaacagaatacctttatgctcgtattaaggagtcttcacgacatgctgtggaggtttaaatgcttttccttttgtatgttctgctgctaaaattggatttctgtttgagctcagaagtttttctttaaactcattgaattattaccaaattaggcgttattggtcattagaattttctgtgaatttttgagtttcgaacgtaatgattggtgactttctaacacttagtatccactacaacttctgtttcctgtaataaatatgttctttcacatcttatttgctcatgataacaaaattacacaccttaagaataagaactgaaagaccactttagtctagatcagctaatcaagtggttggatgtgcattgtgtataagtggtctggggttcaaaccccagctgggcaattaacaaaatgggtaattactaatggtttcttataaacataaataaagggctgaaagccaatgaagaaagctttaaagggcattattctgcttgtttatgttctgtggctacagagtttgatgaataccattttatatgttattagagaaaattataaagtaatgttttggaggaagttttcacaatttagcaattaaatttatttttatgttttagctcagtagtgatggtagaaaggggtttgggttcgaactttggacctctttgtttctggttcattatgtgtaccaagtgtgctagttgtaaacttgtgtataaaaaaatattttgcacatgaactgtaaaccactcgagccaagtatgatctccacggactaaacaatgtctatctattaatgttcttcagggtaagaaaatttggtgtatgcttgatttttgattgtatcatattcatgttattgttctttgtaggattctttatactccttttctccattatatggtttgtttattaataaaccccattttgttctttcacaaactcacaaatacactttagagtttggttatgctgacagctagcttgttttgaaactagatgagttttcactgtattctggatgtaaaccccattcactaatgttttcttcctctgtccactctttttctcaataaaggttttgtctgaagatttgcccaatgccattgctaaaatatccttccccaagtcaatgcgctggaattctcaggtttgtacaatttaaagttcaagttgcttagtgaaaacatgaatgttgaggtgttagtttcattttatatataattaagctaactacttgacttaggtttcacatgaatatattacagggatggagtatgggggttgggtttgttttggtttcttgggctttaagtatcatcatgatttttaggatgtacataactttttttgttcttcttctctattaatcatttctcaatattataaattataaaatattgaattaaatgcctattaggcattagctactactgatttgaggatacaaattcagaagctcaagaagtctattttgttgttagacaaattttagatgtggtcattgttttgctaatgaaccagttgaaga

SEQ ID NO: 245084 - DNA, 632 bp, Cannabis indica
gtcttctattgatgatgtttttgtatatttttctctcttaatatgttcaaatcgatattgattgtagattttgatgctattacatgaatattattacacaacaatgtacttcttgacctcatcgactaatagatgaagaaagaaaaaatgaaaatgatataaagttttttttttttttcaagggagagtaaaaatgatatattagtttggagaaattaaagcacaattatgcatgatactcgtgctattttaacaatatatatgagatttataaatgagaaaggtggtctagattagctatatctaaatcatatgtagaaaattaattatattagactttgaacccgacaaattaatatattaataagaaacaaattacaaaatgaatcgcgaaagtatacatcgggagaaccattagattataatgtagctatatatatttttttttatgataaataagacctcagaaaataaaaattctgagtcctcactgagtatatatatatttatatatttatatatatatatttctttagaatctatatatctatgagggcataataattaattgtagttagtttcttaattaattataaggttctttgctataagtaagttatatatatatatat

SEQ ID NO: 245085 - DNA, 1257 bp, Cannabis indica
gcaaatagatctaagatcctggataaatataataccaacacttgttttggtgaaggacaagtggatcacattgggtttaatacttctaaaattggggttgttttgggtgagtcactagcctctcaattgtctcaaactgggcctcattgtaatgtgcaaagtgctcctgaatttaggcctattttcggtgagttaccaaccacacaatcatctgaaaatgggcctgaatttgatgttctagatctgccagggaatcagccacaaccaccttctgttgaacaagaaatttctgcaatattagagaaacaccagccaagaaatgaaccgcaagatcactctagaaatgataaagaacaaccaccattcgaagaggaaaatgaaaagacaaatgaagaccatgagtaaaatacttttgggataggacaatatgcggatttcggtgaggaagaccatgagtacaacatggatgaagaagatttgggagttgatgagagagccgagaatcagttgacagagttagtgaaaaagcatgtacatattgatgttgtcaatgatggttatgttgagtctgatagtgatttcaaaccgcatagtagttcttctgataaaggcactgaagtagaagatgaagaacctacaaatgtgcataagaggaagaaaaagtttgtaagaacgaagctgccaaaattgcctgagtttaggccagaagttgacatggccaatccaatattcaaaccaggtttatcatttgcttcaggggcataattcaaaaaagcagtgagggagtatgtcattcaacagggtaaggatgtttattttgagaaaaatgactctaatagggttagggcaaaatgcagaggagttaattgtccatgggtattgtttgcatctaaaatagatgatactcgtacatttgttgtgaaaacgtttaacgatgaccacaagtgcccgagaaccaataaaaacaaatttgcaagttcaaaatggcttgctgaaaagtacctggatcgattcaagatgcatgataagtgggatgtctcggccttccaacaaactgttggcaaagagaagaccctcgttatctcaagagataaggcatatagagctcagatgtttgcaacaaaagagatagaagggacttatcaagaacaatacaatgccctttaggattacgctgaagagatcaagcccaccaacaaggactcaactgtagaagttctcactgaagcaactaaagatggtaagcctcgtttcaaa

SEQ ID NO: 245086 - DNA, 623 bp, Cannabis indica
catgaatttctcataaaccattttatttttaataataaaccattttatttttaatataaataaaaagtcacccatgaatttctcataaaccaagaattctgttatatagacacactttatatagaatagatatatttatataaacaatataaacactagcggatgcacaagtcctggctgacaccctagaaaaaaaaatgaaagaaaaatacacattttaattaattataatatatatataaactgattttgaattaaaagttcataagcaaaaatgaagagtttgcattgctttcattaagccaaaagaaatagttaatttattctacttttaacatgtttgaaatagttaatttattctactttcaacatgttcatcttaccaatacaaattatattgaattttaataaattatgagccttaatttgatgatagagttttgataattagataaatactatattttatgtgatatatatataaatttaagagttcatttagtatgtcgtattagatcgtattgtattatattaaattgggttatagaagaagcaaaaggaaaagaaggtttcatgactctaaaattgtaacaccctaactaacataggcgtattacgtgatt

SEQ ID NO: 245087 - DNA, 1376 bp, Cannabis indica
gggaagcatgtggaagttgagtataacaacttcagacaacattggagaaattgattgactattcactacctggcttaggacttgggtgcggtttaacattccaccgcgagatatcagttaacctaaggtggatgttgaacttaaagaaacatgttggaataaatgaaggtactattaagtaccttaattttttttttcttattattaattataatttgtacttatatgtaactataattgtcaatttttacagagttttctcaagttgtcagaggagtacaaaaaaaatcattttaagagctgaagatagatggagagataggaaaacattcctaatagaaggcatttacgaattcaaagatgtggctcctcaccttctcaagaagccacctaaaatttatgaagaactaattggtgagaatgattgaaaggatttgtggtatctagattgactcttgagtgggcagcaaagagtaaaagtgcctaagagaacagagaaaaaaatatttacaaccaccgcttcggacgaggtggtgtgaggaaggtggaagaagatatggagaaagagttagaccaccaactcatcgacattgataaatgaagtactgtggaagtgtaatgatcgcgtacttagaatacatgattagtaagacaattagcatattaattaactaaattatattattatatttgattattttatattgtaggtgctattatcaagaaataggtattagagttataattttttaattcttgagattttattattatttttataatttttgctcggtaatgatgaaaatgtgacggttttgctaatagagtcacataagtttggtttagaactttttgtttagcggatcggcaagtatttcatatttagaatatcgagattagactgggttgtggtatttgaccattttacccctaaaccttaatgttacttaagcttgaattaaagggtaaaattggaatattgcttaaggttagactttggattttagtggaaaatttgtagagtttatttccttaagtattaattagagtttttatcggctaaaccttctcaactgtcgtttcacttgtatttaactcttcaagctcaaattttggcgataaaaccatccaaactactgaactggtgacaaatttaaggtgtcatttggctaagtgttattattgaatgcttatgtatacaatcttgcacacatgacacttttatattggtacacctaataatattattttcaaaattcattttgaaattataataaattataaaaataaaaaaatatattataaattttgaaataatttttatattttttaaataataatattaggtgtaccaatataaatgtgatacatgtaca

SEQ ID NO: 245088 - DNA, 1059 bp, Cannabis indica
catgagaaatatgccactgccaagtttcaaactctaaatataggtctagaagaaattgtacccaggttctcagggaccctactcgacgccaaggttgacatataattgaccttagcaacacgatagctagggtttaggttttaaagaacttctttggacccctattcctcaaatctaacaaggatcaacgctagggcatgaattttcataaatgacattccgaaggagcacatctcaaactataagcacccaacttgacattacaacttaagcactgattctctttcaccaagtaacgcccatctgaattagacaaacttaaatctggtgagtacctttaaccaaaaagaagactgaacatcaatgaggagaaatatggggactttcccccccacctgatcgcctagcgaaaaccctcatgctgctatgggcacccacatgttgacgtaaggaactctggtacacctttctggagaagtctcccaaaaaatttccttatttatgttgacgtgatgtgaactactataactgaatggtgttctctttatttttcgttattcttttggtggtcgctaccgcttataagatagtatagagttggtcgcttttcagcgtcaatattttggtgttttcattgagagcatcactcgagtcccatagttgccttcaagtttttagcgtttgattagattctttccaaaaggaattcataagtacaaaaacctgtgaacttgtagaaaatagtggttataagatccactagtgtagatcgtgatgatattgttaccgccacctcaaggggtggatcgagagcccctggcttaagaccacaaccaaagataccaacaaagacgggtaatggaactagtggttctttaaccccaaatgagctgcatgtggaccttggtgaggatcctatggatcatggcggggatcttccagacctcggcaaggagccggagctcaaccctgagattgagcaactaaaggatattgctactaacttgcgatagattatgcgggtgtaaagaccgcttatctttaatttggaaattagca

SEQ ID NO: 245089 - DNA, 1322 bp, Cannabis indica
ggaagggattattgtaaaccatagactatatatatgtgggaggaggagatttttaggggctgtgaaagaactttttagagttatctcgattattggagagcccagtcctctcaaatgtggaataaaagagtacaagcctctcgaatgctcgtggatgtaatcttctgcttcttaatcaataaaagtctttgagtaatttcagcaatttgtgtatgtagtcagataagataattcgaactattaaaaagcttatcgacctatttggcatattatgggtttgaggtatgagctgcttgataataaacattcataaaactgtcaagagtcacttcagtgtggcgagcaagagaatcaattgtgggtcatgttccagattcacgttatgggggacgattaaaatggtttttatgtttatatgtgtgttattgaatggagcttttcttcacttagttatctgataagtgttttttctttctgatatcagaagaagtgaagtctaaacatccaaaagtaacatatgctgacctatatcaggtgattttttgtacttaaatcttagaatgataggaatacatggtattgtgtttttggtattagatctcagccaactttatagtaaattcttagtggaacaacattggagtttcttacatgggagactaaccagatagggttttgacactcttaccgttcaagtttattacatgttcgacttgctagataaggttttgacacccttcatttggactgacaaaatagggtcttttctcctcccaaggaaactataaaggaaaagatcagcattagtaaatcagaaatttggcatcttaggaactctgaaagttcttagtaacaactaaattgacccaactggtgaattcctttccagcttctggattttagtgtgtaaagatgataagctttgactattttgttctcctctcaaccccttatagttgatgacattaagaggaagaaagttatattctatataattcttggttaggtagtccaaaatgagaaggaacataaattgcactaagaaaaaatggttcttcaaaatcatattctaaaactatctggaattctttgatatatggacatctacatctcaaaatatttttatatatatatatatatatatatggacatctagaaattcatttggcaacttcctttaaacaattttgttttccagcttgctggtgttgttgcagtcgaggtcaccggaggcccctccattgattttgtgcccggcagaaaggtatactactactatttatggtcataacattaatgtaagtcatattatatagtcctta

SEQ ID NO: 245090 - DNA, 2068 bp, Cannabis indica
ggctttgccaactcttcccacagctaaaaataataataataataatgcagttcatcatcactataagagctttgggtttttcactgcaaagtacttaatgagcttagtacttagggtttggtgggtgttgaatttgttttggaatacgttttgggatgttttgaagtttatggggacagctttgttgttgattaaagatagcaagactcctataaaaggtccacctgggagtcagaataatcctcgtcgaattgtctacaaaattgttagtttggatgatatgaaattgatcaagaatgcaatgaacacggtacgtacatactttaattaattaattaattaatctaaatatatatctcatccatcaatttagttttatatattattattgtttctaatttgtgagacattctctgaaacaagactaaaaaaataatgttgttttcccttgagaataatgcccggtcctgaaaaatatcttattaattaattatttcatgcattaattaatatataatataataataataaatagcatttttatatataaaaaaagatcctatatcaatatcactatattgaaataataaaaaaataatactatatacaaataaatgaatgaatagttataaatatgttgatctgcaacctatatatattttgtatccttttaactatatatataaatatatttatatataaagtatgttatgaaatcccttgtttggtaggagagatcgagatataagaagaccttctaatctataaatttcaattcctccattttaatttatataaatatatttatttgaactgtatcctttaaagataaaacaaattatattgggaagtatatgtatagtattataattttcacaaacttttttattcttctaatttcacttttaatgttaaacattaattgcttctactcatgatctccatccttggtatgctctcttcatttatcctaccaattttcttccctatcaatcacatgttagaccaccttcaagagaattgtactattttggtgtatttatattttccactaagttggtgctagtaattatttattgcattttagtgctacaatttctaataatttacacaaaatatcactattaaataaatatatttttttttaaaaaatatttttacatttttatactatttatatttataaccaataaatactaattaattataatataattatgtatattgttaacaaataatttatggttaatttttaaagaaaattaaaaaatattaaaaatgaaaaaaatttacacgtcaattactttagtgtaaatttaaaacctaacattattactagtgtgaaatttagtgcacatgtaatttagtgtatgtttagagtaaaaataatatgaaattccacactaatttagtggtatgatgtagtaccctttaataaagaagctacttagcaacgagccatatataagataaggagtccttaaaattaagttggacagtaaaattcaattaaaactaaattttaggaattttgtttatataaaacgtatttttttttaagaaaaagtctatctaaatataatttataattatattttaaataatggtataaaataataacattattttttatttaaagtgcatgcatgttagctaatgtacagcactaatgttagaaatagtatagtacaataattcaatttatttattgcgactactcaccgatttattactctttatttaccttgggctctttgcagaccataaatgatgttgccttgggagccacccaagctggtttatcaaaatatctcaatagaagatatggtgagaaaatttcatctcaattaattatctagtagatccacctcacttaattttagtaatacatatatatatacatgtatttattttacttttaatataataataaatatcagtacgtaattcattcaaaaaaatgaaaccaacatatttgtattttttttctcatgagttaggtatattgaataagaatgatgtgggagaaaccgaaaagaaaaacaatcttccaaagaaaattcggtta

SEQ ID NO: 245091 - DNA, 1208 bp, Cannabis indica
ttttctgttttgagttggtctcctctttaccaacattagggccacttgtctttcatctcttggtgcttgtatttccttctcaaagtatataaagaaaatgttgcctcaacctccatttgagctgagaattccatttaccatttctgtgtgtaattcaacttggtatcagagccaagaaaaagcttgccccgatgtcgtcgcactctcagactcctcaggcaactactacggctgtagcaggtgctacaagttcacccatgcttgttccccaacaaaactacacccaaccgttcagtacattgaatcaaccctttcccttgaagctcgacaggaaaaactatgttctctggaaaacaatggtgtctacagtgatacgtggtcatcgtcttgatggttttgtcaatggaactcgtccatgtccaccggagtttgttccagctccgatcaccactaaaggagaagcaggttttggtgtaaccatcaacccaaatttcgaacactggatcgtgagtgatcagcttctaatgggctagttatatagctcaatgacagaaggaattgctaccgaggttatgggctgtgctacagctgcagcactgtggaaagcacttgaaaacttgtatggtgctcactcgaagtcaagaatggatgatacacacactctgattcagaccacaagaaaaggatcaacctccatggaagactatttgaagcaaaagaaagcctgggctgactctctggctcttgctggagaaccctatccagaaaaccaactcatatctaatgttacctctggcttggacatcgaatatctaccaataatgctacaaattgaagctcgacagtcaacaacatggcatgaattgcaggggataacttcttgcatttgataacatgatggagagacttcaaggtttaagtcttaacagtaacactaaacctttccatcctcttgtgtcacctaatgctaattttgcaaatcgaccaaacaacaacaacagaggtcgtggggttagtcataatcaaggaagtggcagaggaaactttaaccgtggtggtggaaacgaactcaggcagaggtcgtggaggtagagtcaaatggacctaagcccacttgccaagtttgtggtcgttatggtcactcagcagctattgttacaatcggtatgatgaggcgttacatgggatcagaatccgaaaaacagggg

SEQ ID NO: 245092 - DNA, 2234 bp, Cannabis indica
ttccaaacaataattttgaaaatctatttataaataaatataaagttttaaaattatattaaagtataataaaataaattcctgaaaaaatatctaatttaagttgttctaaaataaattttcaatttaaataactttctaaatttaaattaaataacaaattaagtatcttgaactaataaccttaatttgaaaaaaaaatatccctatttaagttgatctaaaattaacaaagaatatctaaataactattttcttagaaaattctacttaattattaatttcaaaatattgaaatttaagttgatccaaagtcagtttaaaaaattgattttcaacttaaatatattttcattgaaaattcaaataattaagtacctagaaaaattctaattagttatagcttttaatttaattaaatacagaaaaatacatctagtttatattgaataagtttcattaaactaataagtgtgtttttcttaaattaatttcaaaataatctgatgatttttttcatatattttgaaattaattatgttgctaatcaattttattaggttaaactagtgtaattaacttattacagttattcaaataaggcaaatgggccttcacaattggggttgttcatgtgagggagggctgggtttaatatgtcgtacccactactaatggcccctaactctcacacaaggtccaaaggagagaaatttaaccttaattaaacaaatgttattcattataaaatctatcagagaataataattttattttagcaacctagtccattttaattataaaaattaaatgggctccctatatgcatctaagtccaaagcgaacatataggcacaggcacaaactgatttggatggatcctatcatgttactagttttatacacagatgtaggaagaaatcatcggcgaagaaagcaaatagagtttgtaatctgcataacatgaagaaatatcgtcaatacactttttaatggtacaattataattagttctatgtatcttatcatttcaggttttccaaatcgtatccactactattgaagcgtataggaagatctcattgacctccactccattatcctttagcccccataagaacttaacccaatcccacattcggccccccgactccggcactggcatcacaccgcaaggggatgacctctaaaggtgagcatcaaaattacaataaaagaatagatgttccacagtttcctcttcatcttcgcaaagagggaaagacacctcattcatatgcattcttctagctagagcattcttgatcggtagagcattagagaggatactctaccacaaaaccttatggcgctccaagaccctagaattccgaagtttgtttcaaagggtgggcacaactatggtaggcagggcacgagacaaggcctgagcaagataggtagattttgtagaaaatcgaccagttaaatcttttgtccaaatccatttgtccttgccttgccccctggcctaccccctttaagaatattattggttgtcacttggtcaaacaagaaattgagcgtttcagcatcccaattcccatcctcaataagaaggttcgcaactcttttccaaccctcctgacgaccgtcttttggattgggatagattttctggccatgaatcacccatggatcatcctagatgtcgatatcattcccatccaaaatgagcttgcaggcacccttttaaattaggtcctttgattttactacattcttccaaaaccaggagtccaagttgttaaaagagaaattcaaaaacggtctacgttttaagtatttcgcattcaagaccctaaagcacaccctttttgggactgacttagtgaaaatgggtcaaacattgcattgggacatgagctagacattcaatagacatatttgagacattagaatcagattcgtagaactttcatttttttttacagccgaagcacctagtgctcgagcacctactgcccaggttgacaattttccaatctggaccacttcaaagaattagaaaaaaaccctgactcatgagtcttttctttttcataaaaaacggggaaagaagtactttttgggaagaaatagaccaacttgagggccaaaataagagatcaaagcccaagttgacacctggggctggcctagggcctaggaggacattttatcaaccttggccgattttgaggagtttttctcaa

SEQ ID NO: 245093 - DNA, 608 bp, Cannabis indica
ggtaaccctttgcatgaagggatgaaaccttatttataggtgttaactaatgggttgggctaagtttgcccattagggtgtgtaaactggaaaaatctcactgatatggtaaattacatttaaatattgatttttgggctgattagttgaggcccaatgtgttggtaacctttgcccgtacgcggacatactattgacagtgacaaccttgcatgagtcgtcgagttgttggaggaatgtcagagtagtgggcgttagtccaaaaatgtgacttccttttgctgtgtgcctatccaaggcctgatacaggggacaagttaccagatttcttgagattcttgtcagaggtgtgccatgtaggatggttcccaaacacttgcacgttatacgcctttttgattatcattcccggatcccttgagggtatacgacttcgcctctttgaatgcttgctagttgaatgtatgattaccttctagaactattaggcttagtcgcaaagaagcgactatctgatccagaaatgtcatttggctttacttatgggtcgactgatcgatccactttgacccagtgaatgggcccgtcattcttaatgggcttacttg

SEQ ID NO: 245094 - DNA, 751 bp, Cannabis indica
ttattgtattaaataacatgatttttaataatattttagtatatatatatatatatatatatatggttttttttttttttgaaatggatgataatctgttttgaacaagattaagatgtaaatgttgatggtgcgattacgatctttgcgtctgaaggatcgatggtttggggctaggtgtagctcgggatggtgtgtgtacattaattcacatattattgttaaaatgattttatattgaatggattttaattaagtaacaaaacccaatcgtattttttggatttaatgagatttattttattatatataaataaaaagtgacatgaatttctcataaaccataaactatttatttttaatataaataaaaagccacccataaatttctcataaaccaagaattatgttatataggcacactttatatagaataaatagatattatcaatgattaaaaacctccggcggtaagtcctccatcaacactgataacttgtccattgatgtatgaagcagctggaaggcaaaggaatgccaccagtgacgaaatttcattaggctctgcaagacgaaggattggggttctcttaaacactgctgagaagtcttcgtcaataggtgtcccttcctgttcaatgtcaaatatataattactaattaattaatttaatacattaattggtatatataagaatgaatttaaacaaaaaaaaaaaagagaataataaattctgagaataaatgtatt

SEQ ID NO: 245095 - DNA, 1757 bp, Cannabis indica
ataaacacttaaataaaaaaaatgttacaatctctcttaatgataacactttgttaatgttaactgttatattttctttcaacatttttagaatgaaattattaaatcaaataatacttattatttatcacaaatgaaatctaatataatcaaaatttgataatatttaacataattggtatattaatcaaaatatccaataaatgtatcacaaatgaaattgttccaaatactatattacataataacaactcattatgtaatgtgaaatgactaataaaagataattaataacatttgtctttaatttattaattggaagtgtctctatctttattcatcacttacatagaaaaaaatataataaaaaacaaattatatcatataggaattgagagacaagcctaaactaaatcaacaatacaatgagatcaacaatctaagatacaaaatttgaagcattcccatcttcaacactcaacaccaaggcaatcacaaagatttgtcatatacaacctaagtcattgttaaaaaacaaggctgaaactagatctaaatcaaagcacaacaacaaataatttacaactcaactcaaaaggaacttaagacaaaacaatgcaccctgtaacacaactcagtagaaaataaacttaagataaaacttagaaaccctgtaacacatcatggttgcaacattcaagggaaaagttttcaaagctaaacattatactataaaattataattctcaatctgtactcttttatcattatttgtcttcaaactaatgctagtttatgccataacaaaggaaacattatgtttcttatcaagcatatcgattatggagaattaggtgtctaaaccagagacaccctgatgcattaaacaaaaacaagaatacaagtctaaagtacaataacaaacaacagactttgcatatcaacaggagcaaaccatcaaaagggaaaaaaataactgacaagctacaaaaattcacagaagagtaccatttgtatggattgaaaaagaaacacacacacacacatatatatataaatgcttatggaattgagatagtacccgttagttaaagaaggaagtgagcatgattttggaggtggagcaagaagaaataaagtggacgagtttggagaaataataatattggattgctgatccacgtttctgatgtcaagttttccaaacccagaaaagaatgattccatcacgttttccatttgatcctgattacgttagtaactgaaaatgaagaaaaagatatactaatggaaataaacaaggagaaaaagagtttgtgaagtttagaaagaaaaatactatagtttacatggtatgaatagagttgttttcaattgttcacctgcaaaataatagccataacaaaagatttctcattgtacattttttatatggatcgtctatattgttcacctaagaaagcacagagagtatcagaaagaggcaattcaggttaagtactgtaaataaatataaaataagagaaacttccaattcattaataggttagattaaattgaatcaccccacaagtgtagcctatatgcaatggaaaagactcaatattagtagaaatttataccttcagatatttcacaagatcacttgaaaccccattatcttcaagtagaatgcttggtgtcatgtcctctatcaccctgtattagtcaacaaggtgttagtgagtaacatctaaaacaacaaccactagtaatta

SEQ ID NO: 245096 - DNA, 1989 bp, Cannabis indica
aaacgcttagccatcttttgaatggtggccaataaggtgtaaaagactagaactttgtgagttttgtctatttctgtgattgtgatgttatgagttaagtttgtttggtggacaataaggtgtaaaagacttcaagtagaactttgtgagttttgtttagttcgttgatgttacgagttaagttggctgttgcaatttttggcttttgacttattggaatcattttttgagtgttaattaaccatggtttcttttccaactacgtaattatgctttttctctactcattagatatagggaacgactaaagtacatctccttaaaaagcaacaccggtacactcatgttttttgacaagtctacagttataattttctttagagtaatttgcaacataaattaactctcagttgcttaagtttaatttttggctacaataatacttaagttatatttctggaactctatagatacctgattgttaaatattaagtaaattgtgacgtggcaatcctaattagtccaagtcatgaatttttaattttttttttaaaataatatatatgtaccaataagaaaatgacatgtgataatgatttgacatttaatgttcaggtacgtgcagagttacagaaatataacttaagtattattactgccaaaaattaaacttgagtatttatttgcaactgggagttaaacttaagtatttatgcagcaaattatgtacattgtaattatttaaaatatttatatcttttgaaaattttaaataatttattgagctgaaaaaaaattctaataatgtattttaggtgtatatacataaaaactacatgcatgtaacatgtttacataacatgttcaatataattacaatgtatactgttacgtaaaaaaaaaattaaaaagagttgtcttttttaagggatgtactgtggtcttcctatatgtacaatatatacatgtataaatataattaatagaatttgtttgtgctatattttagacatgtgcaacatacttcattagttttacggtgcgtccaagagaatgggagtaagtaagtagtagataagatttaagaatcaatgtagtattgcttcaagtctattgtctcttttcttttttcttccaagagaatagaaacaaaactaatgtgaagtttggcaaaaaattgtgaagtgagatttgaaagttctatgttcaggtctctgtttcagttgaagagacaatagaattgttttcataaacctgttaacataagaatttacaatttagaattggataactacttgtaagttgtaaatgtggattgatgaaaaaaaaggtcaatttctgattgttttttgggtaaatagatcagtgtaccttactaatttgctaatctagattttttggctatgggttaaatactttattttgcatttattttttcttgagatgaagttattaatgtataaaatgtatcctttacagcagtaattacactctttttcttgtttagagtttcagtgcttaacaatttggtatttgttgcaggataaaaatgaagtgcaacatcacatatccgtgttgctctttgttggattgacttgtggcttcttgatgtttttctttacaagatttttcggtttatggtctctaactggtaataatacctggaatttactttggaacttcctttcaatatggatcttgagtgtttgattagtttgtcattattttttggctgatgcttttaaaattattgggcatttcagtaactaaagaatttgattatgttgctttcagcttttgctggggcaaataatgtacatattgtacctgctagcgaacacctatgttcaggtactttttcattccttaataattcttaaaccagaaaaatcaagttataacgaattcaaaagtataaagagcaaaatattttctttaaaatcgtttttatattttctttttaatctagctgtcatttttgaacgtcca

SEQ ID NO: 245097 - DNA, 736 bp, Cannabis indica
cattttttttacttgagttttgagagagaaaagcaagatatatatatagagagaaagtttttgtgggtgtgctgagagagaaaacttgaaacgacatgctgatgaaggagtgtggaggctctcttggtgaagagagcctatcccaatgagaatatcttcaagaagaacaatacagaggaagaagaagaacaacagacaactcaaattttttttatataaatttttaatgaaattaatatttaatttagtcaaaatgatttcaaaaatttaaaaaggaaagatgcattaacgagtatattatacaacccaattttttattacatgttctttcttaagtttttttatttataattttttttaattattaagtcattaatgacaagcctggagactgtccctttttcaaacactggcgagaataactaggaatttattattatcaaaattttttttattttttttatttacttattaattagagctatatttttttttttttaaaaaaaagaattatgatatagtgacacgctaaatgcgtggggacatatttatagattcgcgtttggtgtgtcactatatactagcattttctaaattaataaaaataaaaaaaaaattaagttttactctttagtgacactccatattattagtgactctcattacatgagactaatattaatgtttagagtctaattatgcatgtcactaaaaatcactcccaactctttagtga

SEQ ID NO: 245098 - DNA, 783 bp, Cannabis indica
gacacgatttagtacatgtacaaagttacgaaaaaaaaataactaaattgaccataataataataataataataataataataataataataataataattattattatagtatgttgaacgaggaatgatagttatcacatgcaagacacgtgacagttttatctctattgtctactctcttctcttctctagtcccctccataaccctaaccctaaacaacgacagcctcctcagtcctcaccaacagcagaaccctaccagagtgattacagccatggttgacggcggattcgaggtgggagtggttcctttcaacccagatggctggggtcccatggaagcaacctccacatctgccgcctcctctaacctccctctcaacgttccttttgccccattctctcgctctgacaaaatcggccgaatcgccgattggaccagaaacttcaacaaccaatccaggcccaagaatcaaccctccgattcagcctttgatttctccaacgacgattccttccccgggtacgccgacgacgacgcctccttcagattggtcgacggcaagcctcccccgcgccccaaattcggacccaagtggaggtaccagcagcaacggcagctccctcagcgacgcgacgaggaggtcgaggcacggaagcgagaggccgagaaggagcgcgcccgccgcgaccgtcattacaacaataacaggtccaatgtcaaccagttcaggcgtgaggcggccgtgttcaaatcatctgtggatattcagccggagtg

SEQ ID NO: 245099 - DNA, 3832 bp, Cannabis indica
aagggagggtctacagtaacacacttttatgttgtactgatacatcacctctccccaacaatatatgaggagaaattttttagaatttcttttttattgatttgttcacatgacctagttacgggatcctccttgtcaattttgaaaaacctctattaatttactattgacgtggtttcttgttaatagatctaagaagaatgtaaatgaacaagatgaataaaagtgaatgtcgatcaaaataaactaatgtattaaaaagacaaataacaatgatgaacaccagatttttatagtggttcaccctctttgagcgataataaattagtctacatagagctcgtttggtagactgtataagagttgtattattttaagtaacaaataatattattatctttggataaaacattgtattgtattaattattatcaccataaattttaatacaatgtgagtcgtattatttaatacataataaatagcacttattaacttatattataatgtttacaaagggcgggtctggcgtcaaccccgaccccgaacctcagacttggacccgaacaacggaccctaaccccgaccctaacctcagaccccggacccagaatcagacccgaaactaaacccgaacctgaacccagaccctgatctagaccccaaccccaacctagaaccggactcggataaggacccaagacccagatccgaattctgaaccccaattctagacccagacacgaaccccaaaccctagacctagacatgaatcggggctcgaactccggacctggatccggacttggacctcagacccaaatgttaggctatttttagcctaatgtttgtaaaatttagtatatattttcttcttagtttttggagtagaattacgctttttttgttggtttcaattttcgacacttaaaatgttcaaattggtcaaatattggaaataagatgatctataaaatagagaaaattttgcaaataaataaagctgaaacttcaagcctaaattcgtcaatgttctggtcagattttgaaaactttcaaaacatacaagttttagatctctttttcagctttccaacacttcatgaatcaactcatttaggtattaagtataaacacattagggattaagtaatccttaaagtgatggcagaggaataatatgactccttccgtttagatctttaacccttgattctttctattgcagagtatgatcaagatttgaaccaaaatcttcttctccttcgatggtgttcgtcacaatcttcctcactatgctgagtattgctttgacatgtgtgggcaagctctcaacaccaaggagcgcgaaattttatgaagaaatctaagagaacataccctctgaattttcaaaaataaagagaagaagaggtctgcttttagggtttctagcttagaaagacatcatcagacaaaactctattttctttcttttaataggctttacttagggttatgttaagatgggatggactttgaataaagaattggactgaatcttactcttaggaccgaatatgcatataggctttagagttagacttttgcctttttatttcaactaatgaaacaaaagtgttttgtctacttttagcacttttctcaatatttaattatttaaataccaattttattttaataattataaataattatcaaataaaatacaacttaaatatatttattaattaaacccatcaagtgtactaattaacaaataaatccttatttttcttttcttctcaattatgccattccttagtaaaattcataaataaaatatagtcattatttagaatcctaattgattaaataaatcaattatttgagactacaaaataatattatctcagttagtgcggggaccatgggcctatgtaaccaagctcctaataagtagatccaaaatttatcaagtaaattttctaactgattaattcctcctaactccactatagatttagattgcactcctgatcactacgtagaacgttttatatactaaatatagatacgctatgaattattcattggtacaatctaaatagtcaatgatcctctatagacagtgagtagggacaaatttactgttgtacccgtaattgtattttatccttaaaacacttagctacttgtaaatgatattttgggatgcctatataattatcgaaatgaggccataattatttaaacgcatttagccaaggtctaatttcacttctatgtagttgtagaagatatagattccatatctatgattaacgctcccactcaattgaattaccgagttcccaagatataagtattgggccgatcctattggttagctttaacgaacaagtcagagaacccatattgtacaattaggctagaactcaaccatctcaggattgagatcaattgacctaaggtcaactaagtgacattaatgacttagaaaagacataacagtaagtttattatattttttcatagtcaatatatgtcggtctagactgatgtatagctgatacatccaatactagattactactttgctaatgacttaaaaaagacattttactatacaagtgtaagtaaatcacatcgctgattattacgctagtgtaaatttagtgcagtgataaattgtaggactaaatagtttgacgcatataatcattattatttttcattgtgtagacaacactataatcatgaataaatatatgtttgagatttaatagaatttatatattaaacatataatcataaaagtaatcatgtgaaccatgcaacataaaataatttctgatcttttattaatttgtaaatgtgattatattgaaatgagttttatttagggcgtaaaatcccaacatcatcttctattgtccttatgttagactcatcatacataagaaacactataaaacaacttgaaattggacttattttctctttagtggatcgcctatgtgggacttcctcttgagattgtagatcgtttgctcttctggaacaacctcttgttattgagtagggagttccatatgtgaatcctccctgttgtcttcaaatatgccttaacaatatcaattggttgatcattgtaaaaaaaacatttagtagaagaaattatttctcttcaaataacaacattccttactttatctcctccctcaaacacaacatcctacaaaagtcacgcattttccgtctcaaaaaaggacttcgttgagtgaacgtaaatcataaaacccctcaacctttcaagataccaacaaaatagtagttaactattcttaagtccaatttattttcatgtgagcctaaaaaggccttggctcagctggacaaccccaaatgtggaagtgtttgatactaggcttttagcctagttcataaggggtgatagctactaatttgctaagtactttatttagaatatatattactgtcttaagtgccttgtaacgtccctgcttcaaacctccattgggccttcccccacggactcatggctcttatacacaggtacgccactatcgctgcttcctggactaacgactgacccaacacaccaacatgagtgtttctagtgtactttgtcctcactcgcacgctccttgggaaaacttcccaggaggtgacccatcctgaaattacacaaggtcaagcacacgcttaatagtggagttctttcgtgatgggttaccagaaaataagatgcaccttgctgatataggtagtaccaatcaatccatttaacgccctcttcaattgtgtagtcccatacctacacagtctc

SEQ ID NO: 245100 - DNA, 809 bp, Cannabis indica
aacacctaacatatttaactgtcattgcaattgagatgaccaatgtggtttaggactccacctttgatataagttgatgttaaacttggtgtggttgagaggttatgttataaattataatgtaggaaatacttgtaaaatatacatatatgtgtatatataggaaaattcttcctttggggtattttctgtctttggtatatagagatactataaatcaattttgtatactatggtggtgtacatcatagttatactagtttttgggagtgtgtgacaaattatttcgaattttatttccaacaacgctgtaaattattctgaattttctgaaaatgagcaaaatgcgatttacaactacaatatacaatatcatataaaaaaaaattgagatataatttagatagtatgagaaatttgggatatatatatgttgtataaaaactttaggatgtaatcaagttttgagagcttgatgggtagtgtttggttactgagaaaagctatttgtaggtttagtttaatgcttcagctacattacaatgtgatttatttgtgctcagaaaatttgatatattgtaatttatttgtttggtttttgcaggaatcttcaacttctggagctgtgaaatcagaagaaaactgcacaattgttcttgagctttcggaaagtgattctcttttcgatagaaagaaggtgcaaatcgagattttcgactacattccatgtattagcaattgaatatagtttatgggcattgaaatcctactgattgtaggtagttgatcctactaaatcctatatttgt

SEQ ID NO: 245101 - DNA, 1071 bp, Cannabis indica
ttttttttcttactttttgattttaatcttttttgtttgagtaattttaatttttaatattagtaggattagtagtagaaaagagaaacctttaaagggttaataactaaagcacctaaccgacaaaataaagaggtgagatagtggagttggggatcacctctttcctttcctttccctttccaagtgattttgacatgtatctgcatatacggtgtccgtacaatcactggtgatgatgaagatagctgggagacaatcaaggtttgagcttttgatcatggaaccaaatatatcccagaatagactcatgttgttcacacacagaccctgcatcatcaatctggggagaaatttcaggcacccaatataataatactttggaaaagattagaaaaataaaaaacagattaattactatttatatcacaagacctgagtgataaaattagagttttgaatttaagcaaaggaataataaaacatggtagcatagtaatacactagacaatattatggtattggttgaatttgcaattactagtctttaaagggaatcagcatatatcaaagttattgaaacagaaaatctagttttcgtttttcaacaaacataatgattgatgcatgtagcctgaaagaaaccattgtatgaaaaaatatattttttttataatggtctttgtttctcattaatttcggatatatttgacaagattagacttcggagacatggtttttgtattttggtacctcaatgtatggaagtctagtattttaaattaaactcaatcacacaagttggtcggttggcatgtaatatgtggtatggtgttgcaaacaattttgtaattttatttccaagaatattcaaacggtgtgtgctgctgataaataagtcttacacatttttatatttatataaggagcattgttgttagcactattggtgtctagcaccaccaagaggtgacgtcctacttttacgattgattagcgatatttcttaaaaagtattactttaagttatatgagattcaataatcaattgtatcaatagcaatatgacac

SEQ ID NO: 245102 - DNA, 914 bp, Cannabis indica
tcagatggtgtaatgagatatatattaacagattcaatactcctaatcactgttaatttctggttggctgttaagaatagactcaaaaccaagggtcgtttcgcttattattattaattgcatagtccaagatcaaaattattctactttgtggtgtggatgcaggcggttaaaaattggattggttggcatgcctcttctagttcgcttgagaatcttgctaaggtggattgttcgctcaaaaaataaggtcttgtgggctcaaaaaagatgaccagattagacatacttgtaaaaaagataattgaatgtaaaaaatagaattttgatggtttggccggtaaaggggatgttaggtagtttgagaatttaccttatttgtgatagtgataggaatttgtgtagagatcataggcctgctgataggatgtaaattgattggtttgatgcaaattcactttctcatcttaaaaaaaaatatacatcaagtcatgagtggttcaacttttgattaaaattatttacttaaaatagtgttctctaatttttcgatcatatgcatgcataatgcattaaaaaccgtgtgaaattgatcaattcccaaaatcagattatatatggtgtatataggtatgcgtatatatatatatatttatatacttatgtacaaacatatattgaaaaaactagtcaatagataatggattacagaagatcgaaacttttccggtggcgggggccattagggtgcagtcacaaagcgaggtataagaaaaagggtcccaattattatatataccatgtgtgagatgacagcagcttcacttaaatggtcaataatttttttgtatatatttatatgaacaatatatatacacagcaataaatatttttatatatattaaaataattat

SEQ ID NO: 245103 - DNA, 1273 bp, Cannabis indica
aaaaatcaacaacgcaccacgaccgcatggatgtccttacggaatccgtaatatcccaacagtttgaagtttaaatgggaagaggtctaacaacaacaacaggaagggtaatggaaagaaggaaaattcaacggcaatgccaagcaacacccttgagaaaatgcctctaaatgtactgctttcgttgtcataacaaagaacatagagacaatctatgcagcaactcagtctatggtgtcgtacaagaacccatctttcatgaaaaaggatgtaagcaaaagagatacaacaaagttttgccgctttcatgtagattaccgccacgacacaaacgaatgtaataatataaagcgagaaatttagtttttaattagaaaaaatatcccacatttatagaagtatgtcaaggttgaccaaaatctaatggccgcccaagcaaacaataccagaaccaattgatgcccccactagtggacgagcatttacaggtaatcattgggggtttgtatcttgctagagactcaggcaaagctagagaaaattatacctaagccttgcagtatgaacaaaatgaagcaatcttggttgtggaagaaaggaaacctaaactaccacgtgtaagggagccaacaataatattcactaaagtagatgccaaccacatcatcttcccacacaacgacctcctggccttggaagtgcaaattgcaaacaagatggtggcacgaactattatagacaatagagcttccttgaacattctgtttaaaacaacttatgagaagatgggactccaagttcaagacttaatcccttgcactcaactcgtatatggtttctttggccaaagtattgcaccccttggactaatccgcctaccgtttactgttggagaagcttcgaggagcaaaactataatggcccaattcctaattattgatgtcccttcgactttcaatgtcatgttaggctgaccgtctttatatgacctaaaagttgttacatcaatttttcatttgtgcgtgaagttcccaacaaaaagttgagtgggatgtatcacatgaaaccaaacaattacaaaggaatgcgataaccttgctctaactaagatcaagaaggaaaataccccaggccagagttcagacactaactttaaaaggtagaaagtaaagaagttttaccctcggcctgcccagaagtatcattctagggagggctctacagaataccatcattgtaacaccctaactaatttaggcgtattacgtgattt

SEQ ID NO: 245104 - DNA, 1688 bp, Cannabis indica
acctccttttgagtaagaacttcgaaaagctcagtctcggcctctttgtacttagtaatggcatcagggtcacggccattcttccatcgtctcacctcctttttccagtatttaatacgagaagcaaagtttctgttagaccatctttgttatttgaactaaattttgttaaaaatatgagttaataatatatttgatcaaaattttattataataattagaataaataaaaaaattatttagagagattagtaacccaataattaagcttttaatcttttttaagcaactgacaatctgacatgaaataacatgtctcagaatggattgttcattaaaatagacatctactatacgtctcaaattggagaagaccacatataaacataatattggacctatttcataaaattaattaaataaaaaaaaactactaaattacaaatttgatgggcaaataagagtcgaagaagttatcaaatctcagtcctgtctacaactctagttttgaaccttgtcttctaatactcttataaatttaactcattttcttatatacttcttaaattataaacttaacttaattaaaaatatttagtatatacttacataccttttataccacattatattttactatataattgtcattaataaagatataattaattctgttatttattattatttattagcttataaattaattataattatatattctataactaaacctaaaaaaaacttatttaatggaacattaaagacttgtgaagtgatgatcttaataatttttatgatatagaaaattatatgcaattatttaaactaatatctttgaacccctatccaattttactgttggaggtgttatgattattgagatatttttaaaatttatatgaaaaattagttatctataatatttattataataatgtaaaaagaatttatgttatgaaaagcttgtaaagacatttctatttataaataagagtgtatttttatatatggttaaatgttttattattaatgttatatattatatatataatttaaataaaaatatcagaattttttttattcatatatgaggttgtaacttgtattacgattacttagccacggataaaacagtcagcaatatattaacattttagaatctttaatcaacaatcactagtgtggttcactgattcaaattactaatgtaacatggcatctaagtaaagttgttgtatataatatagattatatattacatgaaccgatatgtaattaagttgtctttatcaaatatatcgtttattataaaaacctgatttatatcataatgataatcaatggtagatcgacctgaattttgagtattcatgaacatgttaatagtttttttgattcactcgttaaaatttcttagaaaagataagtcttagtacttctggtttttaataatctaataatatgggtggctggaaacatgatctacaattttggaattttaactttcctaactgatcgaatgttagtttcctttaagtgttaattctaaaactgatcaaagttgtgtacacacttagatattggatctaaaatattatattttcactagtgacactactacaaaattgggctttagaggcggtttttaaggggttttggtcgtcggttttggcgaaattcgctac

SEQ ID NO: 245105 - DNA, 2742 bp, Cannabis indica
atcattgactgatcgcgttttacctcttctgatcacgtgttaaataaatctttatttaattaaataattttttcttcaaaaaataaagtgacacctcacccgccccggctcggacggacggcggcggcgcgcgcgcgtgtgtgagtcctcacccatgcgcgcaaaactgggtaccccttggggcccaaacccatatctcaaacttgcactagatatacacttaaaataatgtagtgtttctattccatgtgggactcctactcacacacttcacttttctatttttacatattttatacaaagttccaacaaaatatataatgatttatatttaatataaaatattgtaattattggatgatcttgtttaaatgaatatataccctctcaaagaaaaaaaaattgttctcaaaacactgaaaaagtgaaaaagcacttattgaatttaactactatatataaatatatattattaatttactttaatatatatatttccaccattacactatcatattttgtaagtactctatcacctctagatccacaattaaggtataaaaaaacatgggaacaaaaccaataatatgtagtcctatatatatataactataccttgaatgtaaaactccacaagtcatacaaagtacttatcatggatgaaatacaagaaggagatcatcatgatgaactaacatggagactaaatgagaaagaagaagaagagcgagcaagaatcgatatctataaatatgtattcgggttcgtagaaatggctgtagtgaaatgtgccattgagctgggaatagctgacaccatcgaaagccatggacgccccatctctctcttggacttatcatcagccttaagctgcaatccccataaccttcaccgcatcatgagatttttggtcaaccgaagaatattcaaagagatcaaaaacgacaccgttaatgacaaaggatgtctatacgtacaaacatccctctcaagactcctaatcaagtcaggagaaagaagcatggcttcgtttgtgttgatggagagcagcaaccctatgttggcgccatggcacggccttagcgctcgtgtcaaggcggaagcaactgatgctttgacaccatttgaggcggcgaatggcgtggatgtatggagctacgcggcagccaatcctgaccacagccagctcatcaatgaagccatggcctgcaatgctagggtcactgtagctgcaatactaaacggttgtttggacgtgtttgatggtgtcggtagcatagttgatgttggcggtgggaatggaaccactctgcagctgttggttaagggttgtccttggattaatcaaggaattaactttgatcttccccatgttgtgtctgttgcgctaaaatctgacggtgttgtccatgttggtggtgacatgtttgattctgttcctaaagccgatgctgcttttcttatggtacgtatacgtgttactgtaagaatcagacacacatatatataaggttaattatgatttttacttgaattttttttagtccttaaaaatttaactattgagattgttagatttaaagacttttgtctaatttcattcaattttactatttcagtgattatttatgtactaaaccatgctcctcagactttgatatctaccaaatcatgcccctcaaacttttgacatgtactaaatcatgccctttgaacttttgttagagtttttttataaaattggaaaaaattccttaaattcaacaatctcaatagttcagtggcattttaacgatcttaaaagttcagaaggcgtgatttagtacatatcaaagtttaggagttaaaaatcctaattagcatatatataaataattattaacatatatttttatgcagtgggttcttcatgattgcggagaccaagagtgtattcaaatactaaagaagtgtaaggaagctattccggagaaagggaaggtgataattgttgaatctgtgattgaaaacaataaattagaggaaaatgttatgaaaaaagagctggagctaaaagatgtgggtttgtttcttgatatgacaatgatggctcatacgaacaaagggaaagagaggagcttggatgaatgggtttacgttcttcaccaagcaggtttcacacgatacaacgttagatctattgatggtgctgtgtcttctgttattgaggcttttccagcctaacatgattcccttcttttaataataaattaagaataagagtattatggacattgttccaatggaataaatgtaaaagtattagtattgagtcataaataagaacatgagttatttactcaccatcaattgattttgagagggaaattcatgattctcaataaaattggtgagtaaaaaaacatggaatacatgtaaaagtattatcaccaattggtaattgtattatcacctaaaagtataatattttattctatcttttcttttatattgttttggctttttttttttttaaatattttaatagtaaacacctctaaaaatttattaaaataatattatattattatttattaggctaattagcaatttttccaccgaactttgacatgcactaaatcatgtactctgaacttttttggcgattaaaaattccccctgaactattaagattgttagatttaaggactttttctaattttagtaaaaaaattctaacatggatgaaaattcaggggacat

SEQ ID NO: 245106 - DNA, 586 bp, Cannabis indica
tatgtatatatacaagtacgtcatgtattattatcaattatatataatctaataaataataatataagtacctttgtaagagtgtttgtgggtgagttttgaaatcgagtggggtccacttagtgttgagactgaggaggaagtcgaaggtgaaccaggactcggataagaaggcgaagagccaagggtagccatgttcagagaggtgaagaagacgatatagaaggatggagatgaggaggagtagggttgtgagattaatagctttgtttagagtgtttttgactgggattttctcgcacagaggaggaagtagtagtagttcatgatggtcatgatcaccatgaaactcgacttctgagttgcttcttcgagtagtggccattagttcttttttctttggaggagaagatgaccagaggtactagtatagaggggaagccttatatataaatatatataaagcacgcaaattttgttttattttaggtattatataatttatttttaaataatacaagaaataatcatatataatttaacttttttattataagaataaaccttaaaattaacaatttttttt

SEQ ID NO: 245107 - DNA, 1742 bp, Cannabis indica
tattaaataatacaacttacaattgcattgaaatttttgatcgtaataattaataaaatacattgctttatccagacatagtgtaatacaatatgacccttatacgacctaccaaaagagtcctaaaatgtttaacaaaaaaaggaaacaaactaaaaataattattataatttgtggaggagtaattaaattttagaatccaaccatgtataattataataagatttattaatatattaattctaagatagttagatttcaatcttaactatttttccaaaatatattttttgttcactttaaatttataacttctaagtattaaatgtaaaacaatatactgtaaatacagatgatcaaagaatattatttctcagacaattaaaaccaagcttttaatttttaactataaaaaatacatgatatttaagatgaaagacattaattaaagaagggaaaatcatttatagagaatcaatgcaaaaataaatacttaaaataaaaataccaatttcatcatctaatttaattgtaagagaacaactgtaagcgtgtcagactttttctctcgtttttttcgtctctttttcctcatggaatcctaactacctaagcttctatttatatggtggtaaaaagacgaatgtacaaataaacttatgacaaattgcataggataaatttgcaattaaaaataatttaatttggagtgaacacatgactttctcaaaatggcatttttggtgagttagtaccacgtgttaaatgttgatggggctagtggtgtgtcatgggacatatggcgcaagctgaaaagggaagagagagtggtttcttcaaccttggaccacacgaagcaaaaagctctaatcgcgccccaggagagtgacctacgcacaaggcccaagaggggttgtgtagcacatatgctcgtgggagacaacgcagtagataactgctaggcatagtacccccaagtgagttacgaagtttggacatctccaacttcctggtcacttatctaaaacatagcttgtggcctttaaaaaataaaaatatatgatgtgaaattaaatgtaagttgcttctattctaattttattatacatgcaggttgtacataatgaagttaattacatcaatattcacacaaagcttaaggcattatattaaggtttggtcacctctacctattggtagtactgacgtaagtgttctgcattccaagcatgaaggacccttgatccatccattctcttagttgaaatgttctctagcccactttctcaatattttttaggggccttcaaattcgggccaagtacccccactctcagttcttgcaaagtttggaatactctccttaagatgagatctctaacctcaaatgtttgactttttactttatagttaaagtgttgatcaatcttaccttgatacttcttgaagcaaggaatgattttgggaaggatcataggtatctcattggtgagaggggattgtggcctctacagggattactacttcacacccgtaagccattgcgtatggtgtgtgtcctgttgaagttcattctgtggttcaataggcccaaaggactcgtagaagttcctctggccaatgagctttacaagattggagctttatcttcaacatgattttcaagatcttgttaacggcctccacctgcccattggcctgtggtcgggctacaactaaaaagcttttcacgattccatgt

SEQ ID NO: 245108 - DNA, 1172 bp, Cannabis indica
ttatcaaaagatggcaaggtatacatctccagagttgttttgaggattgaaaccatatttccctttgctcacactatccaacaggtcacttccaacatacatagctccacaatatttccattagctacttctactactctattaacacttatcttaaccaatactgctgtcactatgctcatcaatgctacgacttctatttccaatcaagctacaacatctgtgcaaaacataatagctaaaccttaaatgcctcaggctgttgtatcccctctcaccaatgttgcagtgtccatgcctaatacagaagcactatcttccattgccctaaacatagttcttccctccaccaccatccctgttaacaacacaattaatcctccttcccccatctgacccaccattaccactacagctcttaacaagaaaccaaataaccctacttacacccataccaccgccaacaatcaccttatgtgttcaagatcaaaagctggcatcagaaaaccaaaagttcttatgtcttccttgcatcctctcactgtcaaagcagccatgttagatccaaaatggcttgctgctatgcaagatgaaattacagccctaaaaaaataaaaattgaattcttgtttacttgccttctgaaagaacaccaattgattgtaaatgggtctacagggtgaaagaaaacacatatggttctgtttccatattcaaagcaaggttggtagctaaggggtatcattaacagactggatttgattttaatgaaacattcagtcttgttatcaagcctgtaactattagatttgtctcaccattgctctcacaaatggatggactgtgagataattgaatgttaacaatgctttcctaaatggggacttgcatgaagaaatttacatattttgttaatcctgagcacccatacaaagtttacaaattgaaaaaagtcattaatggccctaaacaagcactaatggcatggtttgaaaaactcttcgctgtctcaatacatcttgggttttcctctgccaaactaactcctctctgttcattagagtcaactctcatggctgcatctatgtactcatttacgtcaatgacatactaatcacaggcagcaacaaaaaggtttcttctctcagcaactcttttgctctcaaaagatc

SEQ ID NO: 245109 - DNA, 1801 bp, Cannabis indica
ttgttctttgctagaatttgaggtagttcttactattttaaatctaatttctcttgctgaattaaagttgagagtcatgtctttgggctttgaatgcatgagggttgaaaagggagctaatggtgattactttgtaacttgaacttgtttaaattatgggttatgcacctatgtttgctagcaagttttagggttatttcccaagtttaagaatcggattattgactctatttattgttgtttggatgatggtgaagcatgttgtgatattcaagttgttgaatttgtatagtgtgaagatttgctcatgtgttgagcttatgttggagtatgtttaaatttgactttatgatgcatgtatgctgtgatttagagcttaaaatgtgtgtgatagctatctgttatgttggttattattgtggaattaattatggtgtgtgagcatgcttttgactcagtttgggtgtgtttttgagcatgttttcgagcaggaaaattggggttttatgggtttgaaacctagaagtcgtggcccagatctctgggcgccgcgtcccgcctctattgaaatccttgattttaaacataggtgtcgcggccccatgtagggagtgtcgcgacccgcccttcatttttttttgggcagattcaaacgcgttatttgaatcctcgttactttgtgatctagacaccgtttcgggagctttatatatcgttggaaagcccgttcctagctctatgtgattatctgtattttgaatgccaattttaaattatgtgaaagtggatttagggattaaccatatacttgtgaatcctggaaattgtgactaggattattggcacttagtcaggagcacccagggatttggaatctctaagtttgcgggacatcaggtaagacagtagttagcacgtagagttatgcacgatgatgcttatattaaatatcatatatgtgagtaactagaaccaagattagggttattaccctagagagagcagtttattggcctagggttattaccctagtgaattgttaatgagtattgttatgccatgatttatgtatgtatattgagattatgggttatgcctttaaggcgtaatcaggttggactcggtaactagaactaagatgaaccattctaaggccttattgtatgttgacgtgtgagcgtaacacgtgggtctatgccacaaaaacataaataggtgtgtgagcttaacacgcgggtctatattaaataaacaattataaatggcattatcgtatatgtgatatgatagttatgattattgatattatactgtcatgttgggcttggctcacgggtgccctactatgcaggaaagggtaaatctgtctctaatcagccctgaatgcgagggcttggcggtgcttgtacatgttcgggccacactagaccaagagggttggggtctactagcgatgtacttttgtaacttcgattttactacttaggtcggctagtgaaaaggcttgtaatatttagtaaaagatttttgggaccccaaaatatgtcacttttgattgtaaagtttaaagttattacaagttgtattttcattctgttttagattaaagtttaatttttctgcacttatcttcttagtaatcctagtttaggggattagggtttcataattagttgttgtgacgtgcctaattgttagggcgctacagttgggtatcagagggccaaggtttttaaacttcctttagaccggttgaacatgtacaatcatcgtcagaggcaagctcgactcgtggtgcagt

SEQ ID NO: 245110 - DNA, 2009 bp, Cannabis indica
tttatagttaatttataattatcgtgaggttgatttcacgatattttttagttatattttgttttttactttttgctgaataaagtgtatttttgtaacttttaaactttaaaagagtatttttataattaaaattttaagccataaaattataaataaaaaaaaggtatttttgaaaacttcctaatttacataacatcgatggagtgatcagtgcctagcatgtggaacatcgttattatttcaacttaattgctaattatttattatatgaggtctggaaccaacacgttcatgtggctctaaatgttcttaaaaaaagtaatcactaaattaggacaccaacaccaagtaaagtaaactactatataattgttcattcaaattaaaacaactcccctttcaaaaaaaaaaaaaaaaaaccaattatctatacagcttcaatttatgagtcttcaaccatatacacatacatcatcttcgatcttcatcacatggccgcgtgtaatgtaataaaacgaatcaatatctttcatttaatttttgatgaatcaggtaagtaggtaagtgtattaatcactaaaagatcgtagttaaaacctatctaatgccaatgaggtctgtgttcttctaaaattgataatttgtttttttataaatagattatgaattgtatattttttagatgaagatcatacgctacaaaatagcacaaaacataaactaccacatgagcttatcacactgcatagagagccgaaagggaaacttattccctctcgaactgtttcgcccaaagttactaaatttgaaacaacactattcaccaaacattttatggccccttttggtaaatttttggcatatgatgttttaacttcttaataatatcttttttgttaagttagaaattctcaattaataaactagcttctatagagaatgcctaagaacactcacaatatttaagttattgttgtccttggagtaatttagacaaccaaaactaccaatctcttagattagagagtactattataaaaaaaataatttttagtcacaactttttaatcacaagaaaaatagtttgtaattaaatgtattttttgtcacaatttatgataaataatattttagtcacaatagttaatttatgacaatctttaaatttttaaattttataacttgttaactaattgttgtaattaaaaatatatttagttgaattaaaaatacatttagttgaattaaaaaaaaaaaattgtaactaaaaagtgtgactaattactatttagttactaataatttttttgtgttgcgacaagcgactgccttttaccacaactgtttattctttgcactgtttataatggctaatgtttaccagtcctcaccaccggagttttctccgccgtttcttgttggtatgtaatctcctctctagctttctctaacccacttggctaatagattagggtcacactataacctccagttttctctggtatggattcatgtttggaagagaatcaactcgaaaagagctcagtgatgtgattgaaagtcttcgctatggagacccagacccaagtcctcctccgccatattcttgattctatcgtaaaaacgaacgaatgaactctctcgcttgatcttacccctttcattgattcagaattggactagttttttctgttcagtgagtttgaattttagtttataaaatttgtatatttagggattttgaatgagttccaagtttgagtaaaagagaggtattggaattgaaacacttcatctcaccttgtttcatacatgaaatctcttcaatataattgtgttttggtctcttttattttgaattcaattacaattattttcgctcacactcacactcactcacaggtacagatttgattttatttgctttgatgttgtaattgtatttcaaaatataattaacctaactatctgtatttatgagggatttgttattctgaaattatttt

SEQ ID NO: 245111 - DNA, 748 bp, Cannabis indica
aataaataaataaataaaagggtatgaaaatctcaaattaagactagaacttgagcagatttgtgtgggcttctaaaatctagagtgaaaaatgcttttttttccctatcaatttgtaaatctcatttttagcttttatgcattttttatgccattatttgtgtatatgtgtgtttgtttttccttttagtatttgtatgatttcttttctatcagattgtatattactttgtttgggtaattgggtcaatatgctaacaggttattaccatgtcaatttttaaagggatttttaaaaaatatacttaaaatataaaataattacaaaaataacttaacaaatttcaattacaataatatcttgtcacgtcattaaaaaaaataccttaattctaaactaataaatcttaaatgaaactaattctaaaattctattttttttattttcctacattttaaaagtaactttttgattacttataatgtgtataagaaacccataagttacttttttatgaaaaatatcacttttatattatataatttgaaatacattttaaattttgagtatctttaaaatttacacatatacactttaataattaattaattacttaaattatattaatagatttgagtaacttcaagtttattttcaaaaataatgagttatcatttaataagctaccattttagtactttgtattgaaatttcctattttaatatttccaattttattatttaatt

SEQ ID NO: 245112 - DNA, 835 bp, Cannabis indica
tatatataatatattcatttataatatgaattcaaaaatataatcacatataatattaattgacaaaaaatatattcatatttcatctagtctttgcggtcaattatagccctctagaaagattagagtatttggcatgtaaagtattattaatttttctggtcctcaaaaaaaaaaatgaaacttgaaatatgctgacaaagttactttttgtttcaccattttatatttactttttatgtaatttgtgtcttacttattactcttcgtatgtgtttaaaaatcgtcctcttccctctagcacattacatttgcagatgatgaatccactaggaactagaatcaaagcttatccaaaacactggttccatttattaggttcaaagaatccaacaatatcatctaagttcatcaacctattatgactgtcaaaatgtctattgtaattcctagagcacaccaaaaagtcaaacctacacacaaaaaaaaaaaatcaaacacttatatcaaacacttattattattattattataattagtagtagtaaaagtttaatttattgttttactatataaatatttaaaagaataaaatattataagaaaaaaaattatcataatttataatataataaataatatttataaatatattaataagtataaaattatttaaataaattagataacaaatgtcatacttattttagtaattatatatttaacagctatttaattatttagcttaccaaacacttatatacaactttttcaactcacagctgttttaaaattaatatttaccaaacactcagtagttttttctcacagcaca

SEQ ID NO: 245113 - DNA, 1448 bp, Cannabis indica
ctctctctcctccatggcgaggaagagaaaccaggtcgcaggcggggctttaaggtagcgaagggatctccggagaatctggatctggagaaagagagtaacgagggctcgctcgatgatggacaaccgctagttcttgctccagagcaactcgcgaaggagaatagggacgaagtggaatctctgatttcagtgagaaagagttgggccgacgaagtggaaactctgcaatcggcggcttatacccattggcaacagttctcaggaggtaaggtgttaaattctgatgttaaattgacttatattgaaccaatgattaaagagggtagaaagatagctcatatagatatggaggaggtgaaattggaagaagagagtgtgaaatcagctgtaatttgtatggttttgggtgctaatgtccctgcagtggtgtttgaaggatttattcgtagaattttggggcacttgggtatagttcagattgttagaatggctaaggggcttacaatggttaagttcaaggatgaagcaacacgagacgaggttatcgaaaatggaatgattcaattcgacagaaaaccggtcattgttagaccatggacagcggacttgaatgttgttaggattgtgaaatcggttcctctttggattaggttacctaatcttggtcttcaatattggggaaaaaacattgagtgctctcattagcactgtagggaagccgataatggtagataaacacaccaaggaaagaacaagagttcaatttgcttgagtccttgttgaaatggacataacgaagaacccaaaacgctcattctagtttgttaatgaatatgggcaactcttagaacaaggaatagaatatgaatggcttccgattaagtgtaaacattgtggtggttttggccatataatggctgaatgtagaaaggttgagaagcctaaagaggaggaaaaaaagcaagaaagtaaggcagaaaaggagggaatgatggtggtgctcgtgctgtaattgagcagcctactggtgagattgctgctgctagtaaggatgaggctgaggctactgcccctgagatagaggcagctgctatggcagtaacaaaagaaaaaacagtcattggacaatggaaaaaaactgttgtcaaaaacagttagtggggattggatttctccaaagaactgtgtgtctaagggctcgtggtttgacaaaggagagatagtgacaaggggtgagaaagttcttaggaattcctatgcgatattaacaaggcgataacatgaagaagtagagggagagaatgacttcagcttgtgttgtcaatggactttttgctaatattagttgttggaatgttaagggattagaataaaaaggagaagctaagaaaaagttgttgaagtttggagtagttaataaagttggcattggagcccttgttgag

SEQ ID NO: 245114 - DNA, 527 bp, Cannabis indica
aataagttgcattaaaaaatataaagagaatactacttttattagtaaattatttagtaattttttatattaactcattatatattcttaattaaattagaataaaaatgcttaaaaaaaataacatatatgtatcttaaattataagataatatactagaacttaaaattattgaaataattattttaagagtaactaataaaaataagtaaccaaaaattagtttatgaatttttgttaaattaaaagtttgattacttatctataaaagaaattaaaatgttgcttttaatttcagttatcttttttagtgatgatggaaaaaaaatatatataattatcttgaaaaaaaatattataatgataccattttcaacccaacataattaatagtgtaatctgattttatttaagaaaataatatatatatcgagagtggaagttaataaaaaaattataaaaatataaattttttgaaaatgggtgattctacaatggacccccttaaaagggatgcactgataca

SEQ ID NO: 245115 - DNA, 644 bp, Cannabis indica
tacacataacaaaaggcgcattcaaaaacgacattgcataacattgtcgtaccaaaacaaaaggatcaagtcaaggcactactattacctctcttgcacagcttcttggatggtggtggcaatggtgtgaaaggagccatttcctctgaattgacttgaccaaatacagaaccaacaaacttaacatcttcactcaacatctccagattctctcttactaacaagtactcaacagagtcttctttgaactcatacataaatcccatgtgtataattctgctgagactatctactacagttgctcttgcttctggcagcattccttccgaaatttcttgagcaaaacaggacgcaaactctgcgctactttttcttttttcgtaccctgatttgtcaatgatcagctgctttgattttttgtcccagaacaccattttctttgcttcagctttcactgtttcgttcgggtatggggtcaggatgtaggtgattttgatgggctgctcggtctggtatagggtgaggttaagaagggcagtggcggtttgttgtctcttctttactggcatattaagcagtggaccagcaagaaaagccaatatcattttgatgagacctttctcgatcaaaccattcttcggtat

SEQ ID NO: 245116 - DNA, 1322 bp, Cannabis indica
ttgtaatggtttaccccaagcctcaacacttccaagcaacccctctcataactcatgttgcaaggtgaaatattcccacttttgaagcccaaacccttcacatatgtattaaaatcccaattcctcatatttgtcataatcaaaataaaactaaaaattcttccccacttagtaatagtgaaacaactcaaaaacgggagaatgtcgattataacttccacaaatattcctagtcactatatcagatcaaacacaaagtacaaaacatctcaacaaacaccagatcagaccagagaatacccacaagtaccgagaaaacccaactaaagccacaaacaaccttgggcccgaactatacccacactcattagtgtagagacacgactcatatcaacaacacttcagaccaagtagcagacccccaactaattacacctgaaaagaataaaaaaaaaaaacagagcacatataaacaaggaagcaacaataaataagaaaaccatttgaggttagctcaagtaactatagaagagtgcgtgattgttgaggttctacattgtgtaatatataaacacttcaataaacaataaataaaaaaacatataatgtgggcactgatggataataaatgcatatgaatatgcccataatgcattattatatttttcttgaaaagatagtggtaaattagtttctttttaatcacataatttttttacatgcaagttatataagtattttcattaaccaaataaaaaagaaaatgaaatgttactttaatttaaatcataataaatacaccccattattaaagaaaataaaaacttaaataatttttaaaaattactcgtaattattttttttttaaatttttcctcatattttatgttaatttcaatacttattttgatttcattttcataattttttaaaacttgtgtatatatttttttaagaaaatttcatataattttttattttaatttttttgtcataatatttagaatataatttatttttatttaatagatatattttttaagaatatgaattggaagaaaaaaatttaaaaaatttagtataattaaagatataaattttatataaaataaaaattattaaaataggatgtctttaaaaatttttagggtgtaaataaaattcctcatttttttctttttgtagaatttactaataagtacataattaatattataagtaattaagtagttgttttagttttggccacaatctctaaatgattacattaaggtagcatttggttggaggtaataaaatggaatggaatggaaagaaaacaa

SEQ ID NO: 245117 - DNA, 1268 bp, Cannabis indica
atctctcagaatgaccaataatgtcacatataaaacaaaatgtgggaatgaattcatatttgaaattagtccacagccaatcaccatctggtttcttcagcttcaattttctttttagtggtttctcaacattgatactaactctgacacgcaaatagttcctccatatgccattaaagtttctaggatccgacttgtcataagtcccaatataattaacaacattttagactatagaatcagacataaacccaagtttgagactatgcaattgcacccatatgtctaaacggcaaagtttcactaacatggggtcttccccttcttcaatcgttcaaagaccaattgaaacttgttaaatgtcgagagacttccttctattactctttgtatattagcttcatggtagaattgaaagagatacaaatttgtttggagttctttcacaaacataccctttccaggttgccataaggatgccatcgtgtgttgcatagacagaaaatcaatgagcctacttgttaagaattttcctactagacatcatctgacatcaattggctgccccacatcctctaccaaatcgcataacaggactccttcttcttcttcctctagttgaattttcaaataactagcttccaaatctgttggcacagtgctgctagaagccatgacaagacaaaacacagattctcactctcacaccaaactaacaccaagatcaggaaagcactcacactcatgctcacaacatactcatgtcaaaggacaagacaagttcatgcctcttttaatatgtaatgtttggagtttgagattattatgagagcagagcaatttttgtgaggctttttttttattttaacaaaaacgtagtaataccattaaatcaaattaactgtttataagagtacatattttttttttcaatttctgttctctcaattttttagattcacttctatttttaaagatttaattatatatttagtctattcttttcttttaattagtactatttaaacccatgatataattttaaaatttattacattaatttataactgtcaaagagtacaaatatttttttttttttttgtattatcaatatataaatatataaaggaatgtcaaagagaggtgatgtggcattttatgtgaatttttttttgcttttctttttttttctcattttttcacttttcttcacattgtttatgcttttggtaatatgagagagtcattttaaaaaagtcccacatggt

SEQ ID NO: 245118 - DNA, 928 bp, Cannabis indica
aatcattgctgtctaattagtcatgactagttatttaagcaaactagatggtaaaagtaaagtggtataattctattattgatgatattttttacaatcttatattattattattattgattttttgttttgcatgtatagggctgcagagtttatactatacaagcttaaagaaatgggtaagataagtccagaagatatatcactaatcatggttgaatttaatgatcttgatattgatcaaaatggaactttgacacattctgatataactttggctcagttatctcctccacacccttgtattccaaaataatatcattaattagggttttttttcacaatgtaacattagaaagagaaagaagaactagtgatgatttatgagtggttagtagttattcaaatattaaattaaaatatttggaataattcaatatatgatatcttatacttgtactaagtagtaatgatgtttttttttaatattttttgaaagtttattatgtacataaatattattatttattaagtcatctaaagtcatcatatcttatcttctcttaagtatgttaatggatattgccttaaataacaacatattaagtggggtcatttgtggggtttacttttttatatttgtttttctcataagatgctttttatgatttttttttgtttttatttttaaataattctaatgttaaatttcttcttcttttttgttttgttttaaagagaagagttgttcattaatttaaataagcaaaattaggtctagattggctgaaagagtaagaaacactctttatgatatttctcatcaaattagcataaaattgttggattaaaaatcctatgtgggcacatatgtataatgtatatgctattataaagtgtgatacaaaattaagtgaccaattatgtt

SEQ ID NO: 245119 - DNA, 1195 bp, Cannabis indica
gttatatctacatactttaaataaaatataaatatgagtgaaattattaattttattaaatattttacataaatatattttaagagagagaacatattcaacatgtcttgaatcaacatttacatgataaattataataagaatatatatacatatatttatggaaatgatgatggataataatcattttgaagtttatataggtgtaggtggggggtcatgatctcgacaatgatcttcttctatacaacctctttggtaagtgttatcactatgtcgatttttcatacaattttgtggatgtttgaagctacatcctgcaatttcatctcttgtaattgttccatacccaataattcttccatcaatcaactcaacattactacatccaattaagttgattatacaaatagcaacaatcactccttttgacaaatacatattctccattaattttaatttatttgaagtaatattgtatggtatgaattaatgtatgtatatgtttgagtgtgtgtatatatatacatgcttttatgacttgagtaatactaatattagggtttgcttaaactgaaataattaaggccacataatgtagcctaatttgctagctagaaaaattaaccatatattgttatatgttacaaaaataaatggaatatttttgttgttagttagttagtttatttgtttctttcttattgtctacattaaacttttaatattttaaagggtaaataccattttggaccctgtgttttgcaaaagttacagattggatcctgtgttttgttaaatgacaaaatggaccctgtattttctaaaatagtaaaataggacctgagctatttttaacaacttttttttaattactaaccaacttaaagaaaatagcttaatacgaacagatataaaaaatgtaaacagttttgtcatataggacttttagatcggattataattaaatttattttgacaaaaattaattcagggtcctatttgtactattttagaaaatgcagggtccattttgtcatttaacaaaacacagagtccagttggtaacttttgtaaaacagagggtccaaaatggtatttacccgacaaattcactcataaaaaaaaaataagaattaacatatgacaaattgaccatatcaatcttttgtagggactaatctctatcataagt

SEQ ID NO: 245120 - DNA, 2129 bp, Cannabis indica
cttcttcttcttcttctatttttgaaattattcttcttatttactgaataattcgaagctcatagtgaattgagagtatgcccactcatgtcaaagtaatacctagcatagtaaggaagactatgtctaaccaaactgaaggagagaagatccagattcagatattgataatgctctactatagaaaggaattaagggttagagatctgaatagaatgagtcattattattctgctaccatcaatataaggatttcttaatcgcttatgtgtttatttcatcgaattaagaaattcatatttacggtattcaattttagattataatcaacataatattagtaaatctagatcctgataaaacaagttccaacaatatcatcgtatcacattccagcggatctccagatatgtgtacattaaatcaaaacaataaattacaagtttataatatacctcttgaagcctatcatggtatcctcaaaacttctcgtatgctgtatcagatgatgaagaattttcaatttgaactcacaatagtgtcttccttttcaatccaccacacaaaaagaatagtgtgggatattaggataaagtatataaagttattcttgtcgagttttcaacacatgcatgagcaagaacaattgaaagaaaattctttctttctttttctctccctatttcgaaaatagcaacataaaagagtgaatctaatttctcaaatcaggctaaatagtagttaaatccctttaattaaatcatatttaattgtttgaataaataaatatctataactgaattcacttactgatatgtatgagagagggaatctctcaactacttgagagaatattgacaaccttaaaatatctataaccacttttcaaattagatatttatctaattgaattaattaaataattaattaatccaaaaagataaacttcatagggacacgacattagcttacgcgcctaccattgtttctaagacaaggttagtgtcttttattctgataacttttgtccgaataaatcttgtctcgacaaattttgtcctaacaatttttgtcttttctctatttaattaatttaaaaaatttatttattacaaaaataaataattactattttaccaattcaaaatagatttttgtgaacatatttatacaactctttatccctaccttgacagtattttaaggtagtaatttagggaccatagacctataattccaagctccattaaactagattatttactaagtctcatcaactaaataatctcttatttattaattccatgattactccactataaatatggaatttcactcttagtaattatagaattgtatttactgagtttaactatagtgtctattgatataatcaattccagtgattagccctctatgtgttggttcgtaatcagcttttgtcaaattactatgttacctttttaattacttctttatcctgtagttctattaatttactagtggaagtacaattcaagatcccatctgaatttgcacgcaactttccagtaccaaaattaacacataaatggaaccaacattcgatccattaggaaagtcaagatttcataatgtagatcatgttcccagccatctatattattagattcaaaatagaagttgtaagaatcatcttctttgagacactttaatgagtgaatcaaagaaactaataacatgaataggagtttatgatcactcaggatttaggttgatctactattgatcattgttatgatatgaattaggtctttaaatagtaaatgatatgttattaaagacaacttcttcataccggtcattgtcataaataatctctattatatacaacaccttcactttgatgtcatactacatcctttattcgaactaagactacttgcaccgaagaacgggcatcagtgaaccgtactagcaaccattgattaaagatttctaaactttaatatgttgctgactattttattcatagctaagtggtattagttctctatacagctacaaaccacaacttcatatatgaataagaaattttttcgatattttatataaattatttaataataaatattagtaatttaacattc

SEQ ID NO: 245121 - DNA, 1465 bp, Cannabis indica
gtaaaataattccaacatcaacatgatcgagtagctagtagctcaaaaacacttcataaaccaagacacaaatctttgaggcagattataaccatttagaattgcttcaagaaaatcccagtttaccgtatcataagccttgctaatgtcaagcttgatggcacacctaggagatacattttttctcttgtaattctttaagaggtcttgcaatatcatcacattatgcgctaaggatctccctttaacaaacactcctttattatcattcaccaacataggaagcactttagcaagacgagagcacaatagcttggaaacacatttgtaaattgttgggcaacaggtaataggtttgaaatccacagctctagttgggttgtcgtgctttggtatgagaaaaatctaagttgaatgaagttccttgggcataaacctgttctcaaaaaactcagtgataccagagcagagttcatcaccaatttttgaccaaacaactttcaaaaaaccagactcaaacccatttgtgctaggagatttagtttccggtatactaaatagagccttctttatttctttcttggtgaagggtttgagaagtattaattgttgctccatatccagccgagtatattataaattattttgttgtgattaaaaatgaaatattttgtagtgtgttgtaagatatttttctttaataaatacttatattaaataaaatatgacataaaatacatgtactaatttgcattaagattcttaaatataacattcagccacactattttctcatttcttttagtaaattagtactttactactataggacttctaacatagtgctttccatctgaccatttcaattgtccaaacacataatctttaggctttccaacaaattttggcttgaaaagaacttcaaatttcttttcttcaccaactttgctaaattctaaaattgtgggcttaacatatacataaactccaattggggctttcacatatgccttgtaggtgcccggtgagccaacattcttaactattctagtaactgtcaccgatttcgaacttagatcagtaactgtaatcgaagggtaattaaggttggctagagtgaatgatttggaacatttaaatggtttattatagaaaagttgaagtgatgttttgttgtagccatgagcacataagaagttcaagtaatcattaacagttctgtcgtagacaagtccgggatccatagctcggttcggttgaatgtggccggagccatattcaaatggagtagcttttgtcatgttccagtccaacaatggtcctttgttgttatcttgaacttttgctgcaaatagattagtttgattagaaataaataatccttgttttaagatttgcagaatatatgaatatattaggagcatcacttttgtccaatttcaataaattttgaataattaatagt

SEQ ID NO: 245122 - DNA, 598 bp, Cannabis indica
aaaataactgtcataacatagcagtgaactaaaaacatagagaactatagtaagtgaatcttaataatccgtgtgtggaatgctagcagtggccgaaaaaccttggttagcttctcctatagcgcctgcacgttcccctgatgcattaatttcctcaacacgcgcatatggtgatcgaaccaattaaaacaagggtacaaaaatatcactatctttgattaaagtggggacaaagacacaactctttgtcaaaaaaaatttcattgaaaaatgaaaattacaaatatttagttacattatttttatgattataacatatacatctattatttttctactatatatttttttgtacaactctccaagacaaaaagaaaaaataataataataatgctttgctttctttaaggggaggcattatttttctatttcttatcttgttttttcctacttgatttataccttttcgttcatttcaaatcctatcaaaaccaaatgtgaaagtaaccctatttttatttatttattaatatcattatgactcgaactgaataatttggtatatattaataagagaaagggtaaataccattttgg

SEQ ID NO: 245123 - DNA, 1075 bp, Cannabis indica
gggtttgaagaggggtattttggggttaccacttaaagattaggatagttacaaaatttttaggagggtggtataattaaacaccacttctaacttttaagcataaaatgtcaaatttcccttttaaaaggggacaaatttctttttggcccctgagctaggtgggccctaggcacaggcctaacccgcctatgcttagggccggccatagttgtaacaataatcaatctaattcatgtattattgttgccaaagaaaaatgataattacttaattacttaattttattggataagtgtagcaataaaaaattcgagaagtattagacagtgtcatacccattttacgagtaataaatatacgggtcagttacatagcacaagtacaattaattaaggcaacaaattaataatattaacgagaaggttgggatacaatatcaattccggaatatgaagacgggacaacataaaattatcttaagggtgaccaataggaaaaacgatgtatataatatcttttcaggattaactgccacaaattaacgttacacaagaagcaagagcaaccaatcatgttctgaatgaacgcctcaaaatcaatagttcaaattgaaggtgctaagcttgtaaaagcattcaagaacattcttggtattaatattgttaacattaagagtcttaacttgcttaagcttgttcttgatggtcatctcggagggttcgtgatctaaaccaagtcggtttatgagaagtctatatttagtacatgtctcctccagtgaattcgctgagaagatgaatccttgcaatcttatttgcaataacctattatatgacttagtcaaagatatcgcggttacctcttttattataaatacagatggttatgtgtatttctcgcctgttagttagttaaacatattaacgtggacattgtttatatttcataaccattgtatgtattagatcaaaaatatctcctatcatattcctataaatagtagaacaaacactgtaaaggaggactgtgagatttcagagagagagagagagagagagagaaagagagagag

SEQ ID NO: 245124 - DNA, 558 bp, Cannabis indica
ctgctgctgcaacctctgaaggcttaacttccaaaaactcaatttctacattaaattaccacccaccataaacgtcaaattctctattaaatctttatcatatatgaaagtgtaaaagatataataatgagaagatagtcacaattgacagtgctcaaaataagttggatggatcgttggacataggtcttaagtggggctttatcattattgatcttccaaatgaagtagtccaataaggagaaaggtgtaacagcttccatcctccacttcaatatgctcaacacaagaagctccattctttgtatggttataggttcaaacccaaactttgagtcacacatctgtatatataaacaaatgatacattctgaaccttaaataaatattataaacaatagtataacaatagagttgatagaaataatatcatgggacaatgatttgtcctctctgttaatatgccatcatattattttatctcaacataattgtttgcatttgtagaatttaaacaccaaacataattaacatcattgatcttcttccatgaacaga

SEQ ID NO: 245125 - DNA, 1401 bp, Cannabis indica
aaaaaaaaaaatttaacttaaataaccattagtctaacacaatgttgtattacttaagtaaaattaacggagcgtcaaacagtggtggttaaccaaaattttttaatcatcacgcgagtttttaaaaaaattgatacgtgtcgtcatttgataagagggacagagaggagacagagagttttgagacagaagatttttattcacctcagagaaaggtcacccaaccaatccataaaatagggccccacatggcaacaagacctgtcttcaggcactaggacttaatgtctggtgaaagtaaaaaaatatgctagtgcctccgtcaaccaagagatgacatcaagaacttagatcttaaagataactattttacaattaaccacagggacaattttaatttgtggagattaaaggagcaaagagaaaggatcatggctcatggaggtgattgaagaaataacaccgacgatcggatgcggggataaaatccctcagacgatcacaccaagaagctagaagataaaattgcgaccttgaggaaagtgatgaaaataattcttagaaaaaaatcagagacaaatttaactcaaaacatgaagatccaaagcccagtgtcaagaggtttttagacacagttccaccggagatgtttcaaatgccctagatggatttgtataagggaaagatggaccccaagattcacttgtcccctccttttagctaaatctgtagaagaatggtgaagagattgccatcaaggtctatctagaattggcacgatctatagtccatgttgaaaaggcagttcgtggccgtaagagatattgatgggaggttattttcttggccaacatttagcaacaaccgaatgaaatccttaaggccaacgttcaaacaataacaaaagaaatgtcatatttgaaagttaatgacgataaaataatgggtacccttcaggcaatgatcggggccgaattcttacgatggattgaaatgcaaaggaagagagccaacaatctctctaaatttttagcaaggacccaggttttcattaactttgaggaagcttacatccaagcatttggagtagctctagcagtttttggcaacttcaatacacccagatactgagggaagcttccagctcctttgttccaggagccactgatagtgccccctggaacacagtatactacacctttggtctaaggatctgctgccccaaggtacacatctttgcaaacaactttttctgagttcggagtggcacaaataatatttagtgtttctcttggacagtggcaaagaacacttaccggtcaacaggtagaggtgtgacatggttacattgcgccgtgtctggcgatgtgtgcatttagagatgatgcaattagaaaagtc

SEQ ID NO: 245126 - DNA, 1030 bp, Cannabis indica
aattaaatatgccaaaaatggaagtaacacttagcaaactttgtagttcctcttctacttttaaggtaagggagtcgagtgatttcacctcgagttgggccggaatcttaggaaaatcctcctagggctaactttatttacatctcttcctcacactctaaagtcctcgagaggatcctcatgagagatacactaggttgctatctaagaggggcgaccatttagggtggattgtcaattgctaggattgtctggaaagagtttgatctgagattcatttgatcttaagggggagctaattgacctaattattgaccctaacttatatttatataggcttggggtgtcgttaatttagattgagaacgagttgttgcatcttgagaatacctttcctcaggagcttgcccttcccccttcacttgatctatttttcttgatgattgtgggaagaagtctgattcttccccattcctttttggattaccctaattaagactcgagcttgtcgaatacctgaaaaaaattgcaactgtaaagcccgtgcttaccatcatttccttgtcatgtctttatgacttatacttggatttcccttgtatacttatatcatccaaaaatacatccctacctccagctcttccaattgcgatggtcatttgcgtctcaagacagctttggtagagttagctgcctcaaacacagaacacgacaaccttcagacccaggcaataccgacctagagtaaatgaactttaggcttcattgaactaggcaacaccccaaattgaggaactttcctgacaattccaatcttccctagacctctttgcaagaagttcgaagatgaagcccaacaaggcgagacaacctcaatgcctctataaaacagttacagaggcgtatcaagatcatgaagaagaagagagatacaagtgaggctaacaaggtggaacgtttactatactttgtctggtttactaattctaatgtggactttagtgttcttggttccatggcactccaaatg

SEQ ID NO: 245127 - DNA, 1849 bp, Cannabis indica
tcggttcctcgcagtgtccaaggcaacgcagcaagccaccgtttcaccacaaagagcatcggcatactccaaaaaagaggtctggactcagatggtccctagcaacaaccgtcgcacacatgcaatctaaccccactctgaagtcacagttaagctttatccagtctagttggggggggggggttggccaggcgcccatctgacgtggaggcacatctggaaagaaagaggtatgataaactgcaaaagaagagcgaacattgttaataacatttaaatacatcaatcagaccattattatggaccttgtcattacgtaaccgccagatagcatccaccgtaagtgatgcatataggaagacctcatccacattgatgcctttgtttttaagatcccatataaatttaacccagtcccacatacggataccattgtcacagacagggtaaataccccacgaagaagacctccacaggtgataggccacagtacatgatagaaacaagtgatcaatagactcttcctctgtcccacagagaaggcaattcacatcctcaatagggaaccttctatttatctcagcacgcaccgggattgccttggagagaatacaccaccacagggtcttcaatctttctgaaattttgcatctccaaagtttattctaaagcgtaggagcaacatcacaatgaggggccttatctgctgcttaggcaaggtaggccgacttacaagaaaattgaccattactttccaacgtccaaattcacctatcattttcctggccaggtggcttaccacctttcagaatagccgagacggtcttattgtcaaagagattgtacaatttgctaatattccagtcaccattctcccgcaacaaatcggcaactctgataaccccgcccctatcggggccacggggacgggggcagaagtctttttatgggcaatccaagggtcatcccaaacctttgtatcttgaccattcaccaccaacttcaagcttctttttttagaatgaggtggctctaactcgtcttccaaaaccagaatcagagtctttggaagagcaactaggaaaggctttcctctcaggtatttagcttccagaatcttgcaacagagggattggttaacagttaagagatttcaaccccatttagccagaaaagcgagtttggtatgagagaaaatggatggaagagaaatggaaagaaaaaaatagggatgaggccaccaaaattcatccattcaaaagtggagaaaaaaaataaaagaaggcaaatattctgtagatttattaaattatcctcactaactattaaaataaaaattatataaataaaatagtagtaattttcatataagaaaataatttccccatcttgcttaccaaacaacataaaacaaaactatttttctttccttcaaatttgaggttttgtttacatacgtaatgtctctatagtattcatatacttctcataccaaccccagttgtctcaaaaatgtaataaaagagttgtacatttttaatcttgttataaatattaataattatgtggatgtccaaatcttttatttattaccattaattgtaatcaatattcctctttttcttagtttccctttttcttagtttcttaatatctcactcttgtatttgtataaataggggttcaccccattggaataaacaactcagaaattctcattcactttctctttctctcttcatcttcttcttctttcttctcatctactttatattattttatattattttataactacgttatcagcacgagtctctgcccaagcttcaagcatgagtctctgcccaag

SEQ ID NO: 245128 - DNA, 597 bp, Cannabis indica
gcataaatattaaaaaattcttatgactaatagaaatgatcatcttaattagagccatatatcatgtttctaattattatttttttaattaacattttctactaattaattaattgaatgttatgattattgttgtacgtgtatacatataatagcgtaaacccgaatctatgtttaaaattttacagaataatgtacacaccaacccaacactttgtcctttaagtgttggatatattgacaaaatttagtgtcctagctagctaagtcaactcttgattttccaaggaaaaaaagttttgttcttcttcaattttaaaattaatgtaaaaatttaggggcgtttgaaacttggtaattactaatggataaattgcggcataaatacctaatgttttcgattttatacacctaaataccaaatgtttatttttagtggtaaaaagacctaatgttataattcttttacaccgttactaccacttccgttattaactcataaatatagacacgtggagagctcaaatacattacatttatttattttattttaaaatttaatattcttaatataaaaattaaatattacttattttt

SEQ ID NO: 245129 - DNA, 532 bp, Cannabis indica
aaaatggacatttattaacttaattgttaaatttagggtcattttgcatcttggcccctaaaaaatatcattttgaaatataattctataaccctacatagagtttgctatatagataataaaaatcaaatatattttattatttttactagtatttttaactttatgtgaattatagttaatagtgtttgtgatagaaggaactctttaaatactaacaatttgagtaaaataaacaataaccacttttccagcctcgtattcaggatgttcaaagagaaatagctaggattcaatctttaggccctgatactagagagcataagcttcatcttaagaatctccaatctcagcttgatgctcttctttacaaagaagagatgtattggaagcagagatcccgtgtgacctggcttaaggttggggatcgaaacacaaagttttttcatagatttgcttcccataggaaaaagaataataccattcgatatctcaaggatgatgctggtaattcaactagtgatcctgaggc

SEQ ID NO: 245130 - DNA, 1590 bp, Cannabis indica
aacattacagaatttcctaagtttctaaaaaaccaaaatgagctggaatatttagatctttccgaaaaaaaaattaaaggaaaggttcccaaatggttcttcaccataggggcagagaccttacattcattaaacatgtctacaaatttcatcattcgttgggaagaagtgttgaaaatgctttcgcaaaaagtgttggaatttctggatttaagctacaacaaattttgagacccattaccaactgttctaccatttcttatagatgagttgtacatttcgaataacaacatcagagagaaattaatccattgttctgcaacattactagtctaatagttctagatttgtccaataacaacttcaatggtgagattcttccatgtttggattccattagctcccttcaatggttgaaattgtctaacaacaaatttgagggctctattccattatctcttgggaatttgactcaactttcttatttggatctctctaaaaataggctttctggaagaatccctcagctgggaagtagctcaatgttctgcactttaagcaatctcggagttcttgatgtctcaaataatcagctaactggctctattccacaatgcttgggtagtttcagccaacatcttcaagtgttgaacatgaaagagaacaattttagtggagagatgcctcagatatatggaagcaaactaattacgctagaccttagtcataatcagctagaaaggaatggttccacaatttattggggatctttagtcattgattgttctgaatctatcaagtaacaattttgaaggccacattccacaatcagttgagaatatgatacaacttgaatcattggacttgtccaacaataagctctctagaagaatccctcaagaattggggaatctcacacttcttgcttatctcaaccttagtaataatcaacttacagggatgataccacaaggcacacaggatgagtacatctcatcttcatttaatggaaatgttgagttatgtggtttgccattgtcagagtgtgaagacagtaatgatgagatgccaagtacgacacttgatcatgaatctgaattttggagtggttttggttggaaagcagtggctataggatatgcatgtagttttcttggtggagtgttgggtggatatctcttcatttccaagaaatagaaaaggtatcataataatttatgtaacatatctataacattgcttcatgttactaggacttatccttttataatgtttattttgatgaagctgatcaatatcagaattattgatttgttatgcaggagtgagtgaataaagggagcttcacataggaatgatttgatttgatttgatgatgttatatgaagtgtacccattttggacctttatcttactcttttgctatgttgcaattaatatttatctctcgtttgttaatctacctttatactctggtttgttgttcacatatctattctatataaagtgtgcctatataactaaattcttgcgtttatgagaaattcatggataacttttttttaaaataattttctattcaaaaataat

SEQ ID NO: 245131 - DNA, 2033 bp, Cannabis indica
tccgcattttgcggattggattggattggatcgtgcagattagattggatcggatactttatgaacacccctagtaaaaatatatatactaccactggtcgactaaaccaaccaatgcatatatatattcgtaaatagcattttaattagcttggtataaaaaaaaatatgagtttgtacttgagacaaagaaaatataaatttgagtaagacatgaaaatatgaagttaactattttttttaatggcactcttttacttttttcttacaaaatatataacacaaaaatataaatataatagcaggaaagtacacacaatcacatatataaaaaaatattactattatgtaatgtgttgtattataattgattaactattttttatattatttattaaattaaattatgtgagactcgatattaatttatactattaatatattatctcttgaattacataatacatcataaactgcccctcagcattttttgatataaaatcaccaattaaatctacataaatgtaaatataattctaaagataaaataattaattaagcctcgacaataacgtgaatggaatatatataatcgtcccaatgggacgtattcagtacttttgtatgatccctacaaagatatattaataaaattcttaatataaagtttagctccactatataagtaagaagatttcttctagatactcactcaaaaaaatatttatttatatatttcttctacatactgcaaccacatgtataatatgcctattttgtgacaattatgggtgatgaattttaaattggaactttctctttatgaaaagatagtataaaataaatagatataaaaaaattaattagaattaggataaaatatagaataatataaataattatagataaagacttatttatagaaaataagtaattatgaggttagcaattaattgtagaaaatttgttatatgtgtgcaatatgaatgtgttataatattaacagtgataaatatccacaacagtagtaattcggcagattgactagaaaaatcatagcagtataatttgtggtctaacagtactgttgaaaaaagttatacttaaatcagcaagattacaactcaatgacaaaaaataaaagacgataacattaataaaataacattataactctataacatagatacacataaattagagaatagtagagataaagaaaaggttacaaactcaatgcaataagcaacaagcaaatagcatatatatatattccatatatatatataaacaaaatgtgagaacaatttcaagatcacaatcacaagtgataagaagggaaattaccaaaatttgaacaatgttttacacctttgttcaaaagtttatttttctttaccacaagcacttttggatgaagaaataaaaaatagttttctggatttatcaagcttgtattgtttctagcaaaatgctccctttgatagaaactcattggtcatcaaagtgaacccaaaaacttatatttatagtgtaagtgaaacactgtcttaagattcaaatttccaacaccccatggttgttataatgtaatgaccgcatagttaaatcataagagttcgaagataattaaggattatttaattattaatttatggttatctgcttcttagtaggaaattatagattattgtcagaaataagtcttaaaaaaataatttctcaattatggaaatatatttgaattctaggtgtattatatgcattgtatatgaatttttttaattcttcatattttaggcccgataacaataaaatgcaacgatttggtcattagagttacttagatacagttgagtatcttagaattagcggggaaagataattagacatttagactgtcgagattattcagagctatagttttggtccattttacccttaagtggttatatttgtcaaataactaacgtccaagtcaaaatcctttgctgctatgaattatttcttaagcattacctgtagatccttcc

SEQ ID NO: 245132 - DNA, 1805 bp, Cannabis indica
tgagtatatttgaacttttttaaaaaaaatgaaaaaataaaaaatcagacaatacttgaaatacttacaatatgatgaaatatttcttaaaaacaacaatgaactaaatatttatatatatatatatatatgggtacattcaatcccataattgcaggtactgtcttcgcatttggacacaacaagattaatctctcgaatcgtcatctctcatgcttcgctcagcatagccttgtctacaccttggccggacatcttctcaatcttcatgtttagatgtctgaatgttacagatcctgagtagtcctttatgggctgctagggatattttcctttacccaggtgtcaaaaatatgggacacatgtcatccattcctttttccatgtcatggtgcaaacaataggataatatttgtctccaagtctgcatgcgaccttcctagtcacacgtggacttcactcagcctgcagtcttgtccggatgggtgacgcgtgtcgttgatgtcagatgatgaaccgatgtgaccctgactaagagtctcttcaatttctgtccatttaatgataattcacggttttaccttaaatcagggttcaatgcgttcgcgtgtttgacggttacactccttgtaatgagtacgttacgtatacttttgggaaaatttttgaaaaattttgaattttgaaatgattaattctcttttcagattgcatataaatagaattaaggatctctaacaatccttttagccaaatttcctctcaaatttgtcaaggaattaacaggaaagcttttgacgattccatccgagtacagcaagaaagcttcaaattagtgagtaacttcttattctttcttttacatatttgcaatgaaatgcatgcctagtttttggattttttgttatgaatctcgcctattcttgaactgttctaggttaaccatagaatacttaggttaaggacatgaaaatctcatttatattaaaccataacattttattatctgactacgcttcgaatttaaccttacaacgttcacttccactcgtccatagggttttagcgaaactcatattccaattcgaagatttaaacttcttggattgaaaattctctatatttgtgaaactttcacttttgatttctcaatcgaatatggccggtatatacaacctaattttcatttgttacttcgaccaactctcactttcttgtccctacctttgtagatgaaccctggtgtgttttggggaggcaaacatcatataaaccaggatttgctccaacttttatacgaggatcaccctcgtctccgtgctagcccatcctcgtccagtgacgatctttccaattatagctttgaatattgggaagtaagtagtgaacatacaccttccccagagcccgaggtgcaacatcatttttatcccaactagattcaaggtgaaggacacggtcgtttcatctgggaactaaggaaaggttggaggcattaccttcttactaactggatgtataaagttcatctgaacatggttgacactctacctgggggccgcccaaaaccctgttgttgtggaaaaacacgttgccaatactgttgtgaccattgctaggcacacttgtgataaattctgcccaagcgtaagatgatggcgtggactaaacagactgttaggaaatcttcattgattgacctgcacattgcttgccttgccactctagctagggaaaaacagactcgtcctgccactgatgaggaatatactgttggggacattgaagtccaagaagtggaggac

SEQ ID NO: 245133 - DNA, 1378 bp, Cannabis indica
ttttatttatgttaatcaactaaaaagtgggataaaaggtcccctttcttgtagtgctagaagaaagaagatatttgtttgtctagtaataaagatattagtgagaaaaaagttgaaagcacaatggaattgaatgatagtgtggaaacacctaagataggaatgaagtttgattcattggatgatttgtttttgtactataaatatatggaaacaagaaggatttggtgttaagaagaaaacaagtcgtaattcaacacatggaaaaatgaaatttgtttgcctttcatgttcttgagctaggaaatctcaactcaagaaacaaaattttcttattcctaattctcaaacaagaacagattgcaaagcaaaaattaatgttactttgtatgaatatgggcaatgcaaaattaattctattatgcttgagcataatcattgtctaagtcctcgtaaatacaaaattctatacatgcgatatggaaataggcagtaggggacaaaaataaagttagaattaaacaatacgtgtagggttatagtgtggacaaaaaaatttaccaaactatttgtagtgaagctggaggtcataataaagcactattcttagaaaaagactgcaatagaaattttgttgataaagctaggcatttacgtttgggggttggagatgctaaagtcattcatgattattttatgagtatgcaatctaagaatcttagcttcttttacatgatggatttagatgatgatggtagaatcaaaaatatattttgggtagattcttggagcaaagccttatttcaagagtttggtgatgtagttacttttgacacaacatatttgacaaataaatataatttgccatttgcattgtttgtaggagttaatcaccatgggcactcaatattgttggggtgtggattgttatcaaatgatgatactaatacatttatttggttgttcagaacatggtttatacgcatgaatgaatgtgcaccacttgctatagaccaagacaaagcaatgaaaaaggccatagaaaagtggagacactttatgaatgagtttgaactttcaaacaatgagtggttaagtgatttgtttaaggaaaaaggtcgatgggttctagcattgaaagatacaatttggattagtatgtcaactactcaacgtagtgaaaatattgtagatgatattgctacaaaagggaaaagatgtatccacaatttcaacttaatgtgttacccatgatttacaagaaaaaaatgtatcttaaaggtaaacaactatttaaatttctattttgaatttatgtttatataaaaatatatttacattaaaattttgaatctaggaacaacatatggaaacaatg

SEQ ID NO: 245134 - DNA, 623 bp, Cannabis indica
atttgaaatttatagtaactattcaaccaaacttataatggaagttttaataattttccaatgtgcatattgctaggtaggtagctaggtatatcatatagagctagagtttatatatattacgtacgttggaggattacaaaaatagtatgtatatataagaaatgcaagttaattaaaggagaaagtgaaggagactctaataataataaaatgcttacccatgccacccctagctagctagctatagatagatgccctctaacctagctatagctatatactcatcaagtatatcaatcaattatatacgtacagttagcatgccctcatgcaaggtacgtagtgcatataaaaattatatatatatatatatatatatgagagtagaaagtgttatcaccaaacaaattgtataagaaataatctaattaataatatataaaagtaagtatagagaatcaataatggacactccaattgttgctcttacattagtagtcctcctcttttcaaaatctgtaccagtgtttggtaccattgatattctcccaattagctataatgatgtgaatcgcttggaattttctttgaatcttgagtttttggcagctgaattcttc

SEQ ID NO: 245135 - DNA, 1115 bp, Cannabis indica
ctaggagtcagggtaacttggtcaggtctagtagcagtcagggagctcagattccactatctgttcgtggtcgaggtagagaccctagaggcagggcacgcagtcggggtgatgttaagccaccgcaggttgcccaagaagggaaaataggtttgcagtaatggaagccaaaattaacgagcaagaggaagaaataagacgcctgaggcagtagggtgctcctataatgcctgctccaaaaatggaagtggctcctaccccaactgtgtaggtaggaccggctgttgtagtgaaccggatggaaccactatatgaaaggttccgcaaagaggcacctccaatcttcttgggaggtcttgatgtgatgaaagtcgagtagtggctgacagtttttacaaggatctttaattttatgggtgtcaccgacaatgacagagtggcttgttccacattctagttgtaggaggatgccctagtttggggggacatggtgtccctggcttgcgatgttactactattacctgcaaatagttacaggagttgtttaatgaaaagtactatcacgaagcggtagaagtagaaaggaatttactcagctgacctagaaagagaatattagtgttactgaatacacaacatagtttcactaattagctaggttggcctcgggattgtgccaaccaattttagcaataaaggaaagtacttggatggcttggatccaaaaataaagcatgaccttatgattagtactgacgacaacaccacgtatgctgacatggtgggaaaggcactgcgagctgagggcatagttgaatgcactcaggtttcttgtggagcccctactcttgctaccccttatttttgaaggggttgtagtcacttgaccactgaacataaatgaaaggcaccatttgcaaccggtggttcatgtcagaataagaggttctgagggaaccagggtcgaggcaattgtcacggtgaatctaaaacttgatacacttacttggagtgtcccagttgtaagaaacatcataagagtgagtgtagagggcaaggatgtttccagtgcgggttgccaggacattatgaaagagattgcccacagcttaag

SEQ ID NO: 245136 - DNA, 1444 bp, Cannabis indica
tttctataacctttacttcactaattccttcttaattgattgacaattgataatgctttagtgaaataatcagaaattgattcaatctcttccataaataaggtttcaaaatcacctgtaagagcttgaagatggatctttttcacttgctccgctcctttacaagcttgtagcttctcccacgcttctttggtcgtcgttgcatttgagatcttctcgaacgcatcttcacccactacttgatagatgaggtagagagctttcttgtccctctttcttgaatcccttaacgcatctcgttgagcttgggaaatagaatcattgtcttgcttcttctgacctttctctacaagatcccatacatcttgagctcctagtagtgccttcatcttaatactccaatggtcatagttgctcttggtgagcattggaacttgaaagggaagcattcctccacttgccattttttcttcacaaacttggctctgataccactttgttggaaaataagaagaactttagagagaatacttgaatggaagaagctatattttatatctcaacttttgtgatttgtgacttggtacaaaatgatgggattacatctctatttataggactctatggactaatctggaagcattattagatggttagcttctacattgttctacataattcctctactaacacaagtgaaagataattctagaaaactcaagagtacccaaacaaagaagaaaactctagacactttagtaattataagaatagtctagaaactttagtagcaacaagaaaattctagaaattagctatattaaatcaagcttaatatttcaacaaggacaactttaagaaacgaggaatcttaaatcaatagcttacttcaagccgcttttggaattgggattatactctttttcaattctaatcgaactatttggtccactggttttcgtttatgaatcgtaagtgctagcatcatgccacctacaaattcccaagaattttttttcaaaaaaatatttagaaataaaaattaattatctatctttataattttgagctaacaggtactgacataaaatagcagccaaattaaaaacaagcatcaatgttaacagatcatacccaaaatgagcgccaccttcaatagttgctgcccactttctaggatcaacatatccaacagaaatcagaagagcaggtacaacaaaaagagctaagcgatgaacaaaagttttcgtatttctggacacttaaaccaacacgaaacaacccgtacaatataatacttgacttgcacttttaaaaaccctccttagtagtaagctaagtctcataagtcttttaagtgtgcttccaacgaacacagcacctgtgactacactaatatgaccaattgaaataaaccagttaagaaaaaggtgctagtccattt

SEQ ID NO: 245137 - DNA, 1784 bp, Cannabis indica
tgaagaagttgttgaagccattatggaagatgtagacattgataaggtatgataagctagacaccttccttgtttatattccaaatagtttagtgctcttatttactcaattactttccatgaacttgtaggatggaatgataagttacgatgagtttgctgcatttatgaaatatggtacaagaaaagcagaaaggcagtgtaattccgagagtggttcaacacactcagtttgaaatgttaaacaatcatgagaataggtagaagtggaagaaccatatagagtagtttacttttgttattgttaagttgcacaatgtgttgtttgtttctgaatgtttgatatgttgtttgtaaacgattcgttggtaattatgaagttgtttctaccaactaaatagtgttattatgtctaatattattaatctttaacaaaaaaaaccaattttaatttttgatctatggttgctcagttttgagctatggttttaattccaagactaaattctgttagtccataactttttatttggaggaactatatcatgaaatagaacaaacatataatttggtttgatattagtccaatccaaactttgtgatgtttaaactttaaagtggattgcaaagaaattagaaaaaaaaaatatgatttgaaagtcagaattggaaactcagaagaacataacaccagtgagtcagtgaccactaactattataccaatttgatttgataatcaaaattaaccccacttcaatgcacttgttcctcaacataattactatgtcaacaacttgaaattgctctttcattaaatctattccacaaatacaacaacaattaaaggactcaattcctctttctcccagcttttctgtcaatcctgattccatacatatcaacaacaaacagaacacatgaaattaattagggtttcatatggcaaatacacagaggttattgctggaaattgggggaatcgcaattggggtttgctgaaaaagttggagggaaagtgaagcggggcactaaaaattgaaatttagagatgtgagattgttgagcattagcggcgacctttaaggttattaggggcggaccattccgcccctaatagtcctttatttatatatacatgaaatccggttcatctgaacaccgcccccaaacccccaaaatcatctataccctaattttccattttccttcttgaatcccaacctcaccagagttagggcgcctaccacagaggtaatctgtctatctcttttgtccctttagtctttctattcattgaaattgatacactacttttttttttttttgatatttacattttttgctgagttagattttgatttgtttttttctttaataatcttataacttagttatatattttttattagatgaaatctattttagaagactaagaatactaaaattaattcagattaaaaaactaactcttcgtatatattttggatttggatataaaattagtttggaagagttcataaaacaactcgtatcatatgacatttgatgaagtaatattaataaaacatcataatttcgtaaacatttcataaaattttataattataataattttttttgttacttttcttcatcaccaaagttatacaattaagtttttgtaacaaaaatgatacacattgtatccatttttatacctatcaagtaataatgaatctgtttcgtacttattaccaaatttggtttttttagtataaaataatggctgcagatgttgcaagtt

SEQ ID NO: 245138 - DNA, 1044 bp, Cannabis indica
tatcttctttatctttttattttgttacacaatcctaaaaacaagaagtgatgataggagttgactaattcgcacactatggaatcaaatgaatcaaatttcattctattgtttagtttatttgattataaagtgtaaattattattttattttaaaatgagataaaagatcattacaaatctaataaaaaaatggttatactctattcttattttttaggggtgagcaaaaaatctaagacaccgactaaatcgagtacactgaccgtctgaacaccgaaaaaaccaacactgaaaaacccaaaaactagaaaaaactgcattcggttaaaacatggtcagttttagtatcaatggcaaaccgaccgaataaattaagaaccgaccgaacatatatattgtttagtttgtaatggggcaagtgaatcaattttgcattgtttagtttcttgtgattttgcttaaaattgttggcaggtagttggtttggctatgattctggtggatgaagggtcgtttaaggactggttttttcacatgttttcttggttgggtgaggaacaaagtgctcaggcggtgatgttggtgtgggcaatttagtttgtgcagaatcaactcttgtggaagagtaagaaaagttgggtggagtttttttccatgagttgatacttggtatctttcggatggggctgagctatggtctaaaccaaatttcaaaaaactcaaggtgaatattaacactgctctttttgaagaggaaaaaaggtatggttttggtagggttatgcacgggattatcgtggtcgggttgtggctaggttttcagggctacagtatggatgcattctgctagaaattgttgaagtcgtggccctcaaagaagtgctttcgtggttgaagcatgatttcttaagtgttagtattatcgaatctgactgactggtgttggtgcaagttgttcgaaatttgaatgtattgcaatctacttttgatgatgtcgcggaggattgtaaacaatttctatctttttttagtgatgtttct

SEQ ID NO: 245139 - DNA, 1658 bp, Cannabis indica
gggccacttatcagggcttggcacagggtaaattgtgttcataacacttcttgaaagcctctatcttgtaccaagggtgaacataagcatgagattgatggttgcaaaactagattgcagctaaggcatgtctacatgggatgcctgtcaactggaatctcctacacgtgcatgttttcccctctaaatcgacagtgaaaccacctcctggattcatctgaatttggaacattgttgcatttccccatgttatgacacatcatttagcaacctctgttagcttagtagtaattttaataatgttgttgtgtatagggccttttcattttgatatactctccctttttgggtataaacgacacataagccaataccagaaaagtaacaaatcaaagttcagaataagtatttttttcatcaatgagcattgtagttgaagtgaacataataataaattacctaatgaactccaacagagtaataattggtttgtcccttgcatcaaaaattgtattgttgaagctttcacagctattgttcagcaacatatcacatttcaccacctctttgaaatgtgattttgtccattctgatggttgctttgccgccagccagttgtatgccttcacattcaccttctttatcacttccattctcctatcaaaatctacttcaatggtggatctggctgcattccacagtagttgcttcagcagtagtccagggaactcaatcttgaaatttccatgcatatgtctcacaaaacttgctatctgggctgttgaaaatgttttcaactgcattttgaagccccttctgtctatcactcataaaagtgaatgagtttggctcaatgggactcaagtcatctcttaataactctaaaaaccaactctacctgttgttgtctctttctcagtgacagcataggctattggaaatatagaatttgttgcatcaattccaatagcagccatcagtactcctttgcaaaaccccttcaaaaagcaccgatcaagtcctataaatggcctacaatcatttttaaatccttccttgcaagcatgtagacagacatagcacctttggaatattcttttatcaccttgcatctcacacttaattttggcagtgctacctggattggtctccaagagttgtttgaggtaatcctccaagactgcatactagtcaatgactatgccttctagttatgcctttgctatgctataaaactttgtggtagttaccttagaatattttgtgtctttgactttctccaataaggacttgtactcaattgatggatgtaatctgaatgtgtctctgaattgttctgctagccattgtgtagtaatatgtctattatcccaaacaatgccacaattatgcttaggttaacatttctttaccctgaatgttttcccatcttgcttcacatatgcatagagcatccacttacatccttcagccttacatttcaccctaaacttcttagagtcattagccaatagaatgtactccttgttttcatgaatgaaatatgccttgattgtcttcctcaaaacttatatgctaccaaactccatgtatggtttccactccaagtctgtaacgccctaatgctaaggcacactacagtgctttttcaattacag

SEQ ID NO: 245140 - DNA, 1764 bp, Cannabis indica
gttaacttaattaagaaaaataatttgtgaggtccaataagcaccaagtagagcacctctattttcatatgcaaactaggataaaatgtcaaataagattaatgagtaagattgtaatattgtaattaaaaagtgtgtactaaaatatattattaatgatcaatgataaaattataataaaaagagttggatttatttagtgtcatatttaacataatgttatatcttgtgtcaaatttgatataatttttagcatgtaccaaatttgacacaaatttttgagaaatgctaaagacactcatggtgcctagtacccttgtgaggtgtagtatcgctattagtgtaactcaatatcggatcttacttgttttactttaataattattataaaaaatcgctaaccaattataggacgacacttcatcatagtgctaagcactatgagtgcctcatagcaatgctccaaatttttggatgagccaaatttggcacactattcatcttgcgctaagagaactaattttcttaacgatgctaaaatataacactacaccattattttggctctccgttggagatgctttccaatactaggcaactctaaagttgtcaccatggttctacacatcattatttgatattatcatttatttttgttattcgtgtttccagatagctaacaagcagggcacattgaaggcccaatacgaaaatgatgcccattcattgggtctataagggttaataatatagctttccactaagaataggcaaaactagacttggcatctaattctatcaaggtcaccgctcaacactgaatccagacatctgtcctaaatcgaccatcgatgcttaataagagagcaagtgtagaccgaggaagagtgtcctcatggggcatctgggaacaaaatatgaaggggcatctgaaactacttaggatctcaaaagttgacccacgtgacatgattctgacatgatcatgaaaaattaagaagcttatcccttgtgttagatcatagaaagggtcacattaaaaggaagttaccttttaggccaaacacccactacactgacattctttttcacaaatgacggcacacgcacacctgtcattgtcaatagtacctttgcatacaaatgatggatcccgacaacttgggcctcacatacccagtcgaaaatccaatattatgttgtatttatcccattaatgaactttatacatcaaaaacaaactctaatgggtctaggtctgcccgaactattagcaaatacctataaatatggcattatcccttcatgcaaagggttgagaattttgtatgaaaaaagaaataaaaatatagtgcaaaattcattgcaaaatagcttaatacaatgactcgtgaaataagactcattaatgctccaaccacgtaaaaatattatctcattttccttattaatcttcttttctttggcttaaacacgtaattaatttagtttttaaaaatctcagtaaatatttggtactttcattgagaatttaaaaatgtcttaatcatttttctcatctacaaaaatggttgcaataagaacaacgactggatggccaacctatcaaaaaacacgtacaatgtctaaaaccctaccatgtatgatttgaaccttcctactcatgtggacgctcaggaggccatcactggggaaggtgatgttggaaagcgatatttaactaggatcttacttttactaaaagtatgtagattattactaatt

SEQ ID NO: 245141 - DNA, 2005 bp, Cannabis indica
attatatataactgagaattattagttaaattgattaaattttatttgagagtactaaatatgtacaatttcaaaatacaaaagtactaaataaatattattaaaaaatactgggtaccaatatatatttttcatgaaaatataaaatactaaatgactatatatatttcctttttttttttggaatttatattgcaaacttaggaagttaggaagaattatataataaaactccttaataaactaatcttaattattactcttttttctatcaatgtcttgaattaatctctcccacttgccaaaatcaagacatatgctaaaaatgagattataatacttgtaagtaccattacaatattagtgattaataagagggttaattaataataagataactacaacaatatattgtgatataatggacttttatttaatgtgtcacactcataataattatataagcatataaatacatgaatcaaaaaaagcatggtatcaatttaacatatacagtagtaccacaattgaaacattatgtggtgtagggttttttcatatataaatatatataatttgtacatatatattatttttgggtttgaagagctagctagccatttaatttgggaataattaatgcttttgtgttgactgtcttttcttaataaagtgtaaatgaaactatcaaatccatatagggagaaccattagaaaagaacacaaaaatatatatagtcaatattgaggtaagaatattaatataattgtatatagggagcacaagttctatattttttttccatgtgatatatccttaaaaatgactgaaatgagagattattcaatattcattgaaaattgaatgagctatatttatcgattgccttaaattaatatatgccaaaacatgatataatttatcatatcatttccatctaatttggtaggactaaatatacccatttgcttttcttgattatatatagggctaaatttaacccccatactaaatgcttccttaaggtagtaaaaggcataggagatcatgtaaaagggtggctaattaaaaagtacttaataacaaatttaagaagggtcaaaacataattttcaaataaattgatgatagattataatttataaatttatataatttttaaaaattaaaattaaaatagaagggttcaagaagtttattgatatgtgcctttgaattcaaaaataaatatataacatgagatcttatttaccttaaaatatatcttgtagtactaaattttcaatattaaactaatttttcctataattgattaagaccaattaatcttaaataacaatagaataaaaatctttttgtctccataataatacacgtataaatttttggaatattatacatgttgatagtcatatcaatttatctattaaataataaattattattttttaatggtaaatttcatttaagtagatcgattcggcctcaacattaaaaaggatattaaacttcgaaaaatacaattagcatataaacaagacgttctattcataagataaacaacttgattagcagattatttgacaaaacgtaaaaaaaaaataccctaaaagaagataaaagttatttagaatcctcaacaacactattaaaagtggatgataaaatattcaaatttctaacagcttataccgataccagacaatcaaattcgataatactaacacctaaaaaatcgcacttcaactatgataacacttccttgagagccacaacttcaacaatctttaaaaaaaacttgccaatccaaagtcccaaaaatcccaaccacgacccaaccttggtgatcccgaacaaccccaccaaaaccatgacttctctcctcgtcaaacaatgcattataaatattcaccttaagttttcaataaccttatttagaccatagctcagctccattcgaaagatatcaaccatcaaatgaaggaaataaacttatttcttgag

SEQ ID NO: 245142 - DNA, 3208 bp, Cannabis indica
ggtttaggttcgggtccatgttctggtctaggtctaggtcacagtctctggttttgatcctaatatgggtctaggtctcggtttgggtctgagtctccggtgtcatcccagtcttggtccaggtccaggtccctaaatcgtaaaccctaattcctaaaccctaaaacctaatctgtaatccctaatccataaaccctaaaccctaaactcggacctgaaagaagaacagggactcggactcagacccgtcctaggacctaaaaaaggacaaggaccgggaccacacccatacctaaattgggacctaggacccagacactgactcgaaccccgacacagacacggactcggacccggacagagacacggactcgaaccaagacccgaacccaaacctagaattgtacctaggcctggacccaaacttggacctagacctagacccggatccggacccgaacctgaactcagaccgaaactcggatcaagactcaggaaccagacccaaacttagacccagactaagacccgaacctttactcgagacccgagctcggatgcagacctggaccaaggctgggactcgaagttggacccaaacctacacctgggaccagaaatcggaaccatattcagactgggatcgggactaggacctagacttagtattggaaccagacccaaacctgaaccctgactcagactaggacacaacttggaccctaacccgaacccaaacctagacccagaccttgatttggacagagaccaagccttagaccgagagtcagaccccaacaaagacttggatctagaccgggacccaaaccttgaccaggacctagacctaggcctagactcgaacctgaacccaaacctagatccagaccttgatttgcacccagatgtgaactcgcacccagaccaaacctggacccagggccgaacccagacctagtcccaaacttggacccacagtggggcccaaacttggagacgtgacccgaatcgaagctgaacctcgacccatgatcgggatccagatgtggatttgaagttgggacttaggacttgagtcttggacacaacattagtaggtgactagatctgggacctggacccaaacctgaacccaaacctagactcagaccaggagccgaaccaaactcggacctagatcccgttcgagtcctaagaacctgtcccaattctaggtcccgagtttgggttcgagtccaagtgtgggtcttccatccaagtctgagtcctaggtctgggttcgggtccgagttcggatccaatttcgggtttgggtcccgagtctaggttcgggtttggatgtaggtctagatctccgttcgagtttgagttcggatcctagtccactctgggtcctagtttgggtctaggtttgggtctgagtcctagattcagaaaccgactatgggtcgagtccaagccgcgggtcttgggtctcaggtcgagatccaaatcctgcttcggttctagttcatgtccttggtcttgttctagatcacttgtctggttttgggtttggggtcaaatcttgggtctcgagtcttgggtctaggtctaggtccaggttcgggtctgggtatcggtcctcaatttaagtaagggtcctaggtcctagttccaattctggtcccagtctaagtgcaggttccaattcgtgttctggtgtaagtcttggtctagggtcttagcttggtatggctcttggtcccggtctggttcctgagtcccaggtttgagtcttgagtctcgtgtctcgggtctcggtcttagtcccagtatgggttcaggtttcggtcctagtctaagttcagttctgagtttgggtcaaggtttgaattctagtatgggtccaagttctagtccgtgtcctgagtgacgagttccgaattctgggtcccaggtccgagttcaagtccaggtctgagtttgggtctaggtccttgttttggatctcggtctgggtccatgtttgggtccaggtccgatttcgggtccggttctaggtctaggtctgagtcccgttctagggtcccagtttcaattccggttccaatttaaagttatgggtctggtcttggttcagaatagggtttgggtttgggtcttggcacgattcccaaatcctgacaacgtttactggtcgggtcaaagcccctggtcctaggtcctgggtcaagattcgtatcctaatcttgggtcccaatcatgttccagttcaagtcttgggttccggttcatgtccgtgtccgtgtctaggtccgggtctgggaccaagaccggggttgggtcttaggtcctagtccttgttctaggtatcaattttgattctgagtgtagatttgggtccccaatcattgtctgggtcctgggtctggttctaggtctaagtccgtgttagggttcgggttcgtgtccttagtcccggtctgagttttgatccaggtccaagatacagtttgggttcaagtccaggtacttgtccaattccgattgagggttcgggttcgggaccaagtgctagtcctagtcccattaccgggtcctagtccgcttccagttctacttttggttttgagtcacaaggtactggtctaggtctttattcgggtcttggtttaggtttgggtccggctctggatctgggtttgagacctggtctaagtcccagatccagaagccgactacaggtcaggtccaagccccaagtccagatctagatcccggtctcggttcctgttcttgttccactttgggtccagattctagtcaaggaccgggcctgggtgccgatctttgtttgggtcttggactggatctaagtcgagttctaattcgggtttgggtttggttcttggtcctgttcttgttcctattccaaggtcctggtccggttatggttcaatttataattttgattcctggatctgtaaccaattcttggtctgtgttagggtcctagttcgagtcccagatcccatgaccgactacaggtctagtccaagccctgattctcggatcgagtcaagattcatatcctagtcatgtgtcccgatcttattccagttcaggtcctaggtcctggtccatgtcccaagtctgggtccaagttcgggtctcacaccgagactggggttcagtactggtccccagtcctgttccatgttcgagt

SEQ ID NO: 245143 - DNA, 1990 bp, Cannabis indica
tgatttttccaacgacaatgccaatttcgacgattttttcggggccagcagtaattccgacgaatttttctgacaccggcagctactttggcaacttttctaacgccgacagtaactctgacaattttttcgacacccatgacaaataaaactggctaaacacaaataaaaacattaaatatgagctttcaaaacttaatttacatatatatgacatatcaaataccataaaaataccttaaattaaaaaaatatatatcatataaattgatcaaacctaaaagtactagtttcttgtttattttttctcagcttgaaacagagtttttcaaaagatcattgaaagaaactacttttagcctatataaagaggtactgaaatagtcatagaccatgggaaggactatggatggaatggtcatagaccatgggaaaaactatagagaaaatgttaagatgtttatacatgtatgtgattttggcttttattctgcacatcacacatcaaattccatttaagcagtatttgagggtgaaaagaaatccagtatttgattaaaaatttaaagaaaaaagaaaaaaacttgaatggggaacatttaataaaataacacgtggacaatatttttatctgtacatagagatgttttttctaatccacccaagtactatccaatactttattaatataatagccatgcaaaataatggaaagaatcaaatctcacaatattattcaaaccaaaccagatacacaagaacagttctcaaacaaaatacatttcaaatattatgaacatgtagaaaaatgacatatttccaacatgtaatttggaacttcatctcattctacctaattaactacaattgacacacttctacgacttttctagtaactgagacttagtcaaaagcaggcttttacaacttttctagcaaaaaataaacaacagaacagagcataataacatgataagcagattatctaagcaaatattaaacaaacgcttaagaaatgaaactatcaacactttgaaatttcacatgagagtcgggccaatctcagttcctcaaaaaaggcctccaaatccatataagaggagccaccttcttctattgctcttttggccatttcagcaaatcctttggctttacttctcatttcttcggcttcttctcccttcataacctttctcaacgcactctctaacttttccctcttgacaaaatcgcccccacatctcgaccatttattaacaccaacttcaatcccaatcccaagaatttgagtcaccaacttctcattgtagaattgctctgctgaaacaggccatgccaccatcggcagccctgcacacactccttccagaatcgagttccaaccacaatgagttacaaatcctccaaccgcttcatgaccaagaatcaaaacttgtggtgcccatcctcttattataagtccttttccttccattctctcctcaaatccttctggcaaccactcttctttaatctcttcttgtttttcttttctcacaacccaaatgaattcctgccctgaaccctctaaagccattgcgatctccatgagctgtttgtcttcaaactttatcaaactcccaaaacatacgtaaacaactgaattgggtttcttggaatcaagccactttaaccaaacttgtttgtcaatggaggattccattcctctattccctgtttctttaggattcattcctttactgtttaagaacaagggaccaatgtgccatgacttgatgcctaaaacgttagtataatgatctgcataagcaggttctagctcatagaagctattaacaagaaccccattgcacctcatttcatcttcatgtatatccttaaagagctttatgaattcgggttccacatcttctttataaaaatcagccaccctgcttgctgtgaattcgatcttatctggcaaatttggaataatgaatgtttcgtattc

SEQ ID NO: 245144 - DNA, 2026 bp, Cannabis indica
ttgatttggcctgattgttaggccttgcattaacctcaggggaggaatttgcagctgtcgaagtaaatccctggtgttcctcacggtggtcttccttgccggagcggagccacggagatgcagtcaagaaattatgccttctcgtaggtgctttcatgtctaaactataaggtttgacgatttgatcagtaggtatatcgtaaaccttgttggagaacctttcggcatgtcccataatcccacagataaaacagaatgttggcacccgttcatacttgaagtaagcataaaatgcttcaccattacgttttcgaaacttcatttgcctttttaatggttcagcaacattaatcgtaacacgcatatgcaaataatcacgccacactcacgagaagttgtttggatcagatgtaacaagaatgccgatgtatttggctgcttcacgacgagcccagtccgtcttaaaacccgtcttcaagccacgaatttgcacccacatatcaagagaattcagaaccaccattctaggattttcacctggttttaatctttggatactcatttgttttcgatcataagtccacgggctaccctcaatcactctctgaatgtctatctcatggtaaaactgaaataaaaatctgttttgatcaaggatttttattgtaattcctttgcctggcttccaaagatcggccataatattttgaaagatttggaaatctgaaactttcccagatagcagacggcctacaagacacaacttatcatcgaaactagtttcttcctcccctacacattcatcatcaaacaatacctcatgatcctcttcttgaagatgccattagatcgagagaataataagcagaaaagaaccaacaaaaagaacaaaatagaccaaaattacacactctcagaccaagattacacactctcaaacgtgagagactaaacactctctataaggagagacaccccttcgattcaatgattctaattatccttattgaaagattaaaatgagggattttatcaagtcttaagataaaaaagcatggagaatgattctttcaagatggtctcctcctgttgtggtagatttcgaaggtaattcaaaattaaaacctgaacttgaatggtctactaaagatgataagttatctacttacaatagtaaaactttacgtgctatatgtaatggagtaggtgaaaattttattaacttatatcttcttgtgaatctgctaagcatgcttggcaaatccttcaaaatcagtttgaaggaacttctaatgttaagcattctaggtttattatgcttcagaccaaatttgatgatcttaggatgtctgaaaatgaaaccatatttgaattttataaaagactgtccgatatagctgatgaatattttgctcttggtgaaaagcttgatgaatttgttcttgtcagaaaaattataaaagttcttccaaacaggtttgacactaaatttttagccatggaggaagctaaagattttaacacgatgaaggtggaagaacactaataccatgtataattctcttgtgtcaagttcttttaaattttgtatatatttatttctaattctgatttgattctacaaatctgtattttgcagtgacaaaattgcaatttgttgccgcagactattataattatatttttactgtaatttagtaaaattattagtatttacaaaaacacaatttttttaatcttgaaacacaaacttgaaattgatgctgaggaaaaaagaagaagaagaaagttttagataataatagacagaataaaatgatgttgaattttttttattaaattttaaattatttttttcaactattaataattaattggaataaattttaaattaattttttattttatttatccatgtagcgctcacgaggccaagatacatcaacaagtaaataattacatcatcaatctattaggcagatatgatagaatttgacaaaattcttattttaagaagtgctaattt

SEQ ID NO: 245145 - DNA, 525 bp, Cannabis indica
agtgttttcataattataattagtttacctttcctaattaccttaagcatatgagactagagtggtgttctcgatatacctaaacaaatggtgtgattactactgtttctccctttagatctttactctttccaggagtagaaaactcctgtgctgtttctttttttttctttctcaaatcatccatataccaagtaatttgcaaccgcaatgttgagcattaacctttgttttggttatcttaatcagataaatgacaaatatattaggcttttgtttataatctccgccgtgtggattttcatggctggcttaaatctctccgtacggcatcatttgtccacactgtactcgataaattgtctttgcgtggtttcagaggaaactcaatcattactaatctcaacttaaaaacgacaagatatatcttataaaatcattcctttgacaactttattttatatatcaagtaaatgggaccaaaggggtgcttataaaagcatcgagcgagaaggttccaaagca

SEQ ID NO: 245146 - DNA, 1127 bp, Cannabis indica
aaaaagatattagcttattttgataccaaaaataaaaatgaaaataattaaaataatattaaacatgtttaaaaagattaaagtacaaatacaactaattatttgaaatcatgatgatgcaagtgccaagtggtgtcgctgctaatataattttctttgtgcccctcaattatataaaaatgaaatcatgttcagactacaagttcgtaactaggaatatgataataataaattgactgctgactgaatatggaaaaaacgtgaacacgaggctctttcttttctagtctttctctctattccacccaccgtgttttttcatcatatatataaaggacatcaatcaaacacttctataaatatattcaatcacagtactcatctatattatataacttccaagacctgccatttcaaaaaaataaacttccaagagctgataaaggtatatatactcataactcgatcacaaattgcatgatcttctcattaatttatatctgtaatagttttttatttttctttcttttcttttaacattttcatcttcttaacacaaagatttgagaatatatagagagtgtacttggaatgcattgtagtaataaattaaatacaacatcatacttttactttctttaaaggaaaatttagataaaactaaatttaaataattgtattatagtgtttggtatgttatttttagtaattttataatttatttgtgtagttgattttttattattttagagtattttaaaaaaattatccttcattaaatgctttcacagaaattacccgtttcacttttgcttgcctctatgtttcaagcaaattataacactccactactcacttaaagccgagtccgtacgctttcaaaaaaagaaaaaaacagagagttcgtataaactcatatataaagtctgtaaagtgagtaggtgtcattttaatcgaggttactttcagacagtgacacagctattaagtaaataagtgggatctatcgaaaattactttcggaccataaatttcagtgagcgaaaaacgtgaacacgcgccatttcttttaagcgcaaccatatctttgcatgtctacatatttaatataaatatatatataactg

SEQ ID NO: 245147 - DNA, 1370 bp, Cannabis indica
tgatacataaaattggtcatatttataagacaaatatggacttatcagattatagcatatcttcaccaacccaatatatattgagctgcaaatatttaatgtaactcgaccaattaaaattttaaaaaattaacccatctaatttttttttttgatcaggttaacccatccactaatcttcacttcttttataattcttattgtaattttttagtattaaaataattatatttaaaaagaataaaagtatattatttatatttcaaatttaaaatttttatggtctaaattaattttaaaaatttaacgtaagacaaatattaattcaatgaacataaaaatattaaacaaatattgattttgtcgatttattcgggtttggcgatatgtaaatttatttagcacccatagccagaactgtacctcggacttcagacttgaaccccaaacacagactagtacctagacctcggacacagactagtacccgaaccccagacacaaactaggaccagaccttggacctggtcctagccctaaacccggtcctcgactgcaaactcagaactagaccacaaacttgatcttaaaccttggacttgaatctagacctagactccggcctgaactccgaatcccgaacctgaacctggcccaatcagacccagacatcggccaaacctgaacccttggcataaccccaaatctgcacctgatcccagacgttggtgtcaaacaccgacccactttctctcacctcagtttcttattgctcacttaaataaaaataaaaataaaactgaaatttacagaacacacttttattttttaaaaaaaaaaaataaaaaataaaacactttttttttacaaaaaaaaatctacttctgcttttggatttaaaaaattttataacaaaaattttacaaaaaccaccttcaaaaaaaaaaagcaatttaaatagttggtataaaacacactcaaaaccctcgcacattttttgtcgtaaggcccttccatacttgttttaataagaaatttgggttaccatgcttaaatgtgaagcatgatctctaaatataccactacacaaaacatcaaagaaaatatgctagtgtgtttatttaatttcaattatactcttcaaataataaaaccaaactcagctggaccaccagagttctctgttcaacccaaaaatatgctattatgtatatagttcgtttttaacagatttacacatttgtgttttgttgatttttttgcttgaaaattgaattttgattttttttgcatttatttttgttttctacttttttttgtgataatttaccatttttagcgatgcatttgcaataataaaccaaatctaa

SEQ ID NO: 245148 - DNA, 932 bp, Cannabis indica
ccataatcacaactataatcataagcataattataattgaaaattaaagagattagggagaagaaaagagctaaaatgatgaataattgatgatgtactctccttcttctccactttctatgagtttgtctctcaaaaatacagtctaaaaattgctaaaaacaaactctaaaagtcctataattactccttaaaaaatcctctgatttaaaaataaaaaaaaaatgaaaaaaatctggaatcgtgctcttgctctggcgaagggattaagtgctcgccacgaccatgacttgctaccgaatttttttgtcacatgttcagattagtattttggccatagctttttcaatacaactcagaatttgacgattcaagctgttccaaaaagttgagaacgagatctaaaactttcatgtttagttccaagtccaattctactaccaaggtcttcaaaatttgcaattaagttctgtcttctaaaaccgagctcgcgaacttctactattttttaccaaaatgtgttaaaatttctccaaataagtccaaatacatgattagtcttcaaaataacctaacaaattaaaatcacactaatcaataatttaaaaaatcaatataagaatattaatacataaattgtccatatttataagacaaaatatcggcttatcacctaaccatgcatgttagcaagctcacagacatagaagagagaagccaagacacaagcaattaattttggacatctcactccacatacgcagggttcatcgtgtttgaggctcaatcttcatcgtagagaaatttcggtggtggtagagcaccttaaatgaaaagaagtaatcgattccctctgattgatcagttgttgtttttaaagcaagaaatagtgatcgttgagattaacagaaagattatggttgaaaaagata

SEQ ID NO: 245149 - DNA, 1013 bp, Cannabis indica
taacatacatagtagtaaatctagatcctggtaaaataattacaacatccacagtaggcaccacctcctcatagaggtcgatcactatttcggttgtccccttctccttggacggaacctcatcacctctagatcgtttgggcagggagtcttgcccaaacagtcaccaatcctctttttcagagcttggagcaccttttgagacatcgctgcatataaacaagataagaaaattaaaggcaagtataatgtaaagcacatcatggaacaaataaatacaagttaaaataccttgtacatgagcaggagcattctatcgaacaaataaggacggagcctcgtcgtctgaagagtcttcttgttcttgctctgtcaggacgacctttccttttccctccactagggcacatggccgaacaggtctatcaggttccctaatcctgatagcacgctcaactagtgcctggtcactcggaggaaccttcttgccctttttgctcaatttttcctgctcggtcacttagtcttggttaggctttgccttcttcactttcttcacgaccctcgacacaaagtctattgggaagagtttacacttgacaacattggcttcaatggccagaagaaagacgttccaagtagcttccgacagttgaataattctctgtggccttttcttgaggcctaacgtgaagggaatgtggcagtaagacggtatctgctggaactgagtgtggacggtgtgcattccctggacaaagtagtactcgtccacaaagttccctatctttctcacctcggagtctacggtgcccgtcaaccacttttcctcaatctgagaaaagtagaaatatcctgacctgctctacttgggagttgattttagatcaaagagccagttagtgtcatgcggggatggctcaccccatcttgtgaggtgtaaaggatgaacagggcggataggtacatgatgttgggttttgtaccctaaataaaacccattacaatctgat

SEQ ID NO: 245150 - DNA, 884 bp, Cannabis indica
aaatcaaaatcaaaatcaaaatgtgtacggtgggaatgagcggttatataatatatatttacttttggtttggttttcgcagatataataaaaccccaataggttacaaatttagatccccacttgtttcgaattccaatctaagtgtgttcataaaattatagtttgaaacacattacaatatggttgtagtttgtatttttgctaaattgctcaatgcaatttgattagcggttcaaattgcactaatttttgtaaatttatacaataactaatatttttagaaagggtatctcaaaaaaaacatttttataaatgaaattttaatttaagtaataaaacatatatttgtttttaaaaaaaaaattcatcatctttattaattgtaatctatagtgattatatgattaaaatctggagtaacatcactactcctgataacacgatcagcaactaaataggatgctcgagctaaggaatgagcaacactttttgcagaacgtctaataaaattgacataaacctctcgcaagtcatttaacaacatcttacaatcataaataatactcccaaagtatgaaaccataagaatagagctacgtaacgcttgcaccacagtaagactatcagtttcaatgataacctttctccaatttttctgtttaacccaactcagtgcctccttaacacccaaagcttccaccatttcgagttgcaacacccctgaccaacagttggattaatgagagcaggattactcgaagttactcttgaataatcttcattcggcagccacagatccaacactatatttattcgagaaccattgaaaaaccgagtttttgaaaatgtcaataatatatatgaaaatataaaattgtata

SEQ ID NO: 245151 - DNA, 891 bp, Cannabis indica
aatttttaacaattttttaatataaccaacttaaagataattcttaatacgaacagatatagataatgtaactaattttgtcataacacctctagatcgaattattattaagttttattttgacaaaaaatcaattcaaggtcctatttgtaatattttaaaaaatacatgatccattttgtcatttaacaaaacagagggttcgattggtaacttttacaaaacataggatctaaaatagtatttacccaatatattattctacaaataaattttatgaagaatttttttagcaaaaagtcactaattattaaattaattgatatattatttgtcaaaaataaatatatattattgtacaaataagttttatgaagaaatatttttagcaaaaagtctcttattagtaaattaattattgattttatgagtaagtttttgagagaactatgagtaagttttggtagcatttaaattcttcttatggtggcggtattcattacatgagttaggaaagaattagtatacataaaactatgggggaaatgagctttcgtaatctttgtgactttaatttgacaatgttgagaatgcaagggtggcagttactgacaaaaccaaactctttggtcaataggttatataaggctcgttatttttccaggggtaattttctttcagcatcccttgtgaataattcaagttttgtgtggaagagcgtcttcgaatcgtaggagcttcttaagtctggggtttgttgggcaataaattttggtgtgaaggttgatattttacatcagtcatagtttctggatgatgtgtgttcttttattactttagatgcctaatatttggtgggtcatacagtgagctcgttgatgtgtactgata

SEQ ID NO: 245152 - DNA, 1003 bp, Cannabis indica
agagtatgttaccaatatttactgtttgatagaaaaaatagatactttattgaataacagtttctttttctttgtggtgtttctatatggatttagtgcacacatctattaaaaaaatttcatttgtttaattagtccaaagtctgctatattattagcagatcatataaacactttgttacaattgattatgtgtttacaatatttggtcttaatttaaacttctaacttagccatatatattacatacactcctctaataagtgatcttcttaaaaataattttacatacatatttagtatggtcacatatatacatgtcattcatcacttgagtttgttcgaatattactccaaaaaaaaaaaagtctttttatttatgtttatatattttaaaatctaagtttagtaagtttaggatttatgaagtcattgcttgttgatgaatgtataattattttgttatatgttctagattaagtgatgtattttccacctagaattctcactactcattagtttatattgtttgacttactcattaattctttcactattgttcttaatatgtttattattttttcaggtttagtaatcttttaggagtgtctcgattgtatgtaatttatgatattgttgtcgctcactagttaaaaaacttaatggttaaatgtgcaagtttagattgcatataattaaatcagaacaaaataatagagattcgtatttagtctatacattgtgaaattcgtaatcaacctcaaaaacaaaataaccattcactgtatttatgattatacttttccttgtggtttagtttgttgtaatggtagtacatattctattcaattttattgagtattactttttttagtcactgctctacagttcttagcttatctaatgagaatttttatatttatcgaatctgctatgaatttaattgtgtgtttattagatacatcatcatgcatttgccttttaatataaggtggatgctaat

SEQ ID NO: 245153 - DNA, 1171 bp, Cannabis indica
gatgtggaccctccttctctgaacatctccattcctgtacaaacaaggaaaaaacaaaacaaagatagagagaagtatacccccagagtcgtgtctggagaaggggttagttccaactgggttttgcaaagaggaaacaaaatgcacaaaaatcaagaattgtagtaacaatgaatttaagtacaacatagcttgcaagaacctaaggatcaatatttctaaatagaaaaagtccactttgataccaattgtatgccgcaagttttcaataacctatctttctctattaaggttgattttcagttgatttaaacatgaaagttacgatctgactagtgcttgggttccctgaactagggtaataatcttcactatatcaaacaatgtttgtacagtaaccaatccaaattacaatagaaaaacaaaccaacatttacagtagtgattttttaaataacaaaatctcttggttatgaatgcaagatccctttgcttcttgttcgttgaaatcccttcaacaaagctctagatctgaacaccttcaaatatgtaacaccaagtcttagcttaaatcccttcagctctcactacttaacttcaagacttgctctaaaactccaacccacaataatagagtttcttgctagtacctgcaatgaaacacacagacgaaacaaaaaagaaagaaatgtgttgtgttattttcaacatgcacgtatacatattgttaacaagtaatagactcacatgaatgaggtcgatcccacaaggattgtaattaagtatgttaaaattaaactttacttctatttgctatttcaaatttaacagaaaattaaaactaaaaaaataataaaaacagaaagcaagtaattaatgtgtgaataaacaatgattagtactagggttattgatttcaattgtatctatctattatggcctaatataattcaattcctataccaatttctatgaaataacatgtttacttaagtaatttatagtattctcagatatataaatctcagttacctataaattttttacttttgtgataaattaactcatgtaaaaggcattaaacacatgaaactctattagctatccaaaccacataggtattctcgtactatatcaaaatttgtttcctatttcactatagcataattga

SEQ ID NO: 245154 - DNA, 497 bp, Cannabis indica
ggtgcgattggattttttgaggcgaaggattaaaattggaggagcgccttaatatgacaaacccatgccatggcatgaaaggcttaagaaattggcagaaaaggtcgtattggaccaaggcatgggtgtcccgaggcattggatccttatgcctaggcataagttcatagaatgctcagtgcccataaaaaagggggtcatgcctaggcatggaaatcccatgcctagacccttgtctgagcattactgagacgtggatttttgcatacacggtccacgacataggatcaacatgttgtggcccgccccttcaattttcaaacagatgatatttttctcagctttattatctttttaatctttttttggctataaaatgagtggacttcgatgttttttagcaagcaattcaggagtatgaaaaatatagagaaaaatcaatcgcaaaggctttttcaacggggttttcaacattcttttcctctctattttcttct

SEQ ID NO: 245155 - DNA, 1551 bp, Cannabis indica
aagtaagattttttgtaatgttaactcacttattaacaacagattgtagagagaaaaacaataatcatcaaagactctccacaatgaatggagtgacacttagcctaggggaggtaaatggttgtgttatatagatgacataatttagttagttaggaaatttctaactgttgtaacagaaagtttaaggctaagtgtgagttgtcttgactcgggtttaggttgactttgagcttggaaagtatagaccactccaacaaattcacctttgtactataacttgacaagcttgcgtcttctgcaacccgaactaaaacttcaacttcactcaatgttgagtaacttcagatagtgtttgaacttctcacatgtaacactcttagtgaacatgtttgctaggttgtcatgagtgctgttcttcttcacaactacctccttctttgttatgacatctctaataaagtataacttaataaccatgtgctttgatctcttatagaacatgggtttgttcattagatgttgtgcaaactggttatcacaatacattattatctcacctatttctaatccaagttcttttgctaatcccttcaaccataaggtctccttaactgcttctgttgctgccatatactctgcctcagttgaggatagagccaccactttttgtagaatagcctttcagctgacacaaccaccaaagaatgtaaaaacataacatgtgagaaatcttctagtattaatgtcacctgcataatcaaaatcacataccttgcaacctctttttcatttctggcatcacctttgaacattaaacccgtgttgatatggtgcccttcacatatctcatgacccatttgagggctgaccaatgctcttcccctagatctgcaaggtatctgctcaccatactcatagccatatgccaagtctggtctagttcagaccatgacatacataagaattctcacataatttgcatatggaactttgtccatgtaacttatttcttcttctattttaggtgattgagttaggaagagtctgaaatgttgagctaaggggactgaaattggtttttcttgatgcataccaaacctttcaattaccttctcaaggcaattcttttgtgctagcttgatatagtctagtcttcttttgatcacatcaattaataccaagtatcctatttgcttcttctagatttttcatctcaaatccattcttcaattcaaattttagattttgaatttgttctttgtctttttaccctataagaatgtcatccacatataataacagatttatgtgattgttgaaatagatacaagaatcatacttgcttttattacaaccaattttagtcatgaacacatcaatttgatgttccattgtcttagtgcttatttcaaaccatataataatttctgcagtaaccatatctggtttgaatttccattatcaattccctaaggttgcaccatgtatatcttctcttcctattggctattgaggaatgtagtcttcacatctatctgctccacttta

SEQ ID NO: 245156 - DNA, 1258 bp, Cannabis indica
cgtgagagcaggagacgaagcagaaagttcagaaacagtttagaggatattgacagaagcagagaaattgctgatgttggagctgaagacataaaagataagaccgtagcaaaagagccaaataagggtgaggaaggagattcagatgacaataattctgaggattctaatgaagttgtcgaggatgcgcgtcaagcgaggtggttttcattttggcctggcggtagaaaactcttttcatcacttggcctggaaagatgtacaattttgtgatcaataagaggaataataatgacacctttttggaattcaattcaaatttatatattagttatattggctctgttaaatttgttcaaagagagtaagataaaatataaacaacttagatcaaaggaagttacctagttcactaaaatgtgcaaaatgtacgagtttgttaaactcttgttgctttgtatatacccaataagtagcttaatagttgactgaattctttgtatttttatttctatatctttttcattcttgcatgtttgcttaggtaggatttatcattaaaccagaacacaacttacaataggaaggttgagtccaaatcagcaataggagtagtaacataggccaaagccccattgcaaatagccgatgctttacaatccaaagcatacttttatcaagacaatgaatgagaaatgaaaaggttcacgtagaaactaaaactagtcgaatcaaaattacagctcaaatgtttgatctctgtcaggaagagtacatgtcactgcagttcatactttcagaaattaataagatggattgcattcaaacaataagaggtcacacccctacaaaaaaaatataaaataaaaataaaataacaatcagccagcttcaaaccagatttaatggagtggttgtcaaagtagccttttgaccaattgaaatttagcaaaataatcttttctttttccttttttttttattacttttattttacacttaactcatttaaaaaattaatttaatattaaacaaaattaactaaaacctcataaaataaaaattaatcctaacttctttttttttttactagagaactcctcctctttctttttgttcttcttctcctcttctcctcctcctccttcttgctaataagactaccatgaatggtcacaactgaaccattcttcttcttctcctcctcttctcatcttctttcttcttcttgctagtaagactaaaaagaatagccatt

SEQ ID NO: 245157 - DNA, 643 bp, Cannabis indica
agataaagatctgttaatgttacgaaaataaatcaacattaataataacttaaagttaaacatcataaacttaactatgttatataaattttttaatttaaataatattatgttggcaaattatttaagatacttttatattatttttctatcttaataacatttaaattaccttaaaaatctatgtataaatcaaaagcaacatcatcatcgcgaaggaaaattactataatcaaaaactacattttagtttcttttatattttattaagaaataagtaactaaactttaaatcaaacaaaatttatatattgaccagatttttgttacttattcgaataggtattttattttgattataattacaatttaattttatagtatgtattttattgtttaggatatatttacgttactttttatttatttaacgatttaagaaattaaaaaataatttattaacaaaattagtatagacattttttttggtaatgtaactcacattttaggacatttaagataccactttgtttcttaaatatgtatatttaaataatttattaagaaaattagtatagatatttttttatgtaatgtaacttattttatgatatttaagataccattttgtttcttaaatatg

SEQ ID NO: 245158 - DNA, 955 bp, Cannabis indica
aaactcaaaccttgctcaaacactacaccaagcatcaattctaacttataaatcagctcaataaattaatttaacttgagaatacccaaacaattctaaacaatacctacaacaaccctaaactcaaattcatgcagaaaacccaactccaaacataaaaattcaaggagaagggaataaagaggcttaccttgagttgaatccctaaagttccaatagaattatcggcttaagcttagaaaaacttgagaatacaaaattcagtagcgttgggcaaaatcatagtttaaacctagtaactcaatattaaatccaatttgtacatcataaaaaaattattttaaaatgggatattggtggcaaaactacctgaattttatatttttaacacttaacaacaaaagaaaaaattttgacaacaaaacctactgaactcccattctatttttctcttcatacttttgtaaaaaatctcagttgagtgtacacgtagcaaatttttagtggtctacataatattaatttttaaaaataattataaaatatagtttaaaaattatataaaaaaagatattttattttattttttcttttttcctgaaaccctaatttgataacgtatcttccttctccttcttcaactccattgtcactaccaccacagtcactaccactaaagctactactaaaaccaccaccacaaatcacaaaaaaaaatattaccacaaataacaacaaccaccacaactttaacctaaatccaaaattataaacgaaattaggacccagaagtgctcaattgggatctaaaacttttcaactatggggaaacaaaattgagctttgattggctcaatgggacccagagatggctcaataggagttgtggtgcttcgactccaacgaagtcaaccacgaagggagaaaatagaaaagacggagagagatagagaga

SEQ ID NO: 245159 - DNA, 1207 bp, Cannabis indica
acatgttacaccatgatcagcaggatctctgaacaactatcaatcttgcctttgatgagcaaagacatcaatttatagaatggagggatcgggagatggaattcatgagagcgcaataggtagccattcaaaacccttccaagcaggccaccgtgctgatcagaagagcctaccaaattaccagtcaataaccaataactcactccaacatccccttgggatcctagagtgggtcagaagagtatgtagctgaccatactgcacaaacttataatggacaaccgtccaatccaaggccacaggttaaaactgtgggcgaaatggtagacggtcaaatcctaccaaattgcccgttgggagcaagtacttagctaaacaatcatattcaaatacaggtatcggatcaacctcttaaccaaactggccagacccaaagacctcttggtacattagtgttcgatcgattaggtaccgtacatgacctctaaaatgatttgaatcggagaaggggactggacgggcaaaacattctaccagctgtctagccaaataactatgcccaagatccagttcaaagagatcttaatgtgacacaggtcagtcaacttcctggccaagttcatccactagtgcaagcacgaataaatcaacttaagagcctcgtacaaggctcgaccggcccaaaactcacagatcttgaactcgacttggtaagaggatcacccttctcacctgaaatcaatgctcttgatcaactcaaaaagtttaaaataccagtatggaagatgtacacaggaaaagaagattctttatctcatttgaaatactttgagatgcaaatggatctgcaaggggtaagaggtaatgtacggtgaaatttttttctagccacactagcagaggccgcacaacaatggtatttcaagctacctccaagaaagttcaattcatggatttctttctcatctgaattccatgcacaattttcctcctctcattagcttccctcatacctagaagacctggtagaagtgaagcaaatacaggagaacctctaagggcttacattaacaggtgttatagtgagatttctctcacctagaaactcgagaccagacccatatttagaggacacgtatactcagatttcccaaagaaagctgagatgtccttgagggactcctcgaagttttaaacctcgcttaag

SEQ ID NO: 245160 - DNA, 659 bp, Cannabis indica
aacaataactatcaagagaattttttatggcagtggctaaacgtaaattagcacgacaaaggaccaaactgtaaaaatcattaaaaatcattcataacaaaaacaaatacattaagtttaacaattgtgcattagagcataatactaaaaattgatgtaaatatatcacaaatcaatttttataattgcagaataacataatacaaaaaattatttataaaaataataaaaattattcataaaaaaaaggaaaaaaaaatagaaaaaagatgatttataaagaaaatgaaaagatcatttatataacaaaaattaaaatcattcataaaaaaataaataaatagaagatataaaaaatgattgataaaataacaaaaaaaaaaaggaaggcacaaagaacaaaaataagtcttttatttttattttttagtgaacatgctttttctattgatgttatagatagtagcatacgaaacacaaaaatttattttgtgtggaaacaaacttttgtctcctaattgttatgcccggatcacagtaaaaatataataactaatttttttagtattttatgtaaaaactctaaaaaaaattaaaatttcaaagaattccattactttcacaaactgtatagactatagttatgaaaaaagaaaaaa

SEQ ID NO: 245161 - DNA, 1557 bp, Cannabis indica
ctctgctcgaagtgtgcacgacaatttagcaaccacgacatccctaggataaaacatcatatgtacaaattgttatgcaccgaacaatatcgctctattacactccaataaaattgctttgagaaattcaatatatgtttttgaagagaagaaattttctgtgttgaagagatgcaatctttcaaaacggaaagacttgttaataacgttagtagcagaattagaaaaattatcggtagcagccatagcagaacacaccattttaaaattattattccgaaattaaaaaaataaaactaaaatgaatcgtcggatgaagattctggttgagttgtggactatgtcgcgtttttttaagacgtttcggagctctgcttaaagtgtgcacggcagtctagcaaccacgacatctccagaataaaacaacctttgtacgaatcgttgaagaccgaacaatatcgctctattactccccaatacaattgctctgagaaattcaatagcaatttttgaagaaaataaatttttctgtattgaagagatgtattcttttgttgctctgatacgacttatataaagaagtcgatctaaaataaaaatataatgtgatcgtacaaaatattggttcatggcagaaaaaaattgatcattaattgattgcttttattgatttatataatgttataaaaaataataaataaataaataaataatttttatttttaataaaaaataaaataacacctcatccgtccgttcgcatggtaatttagtgtatgagtctccactgatacgcacaaaattaagtaatgcttagggccaacactaaatctcaagattacactttttatatacctataaataaatatgttaattaggatttttgcccctaaactttaacatgtaccaaatcatgtcccaaaacttttctggcagttaaaaatttctcctgaactattaagattgttagatttaaacacttttgtctaatttcattcaattttactattttagtgattgtttatgtactaaatcttgctccctagattttgaaatctaccaaatcacgttccttgaacttttacatgtactaaatcatgtcccctgaaccttcatccagactttttttactaaaattgaataaaagtctttaaatctaacaatctcaatagttcagaagatatttttaacgacaatacaaattcagaagacataatttgatacatataaaaattcgggggataaaaatcttaattagccaaataaatattcctatctcatgttaaactcaaatgcaatatatattattttttgtttggtgaatcaatggaagataggttgtgctctagtgttttgggtaatattattattattattattattatttttgtaaagagtgggaatattattatttatgatgtaggaacaaggcatggggtggtttggtttgtaacgagaaggcgcgtgggaaacgtaggagagcgtatgctacaactgcctaaacttcagctctgtctccgaatggaacactcggtcacacacggcgccacgtcggca

SEQ ID NO: 245162 - DNA, 833 bp, Cannabis indica
gttgaaatggaacccattaacgactctgattagcttgatcagattgtagctcatgcaatagaaatttctcaacctattctcatcgattggtacttccgttttgtcttccttcactctgataattatgcacgtcacctgtttgatgatttgtaaaaagaatctatgacatttttaggtacatggatttatttgaaaatgtcacttttaggtacatttatatttggacagagcgcaatcaggttgttcatggtggtaaggtcaaacctgcaattagccttgctagttttgcatctcgatatcttggaaactagtctgctgctcgacagaaagaactgcctcccccgactcctgctgctgctacagcaccagcaactcataggcaggttccatggattccacccatgtcaggttcctataagctcaatgtagatgcagcgttaaatgccggtagtaatattattggtgtgggagcaattgtaagagctgctgggaatgttgttgctgctctttctaaaccaattgttgggaattttgcttctcatgaaatggaagctaaagcattatttcatggtctcaattgggtactgcagatgcaacttcctattgattacattgagacagatgctttaatggtgtccaatgctatccataatccgccagtggcttttactggttttgatgatttaattttagatgttactagtcttttgtcctttttccctagagctgttgttgctcatgtcaagcgtggtgctaatatggctgcccacggtttggctaagtttgctctagagttggatgaagattgtgtttggttggagtcatgtcctcca

SEQ ID NO: 245163 - DNA, 1983 bp, Cannabis indica
ttttttatgtctggcgggtcccgttgcgagttactcaaagcttattttcataactcccttgggggtgaattttggcgatgatagctttaaaatttagactaatgtgtaagacatgacttgatagagggcttaaagagcttcaaaatgttagttgaatcgtatcaatcgaatgaaacttgagtgagttataaccgttttaattaaggcagttcaagttccagtgcccaggttgacatctcacatcaacctggacgctgtaaaagtgtagaaacgtccaagggaagtccttgagatgcttaagtgatggtttgacatcccttagtcattttatatgtttttgtgaagctcgtcacacattctcagagatgttgctattttgtagaaacggaagactcgaaacttctaacttccgtatgagccaaaattaaagttgtgaatttggttgatttgacttcatggataatttttgttgacctcaaaaagtgatcaaccgatagcggagttgtatagatctgatgcttgccacgtgttgcacaaataagaatgaaaaataataaacacacagaattgttatagaggtttggcccccttgtgatagcaggtaataacctactcccctcttagctgtattaataccaggggaaatactatccagattgctatagatgggatctgatatagcaccctaaaggctacaaagtatgaatcgagattaggaagtctcaagtgtaaagaatgcttgtatgggcatgtgagagatgaagtagacaagagaagatttattcatacttaggctttctaagttagagttaaggactttatataggaggcctaaaccctagattacaacttaaaaccttagttatttgtatatttaataagttaattataaaagaccaaaatgcctttgaacctagatattattcagctattctgttgggcttttagagcccaatgtgcagctcaagagttattgtccacgtgtagaagtgcacaaagaatcctacagaacccttcctggttagccaagcacctgtagggagtaggctgactggccatggcattgtctagaggctggccggccatggggccgacaggggtggccagccagcttctatgaggaagctgttcttacgttcgatgcccgtttgagtgccagggtctctatttctcaagtactgacttggttttcttactggtgagttgtattgccacgtggcactaattctatccatgtaagcactgccatgtcaggaggacaaaaattgggataatatttgcctcccaagtccttgtgcgtacgtctatacagatagggactttcctgctatgttggtgcagttggggttgcagtagcctttattgaaaaaaagttgttgtgctcttagtcttttgaaacattttaccttgactatttgatctcatttgttgtagaaagataactgcttcagttgtttctttgttgtgtagttgaagtaagtgaagaaagggtcccacatgcattacataagtgccttttggagggaaaacctttgacttctcactttttttttcttttcactttatctcactagaaatttgcattagaaaaagctcctccttctctctagaggtccgaaccaaccaagcatcatctttcagggatttttgagtcgtttcgacgatttgggcttcccaccttcttcctcaacgacatcttgaagtggataagctttctattttagctattttacttgatttggttgatttggccatggatgcaggaacattattccttactttcaacatgctttaattcttacattagattgttatcctttcgatattttaatctgcatgatggccttaggatacataatatgtgatttctagacgaaaaagatctgaatttgacatttgctgtgattcttggcactttgagtcacgaagaacatgtttgagttcttgaaaaaacaccagtttctgatccatgcagatcctggg

SEQ ID NO: 245164 - DNA, 894 bp, Cannabis indica
taactcttggaatataactccttctgtgatgccaaaggcagaaggtacatgctaattgtgcatagtctgaggtggcacctttctgtgattgcaacgtaccaggaatctaagaaccggataacatttacccccaagctttcaggactcacgcgtgttgggagcttacagcttccttctagaagcttgattttctaccctaacatgccagtcatgtgttgagatgcggaaggtgttttctgtattactttgggtaattggagggttgatattttttgtgatatttctatcattttgctaaaacatgttgtccatttggtggatccatgaagcttacacgttatgctcaagcgcatttcttgtgggaagtgaatgatgactggacttaaaaagacgacaaatgatggtatgttggggaggttaacatgaaatgatgagtaataaacgctccattctctctcctcaatcaaattaaatgcaaaacccttcgagtcctcaactgtcggatggagtaatttattttatcgataaaattaggaccatctattacaaaatgctccaaaccgttgccactcatataaataggagacttggtgaatgctcactttttctttctcaccttaaacaatgatccttaacccagagaatttccttagacgaaacctttgacccagaaaaaaccttcgccttcacacacttatctaagccaaaaacctcatctccttttctcgaccttactgtcgcctctcccaatgcttaaaatccacccaaacggtgagttctctattggagcaggatgtgactagatcgttgagcaacctgtgggattttgaactactacaagctcacaactacatgccatatctccatcccctcttgtactcaacaattgtattt

SEQ ID NO: 245165 - DNA, 1026 bp, Cannabis indica
aaagaatttcagaaaaagttggtcctctcataatgcaatctcaactatacttcatattgaattaattatctcggttgagtttaggtaagaagttggtgatctattatatcaacttccgtagacaaaatttatagttcaatatttattatttattaattgcactgcaccaatatttatagccctttaatgaaatgaaaagtcgagacaacgagtcaataaaagtattatttttggtaaaattactatacttttatatattatagttttttttttttaatatctttacgatattttataaatataataaaaaaataataggagtacaatgtaaaaacattaatggattattatattttctgtaaataatattttataaactgtaaaaatatttaaaatttcatataatcatatttttatatttttaatatatttctgaaataattctgtttttctcttcttcattaaaattcattccataaatcatttttatgcttcgtttttttgctacaaaaaataaataaacaataagtgcttctccaacagaagataatattacacaacacaaggtttatatttttaagcaactttttcaggatttgttgttctctgtttcaatttataagtaatcattcttgcaatcttgtagaaccaaaaggcgctcaccagctgtagtcctacggccatgacctggaccaatgtacacaccaatatcagacgtttggttactaacttgtaacttttattaatatcaaaagtgtctctcattaaatatataagaatatttgaattttctttacaaaaaaaaaaaaaaaaagaatatttgaatttgtccatgacgtcaacatattgttacctacttttttttttaggcgggtcctaaattttagtgagtcacgacaaaaaaaaattaagtttttatttagaaaaaaaaatatattatttttaatatacatgtgtgttaacatgcatatgaaatttttttgatgcacaccttaaaagggaaatttgattttctatacttagaaa

SEQ ID NO: 245166 - DNA, 1188 bp, Cannabis indica
gtaagttttctcttttttcaacattttaacaaaaacccatctgaaaaatcacactatttttccccattatgatatttgatcactaaaagatttcatttttttccatataaatttctcttatgcaacattttaacaaaaacccatctgggaaatcacactatttttccccattatgatatttgatcacaaaaagacaccatttttttttcatataactttctctttttcaacattttaacaaaaacccatctgagaaatcacacatttttttcctatacaagtttctctttttcaacattataacaaaaccccatctgtaaaatcacactatttctccccattatgatagttaatgacataaagatttgatttttatttcagtgtttttgttacccaccaagtcaagattcagtgattcaagtcagcaaacaatcctacaacagctgcaaccttaaagatccaattttgtacatggacaatggaaattctttgtttaacataacttcagaaggagaatacttcttcacaagtggaaagccaggtcattgtgaaaagaagcaaaagctttacattttggttgggaatggcactgccacagcattctctccctcttatggtccttctgcatcagactctgctgcaccttcatatcaaacagcctttggcaccatcccagctccaccttcttcatcatcttcattgagtttttcactttccatggctgtttgtattggatttttggtactttgcaatatttggtaaaaccatatgaaaacaacaccccttatatttctgttttggtaattttgatattgatattggtttatgtgagattattggttttgtaattctttattggggataaaaaggaaagattttgtatttgtattgagaaagattgaagcttgaattgagttttacaaagttgttgtataaagttttggaaatttatgtattaaacccttatacttaaagggttgttatgtagattttctatcatttttaatctaattaatttttttttatctatcgcataacttcttgtagttatttaagattatttataaattttaaaaaaattttaaataatttataatgccgtaaaaataattacgtttaatattataaattaatttattaaaatctatatgtaattaaataattatagcgtactataattattaaaat

SEQ ID NO: 245167 - DNA, 1344 bp, Cannabis indica
cactacatctcggctactgctgctgatgctgctactggcatagcttcttcttcccttagtttttgggtacatctccaattgtgggtagtaagtaggttttgttgatacatttgcagactattttaggatcattttctaactctaataacacatgaagtttgccccatcccttattttatgtttcacttctatttttttcttttcttgactttgattgtacatattgtattgcattgctcatgactcaagtctgagtattcgtttcgttttttgtttttgtgtactaagaagctctctcatttattatgttagattttactcaaccatgttctttacaactttaagctaagacagatttatttgattatgaatttatgaattaagataataacaatataattaattttctggttggtgagtaactagctatcgcaatctccaacagtattctttaacatcaaataattttcacacatttttggtatgattttaacatcaaatggctgttttgtactcattacacttgaaagagaatattctaaagaacattctttctcaatttatgtgaaaaatatatccattattaaagaattgctcaaatatatgtgtaactgtaagttgtggttgttatttttgaattattttaataagttgtgccatatggagttcaattatttccctttcaaaaaagaaaaaaaaagagtgtaattattttaagttagtccctaatgtgatgctaaaatttttattttaatattaattaaaacatttggtttcaaacaattatacatagaaccttttaatttgtaaattcctaaaaaggaaaagtttgaagaatatttttttatatccattaattaaaaatattttcatattatattttattaaaatatactcatttttttttttaagtgaattgcataatatactttcacttcctatttaagtttagtacatattttacattaacttaagaggtataatgaggatactatctataaaagtgatatattttaaataatataaaaataaagataaaaattaaaataaaatagacatacgatgcaattttctcaaaaaaatagcactctcaactagagttgtacatatgggcggtcaggtccggcccaacttataattttaaaaagtctgcttcaaatataaaggtccagcctgacttatatgtacaatatgattatgtcgtgatgtgcccatattttttaggagaaaattatattatatacccactttactttatttgttttaattttttactttcattttcatattctttaagatatacttacttttattgatgatgtctccattagaccccttaggtta

SEQ ID NO: 245168 - DNA, 529 bp, Cannabis indica
aagatcaaatagaagttcatcatcacatctaacaccaacagattcaagtcaagaacaccaccgaattcaacactgccgacaaaactagaaaatccatcattgcaatcaattgttgtcaagaacaaagattcatcggccaaataccaagaagaataggttccaagacaagtttagggtagcagcactaggattttcttgcacctctatcttctattcttagtgttctccaagatgaatgtaccaaatctatcttctattcttagtgtacattttatcttaagggagcatatattaagagttagagtctaggcgttagttagttattttgttattccaattcttattgtaataactaggtagttcgttacatttagatattgctttgttggtataatacataggggtgtgcatataaatatataaatactacattaattggatcagatcggatattggatacggtgtctaaaaatctaatacatctatcatccaatcaaatttcttactattttcatttagtttgaatgag

SEQ ID NO: 245169 - DNA, 1161 bp, Cannabis indica
agatcacttcaagaagccatccctacaaagaatagattgccctttgtaatggataagggttgttgcctatgtggagcccatgaagaaagtagccttcatctgtttagagactgtagctattccaaagccatatggtttgctagatgctttcctatacagatagagaaaataccagagaattccatgattctttttatggaaaactaaatccttaatagctagtatacaaatagaaaggatctcatcttatttgtaggctgtctctttactaaaatttgatactagaggaaccttcttagcttaaaaggaatttgtacaaacccatctcgagctgcagcaaatattgcagcaccctatactgagttctcaaaagtattggaattaaattctcctttgccttctcctcacggattggtgcttagtgacataatgatttatccttctatccaagaaaggaagaagtaaataatgtttttatttactaatgcatcttggatcaatggagaggctaggattgctgttataggtattgacagagatgttggctggtgggcattcaattcctagaagatcattgcggtttctgctcttgaagctgagctaaagaaattctgatggatcctacacgggctaatgagatggattggaggtgcattcacattctcttggattcgaaggttttagtccatgctttgtctgcgaacagaggtctcccagattggaaagtttttaatttccttatggcaatagtgaatttaattaagaagttttcggttcgtaagctcttttatattaatcgtagttttaactctttcacgaatggtatagctatgtgtgctagagttgttagccaaccagctattttatgtcaaggggagagatattctcctatgattctcttcaatatttcttagttaatgaactcgacgttctttcaaaaaaaaaggttatcacttttacaaggtaatgagtgtgagatttggaaacaaagtaccatatataaaataaatagactattctttttattgtcaattatttttgaaataaaactcatgcatcttaatcccgaattctaacacaaatatatttccttttattatagtaaaaaaaataaaaaaaaaattaaaatagtaagaagtttgagaattaattagggtggat

SEQ ID NO: 245170 - DNA, 957 bp, Cannabis indica
actataacaaaaatggagaatactctgttagaagcgaataccgattagctgttcacttacaagaaaaagagcctatgaaaaaaaggtcgaaattcatggggaaactcaaaatacccccaaaggtaaaactaactatgttatatccaaaaggggtatgaacttggcacccaattgtggaaactgttgaggtggtaacatggaaaatattcaccatgctttatgggattgtgaaactcacaaggaggtgtggaagagatgtgggctatgggagaacatttaggtacataaacaatctaatattcaatatcctttctccaacagttagctcaaagctagaagcatgaggactttgagttgttttttatcactacatggcatttatggtcgattagaaactatacaaaacatgggggagaagctccccattcaatctacatgccatgatgaagatggactactacatcatatatgaagtttaggggttcatagtcgagtgggtgggttgtcctttgtatttcttgaggctaatattgtagcgcataatttaaccaattatgctttgtcttttaaagttagtgccatttgaattgggattattcccccttgtattaatcaagccatatgagacttgattatcctaatcatgtgtaatttgttctgttaaatgaaggatttccatttcaaaataaaaagataaaataataataataaaaaatctaccctatattttaggtaaaaagtcaaatataatagcaataaataaattattaccatgattcacaccatgttataaacttgtacaccccattagttcaagcaatcaattaatttagaaataatattgtattagtattatgttttatatcatcccaagatgaacagaactggtctcagagccacactactacaactcccactctatacatacataaatataatagaataaaataacaataa

SEQ ID NO: 245171 - DNA, 2887 bp, Cannabis indica
aatcacgtaatacgcctatgctagttagggtgttatagacctcattccctaccgcagagacctcattccctttctcatgagacttggcagcctcgatggtaagctggctcgaggatttctttttgttggccgtgattttagtccttttggattccttggcagaacttgaggcctcaccagcttggacaattctcttcttagatttcttgtcagctgggggaggactcttgaagatgttctccaaatccacatccatatctgtgaggcaagagaaactcattagcacttaaacaaaataaataagagaaaatgggaaagaactcccaacttaagaaagttaccataatcttcagaggatgacgagggaggactataatattcactaaactccctagatcttgtgattataaagatatcataagggtttagtggatctaaatcccagcttgaatctatgtgactcgatctatccaacatggtctcgtactgctcgacaatcccatagaatgagctggtgcagctaatttggacatgaaactctgggtaccaactatcaaacctatgagttatgcgatttatgaggagagggttccaagtgtaaaaattataccgactatctcggaaggatactaaggtattacattctgccctaagcactgtgggtgacaatctacattgattacctcgggatgctccttcttcccgaggggcaactctctcgagatagtgtgcgcgagccacgaagtcctcactttcctcttcgtctgggaccgagaccttttgccacgaagtgtacttgggaattttgtaatcacaagtatatttttctgaggaaagaaggccgacgttcatcagattcttctcatttaataagaaatctatagctcgcaacccatatggcaaactaagtaggatcctgtgacgctcaacaatctcaagagcagggactgatctccgaggaacctctgcaaacagataaaagttcaataaccgactttaaagatacaagttaatattcttatggttaaagtttacaagaaagagaacttacgtataatgcgaaaggtcgatgtatctattggagagaggcccgttgtcgagaagaaatcttctttaaaatctatcttgtttggcagcctaattatgatcttgcgatcaccagtgtaagtcccaagatagtagaagtctcctacatcattcttcctcattgggactgctttgactaagtaaaagcaggctatctccaaaggagtagggcactcccatcctaagatgtgatataagaccttcaggctcgcaaggatcctatacaaaatggggttcagctggaatggggcaaccccgaggtagttgcagtacgtactccttaaagtaatcccttaggggaaaggaccacccaagccttgatatgttcaaggctccaggctccaacgcccgaggaattactcgtgctaggcccactcctcacgtattatcctttctaggggataatagctgaattccccaggtgccacagactttatgacacaacccttcctctgcttgataccacaggatttttaagataccgccaacataggccccaatcgacctaactttggattcgataatctcggcctcaaaagtaacactgggatcttgtgaggtctttgatttgcgaggcttaagagacatgatttcaaactcaaggtcacctgtttcaaaagcaacagtgacttcgtgtaaaaacattagtctcacgagtggaataaaagttaatagcgtgggttcaggccaggctgcgtctcgcaaaaaacgatgcttgccctcagaaatctcttgcaggaatcgcctatagcgactagcagtttcttcttggtttgacttaatcagatagtctctaattctggcatcattcacttctaatttggaccgaggttggaaatttctgggtttatatggggaggctaagtgtttaggatattttgatttcaaaattccgaagaataaacttttgaaccagattgggacatttctacaaaaaagaacaatccaattttctggttgaaatttattaaactagaggcttaaagtatatgaaaaacctaaatcgtgcctaaaccctaaaatttacccagaaattgtgactcgaattgttaaaccaaatggaatgacaaagtgcaagataatcataacccagaaagataaacaaaaaaaaaagagtggatgagacacttactatgtgaagttgagtagtcaggtgttgggaaattctgcaaatgaagatgtgatgagtcttttgaacacttggagtcgaagtgcaagtctgagtaaattcacaggaagaatgtcaaagataaagagggcatgcatggtttcaggaagctcaaatgaaaattttcagaaagcttgagtttttgaaaaagacgaaaaatagtggaaaaatggattcttgccattttatactctgaatttagtaactatcagatcggaatatagaagatccaatggataaaaatggaagataagtggaaaagatggttcattaatgctattgatgtgcattggaaccataaaaccgccaaaattaaaggcatgcatttttttcaaaataggttatgaaaaaataccctctgtaatcatttaaaaagcaccttttattaaaaaaatactttttaaggggctaattgttatacctgaaattcggctggtacttcagaaggtgacacatgtccatctcagggaatatgaaccaataaatataatggcaattatattaataaatattaaatagaataactctttaaatgcagaagttaatagggtatatttataactcgcaaattgcacatttcttatcgagacaaggatgtacgaactattgactcacgtattaacgagaaaccat

SEQ ID NO: 245172 - DNA, 787 bp, Cannabis indica
gacatggtttggttcatttataaaaccataaagcatatgtcctctattaattgtagagaccataattcttcactgagtgcaattattccaatcaagctttaaggaaaaagattaagttagagtgccaccaaaatgtgcatttgagaagataggtctgggtgagtttcctaaaaaaactctttgttgtacaatagtattcacaacattcctatccagaggagtttgtaatggtactgagtgatttcctataggtttcctgtcttcatctctgcttggtgtctgaccatgagtcaacatctttcttttggtgtaggcctacaactcagataccaagtaagaaatattagtattattgctatagaaaatgaaaatcagtacaaagggtaccgagatatctctttctatttctagtagggaaataagtatcaatacacataagaatattcaaaaaaaaaagaatctttagggggtgactcatccattagaatattacacctgaccaaaaaagaaaatataaaataagaaaagtaataaactaggtgtaaataatatcaattatgctattataacagagcaacatgattaagagcttcagagtttattaaaaaaaaaggccccactaataataatgtcttcaatataaatatcgcccatattgtaatgaaatgttaaaggatttgagcagagtctctactgaggacagtattgttggtagcacctctattggtaatactgttggaatttattttaccaggatcttaaatctactcacaagtatgttgtttaa

SEQ ID NO: 245173 - DNA, 1653 bp, Cannabis indica
caagcagagtcgtaagctgcattctgaatctgtcgtttggtataatagtgtatagaaatgcacatctgttgatggtattattttgtcaagttatctaacttcgtccatgtttaggtgccctttggcactttatattctgatgtagtcgtacatggcaataggctttcttattttacaagtaaaaggaaagaggaagtaggaatctttaactggtgcttctttgatgctcggatttctttctttttattttcattgatatattatgatgaaacggttgcataattcacctccttatttgtatagcatgtaactacagtctcatagtgtttgttttgctaatttccagatctttgatgcacaagcgtttgacactttgacatttgcatttccaccttatgagttatgagtcatgagaagtggttatcttgtatttcgtttgtcatgatatagcaaacaatctctgaaaatcaactctttgacatacattgacttgagtatgttattatattattgctcttcttgttacttttttatatgggtcctggtgaaatgtctcctttttgccatactatcatgaatcttagttgacacatttaacagataacggaattgcaaaagcactcaagagaatcgcctggctaccttttattatataattttagcttttagctcattttatttaaatagcttttatgctagttcatagtttgagttggtgtgtttttcattcagttgaagtcctttgctggtaataactgataattcttgttatagtttgagttggtgtgtttttctttcttctacactggctgtaatctaattctttattgctgcttgagcttatttgtttcttcaatctatgtaattcgatgcattaatacacgtgttacaaaatattatttggtgtataaaatgagtgtacctagaaaacaaaatttataagaaagtctcatgatagacaactgaaggtgacgacctgtgttaacaagaatcttgaattgttcttcttggtaatgcttttattttaaaccattaccttcctcacagtaataccttacactgaatgatgatgtgaactctatacataatctagtgaacataaaattaattgattataatatatttatacatagttacccttcaaagttattgaattaagacaattttcgcttaaactgtgtaaccaaaaatataaaaatattgttcacagctattgtgaaaagcttaattggctggtaacaattttaaatacaaaataaacacattttaaatgattgttatggtttctaataaactgatacagtgttctgtttaggcgagagtaaaatatatatatcattcattgaatagactagtcagccatctaaaatagacaccattctagcaaccttttattcggtcaagaatctggcgttgtgctgattaggcgagagtcaagataattctatcttatgagcttccaccattacttcatactttgtaagccctactcttagcagtcactattgtggtgatcgttactaaaaataaaagacttacaataatacttatctttcgaaattttacgtcgttaaattgctaatgaatgaacatctattagggatgaatctcattaaaacaagaactatgtaaaaccaacaatggagatggaat

SEQ ID NO: 245174 - DNA, 1721 bp, Cannabis indica
atctagtaggatttaactctcctttagaatacacaaggatgagatctctcgttctcttaagatgcttgagaatgtgctttacagctatccagtgttccaaacctggattcgattgataacgactagcaattcctacaacataacatatgttaggtcttgtacacaacattgcttacaaactgctgatgcataatggtactttctcatgtcctccatctcttgaggagtctttgggcattgatccttcatagagaaatttcatgtttggacggtaactgtccttttaaataattctccattgagaatctttctagcacattatcgatataagttgcttgagaaagtgctaatgttctcttttttctatctttatagattttaatgcgagaacatagcttgcttctcctaaatctttcatttggaatttattagctagccacttctttacgtctaataacctttctacatgattttcgataagtagaatgtcatcaacataaagaaccatgaataccattacattacttttaatgtacttgtatacatagacttcgtctttattttgttcgaagccatactctttaatagttttattaaatgatattctaagatttagaggtttactttaataaatagatttaagcaagttacaaaccttttgatcttcctcatcttgcacatacccttcaagttattccatataaatagttttgtcaagattgccattaagaaaagcagtcttgatgtccatttgccatatctcataatgataagtggcagttatagataaaaaaatgtgaataaatttaagcatagccaaaggagagaaggtttcatccttccgaaaatgtggataacatcgtcgattggggtcgtcatcgattcagatctgttagtcttattggtgagggtccgcataggtgcagctactggcgctaatggcaaaaagaggtagactacccagaccttgggtctccggtctagcatgtaaccccatcccgatcttcattgacaccatctccgatatgttgcgatatcaaactcaccacctccgatctactactatgatgccctcacaccaccttctacgatttgtatgaagaaaaagaagtgacaaatttttacaatttaagaaagtagtagattgaatttatacttgtgctgggtttgattattacaatttttagatttggaatattatatttgatgatgtttgtggttattttgattttggttggttatttgattttgggtttggatttcataacatgaggtatttaattttggtctgacatcttctttgttttggtgcagtgagtgtagtggcgaaagataatggtggtggtgatattggcaaagaagaaggaaaagagaggaagaactattgggatttttttctatcacattttgtaattttttacattattctttgtttgtttgtttgttttttttttttttaattttgtaatttttttacattttataattattttttaaaatatttaaatagttaatattatgtgaacctataaaatttaaagtgatatttgaatagttttgacgtagaaaaaataattttttgtgattaagtcagataaatttaaagtgatatggttacattttttcttttacctgtaataataggtggacattcttttttataattaattaattataattaattattttcttaaactaattaattaaatatttaacaagac

SEQ ID NO: 245175 - DNA, 495 bp, Cannabis indica
gattgaggattgggcagattgaggttgttgaatcggatgcgttctctcggcaaacaggtaattaatttctaggttttcttctactttgaataaaaagttcgatatttacttttggatctgtttgaatggatcgtttaaggaatggaagagaagatcgaatgaaagagatagatctggtgggaaagtaatttggagatgtgcaactctgagaatcgatatctgtatattttgtttcattctttgatattataatatgtgttgtgtatatgttagggaaaaccatttcaatatgtacaaatctaagtttgtaggaacaagaacatgaaacaatctattaattttttaggtttttttttcttggggtttttttttcttgtaatctggttttgaatatgttgagataatgaacagtagttttggatatgttgaggatgatgagtacagtgtataatatttttttttaattttatgtaaatgatattttttaaaaaaaaa

SEQ ID NO: 245176 - DNA, 968 bp, Cannabis indica
ctttcaaataccttaagaattttttgtaggcttcccaaggcaatgttataggagctttgagaaattgaatgagcttattcacaatgaatgcaagtttggtcaagcttagatattgtaaggcacctaaagtgcttctatacaatgtaggatcttcaaaaggctctctttcatttaagctcaattttgtggtggagctgctaggatttggacaatatttagcacctttcatgttaagtttgaccaaaagatcagtgatatactttgcttgagataggtacactgctattgaattcctaaaaatctcaactcctagaaagtagtgaacctctccaagatcctttagtgaaaaaagttgattcaagtcagcaataagttgagacatgaggtgttgatttggactagttactagtatgtcatcaacatacactagtaggacaattagattcaaccctgagccataaatgaatagtgatgtatctaccctagatgcttagaaaccccattgaaacagactattctttagcttttcattccaagctctaagagcctatttcaagcaataaatggccttatgtagcaaacaaacatgatctggatgttgagcatcttcaaatcctggtggttgttgcatgtacactacctcattcaagatgccattgagaaaagcattactcacatcaagttattttactatccaattatttgtaacagctatggaaagaacaattcttactgtagcaggtttgacaacaggggagaaagtttcttcatagtcaatacacgggatttgcaaataacctttagcaacaagccttgatttacacctgtcaagtgcccatctgcattaagtttgaccctaaaaatctacttgttactgatcacttgcatgtcaagtgatcttggtactaaggtctaggttttttccttctttagagccttgttttatgtatccatagatgcataccact

SEQ ID NO: 245177 - DNA, 2313 bp, Cannabis indica
attccgtcccaacacagcgaaaaacgcacctaaaatagatccaaaacataggctaaaaatagcctaacatggtgcaggtatgaggtggtttgggtgaaaatcagatggctcagctgcagtttcagagttaacccgatctgtacctgcaacaatagtagaggaaattctgccatagcagttaggagcaccagtattacaagtagcagcaggtaaatcagtgtctatcacaacattttgatcaatctcaagaggaaaattattgtgtttaaggacagtggggatagcagcactagaagacacaacagattgagtagtgtttgatgaggagggaatcactttagagtaaggaaaggagtgttcatcaaataaaacatctcgagagatgtacactcgacttgtagagtcaagacacttgtaacctttatgattcaagctatagcctaggaatgtgcaaggagaagacctaaactggagcttatgcttattatagggtctaatattgggataacaagtgcatccaaaggtccacaaggttgtgtaatctggctttgtattgaacaaaacttctaatggtgatttgtcatgaagcagaggtgagggaagtctgttataaagatagactcttgtctgaaaagcctcatcccaaaattttaagggcattgaggcttgagcaagcaaggcaagcccatgctcaacaatatgcctatgttttctctcaatgagaccattttgttggtgggttgttaaacaaggatgtctatgaatgactccaatttgttgtaaaggggctgtgaaagatctaaattctccaccccaatcagtttggagaactttgagctttttggaaagttgcaactcagcctcggccttgaactgtaaaaacatttttaaggcatcggatttagctttgagcatgtatatccaagtaaaacgagaatatgcatccacaaagctaatatagtaactatagccattataggacaaggtatgagagggtccccataaatcagctacaacaagttgaagaggttcactatagacagtttgagagaatttgggaaaaggaaacttatgtatattgccaagacaacaagcagaacaaaaagagacatttttattgattaaaggcagattacacaaggacaagactttggcaactgttctttcagagggatgcccaagcctattgtgccaaacatcaaaatcactaagtttgtctttattacaatgactacaaacagtattacattgaagtgtatgatttaggttggcattggcagtaggcacttgtgaagcttcgggtaagaagttgatttgagattggtcaaaagtatataggccattcttgtgcttccccgtcaaaagtgtatgatgattcaactcgtccttaacatagcacatgtcatgatgaaattggaaataaacattattatccaaagcaaatttagaaacactcaacaaatatttggtaatttcaggaacatgtagcaagttatttaagacaagaggtttattagtgtgctctgtcaaaaaacgagattgaccaatatgagtaatagacaaacctgatccgtctccaacatacatcctttctagaccatcataactggtgcaatttgtgagattgctcatatcgggtgtgcagtggttggttgctccggaatcggggtaccaattttcatcagatccttgagcagcagtggctaaatttgcttgagcattagcacttgaagatgatcccaattctgcagtaagattaggccctgctagacctgtaaatgacttgtcaaacctgtaaaaacaggtatgaacagtgtgtcccatcttcaagcatagttgacactgttgcttattattagaaggaataggaggtgatctaccagttctattaaaaggcatattaccacgaccatagaagttgctattaggaggtatgtgattagagaaacctggtggtggagccaaaggtgagttttggtggtaattcggtctgaggctgctcctattgaatgcattcccattgaatcgagggtgttgctgctgctgtctaaagttcctgtaagccacattagcttccattaaagctgtcatatccgattcttgaacagccatatgagcacttagatcaatttcagtgtccttctttttaattcttgactcagatgagaggattagggcttcaatctctgcaacagagtactcttcaattctagtgtttgaagatatgacaaaggtgtcatattcactaggtaagcccttgaatatggctgcaatatgatctctagcactaagcctttcaccaactgatgcaag

SEQ ID NO: 245178 - DNA, 940 bp, Cannabis indica
cgttggtatcatggccaaaatcactgtgaaattggaagaatttagaggtgtccctcatagtcatttcccttttcgtgggaggaggcttccgtatggaactatggactctatagccgcatagattatttcaggagttgctgttaggaaggtgaatcatgtaaatctcctttccttctcctgtgagtcttgtggcttgggagaattattaaatttcccccttttgccttttgcttggccagagttgttgctgccacacttgcctccattattttggcctttggagggctggccaacactaatcatgctgacaggtatgtgggacagacctgagggctatccaacactttgagtctgtccagcacctgttggtctcccattttaggcttgtttgatagcttcttcaagcttgacaaagccttctgcctgattaaggaatcaaccatgttttgagttgagtgtcgacgaatgtctttccataactcactcaaaggtattatgccactcatgatggtagtgtaccttccttcctctgtcagattcttgaccttggtggcatcgatcatgaatatttggagatagtctttcaaaggtcccccttgcttctgtttgacctccactaagtcttccaaccgatagggcatctattgggaagacgagaatatgtgtataactctatgtgacgagagttccgtgaatcgaaccttcagccagatgagtatatatataaatatatatttagtggatcttaaccttgaaacaattcaagaactttgacaaatatttgccttgaggctcgggcagagagtcgtgctgataacgtgataaaataatatagaataatataaaatagaataaagaaaaaaataagaaggaatttatgggtcgtctcatacctttcaattcgactttatccggcttctatacactagtaactaattgt

SEQ ID NO: 245179 - DNA, 710 bp, Cannabis indica
tattagaatatttctaatattggtataaaattatttaaattgatgttgctttatctcaccaactattcgttatcacaaatcaaaatgtaatatgagtgaatattctaaatatatggtcatactacgatttattaattaatttaatttcttaattgattgtcaaaatattctgacaattaattgtggtagagactttgatagaatgtctcaactatatatagggtcttggtttccgagcttacgatttactctgtgaaaacagtaaattcaactaaaaagagagtagagagagcttggaagcctgattacccacaccaataggttttctattcttttgtagatacaaagatagtgtgggattaaaactcaaagaatcaatgactgaaactatttcgatcatttattcatagtgcatacaggtttgattaattctgtattttatacatgatcatatatgcttcatatcatatatataaatatctagcagaatgggctactcctctcattgccaataggttttgagatagaaccccatgcatctattagccactttcattccaaattctaacatggtatcagagccaaagtaaactctaatgactattcgatagccaaaagagcctcttgtgatccgttgtgagcccaaagtacccccggtccaaaagataagtcataaaagagttgtttgtgatccgttgtgagcctaaagt

SEQ ID NO: 245180 - DNA, 1358 bp, Cannabis indica
ttatataaataaaatctaaaaaattattaaaatattcaaaactgtatttttgtaatttttttttttgttaactttgtgttttttttttaaaaaaaattatccctatataaaaattaaaataaaaataataaaaatcctaaaacctacatatttaacattctagtttggaaataaatcaattatcaaacattcaaaagacaacgattagtgaatggatttgctggctcattatctgaattaatatatagtggaataatttggcatatcctgcacatcgccatactaactctaaatccattaaaaatgacacaatatctagatttacccaaaaaagggagaaagaaaaaacatgctcactaaaaataggatgaaggagaaatcaacctcgaaagatgaggtaaataattataataatattaatgcgatgaggaatccatgatgaatttaaatctagctagtattttattttaagtgatcccgatcacacaagaaagtttctcatataatatcatatacaagaaccgttgacacaactcaagcacattctttcctatgtacatatagtttttatataaattcatgtaccaagtgcccatcaataatacatatttaatactattaattaacttcattgcctgcctacatggtcactctatattttatagtggcaatgttatctaaatatagcaaaacatgttagggatttctttagcaaaaaaataaataaaatattaaagatttctttacgacactaaaccagtatgcttgcatgtggccaccaaacgcattctcaactaaagaactgataatttttggcactataggatttatatacattaacaactaatatatatagttgtcatgtaaaagtgtcaccaaatatgccaaaaaaaatttccagccaatatgctgcggaagcttgattataaacacatgatcccatgaaaactacatatatataattgaatatatatatatatatatatatatatatatatttctatattgcaacatgtttgatcttcacatttatttagcttctttcattgtcaacctctaattaaatatagacttcctcaaaggtaggctgatttattcacatgcttaatcttagaatattaggttatttttatttttatttaatctataaggtgtatacgtactattcgcggtaagccttaaaaaaaaaaaaactaattagcttagattaagcggattccattcctttttttttcgttttactattgctatttatttttgtggcatgacatgttaatggcgtacatatatgttacgtaagcgatatatactgaatatatatcagtgtggaagtgttaatttctttcaatttttttttt

SEQ ID NO: 245181 - DNA, 729 bp, Cannabis indica
tcttggaaggctagctgttccccggatagaagcttcacgaaagcattttctcatccttctaattaataacacgactcgcttagttcaggaatgtgttccacattcggagagtaactttgtaagtgctaacgtggagatcttaattgtaggagtttgttaaggcataacaaacttaactgaaatcaattacaaactatcgacttaagaatctcatcttcagcacctagatatactctcatgaacacgaagaacaatacacaaagaagagaaatggtactcttcagtagagcaagaattctcctcaagttatagagagaagctcaagagtgttagagagatagagaggaaagaaagagagttattttttgtgttctctgcaagagaatgaggaaaaacaatttgaatagagagagtttatagagattatttgtcaaagaatgtgatataaaatctcaacacctttgtaattattcaagtttggatatagtggaaagagctaaactttcagaggatagctcccaaaaattagagtgatgaaccttactaaaaacttctgtgtttgatatttcattctaattccgcattattttgttttgaattgtaaaatgagttgtgaggggaatttaacaaaatatcaaaatatattcctctattttatataaagatgacaatattatcctctacatgtttagcaacaagaaacatgcaacatgtcatctcttacatttt

SEQ ID NO: 245182 - DNA, 1727 bp, Cannabis indica
tttttttttttgtatttaagcgtttatatattacaaccacatgttttacttgggactcgaacctaggacctccaacacacacacactcacctatggtcacttgagctagcctcaagtggttcacccttaacttattagttgattgtaatattattatgctacactcaaaaaaaaaaaattctacataatatataacactaaggctggtgaaggagggatgagagaaaaagaaagaaaacatggattcaaaactcttaacttatcagttgatattataataccattacgctacactaaaataaaatcaacataatattactgtacatatcttattgtattttaaaatactatatatataaataatatattaggatccaatatacccaaatcaaaatttaattctatttccaacataaaaaattattgtaaattttaaaaaattaatcacatattaaaaaaaaaaaatattagatataatcatgcaaaagacatgtacatgcacccccctacgatatttatatatacattataatttataactttacgttgacacgattgtttatgaaattcaagaaccaggaacgcatgctacctactttaaatttttttttttttttgaaactgctttatcctacaaactcatgatcacaaattaatttgtttttcgatcgtataaataaataaataaatagattattacatatatttcttgtttggtgcttttagttttatgtgatatgacagtccgaattcagacttattaaatggtgttattacaaaagcaatatataatacgactaataaagtaagacccactttcagtgggagatatataaatatatgttattatgtttatgtgtgtgaatgaaataaaggccacagatccatccaaaccaccaactgcatgatttgacgtttcagattctgtactctcagccccatcccccaccacactatttctctctctaatttcattatgatctctcactctatttttttatgttaagttttccttctctttcttttttttctgtatttatgtatgtgttttttgtgcaagtattatgattccattacagataagtgataccaaaaaccctcaaataattgtacaaacccaccatatacatttgaatattacatgcattttctatatatatatataattctacacatcatattcaagtacatgcatagcaaaatgatcataattatttgtgtatatatataatcattacgtgttttctactttattaataatattattatgtttttgtggttccttgaggagttattaattatcatattaattatagtgagaaggtaccaacgtacgtatacatgaaatgtgttaaattaattactgagtgacaagagtacactaatattaataagttaagagcattgctataaggcactataagtgcctaacaccttctcgacatgtcacgttgcgattggttagcgattatatgggactcgatatttagttagaccaataacgatactcacacataagagggtgctaagcaccactggtgccctttagcatttctcttaagttaattattgtttagtacgtaactattaaattcaagttataggatagtaatttttgcttaataagcgtgtaatcgagccaagaaaaaaaaacatataaccaccaaagtatgggattttttattcgaattttcctaaaagtactagccataataataataataata

SEQ ID NO: 245183 - DNA, 500 bp, Cannabis indica
tctttccccttttattttattttgctccattttgcttacccaggcaacatttctcttcattttgcttacttaataatcaaatacctatttttcttgtaatataatggagggtggtagaatgtatgaagaagaacggagtagatccaattgtaaatgtagatttcagtgtatgaataattcgattagaaggttttatggctactcaaaatataaagtttgtaaattatggattttattttggtttgattatgggttcaattttatatatatatatatatatatttttttttcagacatgaggttgatgggtgtggtactattattagttgagatacatgattatttgttacaaagaattgtttatgaaaaatttcacaatgaaaagaatgagctctgctaaatgggaaattggggagacattttagactggagctttcctttttctttgctaaacattttagactcttctctattctctttgaaaccaacctgcactggcg

SEQ ID NO: 245184 - DNA, 1246 bp, Cannabis indica
aaataccaaactaatgatctaagtctaatacttcataaaccagacttcttttaaagctatgtggtatgcactaataatcaacaaatcccagtacatcaaatggtagattccgagtcacataaatcgaatcgactgatgtaatccttttacaactcccatgatcaatattattagtatcgtcactctctgtttctcttctttccaactctgtttcttcttttgcttttctttttttggttgcaaagtcactcgagaacaacaactagacctctaagacttcaataaactacagcccttaaatatttatatatgatgcgagaatgtatctattgaagactgttgagaagttgttatctgagattattagctgtaactgttttgctgttatctgttttgacagctcatgtgtggggatttaacttatttatttttcaattaaaaaaaaatcttgatgacattcaattaaacttaaaataaaatgaaattaataaagtatacctaaaataaaaataaaagtataactcttcgcatcagcaatgtccaacataaaacatgagacccaccagtaacatatacagcgagtcatcaaataaaataataagcaaaaagggaaaacttgatcgtatcgtgaagaaaattataggcataatattagtcaaaccaactactgtatgtataagatttaattacaacgcatttaattgcatgaacaaacatacctgtgttaggcacaaaatttactatatacatactccatattttttactttttctctctgtatcttgtatcggagagttagtccacgttgctaattgctttgccatttctctactcaacatccaaaaaaaaattaactgtgctatatatttagctagctagttaaggaggaaaaacaattaattaaatgcaataaattaagaacaaaaccaaaacttagtaaacttttagctagctagactacataaaaaaaaggtaatatatcaaaccccgtagccaccgtcacaggtgcagctagcgttggcggagtcgccgccagcatggtggcgaggtttcgtgctgaggcagcaacacacgagacccaccaataacatgaatccccatgctgatgctactgcttgtgcccaactcagataatgccccattgatgatctttaattactactgattagtactctctctctttctccctttgctcttttctcttccttcttgatttttgttgcttaataaattgtcatcttcttct

SEQ ID NO: 245185 - DNA, 1811 bp, Cannabis indica
cccccctccaatataattttgctccgctagtgaatcaaacatgttccttacttcggttggaaccacctcctcttccaccacaactttcttccccttagtcaccttcagaaagacatcttcatcaatcccctctttttccttactttgtttttgttttggaacccaaacctgcttccccttctcctccactatctctttcgtcctgcagtgatttgtctcatgaccaataccagcacaatgatagcacacaagggggatccattcatatttaacctccaaattaatatcatgattaaattcatcagtaaaagaaatcgagctagggaattcctgtgataggctaacctgtacaagaatccttggatattgaagtcgttctctattttttgtgatattgtccacttgcaacgggtcaccaatttgactgacaatcttaaagagagaagtttctacccaatacttgatatccagtcctttcagctgtattcctgcctgagggtgtttttgatcacagccctactcttgtatcaatataattggataggagctttgggaaaaagccttttagatatttcaacatgtggagattggcaccagggtatgatgagcaagttactaagagttggaatcaggcgaccatgggatctaaaatgtttcgaattgtcagtaatctgagacggttaaagcaggtattcaaagacatcaataaagaggggttctcggaaatacacaaagctgagaaaatagcgaaggtggccttagaggaggctcaaaagcagctaagtacagatcctcttaatgagaaaaaatgaaatctgagcaggaagcatgcaggaactatacagaagtacacaaagcctattcactcttcctttcacagaaggcaaatatgtcttggctaaagtatggggatgaaaattcagcattgtttcatgcttcaataaaagctagaagaacccctaatggaattttttctattgaagatgagaatgggaactggtgtgaaaactcagatagtgttcagaaagcctttcttgagtactatattgggttgtagggtaagtctatggagcaaaggaggaatgtcaatcagagtattattgatctcggccctaagatcaatgaaagccataaaagaatcttgatagcagattatacaccctcagaagtgaaggaagctctctttgctatccctggtatcaagtcccctggtcctgatggatttgggagtgcttttttccaggataactggcaacttgtgggatctgaagtggaggaggcagtgctttcattcctgaactcagggaaaatcttaaaggagatcaatgctaccaccatcactcttatccccaaactgacttgcccaaagagtgttgctgacttcagaccaatctcttgttgtaatgtactataaaaaattgccaccaaggtgatttgtaatagattgaggactatcttgcctgatcttattgcagataatcaaggtggctttgtacatgggagattcattgcgcataatgtgttagtttgccaggatttggtacgactatatggaaggaagaattgcagccaagttgtatgatcaaaatcgacctcaggaaggcatatgacacagttgaatgggactttattgaggaaataatggtagcttttggattcccaagttacttcatttcacttataatgaattacataagaaccccaaagttttccctgctcctcaatggatccatctgtggattcttcaatgccaaaagaggattaagacaaggggatcctatgtccccattgctctttgtattaggcatgga

SEQ ID NO: 245186 - DNA, 1194 bp, Cannabis indica
tttttgatatcatgattcatttggtcttacatttttctgaagaagctattttgggtggacgtgtatttatgagatggatgtgcccttttgagagatacataaaaaaattaaagaactatgttagatataaagctcgccctgaagggtcgataggtgaaagatatgttgcagatgaggcattgatattttgttctatgtattttaaaggggtagaaaccagatttaactaacttgatcacaatcatgatgatgtgattcctagaattcttatcgtcattcaatcacaatatagtcccctaacaaaggcaagtatcacgcctctcgagcgaaagactcgtgaaaaggctggtggttcatatttgataattcacctgaatttagaccatattttgagaaagttccttcctttatcaattaaaatttgttctcattctaaatagttatatttaacatagtgatgttatatgaattacattgaacacttagaagagataaagcttaagtgcctagatggagatcataacgttctacacaaatttttttccagggatggtttcatgagaaggtgatatgagactcttaaagctttcaaaatcatcatgattacttgatagtcactctaatataattttattcatttagatatatgatttacacaagcttggatcgttagagtatagtgaagagtttcaagctttagcatctgggtcaaatcatttagtaacatatcacgaaggtgttgtagtgaatggtgttcgttttatggtagctgaacgtgatatgaagcatatcaacacaaaatagcagagtgtttgtggcaggatcagaaggatttaattgttatgggatgctagaaaatgtattgatgttaacttttactagtgtgtattcagtgacattattttggtgtaaacgatttaataccgatccccatgaagaaacaatcactgagaataatgtcactagtatcaaagtcagtggtgaatggtacaaagatgacccatttataattgctaccaaagctaagcaagtattttatctcaatgatctgcttagaggtaaaaattggaaaataatcgaggttgtaaaccatcgataaatttgggaaattgaggaggatgaagttgatgaagatgttgtacatgattcaagctcgtcaaattctcagtcgactatggatcaagaagagttaat

SEQ ID NO: 245187 - DNA, 1314 bp, Cannabis indica
tttctgcctgctttgagaagcaagcatttatcattgatcttctatataaatcattggtccgttgaactgattccggacctatgtattttctctgtctgatttcatcccaataaattggagatctacatttcctgccacaacatctcatagggaggcatccctattgtactctgatagctattgttgtaagaaaactctatcaatggtagatacttactccagcagccttcaaaatccatcacatacatatcctttaaaatctgaattatactctcagactatccatctgtctgaggatgaaaagttgtgctgaacatcagctttgtacccatggctcgttggagacttatccaaaagatggaagttaactttagatctctatttgaaacaatggacttaagagctccaggaagtcgtactatttcttttacatagagttttacatagtgatctgctgaatacattgtttttactagcagaaaatgtcttgatttggtaaaccgacccacaattatccatatggaatcgaacatacccacggtcataggtaatccaaccacaaaatctatggtgacatcctcccatttccactcaagaagtgtcaaaggctgcaacaaccctgcaggtctttgatgtttagtcttaatctactgacaagtcaagcatctagtcacatattccaccacatcatttttcatactgcaccaccaatggtagggttttaaatcttgatacatcttagtggtactaagatgtaatgaatagggagtggtatgagcttcatcaagaatctcatttctaagtttggtactactcgaaacgcaaactcaggttttacaaagtaacattttgttacccaacacagtgaattctttagcttgaccagctaagaatccatttcggatcttcaccaattctggatctaccaattgagcatttctaattctctctaacaagtctgattgtagtgtcaaattttaagtctaccaaccacaaattcaatacttgatttgaccatatccactgctaattaagaggaaatcataatcgtgttggaaacctccaggccctttcttgcttagggtatccaccaccacattggccatctcgagatgataaagaatttcataatcgtagtctttaactaactctaaccatcgcctctatttcatattcaaatctttctgagtaaagaaaaattaaaggctcttatgattgatatagatttcacacttttctccgtagatttagtgtcgccaaatatttaaagcaaagaccactgcggcaaatcctaggtcatgagttgggtatcgc

SEQ ID NO: 245188 - DNA, 1045 bp, Cannabis indica
aatttgtagtctaacacatggcctttttcaattttcacaaataaaaacattcattgattaattcatggatatttcaattgaaaccaaagcaagaaaacaattaaggataatttataaaaacaattcatatacaatacattacatgacagcttaaatccaataatataaattaatatacaaaaaaaattagtgtccatggaacgaaagaaaaataaaataaaaatcatattttactcaaattacaatatttttacacaaaaataatagaaaaactaataatattaatattaatatctttttttattggaagcaattattattgttaatattttgtgttaatcattactctaaattatttttttaaatttaattatttgattgttacacactataaaatataccattatagaatatagaatgagaaaataaaattttaatttaattaaaattttatatgaaaactgtaattagagtttaatactaactcgatgagtatatcccgatacaattgatattgtgtcattgatccacttcatagttgaattttgttgcacgaatctttgaataatttctttttttttttttttttttttaaattaattcatttgcgtgttctaaattgttgaataattttatactcttttacaatagaaaataataatgagaatgtgaattattgtaattattgaatgctcaaaacattattaaacctaatcaagtgtttttgattgagccaaaatgacaataatgacaaactagaaaataatttgtagaagattgttcaagaaacaaaaccacttttttgaattacttgatggaaattttattatacaatttctcaaaggagtaactcatcatgacatttattacaaatataaaagaaaaattaaaaggaaaaatattaaccaattaataatattattgagtaataataataaataatccaatgaatattaagtgcttttgggtattgtttttcacttcttgtcactcactccaagtgtgctcttcacagtttccatagcaccttgagtcatgctcttca

SEQ ID NO: 245189 - DNA, 888 bp, Cannabis indica
ggtaaaaatgatagattttaaaaaagaaggtaaaaataaaagaggacaatataaaaaggatatagagtgtaatttcctcacatatatttagtttgggctagggatgaggcccattagttttaagcccaaaaacccgacccgcgaaaaatgggacagagcgggagggagtgagagagagggagataggcttttggcgtatgggattgagaaagccaaggaacgataacgacgacgacgacgatggcggtgttggacgaggacgaagagaatttggcctacttcctcgaatcggaggtcctctcacaggtttccgatcaggtataattactttattatatacatatcgatccaaattgtttttgtttttagttttgattgtgattagggttggggttttcttgcaggaagatgagcccagccccaagagaaggcgtgaggaatctccgcctcctcagcctcagcctcggcctcggcctagggctcatcctgcggctcggattgaatctggaattttgagtaaaatccctccggaacttttccctcacatcctcaaattcctttcttctgaggatctttttgcctgcgcacttgtctgtagatttcttactattgcagcttcggatgagtacttatggcgtcgcttgtcagtttcttcttccgatgatttcttctctatttcatttcattatttgtgtatttgattttgtttcctctgtaggtattcattgcgctggggtcttatggccccttccaagaaactgcgcgaatgtccttggaaaaagctttatattcaggtacttttgtttgtaatcaatatatgtaatttcaatgagatcatgttattattattaatcactaaaacaagtgagtaaataattctttaaatta

SEQ ID NO: 245190 - DNA, 2097 bp, Cannabis indica
atagttggcagactaataagaaaataagaaatgatttttgttttgtttgtttcattcataatatgcattcgaatatgcacggtatttattacaaaatattaattaaaatccgacatttacaaggaaatatagacctattatacactatatacaataatacaatatttatatattgttatataattgtttcaaaaaagttaagaaaagatgtgatatattcgatacaatatttagtatattatatatgatcccaatgtaaaataagtaaaagttggtacactaattttttatttaatatttattagaaatataataaaaaataataatttttttcatatatattatattttatttgtgataactaaagataacaacttattatatatacaaatgcatgcacattaattagcatatataacttattatatatacacacaaacacaaacacaaaatctagaatctaataattattgtagtaataatgtcaacaatattgccaagtaatgatgatgaaaataccaaaattattagtagtagtcattttgtgttggttcatggggctggtcatggagcttggtgttggtacaaagtggccaatttattacaatccacaggtcacaaagtcacaacaatagatctcacagcctcaggaatcaaccctatccaagtcacccaagtcaacggttcattggttgactatgctaagccgttgatggatttcatggcgtctctgccgtcatccgaggcggcggagaaggttgttctggtgggtcacagtttgggtgggctcagcatatcccttgctatggagatgtttcctcataagatttcagctgcagtatttgttactgctttgatgcctggtcctaatctcacctatcataacatatatcaagaggtatatacaaatatattttagtaatttgtagcctaatatttaagtttaactttgagttgaacatacttaagtttaatttttaatatatgattaatatcttagttatatttatagactttcgcaagtatctattcgttaagtttcaagtcaaaatctacatgttatttttttattagtaaattgttttaaaataaaaaataaaaattaaattaaatgatatgaatcaattgaggactgccacatagccatgaacttgataatggtagatactacgaaaatttcagaaatataactttaagtattattaccataaaaaattaaatttaaatatttaaccagaaattaaaattaaatatttatatcgcaaattactctaaaatttttaatttaagttcataacattattatatatgattgttgaattaggcttcaatcgtataattttcttacaatgataaaaattattaaattgatcagaatttagggtgcttttattacaatacattttttaaaaaggatacattttttactattttgatatttagaagaattttttagtctaatttttttcatattcatatacattataattatttaagatatattacaaaattttaaaaaatttaaaataatttacaacatagaaagcagtgttcaaacagtctattacgcgtataaataaaatagtaacgtacacgtgcaatatactgtttgaaccctgttttcgacgtgttaaatatttttgaattttttaaaaattttcaaaaagtcttaaataattataacgtatatgatcatgagaaaaatttgactaaaaatttatttgaatattaaaataaataagggtgcatcggtacatcatttcttaaagaactgcattataaaattttccgttaatttaatggctgaaactatttttttttttaaatgtcctgaaacaaaaaaattaaaacaccaccatatatatataatttgttttaatataaattttaactttttttaactactaataaaaataataataataaaaaaactcttactaataaaaaatggtcattaaactaatgttatcaaataaaagtttgtgatttaagcttgtttgttacgttgtattaattaggtcgtattaattgtattttattatattgaattggattatatattatatttttatataatattatattaaattttaattt

SEQ ID NO: 245191 - DNA, 1137 bp, Cannabis indica
atactcaaaaactacttgatagtatctaaatgagtattttatagaacgattttaataatttttttataaaatttgtaaggaaactaaataatatttcaaacaccaaaaattaatttcattacaaaactttctttgttatattgttgtttaaaaatatttatacatttaatttttttagtaacatttatattacttcaaaactagtttaaaattttaataaggtacaataaagtataagcacttattagtaaaattagtatacataactatttcaaaaaaaaatagtacgtatatagtaatttttcataatgtaactaattttgttatttaaaacacctttactttttttagtaactttcgtcacccttaaacatgtgtgacaaaattatagagttatgataaagtatacttaatatgaaaattagtagagttaatttttttaatataaacgattctaatactgattaaaatactatttagtttttttaaaagttcttttagtaatttatcaaaattatttcaataagataaacttatttagaatactattaggtaacttttaaaatgaaataagaaaataatttataatctactaaactttgattaattttatagtttgattttttgttaacaaaatataaaagaaattaaatggttgttgttgattttgatcattttttcttgattgagcgaaaaaatatatgattcccatatattaaaataatcctttttaaaagtaagtcatgatgacactatttttgagctcaaccgactaacgttgtgctgtaaaaaaaaaagacgagaagagagacgagtgggtatatttttttagaaatttatcgaaattgctctacaaaagaagcttatgttgaatacgatttagttaccttttttttagatatttaccgagattactctttttatgtagaatattatctagtatacaataaaatactttttagcagcccatgaaattagttggtacattaaatttcgtttaagggtaaaatttgatatgttgaattcactattctagaatttttaaggtaatatcttgttttttcataagttattttagaaacttttaaaaagtgttttataatattaaaatataatttagtaatatttaaatatgaa

SEQ ID NO: 245192 - DNA, 635 bp, Cannabis indica
ttaattccgctgcatcaatgtaaggttttcttaactttatatgtgtttaatttttcgtagaaagttcatatttagggtgttaaacaacatacttgtgagtagatctaagattctggtaaaataatttccaacagtttttgcctggcttttagcttttcagtgggcaaaacagaataattgggacgacttcgcgctgatatccgactcctcagttgttctcaaagctttctcaaatgagagatatcccccatctggaagtgtgtttcttggtttgctgctgcttctaaacttaaacatagtttttcgaatgtttctatgttttatttcaatcgcactcatttagctttggtagacgcattggctaaaagtgctcgctgttctgagagcgatactctttgttgtaaaggggagggatttccccctgtggatcccattttctcagttgctaatttaagataaacactttgtctcttcaaaaaaaaaaaaccctagattgccaattctgggctagaaatattggcaactaaaatatgtatatgaccatatgatatttcacataccattaagttattaataaggacttccctatctgttgaaactttttaagtcacttgtatgtatatagttttcaatat

SEQ ID NO: 245193 - DNA, 1106 bp, Cannabis indica
ttaagaaagaactagatggtgatcgtgctccgggtcgccacaagtgctttctctgcctccttcaaatttagggtacagtttctgagtatctttcttctacacacgagccccttaaatagaaattaggatgactacctctaaatggcaaaattccaaaactgcctaaaatctcgtgtttagcccatagtcgcgactatataaagtcttgtcgcgaccataggcaaaaattaaaaataaggctttctatctatgcctcgtagttgcgaccatagtcacaaccatgaaaaaaggtcgcgaccatggataatggtggtcgcgacaactgaagcatacttgtcagcttcagcagatttttctccagtttatcccgtcttttccataattgataaaatttgaactctaatgcctcgtggatctaaaacaaaaggaaatcaagcgtaaaattattctaaaagataccattaacaaagaaaagaactgtaaaatcgacccaaaatttaggctaaaaatagcctaacattaatgttattcattcgtgttcttatatacttcattaaaaaaggggtagctcaaatggttacacatttggtttgcttccacaaggtctaggacttagtgtacctacataataatagtttttggttccaaatattgtaagagcatctccacaaattggtaatctattgctaaaatatagctcattttataaaatatattttataatggtgtgccaaaaattaattcaaattcggcgcagagcaaaagttgagtcaaatttaaattacaatatgacataatacaaaatttacatcacaataaatatatcacttttatatttacatttatctcatttttaatattttattattaaatatgatttcaaaaaaaaattgaatgaacaatacccgaatggatgcatgcctagcacaactcgcgcacacatgaaggtgcatttgtcgagtgtcacgtatacaagcttgcataacacctcgagcacctacgcgcatctgatggcagccaaaggcaatccgtacacgtgcatctaggcgacgcctagtgcatcagtatgcgcatacgtgccaagttcttatacttagctagcacac

SEQ ID NO: 245194 - DNA, 1850 bp, Cannabis indica
ttagtgatatacaagcatattaatgtatatatatttaattatatatatatatttatttatatatatctatatatagtcaatctataaatactatatatatatatatatatatctatcttgtttctttatttatacaagaaaacttgatacagtatatttatttgaatagattaacagtttgttttaacaatttttgactttatttttttggaagattttctatttaacagttgattagttcttgattcttcttccacatctaaaggatttctaaagggtataaagacaccattaggtcattggttttacttagctctctaggtgggaagaacttgagtctaacaagtttttagtattttataattgtgttatttctttgacatataatattactgtgttatttctatattgtttctttgtagaaatggtgcatgttgaacacacttggatattgttcattaagcttcgggagaagacttatttgtgagacacttttcgagaagaatagtgcaagtgagacactcttcgagaggaagaatgcaaggtctacgatttgaaggtagttcaagatcttgacacttaagaaatttgattaggagtttagattacaacagttgcgacaaattcaaagatgcagtctttatttgtataagtcaattcgattttataatcactttgagattcttctaataaattttattatttgggcatgaccccgtggattagtagcaatttaaaataattactgataccacatataaattagtgtgttctttactaaatctttgttttcacttttggttagttatctgtttaaacatatctctgttctgttcaaacaatctctgtgtctatttaaacatctctaaaactgtacatgaaggaattatttaatttgataatcctaaaaatagaatttcaagtaactattttttttttttaaattttttggtcatataaatcaaagtaaaattttatttattttgaaaaataaaaatatgttctataaccatttttatttttaaaaaacaaaagtctattttgtaaattttattttcctttttatttttttattttatttaaatctggttcggaatttgagtttgggtccagattccaaagtttaagttgaggtcgaagttcataacattgattaagaaaacaaattattcaaaaaaaaaattgaaaagactttttttttttgtttttaaagttttgatttttattaaaaattaaaagtaatgaataatttattaaatatgtttgaaaatatttttatttttttgtttaaaaaataaataaaatgttataaataaatagataaatgagaaaaacaaacaagcaaaatctcaatcaatttattatttgtacatggtatataaaatgttacaaatagtagacaatgaagctataaatattgtagggttggataatagatattggatagtgccctaaggagatggtctttgaccaaaatccaacttgaatttgtaaccacccacccattaccaagtgaaaactcaaaaatgaagagaaaatttaaaaggtaattccatatatttattttcttgaaatggatgtactgatacactatttgttttgtattcagaagaattttttagttaattttttttttcatattcatatatattgttgttatttaagatattttacaaaattttgataaattcagaataaattataatgtagaaagcattcactacaaaaaaagctactttaagtgacaattttttagtcacaatataaattttttgtgactaaatgtgacttttgatcacaataaacaactacttgtgactaatagtatttagacacaagttatcactaat

SEQ ID NO: 245195 - DNA, 993 bp, Cannabis indica
aaaaaacaaaacaaaaaactttgtaataaattgggatatagtttcactttgagtaaggtaaaaataatgaagcatttgaagtttgtatttttatgtgtaagcttcaaaccacttttgagggcaataatttgcttcttattttccaagaaaaaggacagttaactgattttgttacaactattaatggtatactcgtatgaaaactatttaatgtgttggttggaagaaaaattggataagagagggaaaaaaaaaagtgagctatgacaaatgtttttttttttttcttaatatttaaataatataataatataagatatgggtttttttatttatatattttaaaataatttttttacattttcgcagaatttatagtgtaatttacgaagcaacttaaatcgcaattcaatttaaattgtaattcatattgcaattcaatagcaacacaaattacaattaatggaacaatttaaattataaaaataaaaagtaatattaaagtaattttcttaataaatatattttttttatataatttttactattagaattgtaattacactaaattgaccatttttatatagaaaatattaagagaaaaaatatatttttaatttaaaaattaatattgtaattgtattttaagattttttatttaagttaaaataatataaggaaagaaatctcgtcttatattatattttgtgctgatttttatagtattttacaaaatgtctataaaaataatttctaaaaccttgtcttaaaacttccattttaagaataatttttaatttattatacataataaaaaaaaattaaatctttaattatagataaaaataatttttaaattataattaattatatatgtttatgtctagtattaaaaaaatgtacttttatataagaataattatcttttaataaaatatatatagtatataaaattattaaggtttttttttatttttacactttaaaacagtt

SEQ ID NO: 245196 - DNA, 981 bp, Cannabis indica
ctatttatacaaatacaagagtgaaatattaagaaactaagaaaaaaggaaactaagaaaaagggaaactaagaaaaagaggaatgttgattacaattaatggtaataaataaaagatttggtattccacataattattaatatttataacacataacttaataaaactgttttttattataattgataccattagttttctttttattgctcttttatttcattaaataataactaaatttataagtttaataaattgacctaagcatcatatttaaatattttaattaaaataatatataattttttttttgcacaatttaaaaacaaataatatatctattcatatactaattcatttattattattaagatatattttcatagaataattttacttttacaagcatcaaaactattgtgaaaattgattatttttaatttattcatttattttatatatatataatttaaaaaaaaggatgaaaattgattattgtgattgttctaataatttttaatctactaaaatattttaaaaataaaatatttgctcttcatttaaattaaaaattgtaaaatgattaagatgttaaattttcaaaaattaatatttctaattgaggttactatatattctaatttatttaaataataaattacgaaagttagaaaattattttattactaatgtaaagtcatttttttttacaattctaattgttatagtgagatttttctcacctagaaactcgagaccagactcctgtttaaaggacacgtgtactcaatttctctaaggaaagctgagatgtcaatgaaagactactcgagtttaaacctcgcctgagctaaactcagtgagatgatgcgaatatgaccaagtctaattgcatcatctcgaggctcgcactatgtgggaccaaggaacggactccaactcgcatttaccacgatatatgcgagtatcctctcaatcct

SEQ ID NO: 245197 - DNA, 1626 bp, Cannabis indica
acatacttgtgagtggatctaagatcctggtaaaatgatttccaacaaccaggcccaacgactttttttgggcataggtgcgacttggttaggattatgttttgctgttgtgattcgattttttctattgcgattagtttaatctctataacatagttttgagtgttttagtcttgtctgtgtgacagtattttattttgttttgtttcgttgtttgtacttctttgttcttcaatggttcccatcaaatcgatgttagtggttgttagtagtgcagttacgtaccttacacaatagttaatattcaatctacaaggttgaatgaacctgctctaatagtttctattattgtgtcttttaagcatatatgaaaattgagtataagtgttcttaaagttaactgtgatgcaacaatctttattttttttttggtcaaatgatttaggaattaggcggctaactatttgtctcatttatctaattctaatcctgtttgtatctccaacagggaaatatcgtgattagattgtagattattattatagctgattgctattaataaaattacatcatttactaaaaattaataaagtttatatttttgtaataaaaaaaaattagacgtggtgattaaaatcacacatgattaacgaagcagcaatctacagttggcagcgacactttctcgagctaggatagttcattgtttaaccgaaaggtatgctttgccaaactatgagctgcaacattcttatcgcaagtcacataagataaaaccgttcccaaaaatttatacaataaaattataacatcctcaaataatatccctaactcattaaagtaacacttttttatctattgatagttcaagagacatttagaaataacaagtgattagataaaactacttacaaaatgaatagataataaaaaagtaattagcatagtaaaattgaaattaagaataaaacttaattattattttaacttattatattccaaattcaaaaaaacaagcatttgaaaatccaacttcagttggatacaatccaaccctgtttttctctctccgccgccgccagtaccgccgcggcgccgactgttcttagagacttcaagatcttactttttttccacaatgattcataaatgtgaaatatgaatgaattttcccttctacaggctttgaggaatgaaacctcttcttctacatcattattcaagttcgaagcttcagcatcgttactcagtgaaagacctccgaacatgtataaccttattacaatcttgtgcaaatgagagaaatctgattaaaggtaagcaagttcactcatttatggtcaccaatggcttccttatcaactctcctccttcaattacaagtgttattaatatgtactcaaagtgtcaaagaatgaacgaagctgtttctgtttttaatcatccgagcgatgaagatcgtaacgttttcgcattcaatgctgtgatagctggattcattgctaatgagagatccaaagatgggtttgagttttacagaagaatgcgtgaagtgggtgttgttgttcctgataagtatacttttccttgtgtaattaaagcttgttttgattccattgaggttag

SEQ ID NO: 245198 - DNA, 685 bp, Cannabis indica
gtttttactaataaaataataaaattaatcaatctcaattacaataggatacacttaggaccatagtattatataaaattgacccaatttaaaaaaaatattaaataccccacaaataaagtcatttttcaatgcatcaccataaaaatttccaatatatatattaccgtttcattgaattcagatcattatccaaatgagttctaaatttctaatagtcactaattaaaccactcattaatagataatcaccgaataagtggccaagtagtgtaagtaagcctattattattattattattattattattattattattattattattaattagtagttcctcaaccataaaagtcatcattttgaaatcgagggacaaagtactcatttgggttatcatatgcaaatcaaattattcaagaaaaatatatcaataacttcggccaattcgattaaattaattcagtttcaagttgagctcttaattagatatatataaattattattgagaaatgctaaaaggtgctaaggcatcagtagtgtttagtatatttttatgtgtcaattactattagtctaattaaatatcgaattacgcataacttaataagattatcgttcagttacaaaaggatatatcagaggaatgaattcatcataaacagctgccactattatgacgc

SEQ ID NO: 245199 - DNA, 1984 bp, Cannabis indica
tctccaccaagaccatcttcatgttctaaaaagagaaccaagaagatctcagaatactcgcccatccagcactgggggtagtcaagaaagaagatgaattatacccccatgtgggggtggaaagaataatcgaacctatggaggaggtgtaataagtgtgcatcaatgatgaagatcctacaaaagtcatcaaagtaggacataatctacctccagacattaaaaattaataatatcaaccgtgaaatagaattgtgatgtactggcatagagtcactctaacatggtcgggattagtcctcatgtaatattccatgctttgaaggtagatgaaaaagtagatttgacccgtcacaagagaaaaccattggattcggttcgatcaaaagaagtgaaattagaagtggataagttaaccaccattgagtttcttaaggaagacttgtatccagtttggcttgccaatccagtattggttccaaagcctaatggaacttggaggatgtgtattgacttcacaaatttgaacaaagcttgttcgaaagattgcttctcccttcctctaattgatcagatggttgacgtcacatttagatgtcaacttttgagcttcatgaatgcatacttcaagattaagaaaatatcagcttctagactaacaagggcctatactattacatggtcatacctttggattgaagaatgctggagccacatatcagcatctgattaacaagatgttcaaggatgtcttgggaaagaacttggaggtctatgttgatgacatgcttgttaagtcaaaaacttccatggaacataatgaagatctagaagaagatttttctatcatccaaaagttgaatccaaagaagtgcacctttagagtttcctcagggaaattccttggtctcattatcagctccagaggaatggaagataatccagagaagattcaagcccttctagatatatcttctctctaaaagcataaagatgtccaaagcttacctggaagaattgtagcactcaacatgtttgtttctaagtcgattaataagtgcatcctattctttaatgtcttccgtggaaacaaaaaaaatgaatggacactcgagtgcaaagatgccttccaaaaattgaaggaacacttaactaaagctcaaattttgtccaaaccggttgagtccttgagggagcaccattgtatttgtacttggaagtgtccaatcattctataagtgtcaccctagtccaggaagaaggaatgatacaacttctagtatattatgtgagcaagagattactgggcgtagagtctagatatccaatgattgaaaagctatcctattacttactaattgcttcacgaaaaatgagaccgtactttcaggcccatgccatcagggtactaacaaatcatcctctttgctaagtcctgctaaagctagagtcatccaaaagactcttgaatgggtaatggagctcagtcagtttgacattcactatcaaccaacagtctcaatcaaaggtcaagccttggaagacttcattatagaatgtaaaggaataactgacaatcctgaagaacccatcccagaataggaagtctagaagatttatgtagacggagcatcgaatgagaaaggttccagagcaagaatcattaatctctcaacaaaaacatcaacttcaaagcgccctccaatttgagtttaccacctccaacaacaaagctgaacatgaagtaatgatggagagcttgcaatcggctaaagaatttggaccccaaaacatcaagctttatagtgattcacaacttaaagttaaccaaatctcttgggaataccaaataaagggttaaaagtgttgggaatattttatcaggatctagatttactaacaagtatgttgaattaacatcctaaatatgaatatctttaatacaatgaaattaaacacacaaggatctagaaaaccttacatt

SEQ ID NO: 245200 - DNA, 1480 bp, Cannabis indica
atatttattttttaaaaaaattatacataaaaataagtttaattatttgatctcaatttattgttcaatcaaaatatttatatttgtaataatttaaccgccacgcgtggagcgcggcctgtttactaatttatgaaataatctcaaaaaaatgcattaaaaaataaatattttccttgtaatttaaaagattcaacaaaattaaataaaaaaggtagatataaagtagatatctagtgaagaaaaacttatagctatcttataaggatgcatgaatagtaaatacaattatctcatacggggattaaattataaagcaatcactaatctggcgtttactaatatctttttaatcagttttcaatttttaaaattgaaaaaatgaaaatattttttaaaaatatattctataaaactgttttcacttttaaattttttaattgagaatcaaaattttgaaaataaaaaaagtcactttcaatattttcttaaatagtttttttttcttaatcaatattttagattctgaccatacccgaaaccaaatccccccagcccctgcggccgaactcgacctctgaactgaacccgaatccgaccccagacctagacccgacttaaataaaatccaataaaaataaaaatgacaatgaactttacagaacacacttttattttctgtttttaaaactgaaaaataaaacttgttacaaaacacatttttatttttcaaaaacaaaatttttaaaaacaaaaaataaatttttatttagttattaaaaaactaaaaagaaaatgtgttgccaaatggcacctattcttctttgttatcttcaactagttctctctctatatcttactaatataaaagtgtggtaatggtgtgatattaccataccacttttgcccctcacattaatttataattacattagtgtgacattaccataccatttttacccctcacaaaaatttataattacattaatattaataaaatgtaaagtataaaataatgtaaaatatagtcaaatctcatatccttacatgattgtatatttcttttgaagtgagtttttgtctattctacaaattgcaacatgttaaaataataggtgcatattcagtttgtacactaaaacatagagttaaaattacaaatcatttaggtcaaatacataaacattaagtaaatatctcaattgatttgagacatccaccaaaagagatcctacaaactagataatagataattctaagccttacattatacataattggtattgttaatatgaatatgatagtagagaagcaaagttgaatattttgtcgtttactatcttatttaccttttagagcacttaatcataataaaaaaaaataactttctcttattttgttttattattgtaaagtccttttttggcaagttagttgacaaaatatttttttcttttatggtaagattcttgtgcattca

SEQ ID NO: 245201 - DNA, 1526 bp, Cannabis indica
taatttaaaacaaaaactaaaaacacaaaaacaacaaacacgtacacaccatcaaaaacaaacagaaaaacataaaaatagaagaaaacaaacaaaaaggaaaaatgacacaaaagaaaaaaaaaatacagaagaaatgaaacaatatgaataaaactgacaaaaaaactactaaaacaacacaagatactaatacaaaaaataccttatcagagtttgggagactttacaaactctggctccaatacaaaatcagagtcagagttctccaccacaggtcgatggcgttttgctctagtgttcttcgaagtaccagcacctagtttccttttagcaggaactagagaagtagggctaggaggattatctttcaaactcttcttacccattgttgctcgagatttatttttcaggggttggttttgggggctttttagcaacagggagggtgatgatcagataacagccattgtgagtgaggggaagtaatatttatagaagaataagaacgaaaatgggggggaatgtagagggaaaattaagatgaagatggaataactgaaaaaaatttgaaaaaaaaaataaaccatccacaactgtacaaccgcctgaaaaataagggatattagaagaagatgatgaacagggaaacatgagggagtgagatttgagtaatgattatttaacatttaaaaataattttgaaataaattaaaacccaaaaaagaagaaaactatcaaacagtgacatccctcgtcaaatcaaagcttttttaaaggaaatttttaaaaaaattgaagtgacaaaaccccgtgaagacacatgtaagccacaaagtataaatgaactttgtaccataggcagtatcagtatacttccgtataaaacaaaaaattaatacacagtataaaagtaaaaatacacgtgtagcagtatttttgaaataaaataaaaaaagttaataaaccatgtaaatttccctactaaaattaacacaaaatatagcctcgtgtatctttgaattagaattaattagcgactctattatttacttttacaccacttttattatattattaaaagcaatgtagcttccataatatatatatatatatatatattatatggaaaatattatttacttttacaccacttttattatattattaaaagcaatgtatagtttttacttccttttgcatacttgatgtattggaattggagtatttgacaatattttcttttaacatcaagtacttgttacatttcatacaagaacttacaaaaattgatacataagctatacagatataatgaatggatggatctttaatctggatacttgaagaccaaagttctccaagtaacatggcgtggtatttatataaatctgtatagtcattttcataaggatcaaagctgaaattatccatcacatagattaattaaaaatgtaagtattatcatttgatgaaccaggagtgtaggtctcacttgagaagcccatagtactcatagtagttgt

SEQ ID NO: 245202 - DNA, 642 bp, Cannabis indica
aagacttgcagtcatacttggaggaattttaccattgggggagttatggaaagatatcaagaggttaacagtgggatccatggcacagtttttagactgggcagatggatttataaaactagaagaggcagtacagacaactgcttgaagagtagattctgctggctaaaaacaaattcctaatgcgaccttgggtacttctattccaagccaagatgaaagtagttaaggcaggaaaatgtcgaatggtggaaataattagggaaatgaaaaaaagggaaagtttaacaacaatcccaaacaccaacatcctcgtgagaaagatccaaagtttacagtcttcactgttcttactgaggacataaaaaccatccttacgaccatggattcagtagctctgtacaagagacctccaccaatgaagaaggacgtgagcaaaaaggatcattctaagtactatcattttcataaagatttcagccatgataccaacgagtgcaaaaaattgaaagaagagattgaatttttgatcggaaagaacaatctacacatacataggtatgtaaaagtcgaccaggaacaaaaggctgcccaacctgataataaccaaactacttgatgccaccacctgtcggatggata

SEQ ID NO: 245203 - DNA, 1315 bp, Cannabis indica
aaaaaattataaatgtactatctattttaatgtcagttcattttttaggggcttcgaataggtggactgggtgaggaggaaattcttcgaacacagtcacacctaccacccaactcaagcttgacctcttgcggtccacaaggccatcgcgagatgagcgttcttatatttgagggaccgaccacgggtgtgccagacactcgaacaaaatcgagacgcgggaggaggtcataagaatcgggtgcgccaaacacttgaacaaaatcgggatgggggaggagatcataaggattgggttcgatttaagggtgcaaatttgtaatattatttgcttgtttgctttcatttttaaaatattctaatgttgattacattgtcaacaaataactattttgccctatatttacctttatttaaatttgaaatattaaaagtaataaaagtgaagatattttcgtctaaatacaagttactttattttattacaatctatattccaatgtcaaagtaaacatcataatagtattacctgtaagcaaacatcacctaattttgtactgcgattagaaaaaaaataatgtttatcattttaataaatgtttcattgaaataaaaaaagaaataatatagatcttttttcctctaatatagtatttcaaggtaagtgttcacctgctccttccatattttacttagttgaaaggttttaaattacgtatattaaggcctttacggagtacgtcacatctaaatttcaggcatgacgtgtttgcaacatttttaggcattatgagattagattttaaatttacactttattttcggacatctttccatttatagttttgtgttaatatttcatatagtattttttagtgtatgaaattagatagtacaacctactgatttgaccttatatgaattaatgattcttttataaaaaattaaaaaggtaataatgtttatttaaaatcttacttgaaggattcaaaaaacaaaatatgtcatataaacttaattgtttaaaaattttattggaaatacaaagtcattttacgaattctattagccaattttattcaccacttgaagattgatattacgttccagtaggagatatttacaggaattactatgccatccatagtaatcaaatgtaagatttggttcttacctcagggtttttaaagtaatttaaatggccgaaagatgccattctttaactaatgtacgctagggttttgacagtgttatgtcaaatcatttcaagaaatcatgacctaaagatatttggggatttgatttttaatttaca

SEQ ID NO: 245204 - DNA, 1495 bp, Cannabis indica
agcattcatcaaacataacatgcctttgacaactttaaataatagaatataaattcagcaagaaaacctaggagcttaccaaaaattccaagctccaatcaccaaaaactaactccaaaattcacctccaacttcaagcaattctcacacaatcaaaacttttcaaagaaatgagacaagaagagagggggggggggtgtcggtttagggccaaagaaatcaaagtatgaatttccatttaccaaaaattcctcttttgttgaaaattaaacaaatggacaaaatactaaaatgcccctagggccaatatatcacataagcatgcattcaagagcaaaattgtcattcatcacattccatacttaaatatattttcagattattaaattatcaataaaatgccaaaataaaatctcaaaaatgtatttcggcctcgaacccagttcggcccaaaatacccagttgtgactaccgcgccgacttgtcaaaaaacacctacagaaggacaaaacaagtaaactatataataatatagtccataagcacgccataatattaaaattacagttttaccccttttgggtcaaaattacgaaaatgtcatggctcaccaacggtgtcttaacatgtcactaattagtttaattcacatatattaaattatatcataatataattccacattaatacacatttaactagttagggtttgctaatctgatttcttaatcttagggtattacataaatacaaggttttagctatagaaaacttaattatactggtagctcgggccaagctgcatctcacaaataacgatgcctaccctcaattatcttgtccaaaaaactcctatagcgagcaaagatatctgctcgatttaacctatccgtatgctcccaaattttcttgtcattaattacaaaatttgtttttgaaattttgggtttggaattaagggataaaattgggagaaattagatttcatcttctaaaaattctggattttcatgttcagagcaaaacagagacatttttttccataaaaataaagaaaaaatgctattgtatctgtagaattcaaaattcaaatttacaattaatagtataaaggaatcacaaaagtccacttacttagaataaaatcctcagaagaatacctaaaaccccagaaaataaaaacaaacttcaaaattttcaatgagaatgtcatagcacctaccagattctacgattggaggtgtaactaacaaattcctcaccagtaacttatgataccaatgttctggtatataccacggtcttggcttcaaaaaaatgatggaaactcttaaagagtataagagagataaacaggcataatttgtaagtaaataaaagagagagaatcagagatcactgaagttttttcttcaaaaaatggcggaaatggtgaagaaagctcaaaaaattcgacttaaaaggggccttgcgaacatcatttgattagcaataa

SEQ ID NO: 245205 - DNA, 929 bp, Cannabis indica
aaaaaaaaacattataccttagaatctaatgtctgtttaagcctaagaagcatctgaagcgcctcttctttagtcgttaagagttctctctcataccgaagagcttttctctcagatgctaaaatacgcccagcagcctctttcgctgtgttgaggattatatcagcatatgccctcttcaaagccgtcaatttctggggaaaacaaagaaaaaacactgaaatcaatcaaaaccttcaaaaatgaaaaggcaaacaaacaaaacccatatccacaaaagtcgagaacgatcaaagatacaaccattagagtaagatcaaaatcagttagcaacccacttcaccatttcaaaaaatataaaaaataaaaaaataaaaggaaaggagtccgttattagctaaacaaaaacaaaaaaggatttttagtgctaacctcggtatcgtccatcttcaccgatattagtttttttggtctcttttgtgcagaccaaaatttgaaatttgagaaaagagaagaagtgaggtttgttatggttttttttgctttatgttctgttagaaactgaaagctgtgacatgaccttattaccaaactgtatttattccctaaccttatttacactactaccactttattttgacaatttataaaatgacccttctataacaaaagttagacaactttgcccccaatatgtaaaagtattttggctttgtttccagagagcccctttggaactcaggattggactgaaaaaattgaattggattggactgaaaatgaatgaattggattggactgaacttaattagattatgctgaaaatattcttatgtttggttttagaatagattgaactattttagtatttttgttttagaaaaaaaaaaattattaaagtaataatatataataatacataaataaaa

SEQ ID NO: 245206 - DNA, 1173 bp, Cannabis indica
taagtatagaaaataccaaaatctgtaaacaaacaccataaacaaacccacaaaaactcaaatggcagtgaaaaagtaataacagaaatggaaagcaaaaaaaaaaaagagaaataacaaaccgatgatttcttcagtgctataaataatataaccaagtgaatgaatcataagaaagtttattattatctgcagcttacaaaattgggtacaagactttatttgtcatcagcatgtcagaacaacttgcttagagcaatatccgaccccaaagacgacaataagaaccaggatgaaagagggatttctcaaatacccagatatctttaaccaaaatctatatggagattgataagaatcagtagtgagcacagaaggaacttagaattgaagtatcataaattttattatctgttggaaccaaactaaggatatctatcgaggagatattgttacaaatgagagtaaagcttattcatgtgtaagaggatggcagaaattaacgaattatacctccttagatttatctccagaaactacattaccatttgaatgataagcttcaaacttctgtaaaaaaatgttgcaaatttctcatgaactgaatttactaaaatataaaagcataacacaaagaatttactaaattataaaagcataacacaaaaacatttacgggaagggagttacagtgcaaagtaagactattccttcttaatttggaaagaacccttaacaatcactttatccatttttctctactcaagacacctatgtagaaaacaagagagagatagtcaaagacatagatagaaaaacctagttttgtatatatacatatacagatataaacatcaatttgggaaataaccattaacaaaatcaagaaaatagagattaaaacactcaaaattaaatcaagaagctaaaccttaaataagggtctcatgcacgatagagagtgatgtctctaactgagaatggctgaagatgatttgagatttttaagaaaatcacaagacctgctctgattttaaggtctggcaagagtgaagaggttatcgtgaaaatacaagagaaaaagggaaagtgggatttgaagggaagccgtaaaattcctgagccacttgtttcgtcactgcccacaacatatctgctcgatctacgaagaga

SEQ ID NO: 245207 - DNA, 1035 bp, Cannabis indica
atgttttaccctgttccattgtgatattcatggagagcttatcctgaaaagcatggtattattagacaactttaatatttataaactcactaaatcatttttaaatttacaatttactaacaatatctctggagatgagctcctgaagcttgaacatgatacgttgacgagtggtaataggtgtgtttttccacaaaggaaaagcttgcttggctgaactaactgcagctttgaattcttcatacgtacttattgggacttgagaaacaacctcttgtgttgccttaacaagaaaaatttataaacaattatacgattgaaatgtacaacttacaatacaagagaaaaaaaaaccaagcaaagcaaagtttaccggattgataacatcaacgactgaactagcatgagaatccacaaatttccctccaacaaaattaggaaccttcagctatatttgaatctaaaataagttgtaatacccaacttgttcaataagcacgataaagcagcccaggacaataaaacacatccccactcacttgagcatagcatcttaccggctggttattttgcatcgttgttctctcagtgttagatgtacttgtgttcacaggaacagatctattaggtctccatgagttgaaacttttctctgcaagaatatcccccagttacaaataactagttagtagttactaccaattctttacattattatgcgagatatgaacaaaagtaatttagattattcctcgccattactgtttggatatttctgcagaattataaatataaatgtattcttattatatttgaaaaggaaatatgtaagattttgattgttataaaacctcaatgtcatgccttaaccttgataaaaaaaataacttagtatcataataaatcctaacatgttacccggattaagaagtactgattgaataactaaaatatcattttttttgtatgtagaaactgagaaaaaaatatacagcattgaaattaattcttgtgatataccagtctattaagacc

SEQ ID NO: 245208 - DNA, 701 bp, Cannabis indica
tagttttagtcacaacaagtattgtgactaaaatacatttagtcacaacaaattgtaatttttgtgactaatacctttagtcacggacttcttagtcacaacatagaaataataatttataactagtcacaatttttcacttttagtcactaaaagtaagattttttgtagaattagagtactttttactagtttgttgtccaaattttatgagacatatttgatttatgttcgttgttcaattattatgattggatatgaattagcacttcgggcacttaaagtgaataataaactaatttgaatgaatgtttccatctcatctctatgatatattattcactaattattttcaataaatgttcattgttaaaaaaaagtaataatagtaaatcgtggactaaaattattttaagtcctagaccacataaaatggtgtgtatgtttatctttctttcttacttaattctctcttcttctttcttatatgtttggttgttggaaataataatcaaaagacaatataattaattttcatagtcttaatttttttttttttttcaatatatgtatattaaccccttcatatttggtgtcacttccaatcgaataataataataataataatacaacatttggaccacaattgaaaactccaatttgagtcacaatttttttttttttttttattttagatttt

SEQ ID NO: 245209 - DNA, 821 bp, Cannabis indica
tagcctctaaatgaattgtccagttgacaacaacacagtgtacggtcatgcaggaacatatgcgggcattgcaggctaaagtcaatgggagagtcaggactcgacgtcaaccccaagttccgaacacgtgtttaggtaaccctcaggtaactatgacaaaaagatggcgaaatgaacgtcctaacaataatcatattcgtagagaacgtgtgaacgaacaagagggtctcgatctgaatcaacccacacataactccatgcagaatagggagccggttgcacctgatgccagtcgtggtagagaagagagaccgcaagaggaagaacttgaatggtgaaacccgagaagtcgagtctggccgcaagtggagataaatgaagtaaaatttgattcttcttctactaacagttgctcccctagtatctataccaggtcgggttctgttgagacacaacgaggagggagataccatgttcatagaggcgatcttcgtgatcacctcaatgagattttttagggtgcgatcccggacaccaaagaatcacgatgatgacgagcctcgtgatccccaaatgggcgatcaagtcacacagaatgtgaacaacccgactaagccaatcaactcgccgattgcactagctgcgaccacaaaggtaataatcccagctaacatagccgcggttgttgctgtataagtggtaacacagaccaattccgtcttactaggaggtattcaccaagaaagcctcttgcgagcattaagaatgatcgagtagcaaagaaagaccatctacaaactccatgggacatcgccttttac

SEQ ID NO: 245210 - DNA, 1355 bp, Cannabis indica
aatgtcatttttttttcgttatttttgatatctgtaataattattaattattattttttttatatataataatgtatattatagttattttagattatttataataaagtagttaaaaaaatagtatattgctgtattttaaaatactttagaaaaattactattttaataatgttctaaaaaatatgctaaatttgacactatattatatcttgtgttaaataatatgtgttaaatttagtccacatgtacaaataaatactactttttatatcttgtcatatttactaaactttattatttttttattaaacatgttgtatattagagtataattataaatagtgagtcaaaaataacataaaattatttttgtgttaaatttaacacaaatatattaaatctttcattggtgattgtctaagatattacgacatttagtaaaattttgaaaaacttaaataatttttacataagtaaacgattttaattttacttttaatatgttaaattattttaaattttttaattttataaaatattttaaataacttataatattatataataaaattataattatataaaatactaaaaagaaaatttaatatttaaattaattatagtgtcactgttctaaaagttcatgtccacgtgtatggtataaacatggtctaggtgttgtgtgttagctaactctttgtaaagtactaaaatatcaattatatattttccatcactttcataaatagtacaacactaattaaaactacaccctacatagaaataacttatatttttgttataaaaaaatagtttagattaattataaataagaataattaattatataacaattaccaaatgaattgtggtatatatttcataacaaattttgataatgaatatttttaaaagctaataataatgtatgtgtttagcgcgttaataaattcgattttagagttaccttaagttacttaaatacaatgtcatattataaaactatatatatatatggaaccaattgggtgtgttctagacacaagcttaatcatctttaaccgagactcgggccgaatacttgtgcccatataactgtaacgcccgtattttaataataataaacccggaaattaactttaataatttatatattaataaccatatggatcgggatcccgagtatcaaaatttaggttaaaagtactttactattacatatacatatataaatatattttttttaaaagttttgcggacatgcatcttcaaaatacagactccaaaatatttataaaccgaaaccctccaggttgcactgccgcaatatgtacaatcatgccgagttccac

SEQ ID NO: 245211 - DNA, 1075 bp, Cannabis indica
atccgatccgagtatctgatctaggcgggggcggggcggggcagatccgtacataatctggatcaagttagatcatagtcggatcagatccgacccgccccattgacattcctaggtggtatttagaagtcaaatgcaaagtaaattacaaaggagcgcaataaagctttagagggagtctaaacatgtttaagtcaattgtatttgtaattatgtgagactttactaattgatttcattctctgggcgtggtcccgtggactggaattgtttgaaagaacactgatactacgtataattctcttgtgtcaaatttttatattctgcactattatttctattatgttactgtaaatctgtattctgcaataacaagtttctaatctgttattgcagatctttacatccacatttttctttattgttattaacgaaattttatggtgtatataaaaatacagttttttagttagtaaccatgtctcccataatttactcttgcaaggcctcatacacattactagttgaagtttttgtggctttctccagattcttcttagtgccagttctcttaggtgttatctactcaacctctatttcatgaaggccttgtttgtgtgaagaaacctctgtaatattagaattattaagcccttgctccacaactttatggataggaacctgcttctcctcagattaaaagaatatttagaagtaactgatattgcatgttttctttcagacgtaatgatctaaaattagggcattatatattttaattatttaacacaataacagagtctgaattgacaaagctagaggaaagttgcagttttaaaaacattaggtacttatgccgctaaaaaaattattgagtgtatgccgcttacaaactcaaaactttaagtacttatacacgctatttatcttatatataatatatatgaaagttttagatagggtcttcattgttgtccctacttataaataaatatatatacgacaatatggtatagttatattatacatccaatttgttttttaaaaaattggaataatttataatgctgaaaat

SEQ ID NO: 245212 - DNA, 1175 bp, Cannabis indica
tctgggataattagagagttgggccggctgtgaaatggtttattgggcccaactttatgacccctcaccaaggcttggttggcttcaattgattcagataactccatggccctaattaagccatttggatgcaagagtcttaatgggccttgtatctccatcttcaacccattgacataaaccgcctgtaaaccttgatcacccattgttcccatgggatagtcttgcacagattcagtctgtcggagagagaagaaccagtcatagatcgatccttcatgagcagaacggaatcgacgaatcagcagcaccttcaaatcctcccatgacccgatcgtgtgccgagaattctcccacctaaaccaattaagagctgcaccctccaaacacataatcgccgcttccaactgctccgccggcgataggcgttgcaacccaaaatatcggtcagctcggtatgtccactcatcggggtcgtcgccggagtacacgggcaattcgatcttcctggcccgaaactccggtcgtcttcctccttctccatctcgtccgaccgaacccattacagctggagaagatggtcgttcattgaccgaacgccttcccgagctctgcatcggcccttggctttcacgcagagaacacatctcatcggccattcgagcttggccattcaaacataatcatatttgctccgccagaccagaaacagtccgttcctgggtttctttgaattctccaaggatggatttgatcgtatgaatgtcattcttaacactgtctaaaccctcttcgattccttcaactttcttctccattcgagtcgacggcatccaccggaatcctcgctctgataccaaatgatgagcacctgctatcaattcaaacaatttccaatatactaacagcaataaaacagtagtcacagagattcaattcacagtaggagctattattgaatactaatcaaggaaataagcttccacacaaggtagagagctaaggcagctctcacctaatgcagaagagatagttatctcttacaaaatgcataaccgaaaaacacaatcctttcccatacaaaaggtagctcactactaaagacaattaccaaattaccccctcctaagccaatttaccttgcttaccccttctagcataagtaaacttaatag

SEQ ID NO: 245213 - DNA, 592 bp, Cannabis indica
cattcttttaaattcatattttggatgttaaataacatacattcgtctataggtggttagaccaccttggtcgtggtcgtgcagagtagaaatgctgaagcactagcgctcaaagtgcttgtacgtcatcacacgacgtcgatcatacggacaatgtcccttggtacggtcatctctaaggctagacgacgtgggctgggtggagcggcacaaacctaaggcccaaggggttgttgttgttgatgaagcatggctggggtcatggagacataaattaatttttacaaaattaaaattacatataaatttcatatgtcccaaattggcttacattattttttaaaaaatattaacaatagaacctacacgaaatcataccatataattaacgatttagcacgtctcatacattcacaataatattaccatccattcacatacatatcacacacatatatacagtgacgaagcgagaaatttaactgagtgagggcttgaataaatattaattcaaacaatagtattattttattttttttaataaagtgttatttttttattatttgaagtgggctacttttaaaatgggctt

SEQ ID NO: 245214 - DNA, 1073 bp, Cannabis indica
catgtgaaaatggatgaagttaggtagtatttttcttcttgtttttacttaaattctagctaagagaaatacgtagatataaatatatacgtgaatgtatatgtcatagccagtgactgaaattgggtgttggagattttggtacccttttccaaaatcgatggtgggtggtggatcgctgcaaatggattgtgctaatggaatttttggtcgctggttggcaaaattggggtcgggagtgtggggtcaggatgggggtaaattgaggtggagatgaagaagacaaagaagaagagaaaaagaaaataaaaatattttttaagattttttaaataaattatttaccttacaagaaagaaggtttttgccaacgccaatttgcgccaaagaaccaggcataatgcacttgtaactttttgtcggcacataaatgcgtcggtaattctggccagtaatctgtggtcggtaaaattgttttcaccgacgcaattggtaaatgcgtcgacaaaaagggtttatatcgatttttttcgtcgaaaaaatgggcccgctagtgattttgtgcacttgttgttgccttatgttttcttcaacctcttttgcttcgcctagagtgcctttggttccaaaatttcttaaaatcgtaaaaaggattttcatagtagtggaagaagacaatcaaattgatcatcctaataataaataaaagcgattaattaaaggaaattaaggaacacatagaatgctagggaaggagcctctcaatgaactgacccttttaagacgagattgaaaaggcagtctgatcaaaagacacctatgatccaatacgaaatgtgccattagtgaagtaggagagttgacaattaagagaacgattggccgaatctaagcaatcgaccttcaatttcctccttattcttcccgtcatttaaataaaatgatggatttatttggatatttctttcttgctacgttagtattattttctcttaatgtggaagacttattgcatgtttgacattttaaataaaaaattgtttttattttaaaaatagaaaactatttcttga

SEQ ID NO: 245215 - DNA, 825 bp, Cannabis indica
ccaccaaaatatgaggttgaatggttttttacaaataaattaatagttaaggggattttaccgtaaataactccacaagtggctctattattgccactccaccaacactacactctatgaggactagatccaaaatggctttcttaaacctaaggcttataatgctacaaaccatcctcttccgagtctctcctacccactaagcccaagtcaattaaagttgctctcaatagtctcaaatggtttgcttttacgaatcaagagtttactattcttaccaagcaagggacattgacactagttccttacgagccttatatgcatgtcattgggaataaatcagttcacagagtcaagttaaacgactcgaataaattcaaatcgaggttagttgctaaactaaaggctattttcaaaaacacctggaatagactatgaggacacctttagtcctattgtcaagccaactacagtttgtattgttctcagccttgatgtttctacaaattggtcagtcaagcaactagatgtgagtaatgaattccttaatggtactcttcaagaatatgcaacaacctcaggggttcattgatgaactaaaacctttagtcctgttgtcaagccaactacagtttgtattgttctcagccttgatgtttctgcaattaaccagtcaagcaactagatgtgagtaatgcattccttaatggtactcttcaagaaacaatgtatacgcagcaacctcgggggttcattgatgaactaaagcctactcatgtttgtctattacacaacgctttgttatggccttaaataggcatcgag

SEQ ID NO: 245216 - DNA, 1516 bp, Cannabis indica
ggtgctgtatcttttagtttgttcagtaattcccaagtgaggtgcctttgagaagaacatggagcaccataaaaaccagaaaaatggaaagaaggaccatcaacaaaaccaatataacagtcaacaaaggttttaccataattaagaatagatacatttacattggacttccaaagaaataaaataccaccacttagacctactctaggaacttcaataccattaggaaactttaaagcatttctaaacttagtaatagaccttaactttaacttagactccataataaaaataacatcgggatgacactgagaggtgagtcaacgcaattgacggaatgctctcgggttactcaagccctgagcattccaagagacgatattcatggcaattggcgaggctgtggagcagccttcgccaaggaagcgacacaatcttcatctactcgtgaattgtctgaatattcagaagatgaatccgactgttgaagcaaattaatgttgttagtatcagcaagaggagaaccccttgtacgacatcttttcagcacattacgaacattctctcctgaggttgatagttgtcgtttggtgaagagagaggacatacggttctcagtaaccattggcgaaattgcagcagtagtagttgagatggcagtggaggaagacatagtggatcgtgtattaaactcagtggacatgtatatataggctggagggattggcatagaaagagatacgggtttcttaaagtgagtagatgtaagtggggggtatgtggccactggtggagaggctaaagagtgattaagattaggtggaatatgagatattgtggggctgatggtgtcactccgagaggtatatccaattgcagcagcagttgtaggaaagccactgttgttggaatgaattaacttgtcaattgggatttctttagaaccagatgaagaagcctgatcgttaacagagagccctttgggagattgagaaggaaggccatttagttgcaaagagtgtaaatgcttgttgttggattcaatgatgtttgtggagtctaatacttgtttgcctttctctgaagaagtaacattggcaggggcagcaggtagttgtcgtgagtgctcaagaatcggattgattgtgttacgagccagccgagtgagaaaaggccaaggaccctctttagaaaaatcttgtctgtaccgatcataactagaccttggaaggggagatccttccatccaaggaccatatggcagatttggttcaacaccttcatctaatttttccaaaaacagagtgcatttatcaaaaacatgtccaataattccacactcataacaaaagtccggtagcctttcataacggtaatcgatccaaagttcatcatccatccaaggaaaagtaacaaattgaccacgtaagagaggttttgagacatcaacttcaacacgcattcgaagaaaaggcccccacccttcatttagagaatcttcaaagacttcaaggaa

SEQ ID NO: 245217 - DNA, 1059 bp, Cannabis indica
acctggagtgttcggtctcgggacatcttgggtagtattttgtagtcgctgtgtggcatgtttgtaaaagtattttgataacagttgtacaaagtttaaatacgaaatctcgacttatgtaaactatacatatgtttataaagtttaataatttaaatcaaaaattttaattgggcacgatttttgaggaaaaccttttgattagcaaaggaggcacgttaattagaaaatcactataaagcgcctaagtatcagggcgttacaattttggcatcagagtcgccagatttgtctactgaaaatcgtcaagacatgtacattcattgtcagtgaaaagcttggctcacggtttagtaagcctttacttgtttagtaatgtatgtgattaataaagcatgttaggaagcataatagtttatagttatttattttaatgcattgacttaaaactaatgagtgcggtatattgagtttatgtgatcgctttctggcctacctgacttatggggtcgcaaggttaagtcctattaaatggatgcccagcgaaatacaaggagtcagggtagcagggtcgagactggaggcggtaagggaaatcaaaatcccccaaatccttgtggatgcggcagaggccgttaaggctgagcatcgttcggtttggtacgtttttttatataaaaatctaaaattcagttttcggtctggattggtgcattctaaaaattgaccgaccaatcaaaaacttatcttaaaattgagcattttgaacctctgtttggtcggtttaaaccgcccaaactgaacttattttttttaaaaaaatgatccactttattctataagtacattattctacattctacaactacaaccatacaaattaattgttcaaaaactaattgtcatattcttttaactttaatattgtaaagtccttttttggcaagttaggtgacaaaataatttttcctttttatggtaagattgctatgcattcattttcgaattcttacctcttttattcggttattagttgccattttccttgtttggaaagtt

SEQ ID NO: 245218 - DNA, 857 bp, Cannabis indica
tttttcttttttttttttctcttcttctttccagtgttcctcatcctacaacaccatcatcataactaactaacattatcttgaccaccactatcaccaccagcacccaccgaaaccaccactgtcgaccaacaccatcgtagcaacttagttttcaaacccaaatcacaaaaaatatatatatatatataataaataaaaatcaaataaacccaaattcaagaaataaacacgcttatatatatagatctgaaaactccaaattcaggtctgaaaaacttataaattgagcaataatggtggggcttcaagaagggtttcatgggtatcgagaagaagaagaggaggacgagagagtgagatcagagtggcaggcatgtataccgtgcttagaagctcagtcaatgccagagtcaaccctaacccaacgaggttccttccaggtctctgtcaacatcataccgcacccagctcacttgaagggtcgtagctctgaagcccaggtcttcgaatctctgcttgagttgaacccaggacccctagagttaagagacgcaacgaaccagcaaaaaaatcttagactccccttctgggctttcataactaataaagcgtaaaagaaaggagtctcggtattcgttctgacttccgctcgcaaaggaacaagatctagatttgactagggtgagcgcagtttactatgcgagtggacttttccctaaaacctttattgaagaaagcgctcttgccttcaactcaaaacagaacgttccttccacaacgtgaggcctgttaggttttatgccctaaataaaactccatttcaatgtaatctattttattcaacatcaataaag

SEQ ID NO: 245219 - DNA, 1013 bp, Cannabis indica
tttatattaaaattagctaaatagtttttattttgtttaaacaaaaattagcttatagcgctgaacttaaagatttaaattagatgtataaaaaaattaattagagcatttaaaagatcagacttctaaaaagaaaaatgttaatggacactaacaccatataataagtatataaattaagataaatttatttcacatatttcatagacaacacttccaaacctaatcacttttttagtggggatggtcttttaagatctccaaactatttgcagcataacagtatctatgatcaccatcctattaattaactagggttagggaattaattagggcgatataattaataagtttctatggctgtgattgattttgtatacttacttgagtgaattttgtagatttgacatgaacctatacctagtaatgtcaatcggaacccggcctggcccgatattactttggtccggcccacgaaaatagcccagattgacatccctacctatacctgtagctaataatgcatatgcacgtagctgccatttttctcaagaaaggcataatgatgctcctgagttgagtcctgaccattcttcatgaatttttattattccgcccagctgggcatttccctaatagtctttttgaatgagtagtgagtgagaaaagtgagttaatttctcacacgtttagattagaggtatatgttcaatttcacatcagatcaactgggcttactgatgccacaattaactacatatggaaacactatactgcacctttgtaagctatctctaccaacaacatttatgattcatggtgtactacactaaatatgtcaaagtaatttttattttcttcaaaacacaacatccattaataatttattttttcttaacaacttcttacattaattttaatatatttaagtgtcgtacattttaaattaaatattataaaatgagaaatgctaaagggcaccgtgcctagcaccttcctatgtttcaatatcg

SEQ ID NO: 245220 - DNA, 1498 bp, Cannabis indica
aacttttcaaaccaatcaacatctatgttagagttagagacttttctatgctttacatcatattctattttctttacaattgctcctattgtgtatacatttaaattccaaatagcctcatttccatacagttgccatagcagctgcaaaaacttgccttttatatttactttccttcaatttttcaaggaataatttcctaaacacacaaaaataataaaataattacagaaaatacggtttttgatgtatttttatcttctactctttattttgcggtttaattttaaattatcattttttgtgttgttttctgttaatttcatgtggttttcttgtgattttataaaataccgtaaaaaatgtaaaaaaataaaaaatctctaaaacataaaaaaattttatgtaaaacttttacaaaaattagccgtttttgtaattttttccatttttcaatcccttcctgccaaagtcctccatcccagcaagaacttaattaataccacacaaaggacacatctcatcagcaataacatgttacatctaaataatctctatttccttttcaacctatccaacactgcaagctagagaataaatttgtgtttcgaaattaaaagtctatttcatacctcgccttgccaagaagcctttctttgaggaggacacaatgctcattgatccgataagggcttgtttaaacgataccagagcgaagattgttgaatttatctttaatcatgtctacttgtagtccctccaattgacccacaatgtatcttgtttagtttcaactgtccatacatatttctctattgctgcttctttctttgttttagtcatttgatctcacaacaaattcctacaaaccgagttaactctttgtagaaatttctttggaagaatataatttgagcccaacaaatcaatatatggaagacttagtttcacttggttgttgggttgattggactattttacttgcattgcatatatggattgcattgcatacaacactctgatcaaatccaatttaatactaagactatgattagaggaagaaaacaattacaaaacatcaacagaagaacacaaaaacaaaagataacactctgcacatgaactcttgtcaattacagaaagagacagtaatttaagaattaaaacacaacaacacaattcgaatattacacattacattccaattattaataattgaactaacagacactggtgaatggtgattggcaatggcaacacatcctccaaatgttgatatgagattctatcaatctgcattcatagtaatgccaacagaaaatgcataagcaaataagtacatatatacttactagtttgtgagtaagtgtctttgttactttcacccatttttaagggatgtaattttatttcataattaaaaattttaattacagaataataaacatgataacaatgattcgaaactcatactcattggatctgttttcttaagtgg

SEQ ID NO: 245221 - DNA, 1183 bp, Cannabis indica
ttggtacatttttttattatcttctctaaaggtaagtagccgcatcattatacatgttgtggaagagagacgacgttctacatggtgtatggacaggtgcagtagcgttttacccaattttgtttgctgaataataatgatccattactgttggctttcattgaaatttaggtcctattcttgtagcttctttgcttgatgctaaacttacctttattaagaatatcggtctttctcatgtcttgtcccagaatgaaaatgggttagaaatgtcttttacagggagtctggtttcaggttagaatattgtgtaccaggctattagtaaacacctttttttttttcattattggtggattctaataatgaatttctatactaatcaagtttagtgttaaaaaaaagtaagtggagaggaatgttagccttctgctagttgaatgaaaaactaaaagacatttagaaacgatctttacttcttcttagcaagtcgtatgaagaataattatcttcattccttatcaaaaaaagtgttacttttgtgctccacatgaacaagtggatgataacatcatgactaattatcttccgataaaataaacaaatagcaacatagtaataatcaagattagttgtttattattatagcaagctaactcctaagtcctaaggtagggacagaaatagcttcttttgttagcttcaatgccagccttttggattacttcaaattcaaattaaaaacgtttgaaggcgtgaagtttgaagcagaaaattccataatcggttgatctgttggaactttttcatagagttaatgaatttttaacaaaatgatagtgttttagtgtttttgacatgagtggatatgagtttttgtttataagggtatatataaaatgtaattttgacacttgggatagggctctaaggggtacttagttttgtgcgaatgggtgtggatatatacttgacccaccacgagccgattggtgtggtgtgacactttgttttttgaaaaaaatttaatatattatttttatttaattaatcaaaacaatttttaaacatgtttaaattaattggtaaaacgatttttcatttttaaaaatgtataacttttttcactcactttattcaactgtcttgcattggtattttgggaggtacatttttcttccaa

SEQ ID NO: 245222 - DNA, 667 bp, Cannabis indica
tacaagtagtagaagtatactgtgagaattttgtgatataagaataagaagaatttttgttttgatttttgttttgggagtcttgttgattgaataattagatgaagttggtgtagctacaagtttctgagcttggtatttatggagctaaggaaatgtacggccgaattataacttctttatattcattcccgctataaaactctaggacgggccacaagtatctacaacagtggttattttataactttttataaaattttaaaaataatctaagttaatcaacaacttatcaaaaaaaaaatgtttaaagggtggtacccacaaacattatataaaaaaaaatgctaattgtgactttcacatatcaaatactatgatattcctactactactattattgaattttctctatatatttatataaatatgtaaatattttttattttggagatagaaagattggaacttgagacttctcataaataagaagcgtggaatcactaaattatttttattttgatgaacacaccacaatctcttatattttgttttattaaaaaaaatataaaaatttattgatgttaattataaaatatcacctcagtataatgttagacaacctaaaatatgaattagcaatactcaaaattattagggttttttt

SEQ ID NO: 245223 - DNA, 915 bp, Cannabis indica
gattgcacagcttacccggtgtttcccccttacggatcacgggactactgactgtcacagacttggacttctctcaataattgttgaatgttagaagtttttgtttgaataaagtgagaaattctcaaaggttagagaagttgaggagacaccacgtgttaggagtgtacataaattttcataaactacccaaactaaactgagaaaattaaacaaaaatgcaaactgaacaacacgataaaaatgtaattcacccaattaaactaaattaacctgactaattcaattaaaatttttattttatgtttatattatatatacaattatatatagtataatttatatataaagatatttatatctatgtaaaattcaaattatatgttgatttaaattttatttttaaactatgtttgtctcattattacaataaattaaattataaatggaatatgtcaaataaaatagtataaacaaactgatacacaactctagcacgtgtacaaaaacagttacatactccacatgttaagagtaaaaaaagtttatctagtgtgtggctaatcaataacctttataaaagtgataattttttttaagcttccacatattaaattaccaaaatatccttacttctcattcttaatatgttgaggttgatcatatacaatacacggagagtccttttttttttaaactaaattatctattatatgttgaataatttggtttgagttattaataaaattaaattttattcaatatataaatatatatatatttatataacattgttttttttttctcaaatatattgttgcatgtatatatatgtatatatgggtgattattcaatggttacatttttattgtaaccatatggttacatttttttttacttgtaatagcaggtta

SEQ ID NO: 245224 - DNA, 1710 bp, Cannabis indica
agtaatggttcattcatcaaaataaattttcactttttctctctcaaaaaattcaaattcaaaatgaaaaatggggaaaatggtaaatagatgatttccacattatttataggactaaaatggcaatttgcttgcccttgagttaatggctcaaattgcatccaagaaaatggaaaatatatatgatggtctagaaaaactgtcagcttttcatttaatacatcgcttggaactgagatattcaaataatgaaaattcttcttgggacactcgctaacatgatcagcgacagttttgcaaatccacgatgcgcgacgctaccttcaaaaacgtaatcttcactagccaacgaaataatggcacatgtcactccatttcaaaaagtaagaagttgtcaaccacaacgtgttcacttagaattgaaaaaggtcttcaccttttaagcatccacatatcctcatgccatttggaaggaaaaatcaagccttcaaaatcccagagttctgaaagcttgggctaaatattattcgtgtttctggaaggacacgtgtgattccaagattatttaattcagctaatacaggcccaaacgcaggcccatttaaggtaatagaccaaatccattaatggagtcaaaccatccagatgatggacagatgattggttcatgcaaacaagtatccatctaagcacatctccgaatagcattaagcaatgctccaagaagagtaattaatgagcatctatatgttgagcatagtatcccactcatttattattatctcccacaatatcaagacattatttctaagatcttgtctgagagtctaatattctcaatatggaaataagataattgccaatcaagcattatctttattatctacaaaagtaggacatgttttgacaactatcaacatgacatggcatccatgttagtagaaaattaatacctcacgggccgagcttcaccggatgaactcgaaattaataaattatttgtatttacctcattagtaggcaatgtttacatacaagagctctaagtctataaatataagaaaattcatttatgcaaaaggttaaaatctgaattcttgcaagctaaggaaaattctaaggtttgtaaactcgacaaatatttgtgcaatactcaaagatttttccagccataataatattgactcgtgaataagaggtcgttaatctttgaccacgtaaaatctcttttcttgttctttgtttttgatctatctgtttaattttaacataattatattctgtttctaaaaatctcgataaataattttatttttaaatatttattcacgtgtgccaataaaataatatcatgtgtacattgtatctatgtggataatactctatgtacatgtagacattcaacttacagtttactgtcaaaatagataaaaataattaaatactaacgaaacttggatttaaaaaattttatcatcaaacaataaattttaaaaattaattgttagtgaggtgacactattaaagattacctcgcaatttagtctttctaatattgtaattagtttggttagaccttcttgaattatttattttgtgagatttgtgcaagtttgaataggaatttatcattcttaaccaataatgaatgttctaaacaaggaaaaaaagaaactttttttattataaaaaagtgaaaaaagaaaaaaa

SEQ ID NO: 245225 - DNA, 1262 bp, Cannabis indica
caaaattcaaaggaagaaaaaaaaaaattgaatgtataaagaaatgtttagttttgtttaaaattacatatagagaccatactacttgtaagactcagttaattgattttaattaatcaattaaaaaaaagctttctctggttctggctcttgcagctctctcggttggtgctatggctaaaacaagatcgaaaaaccatggaaagcctaaatctgctactaaaaattcaaagaaaaaagctggaaaagcaatttcggatgagatctgatctgatgctctgatcaaatcacggagattgagcctttggaggtcctggatatggaggttctgcaggaagaagatgctctcaaagacgtctttcaacccccattatcccccaaatcatccttggaatcgatacacagacaggaaggaattcggaatgacttcatccactttcttaaagccaatgatcaatgtaacagtaacctttgacaaggtatgaattcgattccccctatattgcgttctaactctgtcaagcgcaacttggagaattcttttagagatactgagcagagtaatagggtgaagataactctggatgatattgaggatgaaatcttgttttggaaaccctcaattgtatgttatgttcttggagttaatcctcctcttcatatccttgagggttttgcaaataggatttggaaggataaggttgatagagtgaaggtactgtcacatggcatatttctcattcgttttcactcgatggaatatagagaccaggtcattaatggaggatatatcttcttcaaccggaggccagtcataatgaagccatgggatcctaatgtcaatttcaaaaaggaagatgttaaatgtgtgccaatttggattcaacttgaagacttggaattgaaatattgggggggggggggaaatcactcttcaagatagttggacagcttgggaaacctctcatggtggactctatcaccagagagagggagaggctcagctaccctagggtcctagttgaggttatcatggatcaacatctcccgagtatgttggattttgaaaatgagtttggttcgaatacatcagtaggagttaaatacgagtgaaaaccaattacatgttccaattgcttcggcattgggaatgccaccactgactgtaagaaaactactattgtcaaacaacagtgggtgattaagaaggataataggaaggccttagaacatgatgacgagggctttactaaggtctcaaa

SEQ ID NO: 245226 - DNA, 1019 bp, Cannabis indica
aatagtatgttagtttttgtttttttttttttgaagaagagctgagagaataaacaatacaaacataagcacagagaaaagaaacattcaatgttcccctttgctgtccttcctttgcctgagagcttcttttgctgagttatggacttcggtattgaattgtcgtgatagatggtgcaaggaggctgcagggaagttggaaaaggactgtcttatctttgaaacaagacttgagagagcaagttgttctgccactggccattaactttcgatacaaggttaagacaatcggtaaagatgaaattgggctgcatctggaggaaaaggcaccaagagagaccttccaataaagcttgaccttcagcaaatataggagtaggagcacctggtttttggatggatgcagaagtgaaaacttggttagagcctctctttataacaaaacccaaacctgtgacacaattagtatgatccagtgctgcatccacaaataaactaatactgtcattggaaataatgtgttgtgaactcggtttggaactggatggttgctaagttgtgtcagccgaaggtgaatctactccattgatcctttgagcctcctaatattcctgcaaataattcatgacaaactcttccacattttaatactataagactttttatacagtgctttgtttataagtattagtagagaagtccggaagtactttatatgtataaagaattatacatatatgatcatttgatataaaaattaagatcatacaacaagaatgtaacaaatatatggtcttggagtaccatcgttatcacatataaaaatttatattattattgatgtgtaatgttcatattccttaaaagtccatacatactcatgaagagttatagtaaatatatggtcatagataatatacatgatattttaaaagtgataataataatcttatgaggtatattatcaccaacataattatagatcatacgtgcatgatggagagatatattcatgttgc

SEQ ID NO: 245227 - DNA, 756 bp, Cannabis indica
tcatatttctgcagcggttgaatatgttccagtccaaaatcaagcagctgcacaaaaactcctccagaaattgaataaccaaaacgaccagcattataaaggtagaaggtttaaggggaaggagagacgagaagagccttcaacattcactcttgatgaatgggaaaagagaaaagctggggcaagcacaaaacctctaatagggcccgggcatcaacatttgagtcatgatgaggaacttgcatggcagcttcaacaccaatttgatttggaagactctaatgtcagcatccttgccacttagtaattattacgaataccacaataataattgtaggcctaacattgttcagttgcaattttatcaggtaggaagcggttttccaaatgcggaggctgaagatataaaaatgagcatgttcagctacagaaaagatgacaactggggtggtgggatggagcatgaaggcaatagaaggggtaggggaagagggagagggagggggaggggaagggggagaggtagggggagatgaagatttcatagactttctgcctctcctttgtgatattataatttcttttattttctgaggtaatttgatgttaagcatgtgtaaattgttgcaacaaagccctcaaattttgtatctgtaaaatttggttcactgttgcatttcgcccgtgatttctggcggaatgtgtgttgtttcctaggaaatgataacttttagagtctataggcttttgatctgc

SEQ ID NO: 245228 - DNA, 738 bp, Cannabis indica
taagattaataaggggatacttcgaatattatgtcacctattgaagacatggtgaaaaatttctatttgacattctttgtttttcctaaatctgcaagtggttggatcgtcatttatttatatacacagtagaatcactcatggcagttagtgtgcttcctgcccgcgaggacagaaagaagagcaacaatattaatttttctgtgacattttgaataaattggcgatgtttctatggatagtaaagcaatattaattgatatataatataaattatgaaaataaactatttttgaattcttttgtgtagctctgacgactcttcctaatattttgttaatctatcgtatttaattaaccgaatagatagaaaatgttaagcctcgagcttggtgtgctttggggattacaatagacatcttgaccaccatattaaattgatgagctcagatgacatagttgcattctttgatccggataaatggaaccaatttttgtgttttgtaggctttggttcttaattcctttgctaatagatgcatcatctgcaaatgcaaatgtgctaagagtaaaaaaagacaatttttaacacatacaaagagcaataaggaagacacaaaatacttaaaaacataaacataaagttgtgaaccaaaaataacttattaaagcatatttcatttaaactctggaactaattgcaaaataaaaaatatttagtcaaaattggcttgttct

SEQ ID NO: 245229 - DNA, 1556 bp, Cannabis indica
aaaaaatagtgtcttacgtaattatccttaatatttatagttgttacacatttaacactaattagggatgggcatttaatccaagttaacatttttctactcatccgatccaacccaattttaaattcaatccaatcagattcaattactaattagactggattggttttttaattagatatctaattacaaacctagttttaaatattaacttaaaaataaatatcacattttatttaagtttaatactccataaaaatatcatcgttacaagtataatgtaactaaaaatttaaaataattaaaacaataacattactaaataataaaataaaacaaaacattataaaattaaatacataaaataactaagtggtacaaattaaaaaaaaaataggtactaaaaatatattaatatatatatttattgtattgttttttattatataaatcaatataataatttttataatgtatataaatgtaattgaatttgatcagtgtttaattagattttactgatccaattcatttagaatcttacttttatcatctaatataatttaattgtaattggatatttgattttttttttaaaataaattggataagatcagtttagttcgattcggcaaaagtaatataaatattaaaatatttttactgtgattttttttattagagcaacaaatttagttataaatatctcaatttaatataatttttgagttagtttttttaacataaataaatttttgttcaaagaaaaaaaaaaataaatgatcaagtgtaagtgggtgggtggccacatgggtgacaagtaacaacctttttgggtccaaaccaaacttgtcaatggacaaacctatccaacccaaaatataaacaataataataaataataaaatgacaagtctaattattttcgtggcaattttcaattgagtaatttagaatgactttgacaatttgacacgagtgccaggttaataaattattactttaaattaaaatgaaaaaaaagggctaatttttttactcccgaactttaacatgtactaaattatgctcttgaatttttaaagtcgttaaaaattttccctaaactattgtctaattctaacatggatgaaagttcaggaggcatgatttaatgcatatcaaaatttgagggatatgatttggtagatatcaaagtttggggagcatgatttagtacataaacaatcaatgaaacagtaaaattgaatgaaattagacaaaagtccttaaatctaataatctcagtagtttaggaggaaattttaacggccaaaaaagttcaggagcatgatttggtacatgtcaaagttcgggggaaagaaatcctaattagccaaaaagtaaatattatatttgatataagattaatttacgacataagtgtctagtttattgcaactaattcctaattttaaaattttagtaggaaaaatcccaaaaattatattctgtacacgtggcacaattcaattggcttacgtaaataaatatttaaaattgaaataatatttaaa

SEQ ID NO: 245230 - DNA, 889 bp, Cannabis indica
taggcatttttagacactaatcttttatgttatcgattttcatattccctttattttcccacatttttagacaccaatctgtcatttctttggtttcttattttatgatgaatttttaataaaagtttatttcttgagcacaatgaagccaaaccttaattaggctttattttttattttttaaaaggaatttttctgttctcattaaattcaatccccctcctgttgtgaggcatttcctgatacggtattgtatatttgtgaaatcatattagtttaactgatattggagtcacacacacaaactcagttgcatttgatgtgctggaacattcaagtttgagagttaccactagttcttgatgtctattctcagggtgttaagcaagtcttagtgaagcttggggaaaaagggtctgctctttttacaaaaggagaagaaccaatcaaacaaccagtcatatctgctgagaaagttgtagacactacgggagctggtgatacctttactgcatcttttgctgtagcttttgtggagggcaagtccatgaaggaatgcttgagatttgcaggtatggcattcccgaaaacccttcaatgatccttgattatgcttcttctcacaattcattacttttattttctgcctcctcttttcaacagccgcggcagcttcattatgtgttcaagtcaagggagccattcctagcatgcctgacagaacatcagttttgaatcttcttcagtttggttgagatgatattgaatccaatgaccggaactctaaattttcaccataagcaagcatgaatgcaagccaccagaagtgaccaaataactagttcatgatcaaatttcgattttagttttattatgacgtgaccaataa

SEQ ID NO: 245231 - DNA, 1718 bp, Cannabis indica
attacaatttgttgtgactaaatgtagttttagtcacaatagtgacaacttgtgtataaatactatgttttagtcacaaggagtattttgttgtgaccaaaagtcacatttagtcacaaaaaatttatgttgtgactaaaaaattgtcactaaaaggagcttgttttttgtagtggttattggatatcactgatatctaatattatttgtaggtagtgtcttgtgattggttaataatatttcataattattaaattaaattacataaaactaaatacttaagttcatcagtaaagaaataatactttggagaaaataagagataatttattgttataattagtacgtaggtaggtgtctcgatcgactaattttaattaacatatttttacaattattatatgatgaaataattgaggtgatccaataattacatctaataataatttttatatatatggctagtagttacttagcttagtttctcctataaatacacttgtctaaatacatatcatcaagaaaaaaaaacatagaaacacagacatatatagctagaaaatgaagatgttgaagagtataataattatgctatttgtggttaataatgtggggtggtgctatgggactagagtagcacatagtgttactatcattccaagtagtaatgatgggtgtaaaacagaaggtcaatattgtagtgccttaccttggcaaatgaaaatttgttgtgaagggcttagctgtgtaggatttctgagtagtgaaaacaaatgtgtgaaagtggcagattgtcgtcaacttggtcatccttgtgctcttttcaacccttgttgttacccatatcattgtagtggtactaccgatggttcaacatgtttggcctctgcttctaccactactactactacttctacttctacaccatcatcatcaatattgtcactagctcatgttgatgaataattatatatatagtatatagttgtgtgtgtggtttgtgcttgaattgtaataagaaagtaccactacttatatactaggatatatgtcaaaccacgttgttatatatatatatataatgtggaaatataagatgtgtatcccaactggtactttcacatgaataatatgcttgttcaatataactatataatatgttaaggtatggctcttacactattattcgaatggtattagcatagtggagaatattacttcagctaatttacaataaaaaacctttttttctttcaacttaactcacaatatgaggtaattgaatttaatatctaatgaataaacgcattgagtaaagcttattggtatttcattggtgttaataaattgcagctcacagacctgacaacactctcaagtgctgaacaaagcttatagagttggtcttgaggtaactacgattatttctttaatgagttaaacactgccaacccacgaatctttggataagtggaggagtgctcacacatgtaataactccctgagatccatgatcaagaaagccttacgggatttggtatggaaagtgaccaatgaaggtatttcttcgatcactcaggggaaaataagacataatatacagaagctatgcacgttacctgagcatttagaaaaaatcatacacgagagccatgtatgtcacatacactttggtatacgagagctaggtgttatcccggtatacgggagccatgggt

SEQ ID NO: 245232 - DNA, 998 bp, Cannabis indica
gctcttgatcactggcgaaaagctcaagataacaactctctatctcatatttactctggtaattgtgatgacggaactgagctttggactaaacctgatataaacacaatcaagatcaacgttgatgctgcacttttcactagcgataaccagtatggctatggtatggttgcaaggaatgacactggttctcttattgttgctcaagctcattgttttaatggagctttcgcccctgaggttgtggaagtcatgggaatcaaggaggctctaagctggatcaaacgacaaggatggcaacatgttgagttggagtcagacagcttagtttccatccaagctatccggtgccgctcacctctctcttctgtgtttgggaatttagttcaagattgcatttcacttttgctttctttgccttttgttaaaatacgttttgttaaacgatcagcaaaccgtctagcacatgctgttgctagaatgtcacggtctctctctggtcgtcttatttctgagtctaatgctccagtttctattctagacatcttgtactcagaaagttgatttaatgaagttgaaatttcatcaaaaaaaaaaaaaagaaaaaataacaaaaaggtagacgcatataactgggttttttgctttattgctggtagtaattgccaagtacaccattactctcagaaagtaacttcttcacatttctttcaaaaaacgaaaaaaaagtaacttcttcacatttttgcttcttgttgttcccaggttcttgtgaagaatgttcctcctgatcctgatgagtcagtcagtgagcatgttgagcatttcttctgtgtaaatcatcccgatcattatcttatgcatcatgtatgtaaattttttcatgtttgtaattacatggtgtagtttaactgcttgaaggaaaggttttgtgataacacacagtttctaattttgacatgtaaatcatgtgattggttgaagaattttgatgtata

SEQ ID NO: 245233 - DNA, 1146 bp, Cannabis indica
catctaatacccaacatagaaagtggacgtacatgttttttttttttttttttaattttctttcaccctatatttctttaatttcaacaatgtgaagttatttcgtggatgtgtacttaatatgtgcatataatagcttattattgtatgtactcgaaattttagtttaaagaaataaaaatataagaataagaatagaaatagaataaaataaaaatgaaatagaatcaaatttaaaatatataaaaatttgatagaaagattattaattttttttatcttgtattgaaatagtcttttttttattttaaaattaaatagtcattttactcaaataatggaaaaattattctattcaaataacattttaatattttaaaatactatcaaacaaaaaataaaataatttttttttcattccattttattttattacatctaaccaaacaaacaccagcttaatgttgaggacgacgaaaataagatcagttaaagaagaatcttaactgttttatcatgtcagcatgtgtgtatataatattattatatagcttcttcaataattttttcatcaattaagcgtaaaagtgttgtgcaatttatttatattaatattgtttgacgaaggattaataaacccattcaagtacattttggcaggttacaccatgggtgttagtccagtcagattccgaggaaatgcggcgctagacggttgtatatatatatacatatatacatactaaattaattagttttttttaggtattatattttgattttaataactattataagtaatagggaaaaaataggaaaatactatcggactgtcctttaaacattgcgctgaaatataaaatgaccttaaatttaaaaataaagttaggaaatgttcctttttataagtatttagcaaattagccatttagataaaaaaattgatgataaaactataattataaccttagataattaatcttaactttttaccctcttcttattctctcgtgtctaggctatcttgccacctataattagtaaatgtctcttatatttcttttaaacagataagctataaattatcaggttgagtaaaattttaatggttacattgtgcttttttttcatcttttttaagttgta

SEQ ID NO: 245234 - DNA, 2013 bp, Cannabis indica
ctccttgtacggatcaacttggtctgtgggggccagaggctcaatattctgggcggtaggggtttcagtgctctggtcggtcagaattatagatgtggctgcctcagggttttctttagctgcctgacctacacagtaatcaagatatacatctttggaatcattgaggtaatcgaaattgcctgaggggttggccttccaaaactcgtagaagacctcaagggtagccgtgtccaggctttccacctccttcaagagtccttcctccctggtctgcccagtagtggtatcctcctccaactttgagagaagagtgcggagactctccctctcgtctttgagctcattgacctccttagacaaggcattattgtctgcctccaactgggcagttgatggcatatcttgaatctcttttatcagctcttcaacccatttattgacagcaaggagctttttgttcacctctccaagctcgtttcgcacgtcctaaacctcctttttacccgcatccacctccctctgcaaggtgttagtgttagcaaggttctttgccgctatggacttggctcaggaataggcgtaagccatcttctgattgacctggatggaaaaaaagttaaaacttgaactagtaaaaggcagaacaaaaataaaggaaatgcttacccgagcagcctcttcaaaattcctcccatgaccaatttcaaggacatatcgttgtccaccccaaacagatgatcgctcacctcgggaagtgaccgatcgaggtagtattaaagcatgtcctttcctttcttggcctctgtgctcagtaccacggctgttgaggaagtcttggtctaaccagaccgatccgagctccccctttggaactcctagattttgagaccttctggactgagggtccatggcaggcactacctcagagaggttaattacttcatcggctgacactttctctttggatggagcctcttcgccttgagatctattgggcaggggagtcttgcctgagctgtcaccaaccctcttcttcaaagcttggagtactttttgggacatgactgcacaaacaaaaccataaagttagaagcaagtgcaatataaggcatgtcaggaaagaaataaatacaagtcaaaaataccctgcacgtgggcaagagcattcttccgaacgagtagggatggagcctcaacatctgaagagtcttctgctcggttaggacgactttcctttttccctccattggggtagacggctggacaggtctatcaggttccctaatcctgatagcacgctccactagtacctagtcagtaggaagagccttcttcctcttcttgcttaacttctcctgctcggtcaccccaacctggttggcctttgccttcttcttcttcttcaaaagccttggcacaaatttctctgggaagagtttgtacttgacataattggcctcagtgccaagaaggtaatgttccgagcaacgtccgacaattgaaggattttttgtgccctctccctaagccccaatgtgaagggaggatgacagtatgagggaatctactggaatcgagtgtggacagtatgcatgctgtggaggaagtagtactcgtccaaaaaattccctatcttactgacattggagtccacggtgcccgttagccacttctcctcgatctgagaaaaatagaaataccttaacctgctctgcttggggattgatttcaaatcaaagagccagttgatgtcgtgcagggatggctcaccccatccctctgaggcataaagaatgaacagggcagatagatacatgatgcccttcgaggtgaaatgagtcggatagagatggtactgatccgtaattcttctgaagtatagaagcaagggcagcattgcaccctgcttagggtgagcacccgaccaaccgcagtacccttctcttggactggtttcccgttgatttggagagggaaggaagaattagacatccgccaagtaaccgtgct

SEQ ID NO: 245235 - DNA, 1174 bp, Cannabis indica
ttagtgtatcccaatttgcccatgataatagtgttttctttgagtttcaccccactattgtgttgtgaaagatcaggttacttcgaggattttactccatggaaacttgacaatggcctttacaagtttgacacaactcaacttgacttgcttgcctccagcacacaacatcccagtatgttaaagagtcaagattctcctagtcttaattcttcttcctctcactgtaatacacacattggttctcacaataataactcttttaatttgtggcacaagagacttggacacccctcctcaaggattgtccaagctgctatctcctcttgtaacatcaaattgaatgataatagtaagaaagactttaatgttactgaactgtgtcaagcttgttgtttaggaaaattgcacaagttaccctttcctatttctgccattgtttacaataagccattacaacttgttcactctgatctatagggtccagcccccataacatcatctaatggaaataagctttgttgatgccttttctaaacatacatggctttacttattaagaaccaaagttgaggctctatccactttcataactttcaaaaatcaagttgagaaccaactaaacactcgcattaaacttatacagtctgactggggttagggagattaccaagctttcactagttttttacaagaatgtggtattctacatagagtgtcatatccccacacacatgaacaaaatggtgttgttaagagaaaacataggcacattgtagaaagtggccttacccttctagcacaagcatacttacctataaagttttgggatgaagcatatagggcatctgttttcctcataaacagaatgcctacagcccaactgaaatacctctcacccattaaaatcctttttcacactaaacctgactatgatatcctcaaggtgtttgggtgtctctgttaccccaacctaaggccttacaataaaatcaaacttcaatttaggtctcagccctgcacttttataggatatagtaaaacacataaacgttataaatgcccagctaaagatgggagagtgtacatttctagagatgttttgtttgatgagcaaatttttccttattcccccaaacaaccacaaacagccactacttccaactctcctact

SEQ ID NO: 245236 - DNA, 862 bp, Cannabis indica
attgaaacgggttttatttagggcacaaaacctaacaattcctagatctgtcacttctcaacagaatgaagatttactagcaactgtcactgaggaagaaatttgtaaggcagttttccaaatgcatcctgacatcgccaggaccagatggcatgacccctggattttatcaaaaatgttggcacattgtgaagcaagatgtttgcactcttgtaaggaattttttctcagatggtacaattccaaatggtttaaaccgcacacatattgtacttatccctaagaaaaagaccccgatcaatatgggtgatctgagagccatctctttctgcaatgttttatataagatcatctccaaagtcctatctaatcgtctaaaggtagtgcttccacatttgatttcagacacgcaaagcgcctttgttctaggcagattcatgaaagataatatcatgatttcatatgaattcatgcactatctaaaacgcaaaaggaggggcaaggaaggatttatggctttgaaacttgactttagtaaagcttatgatagggttgaatggccttttcttgaagcggttttgtttaagatggggttcgattctaaatggatctttctcatactttagtgtattacttcggttgagtacatggttactcataatggatggagtattggccctattattccatctaggggcattcgacaaggtgaccctttgtcctcttatttgttttaatttgtgttgaagctttttcatcactaattaaacactatgagatcactcatcaaatcaaaggcattagagttgctaatggtgctccttttatttctcacatgtatttgcggatgatagctatgtgt

SEQ ID NO: 245237 - DNA, 1517 bp, Cannabis indica
tttttttttagtcaatcatataaatttttcacatagtgttatttattattatattttattatatacaatttatattattattataatatattctatttttctctttctatataaatttacttatttttttttctctgataataactgcaatgataggagatttttttatagatgataattggaagtttttgttatgtttgctgatggtattaccccaagattgagattatataatcaccaattttatattgaataattggagctttaaggtgatgagtttgttactgccagagatggatgttgtcattgacagagatggactaggtccttgaagaattttgaatcacaggagaagaacaatagtagaattgattggaataggagaaagagggatgttgaagcaattgcaagagagagaaacaatcaaagagacagaaaaaaaaaaagattagtaggaaccgcaatgaaaaagaagagttgtcaaaaaataattttgtttttaaatgttttgtatggcttttttttatttataaacccatatttttagtttgttttgttaaaaaatgccatatattgtagcatttaagttttcatgctatatttatcaaaactttctcatttttttcccagagttttgtaaaaacccctaaaaaatattacacaaatacattgggtctgctttataaactagcacaccaaccaaaaaaatactaatctagaaaagactgtaaaaaaatctaaacacatttaattttagatttatgcaaaatcgtgcagaaaaaattggttcaaaattaaaattcaaccttgaattacgatttaaatatcataaaactaatcctcttaatatcaatttttacaaattttaaaaaatgtagatctcttataaatagatctggagttctcgatcaatctaaaatcagctatgatccaaaaaaaatacaaaaataataaaacaaatgcttatctcattgtattgacgttgttttccagatttttaatttgaatttgatcgtatcaaatcatgaagagtattaaaattctaatagatctacagacacatacatcaaaaaattgttctagtttgttaagtttatgaatgattttattacagttgcataatggttttgctaaccctctgaaacttgacatatcgttgattacaaattgataacgagacaatggtatttatcataattacatgtgttatccctattaggctacttttagcctatattttggatcgactttatgttcgtttttcgttattttaggacggaattatgcgtgtttttcaagtttttcaggttcctcagagttacagaggtctcgggatgcaaaagtgcattaaaagatgagcggagccaagaaaaacgcgatttttcaaacttacgcatatctggccacggccaaaaacaccatcgccgcagccatagtgaaattacagagacatgtttttgtaggcttatctggtcgcggcgagatacaccctccccgcggccatagtggacttacag

SEQ ID NO: 245238 - DNA, 3053 bp, Cannabis indica
tttgttttgtttcattgttagttcttctttattctctgatgattgtcatcttcgatattggcagttgagaataacaagttctctacaactaaaagagttgttaattactagtgcaattacttactttacactatagctgagttctcaagctacgaaattgaatgaacctactccaacaaattctactgttgtgtcttctaaaaattagataaaacttaatataaatatttttaaaattaatttaatgcaataatttttttaatcttattttatttttaattttctctcaaaaaatttaaaaatattatataattttaattgtgcctccatatattccaattaaattataattattattattattttaattaaatattattaataataaaattacataattcattattaaaacaaacaaacaaaccatgccccacaattgtttaaaataattatttcctcaattaaaaaaaaaaaaaaaaacaaaaaaaattgaagccacactcaaaactttttctctactatcctatctctttcctattccaaacttttctacttactcattattctaattatcccacgtgcttttttcttcacatatataaaccaaaaaccccactcattcaaaacaatccaaacaactttctctctctaacctcactctctctctcctcatcctccatggccgtcgttagagaacgccgtcacctcaatctccgtctccccttaccggaaacctccgatcgccgaccacgcttccctctcccactccctccatccaccaccaccgccgtcgccgccgccgtcgaattcaactggtcatcttcctctgccgcaatctctgccgccgatctagaaaaaattcaagttctcggaagcggaaatggcggaacagtctacaaagtccgtcacaaaaaaacctccgaaatctacgctctgaaaataatccacacagattccgattccgattccaaagtccgtcgccaactccaccgcgagatggagattctccgccgtacggactcacctcacgtggttcgatgccacgagatcttccagaaaccttctggagatttcggaatactaatggagtatatggattccggaaccttagagaatgttctagaatccgaaggaactttctcggaatccaaacttgctgacgtggcaagaaaagtacttaacggtcttcactaccttcactcgcgtaaaattattcatcgtgatattaaaccggcgaatctgttagtgaattcgaaaatggaagttaagatcgccgattttggggtaagcaaaatcctgtgccgtactttggacgcctgtaattcttacgttggaacttgtgcttatatgagtccagagaggtttgatccggaaacttatggcggaaattacgatggttatgctggtgatatttggagtttgggtttaactttaatggagctttatatgggtcattttccgctacttccgccgggtcagagacccgattgggctactcttatgtgttcgatctgtttcggtgagccgccgagtctgccggaaggtgtttctgatgagtttaggagttttgttgagtgttgtttgcagaaggagtcgagtaaaaggtggtcggtttcgaagttgatgggtcacccgtttgtttgtaaagatccgaaacccgaacaatcatagttccgacccgaatgggatccgagaattggttttgtatattttgattgggaggatataatgttagattagggagggattaatttgattgtttaagttaattaatattattatgattttattttaatgtattttttttaatttcttactctttttcttttgtaaatatagccattttgattaaaaaaataataatttttttattatatctattagacatagaagtaaagacgaaatagacatatataatggattattgccactcatacaaataaattaaaattatctttacactaataacaattcaaattttggtactatgggacactatgagttgttgatgtcctataattaattagtgacataaaatttaagtatttatctaaaaatatttgaaggtgaattatttatgcatactcctaatttaatagatcattaccactactaatagaaataaataaattaaaatgatttatcataatactaataacaatccaaattttggtgataatataaaatttgaagcgtgcatgggttggattttatttatttattttgtttggagtttaatttatggactttagtctctacccaatgagaattggacatttgtcaaaattaaaaatagttgaatatgatgggagccacttgagtgagttgtcttatctatctacttactcccttttgtaactaaccacttgagtaaagctctctctatccgccgccggctccaacccaacaacacatcttttcattcattcaatcattcattatataatattaaaaaataattaatttaaaataatttatcccattcacaattttttgaatttgatttactaaatttaagttattggattcaaaatataaaatcgcacttaatctagattgaatgcactgtgagcgaaatagtgtagattagattaaatgaatacccttctctaaaagtgagtatcacccgtaatgaactcgaaatttttattatgtgagagctgaattgtcatgtaaaaaatatttaagtttacttcaaataatttatttaattttgtaagggctattttaatattctatagtataataatcaaattaaaagaataaacatttatttttttagtgtatatttttttactttaatcaagcgagtttgtcactggcgttgccaatttcgtctccgcctccttttgtcggggatatccaaacgctgtcatcactttcttcttccacttcctcttaataatcctactatatatcgccttgcgctagcagtcatctctgacatcatctaaatgttataaaaaaatcactaaaatatatttgttataattataatgtaaaatcgttaataaaagaaaataattataattttattcaaaaaaataaaaaat

SEQ ID NO: 245239 - DNA, 725 bp, Cannabis indica
caagttctttggagagagttttgattgagaggtagagagagaggtactgagaaaatagatgattgggtttgagttttgtaaaggagaagctactgtagatgaagaaacttcttaaggaagagcgttagagagaaaataccttgagagaatctaaatagagaatcgctctcaactgtattgtacatgtgtttttgctctatcaataaaggaagtttcgattgtgttccaaaactagagtagagccatagatcacatcaatctatcgaacttgaaccagtataattcttggtgttgattttatagttttcttgcattgtttatttgtggttttatcgtctttgttatactttgttattcttccaattcttaaactatgtttggttaattttgtcattgctaattgtttattaattcattttaaattagtttgatttttcacaataattaaaaaatttcacatatatatatacttttattgattgtcactaaataataatttgagatttttttttttatttttacacttcaaaataattttttttatatatattttggggttttatttatatctttagtatttcatatatttattttatgatatattttttcatgaataaaaattaaataaataaattgctttgaacgaactaattataattaaatatataaattatagggtgagttctacaatgcacgtccttaaaaggaatgtactgatgtaccct

SEQ ID NO: 245240 - DNA, 936 bp, Cannabis indica
attcccagatctcatttggtttgaaaatgaatatggtactaatgtctcggttgcagtatcttatgaatggaaaccaactatatgcgctcactgtcgtggaatggggcataataccattgattgccgtaggaaggaaactaaaaagccagaatggattgtcaagggaacaaagaagaacatggatcatggcaaggcagataaagagaagcaaggagtgaagaataatcctcatgaggaatttcaaccagttacaaatggtgtgaaagtaaaatcagtagataagccgaattcaactactatcaacaactcttttcagatgcttgctgaatgtacagcagatatgactgtaggcgacacagctcatagggtatcagttgcagaaggagaagatacaagaggagggggaggtcctcctcttcacaatggataaaatcctaagctggaatgtccgagggatcaatagccagcagaaacagaactcagttaagcaatttattgctcatcataatgctggtttagttggtcttctcgagacttgagttaaggcccataagttgggggtcttatacacgaatatgtttgcaggatggtgttttacaactaataatgcgtggcacataggtggtcgcataatagttgcatggaatcctagaagtttcaatattaatatcttgttttgttctgcccaattaatacatctccatgtgtcttccatagacgataagtgcaaattctttgcaacatttgtgtatggtttcaatgaagatgtggtagacaaagcatgtggcaagatttacaaagcattagacctgatggttcttgggtggtgctaggcaattttaatgacattttggaaaaagaggagcgaattggtgttcgggtcaagtataaatcatcagtgtcttttattaactgtatatcaacatgtcaattgga

SEQ ID NO: 245241 - DNA, 541 bp, Cannabis indica
taaaaagtagttaataataattatgctatatatatacgttgacttaatttgcatgtgttcttaatttttcttcataacatagaatatgcaattacaatatcgattagatgatcagtcatagttataatgacaatcatttgtcataattgccttcttattttatgattagtaaaatgaatttatatatatatagatatcattaatgctgtttttaattgaataagcttggtataatcaaattaaataaagacaactgggttgctgctgatttggtgtttttgataatgtttattattattatttttaatctttttacaatgaaaactttcagtttatttgtaactttagaaacgaatttaattcagatcaacttcaaaaagatataagttgtacatttacgaagggttaatttttgatatttgtatttatttgaagaccgtccataaaaactttcttggtcttggaagtttgaatatggataaatgatcatgattataataaagagtacaataatgagttaggtaatagttatccattatta

SEQ ID NO: 245242 - DNA, 1156 bp, Cannabis indica
ataaagatatattccatcctgtcttagattcctcgataagatctttcaccaacaaattgggatgattggaaggggagaagtaggcaaaaatgagtatagacggggcagccaagggtccttaaatactaaaatacaatcacatgttcccactttcttctgtaaccctttaataagaagttatcgtccctaaatgatactgtcccagatataacttggtgatttgccaactaaaagcacatagaataatatgaaaatattagagattagttcattagagacttaataattatatttatacccctccttcataactaaacaataaaaaatacttatcaatgaaaattacataaccatttaaaaaaaacctgaagcatccaaaaaagaagtatgatgatagtatttggctctataaattttggctgacaacgaatcagagcaggtaagaattcaccaagcttgagcagccaaaagaacttgattatgatgtacaaaagacctaaagccaatcccacctttttttttggataacataacttatgccatgctagccaaaagattttccatttatggacagaagaagtccactaatagcttgccataagcaatttcaactaatcacaaagaattatagaaagttcgaaacatgacattacatatgttggaatagcttgtataactggtttaagtagtatctctctaccaccatacgagaaaagttttttcccaaaaattaagacgtgaccataccatttccttaatgtaatcgaacaattatggtttattttgcccacttaatatcggtaattctaaatatttttctatggatttagtcacttgcatttagaaagtttcagcataaggagagtgcatctccattggagtatttggtgagaaatacaaacttgacttgaaaaaatttatgatattcatagagatatcaagttaacttattaaataaattaataaaataatgtacaaccgcactagactctatagacaaataaaagaacaagttactttctaaatctgtacaagttgccttattaagtagtgtacccttaggaagatcatagagattgactataaagaaggagaagtatttaaaaaacttagataagtaaaatattaaataaatacctgtctagaagctttggaa

SEQ ID NO: 245243 - DNA, 1460 bp, Cannabis indica
gtttgctttgctttattaatagcgtggctcttgtcccccatgtcgggttaactgtcaggtgttattttaccaaattgccattgttcttaaaccaaattttcctaactgtttttttctttcttaaatttcaattattagagtaaattagtgaaaatagaactttttttttttgacaaaaaaatataattgttttggtaataatagcttataacttattgatttgttgaaaaaagtccgataaattatttgaataaaacactctaaaaaatgatgagaatttattatgagatattaattttttttagtagttttttttgtaaaatatgtaagtttaatttttaatggtaataatacttacgttataattttgaaatttttataagtatctgaatattaagtgttaagtaaattgactcgtgataattctaattagtttaggtcattaaattttatttttttaaaaaatagtttaaatataccaataagaaataattttcattttatttttttgtttggttgcatttgacatgtttactaataaataatgagaatcaatggtaagataattattcccttacattcatttacttacaatattaaaattaagaaagtgatgagaacttaattaaatatgagagaaaagaaagggagaactttttcggtttttccaccaattttataaggaatgcgattaaaggtaatggattttaattttttttttaatattaaatatacaatgacaattttatcttttaaaatatatcttacaaaataactaccatataatatagtttaactcaaaatggtaatttagtcaatttaagcattccgattacgtctcatgataaagtaaacaagataaatcacaactattccatttccaaataattttagtaaacaatatattacaaatattgatttcgattctcttttatttattccgttacatttatctattaatttattccgattctgaataccgtatagtatacgtgccattaaagtattgaaatatcattacaatagaatgatctttctaccattttggtagaatgactattttattttaaaatgtaaggaaagactattgcaagatttgaaaaaaattaataattttttttatcaatttttttatgcattttaaattttattccattttatttctattctaatttccatttccattcctattcctatattttcattcctcccaatcaaacgccacctaagtgttaagtaaattggctcgtgataatcctgattggtctagatctttaaatttttatttttttaaaaaaaattagtttaaatataccaataagaaaattatacgtaaataataacttgatatttaacgagtaggttcttacggagtttttgaaatataacttaagtattattaccgctgaaaattaaacttaagtatttatttgcaagagtattaaatttaaatatttata

SEQ ID NO: 245244 - DNA, 1617 bp, Cannabis indica
atgtcgataaaaggttgtaacttttgtttgtttaaaaaattaataagttagcttgtgacatggcgaaaaaaagtaatatcaagtatacccggtttaagtctacttatgttgtaacttctctctttaaaaaattaattagttaacttgcgacaggagaaaagaagtattatatatagcaagtatgttcggtctacttatgttgtaacttctatctattaaaaaagttaaatagttatcaattttttttataattagttagtaattttttataatatttattaaaataaaataaataatactcgataataaattatatcaataacaatattacacttcaaaaaaatattacaccctttatttagcatttttctactaagtatatagagcctccattattagaatagatgatatattttttttcttttttattttaacatttattaattactcttaacaaaattaaaatttattatatgaagttgtagtgtttagaattttggtttgtggagtaatagtgtggaagtaaatatgacaaatgtttttttttttcaatagaaataagtatataccatttaaaaagtgagagagagagagatgtatttatatattaaattaatccataatttatatattgatgtagtttacacctaattaatatataatttggtattgtagtaatttaacattattagtggccagctcatagatttgattcaatataggaatatctattgagatcagatgttgtctttgaaagaagcaaaagccaggtcgtttctcatgttttaaagtcttctacttctagaacatatatatatataatatatatataattacaattatttgatagaattaatgaaccatttattgtgggatatcatcatgtgtttataagattttaacttacaaacttattattattgtatatatgtatgtatacatttgaaaggaactaatgtcaatatggtaccatttttttaaaatatatattataattatcatcatacatttgagcatgatctcaaaatacatatttacaatgttcaactcgacataacccaccatgcacgtaaggtaacaattaattcgtcttgatagatattattcgtgtagtgtcgagacttatattatattacaattataaatgaattcatgtttaaatatattaattcattaatttatacattatatgtttaacacggttatgacatattcaatacatttacgatttgttaaagtcttaaattaactttaattatcattaacgggtcaaattcgagttatatacacaagtcaatccaaacacgactagtttattaaacgggccaggatcaacctaaaaataactgtattcatttaagatagtcccgaccctcgacataggcggtctaggcatgtacctagggcctaaatttttttgcccattttaaaattatatatatttttcttatgtctcactatattttagagtcgaccttgatttaagataaacccattaatttttatgcggatttcaaattatattatcgtatttgacccattttactgctcaaaccatcacatacatttataggggaaatgaatggtatcctcttaacaataccatgcaccaccact

SEQ ID NO: 245245 - DNA, 755 bp, Cannabis indica
tttttttttttttgtttaaaagttaaatcatttgtttaagaaaatatggtatctattctaatttttttcttgaaaaattaattgaaatcttttttcttttttctcttttcaaaattaatctgaatcttcgtttttccaaaaaaaaaaactatctttttgtatgatttgttagaaaatggaatattttgttttaaagaaaagaattaagtgttcaatttgaatcttttgcttacaagaaaacaactgtggttaagaaaaagattgggtattatattatgatactcattggtatcatatataatttagtagttattggtgttatattatgatactaattggtgtccaaaatattgtggatgatatataagttttttttttttttggacatatgtgaaatgtgatgatatataatttgttttctttagtagaaatagaagatatgtttgttattacgtaattaatggtatcatataaaattttgtactaattgatataataaaaaactattaattagtatttaaatttacgctaattaggatttttgtctcctgaactttgacatgtaacaaattatgccctctgaacttttaagatcgttacaaatgccccctgaactattaaaattgttggatttaaggatttttgtcaaatttcattcaattttactatttcaaagattatttatgtattaaattatgctcccaaactttgataatctacctaaatcatgcccctcgaactttgacatgtattaa

SEQ ID NO: 245246 - DNA, 1165 bp, Cannabis indica
  modified_base (1148)..(1148): a, c, t, g, unknown or other
acaacaattaaaataaaactaaaagttatgttttgatttttgaatatattttttttgcatatgaaaataatcacaggtattactatttttaactctgaactaatggtgtagttagatttttttaaaaggataaaagtaatattagaaaaggaaaaaaaataatagattggtataaaaaaacaaaagaatgaaatggaccatccgttgaagtaaaaaaaaagttggcgctgacatgtgatataacgattcaatgaaaaaataataagtaataaaatatatatttatatttcggtattgctcggcgttagttttaataattaaaattacttttgtttttcttataaataataatacaatcacgtatatatataaaacattccctttattttgaatcctttttgttactatatatggtttatagagaaaattactttgagagtacgtattttttttttattttaaatagaaaaataccagactttatttaacttcaaatatattaattttagttttagatttttaggtgcacagacgcatacatataagttattctcttttcttcgccacttaaaacaattttttcggcaactttacctaccattgaaggagattatttttattagtgggaaacataactttttaagatttatttggtatgttgtactacattgaattatataatattatattaaattatattttatataatatttttatataaaattatgcgaagtttaccttttatgagcatataaatatataatttttttaatataaattaaaatttatcatagtaatatatgaaaaatagtagaaattacacaagatatgggaaaattataagtttatttttttatggtataaataaataatacccatgtcaaaaaaaaaataataaaataataaataccatgaagtttatgggttttttttttttttttttttttttttttaaactttatttattatgtgtatttttattgccatttaatttgtaaaaaaaaaataaggaaacccaactattttactaaacaaataataaagtttctaccggaaaagtacacaagcgcagaaaaagtacaccgaaaaagttaactagaaaagtcacagttgccgaaaaagtacactagtcaccaaaaaacgtaacnctaggaaagtacattac

SEQ ID NO: 245247 - DNA, 1741 bp, Cannabis indica
gggcacaaaacccaacaaaatttccatctcattgtcaacttgaatcttgttcatctccacttattttaacttgtatcaatttctcttggtctgacacaacttttaaatttcccaataatttacagttaaccaccgttataaattgaattaattcaacctttacggtagaggtaacatttctgcttccgggtacccataactaaactgatatactcatttcctgaattctcaacagatacaattaatcaaagatcattccttgatctcaaagtttagtttctgtctttggtagaaatcttaaaaatcttttcaaacacatccagaaatatacatacctcaagtatattctttgttctattgacaaccccttggtatgaactaccataccaacttatagtgagtctcccattaatggtgtcgatttatcaacatctaagactctcacattcctttcccgtcattaccactaaagttttactttctgattcatacgctaccattactcccttgaaatcatcgttatcttcatacttagttaaccactctaaaacttattttatactcttaaacgtattcttatcataattatcactatgctacttttcctaacatactttataatagtctaggcaagtaatctaatagcaaataatattaacacttactataccatgagtcgacctatcttcgtagcaaatgtacatattcgaccagtcttcaagacctttaaaactgtggctgctttgataccaagttgtaacaccctattctatagggacgccacatttgtgatttaatgaactagtttcgtactaataaaataattaattattaaaatatgtgataatattaaaaaatttcactaaaataaaatactaaaaaaggacatcataacgatactaaaattaatccattattattcacattccaagataaattagtttagttgaagaaaaaaaattgaaaagttgtgtggctcttttagaggattttcaatgttatatctctctagtttttattagtttatatttgactatgtaattattagaccatgtaatgtaaaaattctagtgtaattactagattatatgttgtaatgtaaaagttatagtgtaatgattagactatataattacaacttataattatatttcttggtaattgcatatttcctattagagatgtattaagaagaagaaagtgaaaaagttatttaaaattcaaataagcctttattcaaaaaattatttgtgcattttgataaaaatatatatatatatatatatatattttgtgcattaactaactagctacataaattttgtaactagtaactatttattaaattcctcctaattactagttacatgaattaattagtaactagttacaattttatttcttttgaactcttttaataattggattcgtttgtaagttttgaacttaagaatcaagaatcttaattggaggaggacacaattatttacaagtgttgattgatttagagctagctagaggtatactttttctataacttttaatttattaattaattatcaataggcatgttagatgagtttgaatatcttaaatatttattcgtagtgaagtaggttctatgaatgagtatactgcggtcgggatgggtagaatatatatgcatgttagaggagtttggatatcttaaaatatttatccgtagtgaagtaaattctatgaatacatgtatttattgaga

SEQ ID NO: 245248 - DNA, 910 bp, Cannabis indica
atgaaaatttaagtttaatttttacagttataatatttaagttctattttctttaagtatttgtctgttaagtttcaagccattatttacatgttattttcttattgatatatttaaattaatttttaaataaaatataaaaatttaatgactcggactaattaaaaattatcacgtgaaaatttactttaacagctggatacttatagaagtttcaaaattataatttagatattattacagtcaaaaattaaactaagatatttatttgcaattgagaattaaatttaagtatttatgccgtaaaaaaacgagcagaaattttagaattttcatctaagttttgacttgtttgtttgtttgcatggttaagaagtaatgagaggcgtgttatatgctaatgcttctttataaaaatgtaccttactttgttaaggtgcaacacacactcttaaataaatgacaactaatttattcccttaatcattattcagtcctttcctttgttgatcaaaactattcacttccatataatataattgttctaccttttgacaactatgcttgagcttccttcatcatttttgtgagccactaatgcttagatttgtctctttttcaaaagaaaaactatgcttcccttaggaccggaaccaaaatcgtagcaattgttatgttggtacccgagaggaactcgaatctcagttttttcggggaagaaatcacctacttgaccattttagctactctttttcggcttctgcttaggagtttataatggttcatgctcttgttggtttacttgaccattttagctactcttttcgggttctttctttccccatttcgagtatgcatgttgtttcgaggaaaacttcactaagaaaagcgcgtcttagtggaagttcaa

SEQ ID NO: 245249 - DNA, 745 bp, Cannabis indica
gaataacacttataaataaatatattgatagtaatattactaatctttgttgaaataatataaccacagtagatatccagatatagcatcagatatcaatagttcatggatataattgggattatcgggtcaccaaatcacactactattagccaacaagacaagtttgaccaaagaatgagcaataatattacaagttctaaagcaatgggcaaactaacatctttgaacttactataatgaccaaaaatgccatccaaaataagtcccaaagaagtaataaaagacacattgctcttaattttaagaataacactcaaacaatcaaattcagtaataatattgccatacccaaaagagaggcattgagccaaggcttgctggataggtaaagcttacgcaacttgagggttgaagcaaccctctaatttccaactcgctgaagcccgaactacaccaaactcatcacagattagcatacccaaaccactatagttgccagccgaatcaatgacagcatcagtgttgactttgaggctacccagaggaggactcaaataatttcatttctacagatcaaggttcgagctcttcaaatcaatccaatcagttgtaagcgattagaaaagcttgcacaagggggcgcctcttatgtctggtaatcagctttgtttggcagccatctatgactcgtcgaaggcgcttgaggacacaccgccgaccgagaagaagaactagacaccac

SEQ ID NO: 245250 - DNA, 1636 bp, Cannabis indica
agagaaaataggatttgggatttcacccatccaacagacatcttcatccacctcgagagcatacttagctaaaccatgtgcagcatggttagcatctctcctaacatgagagatagttactcctgagaaaaaggataaaagataacgtatatcagaaattaaatcattaaaactagaaagattcgttgatgcagaattgagggtcgtagaaactcgtaaagcatctgtctcaatatgcgtgattggaagttgtaattgcagcgcccaattgagactatgaaaaagagatttagcctccatttcatcagatctaaagcatccttggactgatttggagatagcagctatgacattaccacaacaatccctaacaagcgcaccacaccccagaattttcaaatcaatattaacagcagcatcaacatttaatttaagtccttgattggtaggtggtgtccatggaatggacctgggaggttgctgatctatcacagcaggattaacaaacctggagcaatgctgatctgttgcagcagccgatgaaacaccagtactgaaaatgtttttctggtttttttgttggtgccgaacaaatttttccaggtgtgattgagcaaaagttgcaatggttaggcttgttcttgaaattcctccatgaatcactttattgcgctcatgccagatagcccacatcgtacaaataatcaattcaaaatctggtttcgagtggactgaagataaatgaattaagtaatctccactgtgcatattctgagcatgtgcatggtctatactaaactttgtttctctccaaactgctttagcttttgtgcaattgaacatggcatgacctatagactcccaagcattgagacataaggaacaagtggcagagttaatgacttttcttcggcatagtgcagtagccacaggcagagcattttgcattactctccaagcaaattttttttacctttgatggtaaatttagaccccagaaagttttccaccaatctttgtgtgcacttgaaccactagaatttcgattttcagctaaattttcagccaaatggaagcccgaattgacagaatagatacctgttgtggtatgatgccatatgtatcgatcattgttggggaagaaactaagagggattgtgacaatcttgtctatatcaatcggttgaaagtatgcattgagaagtggaacattccattcacgttgatctgtaataaaatgtgatactaggacattgtttggacccgaatagcttactggtttgaaattaaagtgtctgggaatccatttatccacaccagccagcactttgaatccatatttccaatcttaaaacgtaggccctcaactaaaagttcacgtccccaatgaatgccctgccaagtaagtgaaggagagtgtccaagacgtgcctccaagaaggtgttgttggagaaatatctatgctttagtagtcggctgagaagagaatctggcatttcaaaaattctccaagcttgttttgcaaggagagcttgattaaagtgtaacggaaacccatgccctccttcaaatttcgacttacaaagcaatttctaacttctccaatgaatcttagaaccatctttgtttgaaccc

SEQ ID NO: 245251 - DNA, 2370 bp, Cannabis indica
ttgtacacagtgtcctgccaggtcaatccttgtcgaccatggtcctgccaggtcattcctggccggccatggtcctgccagatcaatcctggtcaggcatggtcctaacagggtctggcaagtcatgttcctgccaggatctggcaggtcactatagcttcgccaagaggaggccaacctttgagtatggaggacagccttttgcaagttgatgacagctttgttcattgtttccttgaagaggtcaggttcccttggtcgaacagagtctccttgggtccaaaagtcacttcttggccgaccagcttgtgcacagttcctggtcggcctataggctctccctggccagcctataggctccttttagatgtccaaggatgttggtacaactccttgtcggctcgtttcactcccttcgattgctgcttgacgattttgctgtatcttgcatgaaggctctgttctgctattggcggggttgtactctacctgtactctgtctttggcttacatgtacatgccacgttaggtgaacaaaatttgggataacaactatcataagcattctaccaccgactaaagttgagacttgccaacgagactgaatgaatgagcaagtcatgccctgattctcattgatcctaatataaataatagattatttttttggaaacattttacaaagatacgaccaaaataaagccaaataaatattgaatcaatcataccaatataatatcaatcatcatatatgatttctaaatattagcccaaaattatctcaacacccgctcaaattggagcatgcacatccaaaataccaacttgtgtagaagaaagttaaatttttttttatcgagtacctttgtaaaaatattcaccaattgaacctccgtagaaatgtacgaaggagcaatcaaattgtttgtaataaaccatttttaatagcatcataaataaaatggtaattgaccttaatatgtttcattctttcatgataaactggatcttaagcaatgtgaattgttgattgattattaataaaaataagaataactttagggtgatgaatccctaagcttaatagcaaacccttaatccatttcaactcacaagtaatagctcccgtggaacgatatttcacttcagtagatgattgagagtgacgtgtactaatctaaagaacaccaaccttgaagagttaaatcatcatctatccagagaagaataccttggcttggagaccttttaaatatcaaactacctttaaagaagcctcctagtgctccaatttagagtccttcataaactaggatagaatatgaaaagtgtacgctaaatttggtcgcgtaattgctaagtatataagacgatccatgtaatgccctaatctatatggacgccacatgtgtgattttataaactagtttagtactaatagattaattaattattaaaatccataataatattaaaaacttcactaaaatagaacactaaaaacggacatcataatgacactaaaatcgtgttcaggggaaccctgttgtaaaagttttacaaaaagattacatacattgacaagtcaaaatatgaaatcaaaatacacaactgatacaacgccaaacaactcttggcaactcggcacacaggtcgatagggtcaatatgtacattgatggagaagactgtcacccatgcctgttctagccttttttttgcctttacctgctccatagagcacccatgactcacaaggattcaatgagaaaagtaataaaagataatacatgaaataacaaattatttatttcactattataaaatgattaaacaataacattcaagagtggataacataacaagccatatgtatggaaataaaagtaatcatatattgcattgttctataaagcaagcccacatcatcatctggcatcatacataatttttctgcatcaccaatcagatgagctcgtgccacaatctagcaccaatgtatcacattgtctaaccagatgagcccatgccttaactttgcactaatgtattgagtcacctaatcagaggggctcgttcctcaacttggccctaatgtattgcatcgcctaaacaaatgagctcatgccatagtctggcacacacatgtcactgctgcccttgcctaaataatcatcactgacaggaagaaacctaacaacagtttcagtttgtcccatagcctggcactcacatgtcactgtcgcccgtgcctaaacaagcaccaccgataggaagaaaccgaacaacagttttagtttatagtcatgaatttataacggttgcctcataggtagaacttgaatactggtatctacatatcacattgcct

SEQ ID NO: 245252 - DNA, 747 bp, Cannabis indica
tattttgtgacatgaatcactttggaaacttgggtttaaggaaatatagggcttgttttgcattggtttcttgtttcaaaattgtgttttaacaaaaacataatttttgaaaatataagacgcgtttggttaatattttttaaaagctgagtttagattcttaaaaaaaataaagaaaaagaaaaaaattacttcaacactccacacctcgacatgaactctaacccagcaaagaatcaaacattggaccctaggcccaagcatggactccggacctggacccgaacttagacccggactcagatccagacccaaaaaaaaagataagagaaaatgatgagaaaaaagtgttatgagagaaaataaaggaatttttatacaaaatacaatatttctttgaaacttaacatttatattgtgataaggaatattttatatttatattattcattatttttatttactttttctatttattttagcttctacaaaatttttttgttgttctttccttctctctctctctgtcttttctctccggtcaacctctcttcttcttctttttttctcatactaatctttttttatctttatatatataaatatataaatgtaataagtgtaacccttcacattatttttttttatttaatttttttactttgtcacaaaattttattttattatttttttttaaaaaaaaatattacaagcactcattctgtatctttttctctcttttacgtt

SEQ ID NO: 245253 - DNA, 843 bp, Cannabis indica
gttgatgtgagaatgagaaaaaaatttctttctatgcagttatgtcttggtgcgccgccatttgaactaaatgatcgagactgaagctaatttctagtccaaggtcttgtagaataaatttttttaaaaattacaaaaataagtcaacacataaattttttctattttactcttttacttttttattcacaaaaatacttattaagtaaatacaataaactgttttttttattttataaattaattatttataattgatattatagttagtatgatgttattttttttaattatcttttgttgttttatagtttatttatagttgatttatagtttttgtgagctgattatcagttattttttagttgttcttgttattgactcccaataattgttaagtgtaattttcgaagttattagtgttacactcaaaaattcaccaagtataaattttaaaatacacttaaaaagtagataaagaaatggaagttgaccaggtaaatgggcaaaccaacaggaggagtcaaggttcgggttgagctccctgctattgctccaccatccgcacgcgtccaagggagttggagttctttgcccctatcactccccgcatgcaccaaagggagttccccgctccactcactccatgcgcaccaaaggagctccccgctccacttgcctctcccccactatctttatctctttatctctcctcaagctcataattttctcatttcatctcctaacacttagtcaaaataccaagtgttactccctctccctacacttaagctaaattaccaagtattgctccctttctcaacactgagccaaaataccaag

SEQ ID NO: 245254 - DNA, 1096 bp, Cannabis indica
cgcacacgaagatggaaatttctaagatggatggatgaccaagagtaaatcctttgatctcatcaggtagatttagaccatcataacagagaagctagtgacttgataattcaattcattgaaagaactaccgaaagtggtcaggatctcattagagatcctctccaagggagactaatcgacagatcagtgaggatctacaaaaaaaactattcaaccaagttcctcttgaactagggacaaaccttccccaacccgaaggaggacaagccttgccaaaaaaatctagcggcgagaatagccaaactgtagaaaccatcggtctgggggaccaactagaggtctctggcacaataacacccccgattatccaacttttgcatggccagcaacttagtggtgcacctcaggccaaccaacaaggtgaacttccatcgcgaagcatctaggagcgagtaacgcaaaggccaatatttaacccattaggcctgggaacgggtggaaaaacccaagaccacaacagcttgagaagtgagacaattcacttcagatacttggatccacctcactaaagcaattgatgtgatctctaccccacgtaaatgcacagcctccaccaatcagtcaaggaagaatgggcgtctaggccctgcgcaacacagggctggctggccttgaacataccctatgccaaggtatggccgaccttaaacataccctctcctaaggtatggccagaaaagctctggccaatccaagctgtagctcaatcaagaagggccaatcaacgaggcccctacaacaacaaatccttctgtgcaagcacaattggatcaaatacgagacatgctcaagggcttagctggcctaaaactatcagacctcaagttggataggtcgagggattcacctttctcggcatacatcaatgcctttcctgtgcccgaatgcaagatgcaaacttggatgatgtacactagaaaagaagatcccctagcacacctaaaatactttgagatccaaatagatctctaacaagtatctggagatgtgtgatgccaaatattttcggcaaatctagctaaaatagcccaac

SEQ ID NO: 245255 - DNA, 1799 bp, Cannabis indica
gcctgccctcttatctgggcttgctggacagcttgttccaactttatgaagccatcagctcgctcaaggaactctccatgctatttcgtttgaggtcctcctaatatctttctagaagttactcaacggtaagatgcctctgattatggccgtgtatcggccttcttctgtcaggcgtgtgaccatgtggcctcagccatgaaacgttgaatgtagtctttcaagggttcaccttggctttgcttcattttgacaagatcctccagtcgggcaggtatttgtcttgaagcaaaaaactgaatatagaattctcaggagagctcttcccaagaattaaatcttcctgggggcagcttgaaatactattgttgggctatttcaactagagtcgtcggaaagattcgtcattgcacatctctagacatttgtaggagatctatttggatctcaaagtacttcaggtgtactagagggtcttctcttcccgtgtacatcttccaagccggcatcttgaatttgggcaaaggcaaggcattgatgtatgccgagaatgatgatccccttgcactatctagcttaagttctaagggttttggactagctaggcccttgagcatgtcgcgtatttggtccaattgttcttgcatagaaggatctgttgctgcaagggactggttgattggccttctttgattaagttgtaacctcggattggacagagcctagtcgaccataccttgggagagggtatactcaaggccagccagccctgagtctggtgctcctacatagtcgggcagccctaagctgagcagggctcagccgccaatacttctatgcttgactggtggagtttgtgcatcgacatggagtagatcacactgattactagaatttggtggatccaactgtctgaagtgattaacttcacttctcaaattgttattgtgggtgtttccacccactcctagtcctcgtcgattgaaaattgatcttcggttgactcgctcctcttagagagggagtgctcttcactggctagccatggggactgctggaggagtctaaccggccattgggactcttgctggtggttggccggtcataagatggacagagggggatgttgttgagtgagatccttggtcggccccccatgtcgctggttgtcgggattcgacagtttttggcaagcgaagatctatcctagttcctgaagaactgggttgatcagcatatcaatagaccatccctgatctatcaacaattctccctcgaagaggatctctgatgagatcctggcctcttctatcagttctctggttgaaccgcctattagattctggtctctctgttgcggcgatctaactctgcctagtgaggtcgaaggatgtgctcttggtcatccatccatcttaagaatttacgtctctgctgagtgagtgtgaaactcaatgttcaaactctatgccttcacaagtagagattaacccaatggagaatatcagtggcatcactatccaaaatggtacacaacttgaattaccaccacaccaagaagttaataatttgattacaactaaatgagtcaacaattcatcccttgaagagtcatctccaccaaaggttgaatctcttactttagttggtccattgttactgaaaaatccatacaaaccaattgtaccaacttatgtcactcttccaccttttccaagtatattgaaaaaatctacgaaagaggagctcatcaaggagattcgtgaaactcttttgaaaattgaggtaaaaatttcatg

SEQ ID NO: 245256 - DNA, 1593 bp, Cannabis indica
aaaaatttcaccttcatttgtttgtagcgttggttcaggtattacaccagattgatcattccttccctttgttccatcttaccacctgaatctgtgcaacatgatcagtggtgacatgttgagttataggggttattctcattggcatttcttcgtctgtaaagagaacatcccttctgattatgaatcttttgaaaccaaattctaggcaacatagcttatagcctttgacactagtagggtaacatgaatttgatggctcttggctccaatttgtcttgcctaatatgggcataggcagtacatccaaacactttcaagtgttcataggactgttttctttctgtccaaatctcttggggagctttaagtctaaggctactataagacatctattgattaagtaaccttctgtagtaacaacttttccccaaaatttcttcttaagcccaactcctttgagcatgcatcaaactctttcaatgagtggtatattcattctctcagctaatccattttgttgaagtgttttccttaatttcttatgcctagcaatgctttcttgtggacagaatttggtgaactcattggaacaatactcaataccattatctgtcatcagatttttcactttccaaattttattttatatcaactttctccaattgatgaatattctaatgcctgatctttaatttcataagaggaacccagatctttcttgagtagtcatctacaatgctcaagaaatagtttgttccacctaggtttgggtgtatgtaggctagaggttctattgcagtatgcattcccttgccaaattttaccctaaaactctctcccagaacacattcctcacagaagtctaatctcccacttaatttcctttgagtagaccttgctttatgaattcttcaattcctctctcacttacatgcctaagccttttgttccaaagttgagtcatatcatcattgctctaagcaactgaggtagtaccacatactgattttccatcaaagaagtaaagatcacctttaaattctcctttcataaccaataatgaaccattcataactttcattatgttgccctcaatcttgatgacacaaccatttttagctaggactccaacggataacaaatgtcatcttagatcaggaacatacttgacattttgtattgttctgatcgcaccactatgcatctttattgtgacaaaaccaattcatttcacttgacatgctttattagctccaagcaatacaaaatcacctaagcattctttgaagtcttgaaacaacaatttattaggacacatatgaaatgggcaactagggtcaagatttcattcattacttgaactttcacttgcctccaagagatttgtcgaatcatatccattagaaaccacactagtttctcttctttcttgacttttatcttgggtttacttattctttaagtagtagcatttagacttgtaatgcccttctctttgacaataattgcaaaacttccctagtttgaatttagactttggtttatggctgttgtgacccttggtgccattgtttcttttattatgtcttt

SEQ ID NO: 245257 - DNA, 1340 bp, Cannabis indica
aatgtttgcttaccgaaggagcaaggtgggcttggtttggtgaaggtgctaagtggaataagactatgtttgcaaagtatgtttgggcaatcaatcatcatttgaaagctcttttggttcgatggattaaccatgtgtacttgaaagcgcaaagcttctggttgtatcaactaaaaagtgacactagttggtattggaaaaaattatgcaatattagatcgatgttttctcagcaggaagtggaggatgcaacttgtaaaggtaaattttgtgtcaacaagttataaaagggtctttgtcatggtgagtaatttgaacaccaaagctttgtttggaatcggtttgctattccaaagcacagatttatttgttggcaggcagtgaaggatagtttgctcatccgggatcatcgttctcagattctgcacattgacatcaaactttgtccagtgtgttgtagtactgatgagagtctggctcatctgctgttctcctgtaacttttcttagcaggttttgaagggtattaatggctggataggggctgattggtcggatcaggtggaggactggcaactgtaaactatgtagctaggaaacaagcggaaaaacttggttgctgcaatgatttttcaggaataatttattatgtgttgcaaatagaaacacttgtgtgttcaataatttttcttaaagtgtccaaaagattatagagatgataaaaaaggatactgagtatagagtaagcaattttacttttaagaagttgaaagatggagagaggagattgttcttaaaaattacctctttgtagggtggatgctttgagttgtagttggttgtttgcttgttaatcaataaagttttttttttcttcataaaaaataattattatttcaaaataaatttaaaaagagcaaaaatattacattaatattatcaaatcctctagagataatatctatgtatttatagtaaatatatatcataatcattctcgtgcgtaattttttcctcatttcatgacattcttttattcattctttgtttctctttattatcctaaaaattgctcgagtgatgtggcattagagagaatgacatgtagcattcaattaaatagttggttagaatataatgacttaagcattagatagattaggggaataaggaagtacaacgtactatgttagaattgttgaagcagctagtgcaaatcaaaattatcatttcaatctatagtatcgtccgaacaaaggcattcgaccagcctgaatcagtaggatacatcattatagcctcacggggtgatgtcctgagtggaccattcgaccaaggatg

SEQ ID NO: 245258 - DNA, 2071 bp, Cannabis indica
tgagcatgttataatcaggtttttgatgaaaaagcttctcataaggggagatgtaattgagaatgggtgtgggaagcctattaatgagataggaggcagaagcaaaagcttcccaccaaaaatgtaaaggcatatcagcttgagaaaggagagttaagcccatttcaactacatgtctaaactttctttctattcttccttgttgttggtgagtatggggacaagaatttctttggacaatgcctaaagatcgaaaaagagcatataggggttcaaattctttgccaagatcagattggatgctttttattttagtttgaaagaatctttcaacaaattgattgaagtgaaggaataggccatgcacttcagatttagctttcataggaaatatccaaacaaacttagtaaaatcatccataaaactgacatagtatttgaaaccatcattggaagaatagaaggagggtccccacacatcagttagaatcaactcaaaaggttgagttgttttattttctgttcttttaaagctgaattggtgaagcttaccaatttgacaagcatcacaaaaatcaaaaagtttacatttttcattaggtacaacagtagataaaattttgctcaaaatagggaaagagggatgcccaagccgacaatgccaaatgttggcagtcttggatttgttgtagacaggattactggtagtggtgtggttataagcacctggtttggtgactgtagaggactggtgagggcttgaaaatttggaagaggagacttgaagtttgtagaggccttcactgagatggccctgaagaagaacttgcttggttctcttgtccttaatgagacaacaagaatcatcaaattcaagaataacatggttatcttttgtaaattgtgatatgctgagtaagtttttggtgatattaggaacatgaagaatatcttgtaaaagtaaagattgatgtgggaaattggtaagaatagaactatggcctatatgatgaatgggaagagttgaaccattacctacaaccactttggctttacccttataatcagctgcagaattgacattggaagtgtcattagtcatgtggtgtgtggcacatgtatccagataccaagcagatgaaaaatctgttgttgcagcaggagtggaattcgattcagtcaagaatgcttgaggattgtcactgtttgatgaagtggaattattttggcctggtgcagtcccattgaaagtgatatcgaagcgatgataacatttcacggctgtgtgtccaacccttccacacagttgacacattggtctttggcctcttccacctcgatttccattgttgaatcggcctccccttgttgaaccacgatagcctctggtataatttgagcctcttgtgctgctgttggtatttgtattagcaatattggcctgaacgttgtgaagagtttcagttgtgaattgctggattctcatctcttggctttgcaacatgaattgaacctcttgaagagtgagagattcagttcttgaagtaagattcacaacgacagattcgaactcggatccgagaccacctaaaatgtaaaggattaagtcatcatcggctattggttgaccagctgcagcaagatcatcggagaattgcctcatctttaacatatattcttcgaccataagggcacctttcttagtggtctgaagaagatttagaagctgtaataatcgagctcgagatctggtagcatacagctgggcaaaagtgttccagatctcagaggaggtgcgacaacgaatcacatgaccaagcatatgttcggacatagaattcattagccaatgcatcaagaattgatcaaaacgcatccattgaggaagagcagggttagggatattacctgcaagaaattctggaggagggagacgagtgccaagaatttatccatccaaatcatatgctctagttgcagcaagcaccaaagatctccaaatggtgtaattgtgacgatccaatctgatgttgagagggagaagattgttgtttgggaggggaacaagggc

SEQ ID NO: 245259 - DNA, 1869 bp, Cannabis indica
gtctggtctaatgcattacaaagtgttaacgcttatttttgttaaccaataataagcctttttgtaataaatttaatatagaaataataaagaataaataaagtataaatagtataacaacaacaccagatatttttacgtagttttgcagtcaaatctgcatactccatgagtctatcatattcaagatattttctgagtattcaatacaatattcaattgattgcatttttatttttctctcaaaagattctccgtccctttttctctaggatctgcccctatttataggaatataggtttacagttatttatattgaaattcaaattataaccgtttaataaaatgtgggaatcgatcacgtttcatttaaatcacgtgttagataacaattgatagttgcatagccgcttattattcttatcctcagagatggtcattgctgatttggacaatcatatcttgcatatttccaagttgttatccttgtctattgtaatgtagaaaggacgctaagtaattatctaatgattcgcctcgtcaagtttcttataaatagcgaggtgcacgtcttgctatacgtagtccgaggttgctccgggtaaccatatccattccttcgtataaatgacttatctccttgaatctgtatactctaaggcagacatgtgtctcgtcaatgcagatattaatagttttccatccttatctcgcttacgactatataatcagcgagttatgaatatcttctattaatcctttatttaacgagttattctttccctttgcattaaatgatataacttaattatatcaggtggttcgtattccactgtacgacacgagtcactctgtaaagtatagccaaattttcggcataacaatttccccttaaaatttctttttaataaaagagtatttttgtcttaacccaattcaaaaaattgcatgccttgaattttggcggttcatgatttcgaggcacaccattagcattaattacccatctttaccaattctctcttgttcccatctgttagatctctattcttttaatctaatggtgatcactctcaaggtataaaacttaagagaaccaccatttcaccatttttgcttttcaaaactctcaagcttttctgtgaaaaatcattattagctttccaaaccttttcataccctctttaccattaacttattttctacaaatttcttcaatttaatcttataccaagggagttttcagaatacaccaagtcattcatttcgaccccagttacagaattcttctttgtgcaaaaatccatctatgaatagtaagtagtgtattcctttttttgtatttctttttcgtgatttggtagtcttattttgtaattaccagcatcattgttcactttttctggtttgagtaatttcgagttaattttttggataatttctagggttttaacagagaaaaacttagctttatcgtattcataagcttctggtttcaataaatttcatccatgtattgcggtcgttctttttgtaaaaatatctcaatctggttttgaaatgtacactccataattcttagaaatagaatgtcctatggaattggcccttccattcaaacccaaaatccataaacctcagtccaaacttgagataaatgatgacaaaaaatagggaccatttaataaaacaaatcaggatgaagtttctagtcgctataggcattttctacaacagataattgaggtaaacgttgttacttgggagatgcagcctggcctgaacctttgtctttatcttctattcccctagctaaacctttgtttttacccaaagtcactgttactttttcatcaagtgaccttgat

SEQ ID NO: 245260 - DNA, 780 bp, Cannabis indica
agttcttcagtatagcttgttcttcaatgggaatgcaaggaccagttgttgctctcatggcttcgatcatcgatgataaaggaacttcttgctactgtggcaagtttcaacacgtcttttgcagtttggcgtgccttagaacaaaattttttgagttaatcacgagtgcgtcttctctagctcaagggctagtattcgtaaatgtagcctttccatctctaaatacgttgataataaagtttagaatcttgtcgattctcttgctatattgatggttcctctattaatgaccaggaacttgttctacaattgctaaatgattggggtttagggtttggggttaggggcccgaggccgagtttaggtctatggtcaagggtcgagttcagggtccaaggctgagggctgatttcgggtccaagatctgggttcgagtttggggtctgggtttgagttcgaggttcggcgggaccgaggcccgggtcccaatcttggacccttaatttgtaaatattataatacaagcttatacggatcatttgcatgtattaaataattcaattcacattatattaaaatttatggtggtaataattaatacaatacaattaatattttatccaaatatagtattacttattatttaatacaatacgacttttatatcacctaccaaataaattactacatttgactatatcgggttttatgctagggttttgtagttgttataagagcatgtacatgatataaatgaaagagttattggggaatgtaact

SEQ ID NO: 245261 - DNA, 813 bp, Cannabis indica
gagcgatcaaaagagtggacatcggttgaatcatccagtgtctctgctgataatatgatgatgggtgtctctttagaggagttatataatatgcctacggctgattatgctcatcggagagggggatttattagtaatcaactgactatatatcacgttgcatttcatgcttgtgcagacctcaaaaatgtcaaggtgatattcctgctaaatttaagcaaaaccacctatcttgagagcgtctgtctctctagttatgcataaatttcttgtataaatatctctaagtttttctgatgcattttggcattatttgaatgtattgtctttcacagttgatggagactctttcagagatgttacagaaggatggaaaagttcctgatacatttattacgatgcaaattatgaggtgagcggtattattactattggatattaaacccttatgcatatctttttctcatatcacacaatgtgattgcatctgcttgttcttacaggtcagttttagttatgtcagtgttatgttctgcgtgcctatcatgctgtttcctatttatgttttatgacttctgttaattcattttgcttgttcacttgtaaatcaactgtgtttgctgccaccatcttttttacaggtgctatttacactctggggaccttgacaatggtctaaaaacttttgaagattacatgaattcagggagatctgctccagctgcggagctattcgtagtgagtttgacaacaaaatatattttttttgttatgttaaaacttaagattactcttgttgttaagttttttttt

SEQ ID NO: 245262 - DNA, 1098 bp, Cannabis indica
tcatttaagaatgtatattataaaagcactttataatatatatattataactaagtggatgtagaactaaactaagattaacattcattcatcatatgatatcatatgttgtaacccttttccatatattacactaatcatcactcactcaaaaagcctttctgaaaaaatcattatcatttaaatttttattcaaataacataataataataataatgaaatactttcaaaagattctttctttctcctcagctttcaaattttccaacgaaaaacaggtaaaatattaagaataataataattaaaaattgaattatttgatatatattatttggggtgatagttggactggtccaagctccaatttccaaggttaaatatttccaaactgtgtcagatataataacctgctacatattgcaatgctgatgataaaaattgaaaaaaaattattaaaatttacaaaaataggaagaaaaattaaatcttgttgtgaaatgtgaaccctttttatgtacttttattgagtttagtttaaggccattttatgaatgaaaatgaagttgaaaaacccaacaaattctgaaatctgaatcatgtttttaagtcccaatatcttttttttctgacatgagagagaaaacccatgttagattatatctatatagtgagaaagaaagagagattaagatttgattatactattaattattaattaattaattaattaaggcctatattagtcattacattacatgttcttacaacacataaaacaaaaaatacaaatacaaataattatgtatgtattgctgcaccaccattaagaactgtctcttttttctataaaactattattaaatgttcaaaataaaaccttttatagatccatattccaacctcatcaaaaccatttcttctttaaactcacaaaactaaaaccagagaagaagatgacttgactctctcttatgatgcttctaaggtaataataataataaaaaacatttctttattccaattcttaactaaaaattcagtctttatcattgtcaagccatcaatgaacaagcttggttcataatcatcatcatat

SEQ ID NO: 245263 - DNA, 1663 bp, Cannabis indica
gattatcatatcagttaaacccagtgtgctgataaatctaggaatatatatttactcacacaatcttgattacttttcactgtgctgacgacacaataatcaagaacataaatgtgataaggatttggatgaaattaaaaaacaaaaaaacatataaatgataacatgaaccaaatgacacattaaataagtgatgaaaatacttctgtctctttattgatatttaaatgatagagattacattgaaatagagttttatttagggcataaagcccaacataactgacgtctccccattggaaggatatcaattgctccttattcttccaacctttttcttctttagatgacctatgagattcttttcaataggtactccaaatattatgttcttgactttttctgtcactaccaatcatccttcaccaactggtcccctcatatgtactcttccagcattcttttatataatagtgagagcacagtgagtagatgctaatatttcactgttgtgttgatgcacaacatgaggacagagaatcttaaaagaatagaacatgtcgcaagtgcatgtgcacttttgcaagttcacttcactgcccatcttaattgttcctcttgggtaaacattgaatgtaaatgaactagatgcatcgacatttaagaacatatatttcttaaaatgtaatgtaaagtcatcctccataattggtgataaatgtttcacacaatactctgcagtatccttccatatagaaaaccaagaatgaattgtgtacttgatgaattctacacagatagtgattggtaggcctcttgctttcctagtcatgttgttgaagctctcagcaaggtttctcgtcaatatcttgtatcaatccccttgaaagtatggatgagctcacttttcaataccaatgccctaaagatatttacaacgggaacatccattgccttgatcttctcaaattctgtctttttaaatgagtatgatgcaacataaataagtttcttaaatcagtcactcttaaactttgcaaccacattcatctgaatgtggtggtagcatgcaccgtggtaagtattagggaaaataacctccaaggcatgaacaatactttgatgcctatccaaaacgaatgttaagttctcaactttaccaatcttttccttaaacttgatcatgcaatacttctaagagaattgtgattctcactatcaacgaaagctaaagcaataggaaacatgtggctatctacatctaattccacagcacacaacatttattcaccatacaaagtcttaaggaatccagcatcaatacatataacaggttgacaaaacttgaagccactcctacaaggacccgactagaaaaaacattacttgaaacgaccatcttctaattcaaggttggtaatggtacctagattcatttgttttagcatgtgcaagtaactaggtaactttgaatacgattcttcaggtgtacacttgactaaatgcaacaccttctctttgcacctccaagatattttgtaactgatttcaatgtcgtatttcggtttcaaatcatcccttatggaagtagccatgtaatccttcccatgagtagtatatttctccttaatgaggtgtgaaattatcataggtacttcttcac

SEQ ID NO: 245264 - DNA, 1344 bp, Cannabis indica
ttttggtacatgcagcagattattcaaaacaagagattgagaggagtttgtgtgaacaaaggactgacctatatgttgaataggaagccccgagccatcaccaacaaagagttgttcatctccttcatattcaacacctgtattcagattttgcacatttggagtgcaatgattcgaagctcctgagtctggataccagcagctgtcttcaagttgtgttgtttgagcaacattagcttgaggattggagttgagagatactcctgtgaagcttttatcgaatcgatagaaacaatcaagtacagtgtgtcctagcttgtgacaaagctgacactgaactctatttgaatttgtttgatactttccacctctgttggtaaaattaaaaccaccacgattgttaggattagagaaggaagaggtggatgagtgattacctccattataagccctttgatttggaaatgctcgaccaattcctctagatgatgacccaaaggatggagaaggaggaactcgattttgattgtaaaatctgctgaaacgatttggattgttttggtaggcaatattgacttcagaaaactgatccaaatctgttgtagcaagatttacacttagctcagtttcagattcttgatctgttttctcgattcgagactcagaggctagcagtagggcttctatttcagctactgaatactcttcaatgcgagtattagttgagataatgaaggtatcatattctgtgggtaatcccttgaaaatagcagcaatatgatctcttgcactcagcacttcccctactgaagcaagaagatcaacatgttgtttgatctttaacagatactcattcaaagacatgcttccttttctgattttctgcaattttgttctgaactccaggatttttgaagaaacttgcagagtgaaatgcttttcaagagcattccagatttgccttgctgtgttgcatcccaccatgcgagtgagaagactttctgtcattgaggataataaccaggaaactaagagttgatcttgaacctcccaatcaagaaactcaggattgaaggtgtttgaagcttgatctgcatcactcaagaatcgaggtggaggagctcgatcttggatgaatttttgtaatctgtttcctcgaattgctgctagtacctgttgtttccacagaagaaagttgtgatcatttagtctaatagacatattatgattgaaatagacagggttgaagtcatcagtgttgtttcttgatcgatttagattcggtgctccattcgtctgatttgcagatctgctggtgttcgagttgtgctgtgtagcatttgt

SEQ ID NO: 245265 - DNA, 912 bp, Cannabis indica
aataaacaatataaatgtttatttttccttatagcagtataaatgtttatttaaggtaatattaacctaaaatagaaaaaaacccctattttatttttaaatggaaggaaaaaccattccaatgcaatatttgaaaaaatttaataatttttttttatgcattttaaattttattctattcctattccaattctctcaaccaaacgctacctaaatctcctttatcctctctcaaatgcctaaccctcctcgactcatttgttttgtcctctgccatggcgaccataactctccgacccgttgccattgaataaataacaattgagaagatagattttaatggttgaaccaaatttgaccaattctttgcagaaaagtagagcaagactgcaactaattatgactagatgattctacaagaatattgaatgcgcaaattgccttctgaaatattgtaatgagaactacattaaaggaagcctgatagtttcagaacaatccttttctcttcctctatacaaaatttgatgttggagcctaaaaatagagcaacaccaggagcttgaaagtacaagaaccataccactggtctgctattcgaatattaaagataatctctctcaaacattggtgttcatgaaatttactagtactgtgcaatggttgaactatattttgttaaatgctttttttatttttattttgtgttaagtcactcttgacatcaatctgtgtttattaacttgatcaaagtttcattttataaagtgccgctttaaaactctactaagatcaagttaagattaacgcatttaagacatttcaaaacttgagttactaaaccgagatatcacttcaaatgggggaaactatattctctcttcctattgattccaaaacttcaaaccaaat

SEQ ID NO: 245266 - DNA, 511 bp, Cannabis indica
attttcacgtgtgcatgtgatccgtttaacaatgtgattttcacgtgatgttcagtgcaaacggcaggatgccgtttaaccattctcatatatattggcacgttctcataatatactttcgattggcctataccctactattgtacccaattttcaatcatatttcacctactgttacactatttatgattttcaacaatcttcaattatttctttttaacgacaaatttgaaagtaattagtcaaatgtttagacgttaatttcctcgtatcacatgcatgtatctcgtttagttaaaaacaaaatagggtactatcgactttttgcgatgagatgatttgtgaattgtgaaaggttaacttcattcttatccatgttttattaatcgatctaattttattaaacttggaaccacagccggactgcacagggcccaaacaaagaaagggcccaaattttctataattaagttaagagaatacgtgttctatttgtttttggttttttttt

SEQ ID NO: 245267 - DNA, 944 bp, Cannabis indica
ttgaatacttatgcagctaaaaaataaatattaaatttatgcactgtttacaaacttaaaactttaagtacttatggcagtatttaccctatcaatatatttaactttttagaaaaaaatagttctagagtgtaacaaataaaacacacataaatattaaatgtataattaagttagatctaacatacttgagaatttagaggagaagataattttgttgaccgaggcatgaattgcaattttcaagttgttgaggtttccattattaagcaactccacagctccatgtcttcttcccatctcatcaaacgtagaaccagattgtttaactccaaccttatgttctaaagtgattccattgtcaggaccaatgccagcttctacaaaagcatctttcgcagcaatttgccaaactgacaaattcgaatatgacactaaactctttctcacccactcataagccttctcaacttcttccatgtcccaatccactccggacatggcaagaaaatcctcgtccgcttctgaatagaaagcggcattaatcatgcttcctcccaaaaccctacctctaacattctccacaccatccttcgatgtgaatctctgcgccggtgtggttccatcatcttcttcgacgaggttagtgaagattccagatgcaaccaacgtatcggggtgagcttgagggacatttcctctttcgagaacaagaactgagtacttttctgatagagttgcggccaaagggcatccggctgtgcctcctccaatcactatgtagtcatatttttctactaacggtagatcagttgcattgtacaccgatttcatgtaactaaaatctgtttaaatcaaattagtatcaatttgacaaaattgtgagataataaagaatattgtaaaaagatatctgatgtaatactgttattgttacaattaag

SEQ ID NO: 245268 - DNA, 987 bp, Cannabis indica
ctgaaaagattaaaaaaccagcaacaatgcgagacacaacaaagtggtgtgaatttcataatgaccacgaacataccactccagagttcataacattaaggtatgaagtggctggactattgtgtaaaggtcaattacaagattttttatcaaacaagggaaaaacgaccgtgacagaagcagataagaggtcgacaacaccaccagagccaccttagcatactcgaacatgtaatgtcatcactggagggtcagaggttagcgtcgtaacatactcagcctctaagaggcatgcacgtgaaatagtcgggacagagggtaaaccaaaaaaacaaccaatagcctacagcggccagaccattagctttgtggacgatgaagctttagatttgcttaatcctcaccatgatgctttagtcatttctttatttatttcgaattgttttacttaacgtatactaattgataacagtagctctggtaacatcttgtgttttgaatgctcttagggagatggggatcgacaatgccaccatcatctgcaagtccatagtattggttggatttagtggagagtagaaacactcagtcgatgaggtcatactccatgtttatgcaaaaggagtcaacctacagacgaagttccttgtagttgactctccatcaacttacaatgcaatcctgggtcgaccgtagatccattccatgaaagctgtgacatccacataccaccaagtgatcaggttcccaaccaagtggggagtgaaagaaatatggggagcccaaaaagctgctcgtgattgttatcaaaattcacttaaagaaaaatcggcaacattatatcaactgcaatagtctagtcttacctttgcactggatgaacctagtatggaagacctagatgacgtgtgcataatcaaagaattcccagactataaagtccagattggaacaaagcttacacctgagtttcgagctaggctaatc

SEQ ID NO: 245269 - DNA, 1126 bp, Cannabis indica
ggggttgagttatgagagggatatttttggattttagataaaagtgtcatattttttttagtttaaaatgtattggtttaagaataaaatattaaggttctttaagtatagaaaatcaaattaatttccctaatagtatatattgtagtcatctaaaataagattcaagcagttgattggatgtgtactttttattttattttatacgtatgtgtaatatgctgtatgaaccttactttttgtatttataaattattcataattgtaaaattcttttttaacaaatgagtcgtcaaaatattatttattttattgtgaatatttattgtgaattaaatattttttcttgtattaaatggcgttttacactactacaaaaaagattttttgcgtcgatcaacgtacctagtcaaagttgttgattggcacaaaagtcaaccctcactttgttgcttcggttggtaactgatgcaaaataatgattaatttgcatcgttgtatctccgacactaaaacgaataccgacgctaaagataaaaataaaataaaattatatacacatattgcatcggttggcaattgacgcaaactacctatgcatctaatgtgcaccgatgctaaagtggttagcgtcaatttctagtcgaagcaatatgtgtttctttaaatgaatatagccccatctcgtcttccccaaaatcaaaattaggttttcttcttcttctttcttacttcaaaagaccaccgcccttgtccctcttcctgcctctttctctccatattgcatcgtccattcattgtcccttcctctctgttccatcgtccgtcgcccaacccttgctctttctttctctcggtggctctctcctctctctatctctcagtgatgaatttctccattcgagtagaacttgcgcaccacctactttgcttgctcaatgttcgagctttgctgttatctactccaaagcccttagctttgccttcctcaactccaacctccttctagtatatattgttggaacttattttaccaagatctagatttataaacatgtatgtttgattataatctataatctaacatcctaaacatgaatttcctaaaacaatgaaataaacaaat

SEQ ID NO: 245270 - DNA, 1696 bp, Cannabis indica
gaaaaaaattgtttaaaaaaatattaaaagtcatttttttattttaaatattttgattctcaattaaaaaattgaaaagtgaaaacatttttatagaacatgtttttaaaaaatacttttacttttttaattttaaaaacaaaaaactaattaaaaaagtgttatcaaacgccaccatagcttattatcaacaaagttattttagggtaaaatttaaaaacaaattaaaacatatgtgaaaatagtataaagtaattggtctctaaaggtaactagttaccctcatctatttttcccataaataaatatttattttttttaaaaaaagcatacttttgcatagataggagtgcacgggtggattttaccgaattttaggatttcgggtttgggtttatgggctttgggtgtgtggattttgtgtaccgaacctgcccatgtgagagactaggttttcgagtttcaggctgggtacgagttgggatatatccggggtgggttagggtcagggttttgagttgggctaggccatattttttcttcaaaaaatatcacttattacattttcgggacaagccaaagaggagaaggaggagctactgccaagtcccggagcttctgcacatgcatgttggcctccataggtcgagaagaagaagaagaacagcttaaaaaagaaaaaagacaaaaatgaaaactggaaaaaaaaacaagaagagaagaagaagacacaaccattgcgggtgcctactaaggtggtcactgcagtcggtcctgctgcaatggagctcgtcggtgttgagagggaagaagaagggaatgatggggggggggggggacttggggtgttgtcagcgtaagagggaggggttcggagtctgatagggtttagtgatattattattagttttcttttttaaaaaaatgggtttgatattaaaaaaataattatgtatggtcgagtttcaggtgggttcgggtttgacccagatttttgggtctcacaatttcaatcttgaacccaacccaacccgttatagtaccgggttgaacacgaacttgcctagtattttcttaactaattttttgggttttgtaggttcaaatcggtgtaacttgttattttaaaagtatttaaaatttcaaaaataaatttaatcaacttagtattttagtacaacttgagtatttttactacgaaatgaaaatattaagtgtttgagtcgtaactacttaaatatttttaatgtaaaggaaaaatgaaggcttaaatatttaagtgcttgaaaaaaagatttaggcatttaagtatttaaattataacagtttgagtattttagccgctaattatctaatgtcttcatagttattgactcgtttgtttactatattcattggcgttaagtgtcggtgttagtattgctaataatgaagcttgtaaattgttgttttattttttaataatgatgtgattttttcttttaatctttggaataataattcgtgtttaactaatattgtcgaagttaaaaataatgttcccctattaaaaatatttcaaaaatgtaatcagtgattgagtaaatagttctacgaatttaatgttagaacattgtaaattagtttgataaaccttattcgaattttttagttaaactttagtataactatttaacaagtttattcctaataatat

SEQ ID NO: 245271 - DNA, 776 bp, Cannabis indica
aaagagttttatttagggcataaaacccaacacgaatatcatatcaaaaaacatgtgatgatattttccaataggagaagataaataaatatcctaatttatttttctaactttaaagaataaattattttcatttcatgtatgtattcaatctgttaatgaattacttctctcattaaagcaataatttttaaaagtaccaagttaaagaggggtgatttttatgttttaaatgtaattgagggttgatagttagttgagtaccttgagttctgccgttgtttttgttatgtaattgtgttcgatttttgaataaaatttttcttttgttaaaaaataaagataaaagtgcatcaaaaattcaaaacgactattttaaaaggcatactataattttttttccctattttctttttattagggaacatgtaattgtattttatttttgtcaatctaatattatttttaaggaaacataaatattaaataattttttaaaaatagtttaaaaaaatatttagaaagaaaaaaaaacacaaatttatgctcataatctatgttttataaacaatgtaataagcttcatgttttaatcattgtaagggtaaggataataccttagctcataatctagcacaatttgctctatttttagattatgcttggtggttgggttttttagttggtatttaagttgtttggatttatttttttagggtgcatttgttaacatttttaatttttttttttttgaattaaaaatgtgaaaatatttt

SEQ ID NO: 245272 - DNA, 576 bp, Cannabis indica
ggttctactttaattaagagttttagtataactctaactcctttagcttgttcatgtggacgtgtggaggtgatcatagtagaatttagtgaagtttgttatagtatataaatttgataagatatctaagttatatattgatatataacaaactccactaaattctactacgaccaccacacacgtccacataattaaataatgtcatttgaattttatttattatatatttatatataccttaaatttcttattaaatttatatactataataaattccactaaattctattatgatatatatatcctttagtttgtaactctaaagaataacaagttaaaagagttatactaaaactaaagtggaactatatactctttattacataaacaaataaatacatagaataaaatgtagcttgattattctaatcttctatttctgaccttttctctaatataacttttgtcaaatttacatagtcgagttctaaatacatcatgtttgacgagattggtaacttttaaaggaattgagacctaacacattatatcgatgatatatttcttctttag

SEQ ID NO: 245273 - DNA, 1498 bp, Cannabis indica
ttttttttttccttttttgtttattttttcatactaagataaaaatgtaaattatggatctaaaaaccctattaaggaaaaaatctcataataaattataactgtacaatttatcatataatttgtcgagaaaattctttcttagatcggtcatctcaaatttggaaaaagtgtatttttggaggaacaatttaggagggctattgccatcaagaatccgtcccccatttaaatgttagggtcctctatttataagtgagaatcaatgtagtacattctctattcattttctcttccaattcatttgtgtagcattgtcctcttattctctccctcgctttcttctctgtgccttcaaagctatgctcttctagctacgctgaattcaactctgatcttcttgaaatcctctcattccttcttatctctaagtgaaaaggagtgtttcatttcttttttcttggaacatcattaatctattttcgcattttatatgttgaaattatttttatgctctcaaattatttttattccttacaatttccctatcggttctacaatttttgaactttggactgttaactccgatctcaaatgttgcgaaattagttacccaaaattattttatgcgtatcttttaaagctgtacatatttaattcaacaattatttcaaatttcataaaagtagccctgccttttcaacttacgttatttatctttttaaattcaaatttaaacttacagttgttgacacagattttcatcaacaaaataattaacttttttgtaataaataaatatctcaattaattatatgataataaattataagaatgacaataaatgacaagaagatttttacgtaattttgaagttaaatcttcatagtccacgagtccatcttatttatgtttgagagattgaatacataataaaataacattatttttcaggtgttatcatgttttgtcccacctgtggtggcagattcacgtggccaatatcgatgacacatgagagtacagctcgccaacaaggaagccaagccatctacttaacacttcaaccaacgagaggtctgagtacatagaagggacgaaaaaatgacgaaccaaccacctctggccggccctatggccagcataggccagccaacttccaagcactgtttggctagccagcctacacttggcaggggcatggccagctagcttttgcttggcaggcctttggtgtgcaaccttcatccgtggacagtaagtcaagcagcaatttgggccttgacaacccacgaatatagggaaaaaaaatcagcaacttccctattttcaagagataattaagtcaattaaagtttattatttaattatataaatatagctttatttacctattttgaagggatattagtgatgtaagttctaatatataaagagaattagttaaaccctaattcactcagtattaagctattagttctaactctcaagctttaag

SEQ ID NO: 245274 - DNA, 1193 bp, Cannabis indica
cagtccttaaagttattaccattaaggaccggtaccgaattaaggttagcagatacactagcaacagctgaaaagaacaatacaattacataaataacatgctcatataagaatccaaataaaacaataaattcaaatattggttaatcccatctcaagataccaaacacaacattaatattaagtctttggacagtaatattaattgtaagcggtactcttgttgtagtgatcaaacattgacaataaattatgtcaaacaatatgcaatctttggactaacatattattcacacaaaataccttataattgtcacacatttatcaccacaaacatgcatgaaattcatccaaatattaactcacctttgggttagttaataaatttatgaattacatacacacaattatcataatatttttattaaattaatctacacaaaagagatcactttggtgatattttgtttcaattaatttaactaaaatattatatatccttaataaatttttaaaccaaaatttgaattaattgttactgaattattattattattaaatttattatatattttaataataataataataaaatagtatacatgatagcataaaaaaataacagaataattaatatacatataatatatacagaaattgtatataaaacaaaagacttaataaacttgtcttttccgtagtatatttacagaaacttctaatcggaaacttgattaaactcttttccatatatgtatataaaagttaaagattattactttttttttttaaaaaaaaaaaaaagaaactttatacatatatatactttacagtactgaacaaaattccagcggcatgtatatacacagtaattgagcgattacaaccaaactataaagagatatatataatcttatacatataacccaaaacaagatttcaatcgtacaattagcatcttttcattagtaatcacttttgacattttgatattttcaatcgtaatatcaaagtttgtataaatatatatacaaagcaaacttaatcgcacacagaaatttcaatagcataaatatatacagcacttcaccaaatgcaggaaaaataatttaatggaaaatcaacactactatacattctcaagaactaatttagggatgctcttgataccacatgttagaatactgtaaact

SEQ ID NO: 245275 - DNA, 1480 bp, Cannabis indica
gggcactaaaatgtagagaagaagacctatgataccaaacattataaagcaagggcagattattacagagcaacacaagcagatgttgatagtagagatcactccagcagaggttaaacaagtaatttttgcaattcctaaagacaaaaccccagctcctgacggatttggcagcattttcttccatgataactgggaattagtaggaagggaagtaactgaggtagtgattgattttctgaggacaaagaaattattgaaggaactcaactaaacactactcacattagtgctgaaaaagaaatgccctgcaaatgtaagtgaatatagaccaattgcatgttgtaatgtcatttacaaagtagctactaaaataatctactctagattgagaacagtattgccagatataatagcgcaaaatcagagcggatttgtgcaagggagatgcattgcctacaatatcatggtttgtcaagttgaggcattatgggagagccaatgctaggtcaaactaagcatatgacacggtggaatgggacttaataaaagaagtgttacaagcatttggatttcctacagacttcatctaattagtcatgtgctgcatcaatacacctcggtttagtctaatgattaatggagagatgcaaggctattttggagctaaaagaggacttcatcaaggagatccaatatcccctcttatcttcatacttggcatggaatatctatcagggattatgaataaaattgggagaaagaatgatttcaagtatcatgaaagatgtcggaatctgaagttaaaccatttgtgttttgcagataatgtactactgttttgccatggagattttcgatccatctacctacttttacaaaggcttaagctattctcacaaacttctggtttgcagccaagtcaagaaaattccgcggtatattgctcgagaatggcacaaaatgagatacaacggttcctagatgcatctggttttatgtgaagtcaaatgtcatttcgttatcttggcataccaatttactccaaaaaactttctaaggcagaatgttcgtgcctcattgagaagatgactgctcggataagatcatggagttcaaggcacatatcctttgttggaagaggaacatttttaaattcagtattgattgctatacattcatattggggatagattatgttgcttccatagagtgttttgaaggagattatagctatatgtcgatcatttctctagaaagggaaggctgaatacaatggcccggggtatatagcttgggataacttgtgtagaccaaggaaagaaggaggattgggatttagaaatctactgtattggaacaaggcatcacttgggaagtatgtatgggcagtagcaacaaaacaagataacctttgggttaaatgggtacacaatgtctttataaaaggtgctagatggtgggactatacaagcactaa

SEQ ID NO: 245276 - DNA, 1115 bp, Cannabis indica
tctctcgttacaatacgtataaacaaaaagatcgtgggatcaatgctgaatgcaaggatcgtgggattgaggctgaatacactgatagtgggatcgtgtgtatgccatatccacttaaattggtccctgagttatagggattgtgctgatgactcatgatgcgaaagttgaattcgctaagtgttggtcgctctgcgcggattgctgaattctttgccctaggcatgccagcgaggcatcctgctcggactattcttcctgagcagatgttccaaatggattccacgtgtcaccattcatgtgatgccttgtcagagggcaaaaattgggacaacagggtgtttcaggaaacagatgctgtatgtgtaaggatatgattatcgttccacaagtagccacgacaaatggattcaatttctcacaaaacttttttgggtagtgaatggccatcaacactgagttgatgagaaccactctcttagcaaaggacaaattttgagagctcaaagttcttatcctagccaccatcttttcaaataaagaattacattcagctgcagagattcttttaagacatctttatattccttagtacttggaaggtaagtcatattttgtaaaacccaaagcatcaagtactctttgaatgtcagaattactcatattactaaagtaaaaagtactttttgagggattaggaaataatcctgatgtttgagagaaaattttgagaacatggagcataagatatttgcttttgaaatctccattgcaaaaaaggagaacatcgtctacaaagctcatgtgatttaacttcaagtcaccacacctctcatgcaatttaaagtctttcctctttctaattttctacataatacatgcctaatattaagagaaggggggacattggatcaccttgtctcaaccctcttgtaactttgaagacaccatgtaaggatccatttaacgtcaaagagatccatggagtacgaacacaataccatgataaacttgattaatttgggtggaaattgaaaagcatataacatctcttctataaaatcccattttatggtgtcgtatgctttatgaagatccaatttgaacatagagtt

SEQ ID NO: 245277 - DNA, 1541 bp, Cannabis indica
ctcctacctttggaaatgcatttaggatacaagatctacaattattaagggctcaatttctgtagctgcttctagggtttcaatcaatttttggcaacaaccttggatcccttgaatggaaacacaagagtttatgactctaatgcatgacatgaggaatagaggatacacaatcaaaactttagcagatatttctttaggcaacgactggaatccggaactgattctacaaatttttggtatagagttgggaagccgtattcttgctataccaaggattcctgctccattccaagaccaagttttttggaaacaatctcaagatgttcatttctctgtgaaggcagcttacattgttgatcaatcttggagattcgatccagttaaagaagtttggaagtggatatggacaactggtattcaccctaggaactctgtttttctttggagaattataaatgatgatatcccaaccaagagcagattacactttcttccagataaagagtgtggtttgtgtgatgctggcatcaagaatcaactgcatctgttttgtaggtgtagttttgctaaatccatattgtttggaggtagtaaacccattaggattggggatatccttggtgactctttatctggtgtgttggaaaatctggtgcttcatttctcagatttatcttatggtgggaatagagtcgaggtccttaattacttaggttgtgtcctctctgcaatttggcatcatcggaatgaactcttcattaacaatgttcctgtcaatcctttggtggctttggcaagggttgaaaaggagttcctggagttgcagaaagcgtctcagttcaggggagaccaaatcatagaaacgcaacccaatggtggttcggttgttggagaagaggcctttctctcaaccaattctctggctcgccatatactttttacggatgcttcttgggtaggaggagaaactggtattgcagctatttctgttgacattgctgcaggaaactggtttgttaagtcacaaagattgcaggcgcagtcagctcttgaaggtgaatttagagctatattcctggccatgtcttgggcaattgatcaaggttggagagaagcgattatcctttcggattcaaaggtggcggttcatgctttaacttcctcaggctcctgccctgattggaagctttctaatattttttactctataattaatgtttctaagcttttcctagcttgtaagttctattttattagtcgtactctaaattctttggcggatggtttagccaaaaaagctagaatttctagcgagatggctgttttgtatcaaggggagggtaatccccctgtgattctcatcacttttcttgcttaatgaaccgtctgttctttcaaaaaaaagattcttatcctaatgtatcttttttacatgtgtttagtaatagaaatgtaatagctcataatttagtttgagaaataaaattagaaagcaaaaatttaattagaaaccagtgaatctctcgaaagaacacata

SEQ ID NO: 245278 - DNA, 1886 bp, Cannabis indica
ttaaaaattttaaaaatttatagtgtacaaaaataaaattcaaataattataagtgtcttaattttttaattaattttttatatactgcaattaattattttaaattttattttcaacaccataaattattataattttttttaaaattattagaatgagtagtataattataataaaaaaaattattattataaatatttctccatatacccaaaacaaaagttcttactaacaagactaagttaatataatcatgtttcttctaggacatccacattcaaaatgtcatctatatcatcactcatcagtaatttaacaatatttcataacaattagatgaccagatctataataataacacttaaacacatcttatgattattaaatatttgttagtacaaatttgaaatgtatataataaaactaaaagaaagaaaataaagtgattagtgatatatattccaaatatccaaagttatatgagatgagatgacaatacattggttaccttatcatgacaaaaatctgacaagctagagcagatttgcatgtggccactcgaaatcgattattccacaacttttgcccaatctcatacattaatattttagtctataaagtccataattgcgtctacattcactactacatatctaccccttttatatgtggttctcattttcactatcttacacaaaaaaaatggaggattttcttcatttataaaaaaattgtttatcctaaaagtgtatagagatatttagaaaatctacacaataaaattttgaaaaattctacaatacacccccttaaaataggtgtattgatgcacccttatctatttcggtatctaaaaaattacttagtccaacttttttttatgatcgtatacattatagttatttaagacatctgacaaaattttaagaaaattcggaaaaatttaacacgtcaaaaataatattcaaaaagtttgttgcacgcgtgactttttttattttatacgcgtgtgaaatagacaatttaaacattgatttcgatattgtaaattattttaaatttctcaaaattttacaggaatgtctaaaataaatataacgtacacgactatgaaaaaatttagactaaaacattcttatgaataccgaaacagttagggattgcatcagtacactcattttaatgggaagtattgtaaaagcaccctaaaattttaatattagaaaagaaaacttttaatttgtgattttctattccaccaataaaacacctaacaaaaataaaagaaaaaaaaattgattagtatcaaatatttaataaatatgaaaattttcataaatatcattacacataattctattatgcaaagattaggatttatgctttctaaaagtgtctcttatatattttatattttctttagaccatactggcctggttagcatgtgacaattaatatagttagtgtccttattagtatagttagtatgtttgtccttattattagttagagcttatagtctataaataggccttgtaatcattcttcaaagaaagtgttgtaatagctcaaacacagagtaatacaattcagattaaagcaaaagcttttcactggtttctattgagtgttgtttgaatgaacaagtgagtgagtgtgtgtgatcaagatcagcaaaggcattggcattataacaggccttagaaaaacaaaaactaatcatactgtcctacaaaactaaaattgaaggcaaaaactgaccatcttggccatacaaaaccaaaaacggatcatactggccaaacaaaacaaaaacagaccatactggccatccaaaatcagacatattctttaatcaaattattcaatcttcactatcataat

SEQ ID NO: 245279 - DNA, 2853 bp, Cannabis indica
cagttctagggatccccccagaaaacactataaataccccccaaacacactgagataggggtcgagaattctgggttcgtatgaattaaagaaagtaaataggagtgatatccaccaagaacattctctgtaataaattctctcataaataacaaagactcgtggactaaggctcgttaatgcccccaccacgtaaaaatcccatgcattaaactttctacagctctcttatatattattaaattggttgtcgaaaacctcgctcaactgtaactagtgaggcccacataatggccgaccacttagtgtgattttggcccattattttattcttttttaatccatacaattaaatcctaaaccctagttgaagtactataaaaggaacatgatgctctcattctcatccaacctacttcaaccaaactaaacctagttttcattctctgtcaactagtagaggagatactctttctatagtgatttcacaccttatctattattcttcaccaattgagcaatagtgataagtaccatgcccacacatagcaagtcaagtactcaatcatagtgcagaagacgatggtaaccaaacccgaagaagagaaagagatccagacttagatcttgttattactctgcgatagaaaggaacaagggttagagatctgagcataaggagtcatattattctgctaccatcaatgtaaggttttctaaactcttatgtgtttaatttcatcgtattagaaaattcatatttagggtgttaatgaaacatacatgtatgaaaatctagatcatggtaaaataaattccaacaggacagaccttgtgtcaaaggtctaacgacgataatagccaaatcctggcaaccagcgacatgggggcattccagggatctcaggctcaacagcaccccttctatccatcccatggcccaccaatcaatagcaggagtccccatggttggccagactcctccagcagtccttatggtcgaccagactcctctagcagtccccatggccggccagagaagagcactccctcttcaaggggaacgagtcacttaaaaatcaattttcaaccgacgaggactgagagcaggtggaaatacccaaaataacaatttgagaggtgaagttaatcacttcagacagttagatccaccaaactccaataattggtgcgatcaactccatgtcaacgcacaaactccaccagccaagcagagaagtatgggcagccaggccctacccagcttagggctggccgaccatgtacaagcacgagacttagggttggccgaccttgagtataccctctcccagagtatggccgaccaggctttgaccaatccaaggttacaactcagttagagaaggccaatcaactaggcccctatagtaacaaattcttttgtgcaaacatagttggatcaaatacgagacatgctcaagggcctagctggtccaaaaccttcataacttgagctagacagggctaggagatcaccattctcggcatacatcaatgcttttcccttgcctaaattcaagatgccggcttggaagatgtacaaaggaaaagaagaccctctagacacctaaagtactttgagatccaaacatttctcctacaagtatctagagacgtgcgatgctaattctttctggtaatagctaaaataacctaataatggtattttaggctggccctaggaagatttaattcttgagaagagctctcctaagagttttatattcagttctctacttcaagacaaacacctggccgactggaggatcttgtcaaaatatagcgaagacaagatgaatccttgaaggactacattcaacggttcatgactgagaccacagaggtcacatgcttgatagaagaaggctgatatgcgaccatactcagaggcatcctaccattgagtgacttctggaaagatgtcaggaggatcttaacaaacaacatggaggagttccttgagcgagctggtggcttcataaagttgaaagaagatgtctggcaagcccaaacaagagggcaaggcaatggcaaacaaacatagggccccattgcgccctaagcactctccaacatgtcgaccagtgcaaaagatctttatcaattctcaaacaacgagaatagtggaggcaagcgcaacaacgatggctctgaccaacataatggtaaaagagggaaattcaacgattcctttatgccatgaagtccaaggaagaaggaggagaagtgtgtatttctcattcttctatcaaatctcccaaagcacaacatgtctagacatataagtagggcaagtcagcaacaggcaatctgaaggctggcctccatctctgaagtttagcctctgccttgaaggttggtctccatcttcgaagtctggcgtctgcctctaaaggttggccttcatctccgaggactggcctccatctttgagggctggcctccatctccgaggactggcctccatatccgagggttggcctccatcatcgaaggttggtctccatctttggccaagtgtacaggaagctaccaccaaccctgctaaaacctccaatggtaggacactcaggggtcgtcattgacggaccccatattgcaggtgagaccaacaaagccagagagcgctatgctcggacacttcgtcacgagctcaaaagcgacttcctggcaggcaaaaaatgaggctctaagcaaccaaagctttgagagcccacgatctctttctcaaaaaggagatcctatccaagacagtttcctgcataacaacacccttgtcgttaccacataaatcgggaatataactgaagc

SEQ ID NO: 245280 - DNA, 1401 bp, Cannabis indica
tctccattaaaatatttaagtaggagaacgagctccattttctctttgtaccttccaaacataggctcccttattagttagggccttgataggagcctccccaattgggtctgtatactcctattgctaaatctttggtattcaggaacactactctttggagcatcaggtctcctatgaagaatctcctatccttgacttgcttgttgaagtgcgtatctaccttttgctggtaggcctgcaactttaggttgacttgaaatcttctatcttctacttcatcaagggattttgccaataggatgttgtttgtatcttggtcataggtgtcatcttgtgagatggtggcaccagctatacaggcaacatttcctagtagtcataagctagagcaaatggagttttcctgatggccatcttctcggtagtcctgtgtgaccataggtcctcagggagcgattcgggccaattgccctttgtttcctcaaggtttttctttagggtgtccttaagggtatgtagtctactgcccattttcttgaggatgggacattgatgatgccatgtctgttgcagaatttagtgaacatgtcactataaaactgctttccattgtttgacataatcttctgtggaaatctgaatcaacatatgatgttcttgaaaataaagtcatggacttttttttggaggtgattgttgccaagtgttcagattctgtcaacttggtgaggtagtctactacaactacagcaaactgtacccctccttttccctttaggaaatgaccaatcaggtctatcccccacattgttaagggccaaggagattgcatcattgtgagctcattatgggtagctcttggaatttttaagaatctccggcacttgtcacatcttttgacgtagtccattgagtcgtcaatcattgttggcaaaaagtacccatttcggagtatctttttggataggcttcgcccccagcatggttatcgaagaagccttcatgcacttctatcatcaattgctcggcatcagccttggtgacacaccttaagggcggcattgagaagctctgtctgtacattactccatctaggattagaaacctagcagcctttctccttatcctttttccttcattcttgccttctggcaaggctcaagtttgaaggtaagctgcaataggagtaatcaatgtttgactatcatctaacatttagacttcttcagggattgtaatgctgggttcttttaggaactgtaattgcactatgtttgccttgtcgataatggtgtgatttgctagatgggcaagtgcgtttgctgtagcactctgctctctagggatcttcttgattgtacagcctttgatctggcttagtaagtctttgatcttgct

SEQ ID NO: 245281 - DNA, 1363 bp, Cannabis indica
aatcggttaggatatttatttaaatataaatatgttaattaattaaaatctaaataatagatttattggttataattaattatatttttataatcttaaatctatatataccatatatttaggaaacctaaaaatatttatcttataatattctctcctctcctataatgttcttgctcatgagactaaaacaagaacaagttatattgtgaatcctattagttgaaactaatccttgagtgttgaggtaggcttagaagatcatggtgtgagttttataatcatcattttctactctgttggattgttggataggatgatgaaataaatacaaaaaaaatatattttttctattaccattattactttctaatttaatataatttaatatatatactatatggggtttctttggaatcggtacaataataatcacaattaaaatgcttccacttcatacttgatttagtatcaaaaaataaacaacaaggagaacttctcaaagaggcttgaccatatcgtcaactcattggacgtcttctttacttgaccttaccaagaccagacattacttatatcgtcaattgcctcaatcaattcatgttagctccacgcactcctcatatgcaactaatattgttggaaaagcttttctatagaatcggtttattaattaatgcaaacaattatttaacgtaaataattataataattattttatataacaagcaaaacaatatatatgagattaagattactcataaaaattgtaccagcaaaaataataatctcctttcatttagtattataacccttgattcttttttcccagtcttatgcaaagatcaaggtaccaagtataataatgcattattccttaagacccttaattttaaaatttagagagagaagaaaagagatagtggactactatgagagaagaagtaaagagtttttatacttgcaaaatctatgaatgaatggtctaaattatgactgttcaaattctttgtattttatagccaaaatagtgaggtaagaaaagagaaactatcttaatttccaaccaagttgttaatgaactcaatgactgaggtgatgcttggacatgtcatcaattgttaaacctttggtgagatatggaatactcttgctcaactattcaacatcaaatccaaagcacgactcctttgaatttgtggttctctgtaatcaacaaagaaatgatcgatgtagattaatgaatatttcttgaagatgaaacaatttaaagatgatcaatctatagcaagataacctatctcaaatggggaactgatcctgtgcattcttggaggtcacagaccagaatatgaagttgttg

SEQ ID NO: 245282 - DNA, 949 bp, Cannabis indica
tagattatattatatgtatgcagaatttttgttttctttaataagaaagatttttaaactttattaataaagacaatcaataggcaacaaatagaggcacaattatcctctctagtaatatgattaggcagatataagacgctctagcaagctaatgacagaccgtttaacaaaataaatgaaaacattcctaaaagaatcaagtaattctccacaatcatgaataacaacaccaatagtagaaaatatttcaatagaactatcaacagcattgaccacgttgaatatcgaggttgttttttaactaactaaaagcttcctttcaccccaaagcctcaaccaactccgcacgcataacaatctccaaatagtacacacaggcctccaccaaagaaccaattgagccacgaattaccataaaaagtcctaaattccctttattcttaaaaattgtagcgtttgtgttaattttgatcatattagacaaaggtttcatctaatgctcaaattccctagtaggaccaaaagatacttgaggagcacacaaattatcttcctgtgcaatattcctaagataaacaagaataacaacagacataacaatattaaaagctataggagtagtattgttatctgagaatctgacaagggacacgtggaaaccaaataataaatgcaactcaaatacttcaggcccaatagttggcccaattgacatcactaggccgaatctataaaccattaatccttccggataaataacacacaacttgtccaagcaaaatttcatctagcattgtcagcacccattaggcatacaaccacatagccgaaagaagctttggaagcccaatgtagtttcccattttctgtcaaatcgtacaagattaggaattaccttcctataatcttggatagaagattatataaataaggaaacaagataatt

SEQ ID NO: 245283 - DNA, 1718 bp, Cannabis indica
aaaagtgcggattggatcggatgaacaacccctaacaacaagtgatataattgccccaaaagcctgcacatgcatgagattgagaaagttgagtcaagaaaaggatcaaaggtgaaaaataatgagtttttattgggaatactaccattgatagtacaaagagaagagagagaagacccaactcaggtttgggttgaagctttaatcttttggccatttgaatggaaacaccaccaccaacatcaccatagccataagaagaagaagaagaaagtataaaggaagaatctttatctttatttgggttatgaaagcgtaatctcaaaggcaaaaggggtggagtagtactagtattggtattggtattggtattggtattggtattggtattggagggttcaacagttgagaaatggcatctgaagaaagagccaacaggagaagccattggtggccagttgattgattgagctcctcacattctgattttatgtttctcaaaactacatgtcgttttgtgtacataaaataaaaccaacttttttttaattttttcaattattaatccacataataaaatcccattaactctgcttgtaatattttcgttgatactcttgtaaaatttactaattcatatttgttaagtggtgttttctaagattattttttttttacaaaaaacaatggtgcattaattacaattaattttataaatacacctaattttatcaaaaaaattatacttttaaaaaggaattaacctccataaatacattctatttacctcaaattctaaacttttactcaaatatatgcaaagattaatatcatttctttgatagacttggtttttttttttttggtatatatatacatataggcataagttgaaaattatctttttaataaataattttaattaataaatactcccttttataattaaagtataaaaatataacactactgtaatttattaaaattaaagttcctaacacacataataagaatataacttataaaattaagtataaattaaaaaataaataataataaaaaaaaaaaaaaaaaaaaataaaaaaattaatatacagtgtaatttcttcctaactttttattacaacctcttatttcaattatttttctcaattttgtctcaaaaaatacagagttaaagttttatttttttttttctatttttattttactacaatgcttgttatagttagttataattatgttatttttttggtaaattttcaaaaaaacagaatccaaaataaatttaaatttcatgaaacatatgtgttaattaaagttaaatattagaaaagtaaattattcataatttttaaccgacactcattatccttcccaattagtggttggaatgacaaaaacatgttttttacatttttgggtttggaacgagttttggacctttggtgcattgtatgataaatccaaattaaaaagtattattatttgtggtgctcatccaattttaattattttaatatatttatatgcattttgggaatatgtgttgatgaaggttttggatataaatgaatcactttccttattttttggataaattcatgactcagcctcctttcatctatgacaagaataaacaatattattattaaaaaaaaatgtgtatgtagtcaaataaaagaggtagtgaagaaacacctcacatgcactccttc

SEQ ID NO: 245284 - DNA, 1254 bp, Cannabis indica
ttagggatccaaatttgtttcacaggctcctcttttgtttctttcttcctacatgattgagtatcgtgcccaatacccgagcaattatagcaaactagtggtatccattcatattttacttccactttaacctcatgattaaattcatcaaaaatggaaatctgattcaaaaaatgctgagagagactcacctgaatcaaaactctggggtattggagacagtccctatttttagtaatgttgtccacttgaagaggttctcccgattgcccaacagtcttgaacaaagatgtttccccccagtatttgatgtccaaacctttcaattgaatccaagttggcatgttcgtgacttcctccttggtaaagtcatcgacagaattccatggtttcattaccataggcttcctgtcaaagaagacatacccctgttccattattttgtctctcatttccatgttctgaaacctgataatgaagatactctttgctagcagacccactttcaccaccgcatccttaaatattcgacgaacaaatccatcgagtatattaattggaggattcgctccaatcacataacaaaccaaggaaggcccccaatatctcacctcttttgcaatgtcctcaaaatcaatcttaacactcttctttcgtgcagatccagcatctaccgtatccttctttacttgtgcaaagctagcttccaagttcttcgttacactagatttgagaattggaggagagatcttcttccccaaactcacatcctgagcaaccctactagaaattgtgagccactcagataggtccttaacctcactaacaggtgattttagaccctcgatccactgttccattgcatccgagtattgttccattgcttccaaagtctcaggaatctctagttctcgaataccaatcacctcatccatggatctggttttgataaccttatcctatgaagacgaccctgttttcttccctttagcttttacttttccaaccatttttgccctttcgccatagccctggtgaatcaccgaaagagagagaagagcaggaaaagtaaatattttgttgtgagacaatttgttttccaatgacttcttcatgtaaattgaggaaagcttattccgcaacccccaatgtttttcttcatgaaattttaaattgaaataagatactttgctaacttttaaatttggttattttatttaaattaaattgtaaaattagaaaaataatatttat

SEQ ID NO: 245285 - DNA, 646 bp, Cannabis indica
aatgatttttttaaatatttgttatatttgtctacaattatccgtaatttatatttgtattattttaacatgaagagttaacagtgttcatttttaaaaatagtgattcaaatcgtccattgtatgcgtgcctattctattttaaacacatgcaacaacatattttactttacttttgtcaccataattattaattctaaattttcgtaaaacggtcagagtggctattacagctacaatatacaatgtcatatgaaaaaatagaatgtaattttttaaagcacttgcaataaaaaatgttcctatctaagaatcttcatatataacatgtatttgttcaattttgcattttatcgtaaattaaaatcctagcaaaaagtgtaaagatgacaaacatgtatttgagttattattattatttttaatcatttataaaagcaagagtagtttggttgtaattgtaaaatattttaaatataaatcaattttgatttctaatttgaataatcttttaaaaagtttatgataccaaaatattaaatttttaaaaaattaaatgttatgtatactaaaatgtagaactcataatattatgtatcatattttttaaaaataaggtcttaatagtaaacttttttacaattac

SEQ ID NO: 245286 - DNA, 1838 bp, Cannabis indica
aaaaagggtaatgatatgtatgccatatatgtaatagatttcagactcaaggttgttgttaggatgtaaagtcaagattgtggtaatataaacttacatattcatttgaagaaaaatgatatgtatgcccacacaaatttgatatacattgatgtggtaataagaaattaagtaatttgttgtttaattatttaaatttaattttcggttgcagataaatatttaaatttaatttttgatgtaataatacttaagttataattttacaactttcgtaggtacttcaccttaagtcattatccacatgttattttttttatttgatatatttaagcttaacgatcaagtacacctatatattatttttttaataaatttaattatactaaaataatatttatccaattactaaaattttatcattacattaatttatagatagtgtaatatatactgttgatacatattatataagagattgaaccaaattacacctagctatgtcatgaaagcttttcataatttttatatatatatatatatatttatatataatttaaaaaattctacaataaaattctcttaaaagtaggtatgtcaaaaagatctattaagttggagcggttggagctcctatccgacaaatcacttctgatccgaaatattctaatacttattggatctcgaatcaaatctgttctgcctcgcctaatttttttctagattagatctataatttgatgtagtttcaatatatttttttttttttaaaaaaaaaaaccttaattcaagactcggaccccgaacctggacccatatcccctgggacccggaatttggaccttgactgaactcactcaggatccacatctagacccgagacccgaacccagaactaaacttgggactggacccaaacataggcccatacttgagaccggacccagacccaaaaccagacttggacccggactcggacccagacccgaacctaagaccagacccatgagccggatctagacccaaacccaggacccgaactcagaccggacccagacacagaatcggacccggagccaggacccaaactcggacccggagccaggacccaaactcggacctaggacatcactacaacaattatggttattagaggtggaccactttgctggtaataatctcttattccgccgctaaagagtaatactagcggggtccgccggtaataatccgctagtaatacctagtcgctaataactattattaatggcggactgacacacccgccgctaataatagtgtcagatcattaaactcacactattattagcagcagatcaatccgccagtaatactatttaaatataaatttataatttttttcttttaaataacaaatataaaattaataatatatatttaatttttttactattttactcacgacccaatattatataaaatatttatcattgaatatttatatatacaccaacatttaaaaaattatacaatataaaaaatatatacattcaaacatttccataacagaataaataataacgagaatttggttttctataagaaagttatctctcaaattctctaatgctatatacaaatataagattacaagaggtatacaaaaatctataaatatacaatcttttttcttcaaatctagtgcaataccttcttaactaacatgtaataaatcacatgtagacaaaataaatttgaggcaaattacatttagtatgaatattaagtttctcattttttttttttgtataaaatttaaaagcaaatataaacaaatacacatatagaaacacaca

SEQ ID NO: 245287 - DNA, 675 bp, Cannabis indica
ctcaatcagattgataaatcaaaataagaatgacttgtaggaattcaaatcaaaataaaccagtactctcattaaaatgtttacattagtttaaaatcggaataaattattttaaattataaaaatacccgttactaaagttttatttggactttttaaagttttcattagtagaatttttttttttttttttttttgttaatggaacagtagaaaaaataattaaaaaaggataaaaatgacatttattttaaaataaatgagattgacaatcccaccaacctcataggactcatgggattagaaatcccattgttcaatctcaaattaatgtgtgacccatatattttattctcattccttatcaaaattagaaaagtaaacaatactttttgtggggatttgaaccattgccattaaacaactctacttcatcttctcgtctataatttaattatccttcacgatggaaatgccctcttcccccaactcaactaagggcaagcacctactcctaataaaatgaaaagcagggagctccacaacaaaagcgaagcgcgctagtagaccacatctgtttttcagctggcgtcaaattaaagcttgactaataggtacaatgttaggttttatgccctaaataaactctatttcaatgtaatctattttattcaa

SEQ ID NO: 245288 - DNA, 1308 bp, Cannabis indica
ttaaagctactgctatttgaaaaattgattatttagggtgtgtttggaattttgggttgggttcgggattgggtgccaaggctggggccaagtctggattccatgattgtgggtcaaggttaatggtcagggtccggatgggcgttggggttcaggtcggagtccttggtctaggatccaaagttggggccagggtcgagtacaggttgcaatcagagtcggatttatagtaaaaataatataattttacacaacctattaatagaagtaaatataatattgtactatacattattatataatacaataaaattcaacctaacacatgactctataatacaattcaatacataatactaagatgtatgaaaggagcccttatattttatattagtacagagaaagttaaacattggatcacttagttatttttatatatgtgtatccaattagttgatgatataataggatgagatgctaagtagattgttgactattcctattacttttgtcataatttaatctgtttgaagatgtttatggatgaagttagtgaacataaaaagaataatgaaagttacaagtcttggattttttactgtcactcttctttgtaattaagctccatgtaagtatttaagtgtgtatggaagaagatgagatgagtgtgtaaaagaataaaaaccaaaataatgttaatttcagaagacaattgggccattgattaaatcaacttgatagccaaattccaagaatttcaaagttaatcaaaacttatgtatttgctgtttataatttcaacccttttatagcaaccaaccccacataacaaagacattataaggctaagaagaatatttagcatcagaaaaaagagagttggaacaaagacatcatattaggcaagttaagaaattaacataatttggggtaattcaaacaaatatatatacacatattattgatgattaatgtatggttttgtctggttcattttatggatgaaatttgcaataatagcattgaacgagaagcacgcacaaataaatacaagtatgagtaatttacggagtaaatatttaagtttaactcttggttacagtaaaatacttaagttaattttttggtggaaaaatacattcggtcacacttttggaatttccgtagatacctctgttatgtgttagattcttgggtaagagtgtaagagttgaaacactttgagagaactcatcagagaatcgatttcgactgtattgtacatgttcttactcaatcaataaaaaagatttggtggtgttccaaaac

SEQ ID NO: 245289 - DNA, 991 bp, Cannabis indica
ctaaaagtcattataggtgtcagatataaatcaagaccaaagagttttagtgtcaagttttttaaaaaaaatacagtccctcgaatcgacaccaaaagtctattttgtagtagtgaaccattagaaatggttcgtgccataaaacggtttatttcatgacttttgccagtgtaattcacaaattgtgccagtgtaggtcacttttgccaagacaataatgcgccagcaaaagtgttcactgaaagctttgggctttcattgagcccctttatgctaacgacatttgccaacgcatttagccaaatatgctgataaaagtgacatttcttgtaatgcaatgttgttttggcaactccaaggtaatacctaattatactaggaaaggtcaaaattattgaccttgaggaatactgattacaaagtttgttggtgtagggattattgtgtaatttcttacataaaacggattagttcacaagctcgtttggtacgctatataaaggttgtatagtataaaataacaaggaacacaatgtttagataaaattttgtattgtataaattattacaactataaaatttaatacaatgtaaatcatatatcagtattaggtacttgtattttaatatttagaaaagggtccagggttggggatccagaccctagccccagacccagacctgaactttggccctgactcttaacccgaacgcggctccaaatcctcgatccagacttagacccaaccttggccctagacccaaccttggccctagacccaaaccttggacctgtggacttcgggtcctagtgagtctgagtatggggttccaatctacggttgagatcgagtttgtaataataatagtataattttacacaacctattaatacatatcaataccaaataatattatattaaataatattaatacaatataatccaacaaaatattatacaatacacatcaaacaagcacttagttaatt

SEQ ID NO: 245290 - DNA, 808 bp, Cannabis indica
aaaaaataaaatgtcttgttattgagcagctaattcaaaaaatttgcatgtattacaacatataaagttataaaatgcaaatctctttcttcagtaggacatcaaacagaaactaaaagaaatgcatatggaataggcatacccaagactttgcttttgagagtggaggttcccctgttccggtcggagtaaaatcatccaactcaggtagtataaggggcaattcagtttcagaaaggggaacactttcaccacttatatccaagaagataacaggaataggttctccccaatagcgttgccgagcaaagagccaatccctcagcttatagttcacctaaagatttgaggcaaataaaccatatattatctattggagccagagttgagccaaccaatgaaataaacttctgtttattaacaaaccacctgtttctttccttttccattcttctcagcccactcaattactttggaagcagcttctttgctggacaacccattgatatcaagtccaaatttcgaactcatagaatttataaccaccccttcacctggaaaagcttttccagaatcaccaattttttcatcatctggtgtcacaacccaacgaatggggatgtcatattttgaagcaaactcatagtcacgagtgtcatgtgctggtactgccataattgctcccgttccataactgcatcagtaaattctctttgataagtcttctaaatgtttgaaatttcagaactattttttattaagaaagatattgcaccaaaatgaactaactcaaccatgcaatgccaat

SEQ ID NO: 245291 - DNA, 821 bp, Cannabis indica
acaaaaaaaaaaaaaattgggcccttactataaagataaatggtattttttaaaattattaaaaaaaacatatatgtatattttttaaaagatatttttttttatttgggcccctaaaatgagtgggccctaggcccaggcctagcccgcctatacctagggccgaccctgttgacctccttttagtgatgatccaaatgagcaccaatctctcacaattatttctttgcattctccgatctctctttatcattgtccccaccaaaccccattcactttcgtcctgccctcttctgccctctctctatcgacaaccaaaccaagcactctctggattttcattctctatcaccgtcctcacccaaccccattcatttctgtccgaccctctctctcagcaaccaaaccaagttctctctggatttttattctctatcaccgtcctcacccaaccccattcatttctgtcccaccctctctctcagtaaccaaacaaacccatctggatatggctaccctcatcattgtcttcggtgtcttaggtaacatcgtgtctttcatggtgttccttgctccaatgtaagaagatctcttaactatatttattattttattaattcacgagattattattagtattaatatatttaaatttggaatatatttgttgcagaccaacatttcacaagatttacaaaagtaaattagcataagggtttcagtcactaccatatctgatagcactgctaagctcaatgttgtggatatactatatacagaaaggtgttctgctgctcattactattaactcttttggttgt

SEQ ID NO: 245292 - DNA, 751 bp, Cannabis indica
tttatttttttaaaaaaagaataggtgggtcgagttgcgagtccaactacgtagtgaatatatagcagatttgtgggttgcattctaatgggcttaacaactgatccatcataaatatgaatcttcttcttcttcttctttttatccccacttgctgggagagttctcttctcacccttgacttgagtgaatttaaaataatttaatcaattaaaatattataataacttataaattgtattttggaatatttaattatatttttgttaattaaattatattatttatttttacaaatttaattacactaaatacaaaaattatccaattattaaaattttatcacagtcttaactacacaccaaatcttagcatcgtgatagaatttttgctattaattatattatttgttcaatatatggatctcaattttgaacaataaatatgaaatgattatcatcttttatcaattgtatttttgtattctaattgacagaaatgtttagaaatcacattttaaaaaagatttaagattgctatttccatagcactaatttttaaaggcttaaaaaaataaaaaccagaataatattgaaaattattatattcataaaaatatttcaccataatatttggcaataacaagtcgagattagatgttatttcaaatttaacctataactatctggtagagtttaaaaagtataatcggggaggtcttcatttaaaattggaccttgcaaacccagtt

SEQ ID NO: 245293 - DNA, 1570 bp, Cannabis indica
cacaggaaacttggactcgaacaaaaaggctcttattctcaatcggttttgtatggctattcacaatacaaagctgtgtttaggcacattatccacaatctcgttattggtgtatttcaatattgggtctcacaaattttgatttagtgactaacatgagaaactgctaaccaactattatttgtataatattattgggcataaataataatgttcaataataaaaaataattcactaaaaaaatattgtactaaaaattatacataaaaaaattattcataagaaaaaaaaattaagatcattaagaaaaaacccctcccaaattattgtaaaaaaaattatcattcatgacaaaatacatggttacataccgttattgtaaccaacgtacccaaattatcgtaaaaaaattatagaaaaaaaaactgtaaaaaataaaaataaaaaataattgtaaaataaaaaattacaagaagacaacaatagttattttatttttctacgatgttatatgatatatattcgtgagaatattgaatttttttttttttttgtctaaacttattttattttattttttgttgctaaacgtgagaatattgaatattatatttggtttcaataagcagacacacaactttaagtgagctactgctttaagtgataacatccaactccattaattgattatgaccatcgatcagtttaaattattggagttcggtcttttgatggagaagccacactaatatattaataaaacattatatatatatttatacatacatgatatattattatactatgtataagtgaactagtgaagtaaaatatgcttacataattatatactatgtatgaagatattttgcagtttgtacacaaggtgtcaaaagtggacacgtacatacttatatttctatatataaatgaaaacctattacgtaccccacctgtttacaaagaagagagagagatttaattttgtggctaagaatttttgttggtgaatggtttaattttgtggatatgagtttttgttggtgtgattagcatgtgtgttcgattctaacctaacaaaggctttaataattccactttccccaaacatgttttgtatcttcttttttgtaccatgcgtttcacgaacttctgcaaagcatttttaatggtagtatttttttaaagatgttaaatttttttatatcatttaaaaatataatattttattttatttcgcttttacgttatttttcgcttttacgttattttttaacactcttgctttataaaattactctaatagtatagcattcttcaaaaatactataattataattttacaaattattatttaattttttagcaacaataatttttagttttaattgtttattaaaaaaataatgatagcatcaatattaatactgtataacatttatacatattcctagaataacattttatttccctctaataatatagtatctcaatattttgctactttatatatctacctaagcaaacatctcttaattgtttaccattaaatatattcttatatataat

SEQ ID NO: 245294 - DNA, 1032 bp, Cannabis indica
ataatttgggtacaatattcatgaaaagatgtatatttgaattaaattttatttgaaggtaaatttagttaatgtataaaaaaataagtattctttaacttctccgtatatatgaatcctgggtccatagctctaatgggatttacctgctcactacctatgacaaataggtctgggactttgcaatttgggcctcgacagatatgtgtgatccgtttgttccagtttgggaagctcaatttctttttaagtttagattttttttttttattattttgtgggtattatatgaatatatagtggaataatttttttaatcttatggtgctgggtataataaataatttgtttaaaaaataaaataaaattaaaagttatgtcaatataaaatcatcaacaaaccaaacaagagaaggaaaaaaagtaaggaaattgagaagttatagttagcacttcacaaatagttcaggctgaaaaaaggtggcaattcgtgttgacgtgtgatgttcgtgttatttaagttgatatgtttaattgattaactttaacttaatccatatatctttcgtgtcaaaaaatttcaattctaacccgacctgtcgtgttttcgtgttgacctgtcgtgttcgcgtacgtcgactatacttatgtttaggattgttcagaaatgatccaatccaataacaaatccaccgttaaaaattagatatccaatcatgattggatttgatcagatgatattttggaaaagagtaatttgcgacataaatacttaagtttaacttccacctgtaaataaatacctaagttttaactttcagttgcaaataaatactaagtttaacttttagttgcgaataaatacctaagtttaatttttagcagtaataatatctaagttatatttctcgaactctgtaggtacgtaaccgttaaatattaagccattaaattcacgtgtcattttttttattggtatatttgaactaattttttttttaaattaataaaaatttaatcacttggaccaat

SEQ ID NO: 245295 - DNA, 833 bp, Cannabis indica
gcttcttcaggtcgtcccaaggctaaggtggcccaaaatacctggtctacgaatgtcgtagagtcctcactgcctccccctccactgaggcctactctggctggtcaactgatgatcatagccactaaggaggactccacctccacccagatcttcgagctagggtgcccaaaagtttggctgtggagattgctaagccactagacagaggattttcgatgctacccttacattggtaggactctgcccatcactgatggggagctccaggagctagagtgtctaacatttagcggccttcagaacttgactttttcaagttgcatatttaattttactcaaattattgcattgataagggctggcaggccagatatgaaccactaggagactggtcggccagggttgcattagtaagaagctggctggctaaaagtgcaccactcaggggctggccggccaggtcttctactgtcactaactcagtttttttttattatttcaggccatgttgaagtttagccttacccatggtagaggaaaggctcttctggcgctcatcgagagaatcttaaggccaaggagagcgagcttcaggtagagaaggatgcacatgtttgaatttgttttaccaagatctagatttactaccatgtatgttgcttaacatcctaaatatgaatttctaaaacaatgtaaataaacacatataaagtttcagaaacctaacaatgggtgcagcagaatattaatgtctccttccactcagatctataacccttgtatcctatctgtagcagagtatcaccaagatctgagtccgaatctccttc

SEQ ID NO: 245296 - DNA, 1116 bp, Cannabis indica
ttgtgactaaaaatacatttagtcacaacacattgtaatttttgtgactaatacttttagccacggactttttagttacaacacaagaatcatgatttataattagtcacaatttttttacttttactcacaaattttgttgtgactaaaagtaagattttttgtagtagctataacgattctaaatacacttatatataccagactttatacaaatgatcactcgtccacaacttcaaacacagctaggagagatgttaaaatttctgctaaaatcagttagctccatgttagctttaatcacttttttaacctcaacaattttttttcaatagtagttacacccaagtggagagttatagctccaccaatcttcatttttaagatagacagcatgtatccatctcatccatagacaatctttcttcaaggctatatcccacacatgccttcccaaagtaccaaaattccattattgctcaatgttcctaaatctcaaacttgtcaaaacttttggtaaacaaatctaatgccaagccacaagaccaaaggccgtcagaggcatgagtactcttccacaagaaagctctacaaatgttattaatgttttttaagatgtatttaggaataatcattaattgaacccaataagtgtagatagccatcaaaattgaattaataaaaatacatctccttacataagaaatatgtctaaactctaaacctagccactatcttctcaataatgctatcacacttattttttgaaattttcttagaacaagtaggaatatcgaggtagctcaaaggtagatggctctagacataatcggaactctaaaaaatatgtttttgattttatttatacaattttctagtatattagtatattttttataaaattttatgtttttttggataataataattttattaaataatatgtaatattttaatatttatgaaatttactttttatatacttaaatttttagtataaactttcattaatacatgggtagagtctctggaagttcttatcctgtccttaatgagaattatgcaaggatagatgagaattaaaattcttaacgggaacaagatgggagaagcact

SEQ ID NO: 245297 - DNA, 623 bp, Cannabis indica
gagccaaaagagtcacttgtgatcgatcgtataagattggtggacataaaaatagccactaccttgaggcaagatgttaaagaattctcacattgataatatgttgaaagtaaataccatatataggatgcatggattactcttctcataaccaattaattttgagatggaaccccatgttacattctaacaaataatcattcaacatactattcttaaaatgatggtggctccttcgggattgtttttggcctcaataccccatgttacattctaacaaataatcattcaacatattgcttctactgataaatctaggtgaaccaaagcgagaggaagcccttgtagtcggagtgttccctagatttatcaatagaagcaatatgttaccctacataaagaggaacttgttatcagtagtgcaaaagtaactttaaacgattgaagtttgaaagcttcttcaaaaatttaatcataaagtttttcaaaagattgtcttagtaaatatttaccgtagcatgaatttcagtattataatatgtgttaaattagatctcactgtaatatttattattactgtgttacaagatgaagtgaaaaaaaaatacagataaaatacaaac

SEQ ID NO: 245298 - DNA, 1656 bp, Cannabis indica
agagatagtgacaaagaaacagcatggtggattcttagcttgcttcacattagagaattctacgttaagaaacggattaatgggaatgtaaagtttggtgcgtttttaattacactcgtcttatatatacaatatattctgcatataataattagatatttaattatacaaatatttctatatttgtgttatattctttttgctgtggttcgtaggaatatctctttgaattcttacagttactttgaggacactctaggttgacactgcagctacagctcaacccaactaacaacattgccctactttaacaaaaaaaaaaaaaaaaaagaaaaaaagaaaaaaaaaaaacaaacaaaacaaaaaaaggtaaaaacgtacctgaagaatcaggttgccctgtctccactcttagcttactcttttttttttttttatggtaacactactacaagtatatactattgattgttttatacataaatattgtattatttttattttttatttttttttgaaggaaagatatactgtattactaacatatctttttatattttaaaaactcccactaattaagcattaagtatttttaattttaattttcttcttcttatacgcatgtatatactaactaattgtgtccaaaattctttaaagacttcattaaaatatatatatgaatgtacaacgaagactacattattttactacagtaaaggcgtataaatacaaaagcataaataaacttgacgtccaagcaaccttttctattagtagacattttattcttctctcccttttctaatttagatttattatcttctctctctctctctttacctaaggtctagcttgggagaactgatctctcacgtactattatgaactaggaaaatcagtgaaaattaaagtgtggaagaattaaattccttccttctcttataacatcaataagagaattaggactagggccaagactcgtcgagataaacgtgcccaaaaagtgacttagctagctagattccgctgttatctctcttaaaaatttgggtattttttttgtccaacagtattagttagtagtgtggataaatcttaatattatttgagagagagagagaaagagagagagattgtttgtggattttggggaagtggaggacatagaagaaaaattcgagctttgggatgaaactcaaagcaaattaagaagaagtgagatcatgacatggtgcaacgatcaatcagaagacgtgagacccaatattcatataatcacggcgccaacttctaataacgatgcttctacaactaataatattaataatactacttcgcttgtgactaataccaaatccattgttgttcctgaccaatcaaggagtactactataacatgcccatcttgtggacaccatatagaattccaagaccaggtaattattttagttttaacttaattatataaatataaatatctgtttttttgttgtttcctagatgttaattaggttgtgtgtataaattaaattaatttgttgattatttatctatatttattttgtgaataatatttgagtaatacataaacacatctataccaaattaattgtgttaattttattcataaatatttctcaaaaaaaaaaaaaa

SEQ ID NO: 245299 - DNA, 814 bp, Cannabis indica
aagatgaagaaacaaaacatcatatagttatataaacccttatggaaaataaaaaatgaagaaggatgaaagcagattaacgttcaaataaaaaccatcttaaatattttttaaaaaatatatcatataacaaatataactttaaatgttaacaatattttcttgcaaaaaaatatatattaacaaaattaatgtaaatccataactaccctgaaagtagtataaaatattttaatgaacattttaattaaaaatatatggcttaaaaaatctgtatacattattatgggaatatgaggtctttttatacataatcaaaaaaaatctcatagaaatccttatattggaaactaaatttcatattgtattacattgtcaaaatcccattatattgaagattcacatgaaaagttcctaatattggtgattcacatgaaaattcatgtcccttaaacttaaaaaaccaaaacaaggatgagtagtacaccactttgatattagtttagacaatcccatattgttggctaccgagcctgggattcataatatactatcttagttcctcgccaagtgggggttcttttcgggaactagatgtgaaaggtaacacatgatacaaatagtgcattttgttttcagtatgtgacgacaattgtagtgactaccgagggtctggccgtctggaaataggaggaaaaatagtgaaaattccaaagaatctgttagaatattagcttcgaagttgtattactagtatcaaatacaagttccgctagttatgacaaatgagtgacgctcatcactcattactcct

SEQ ID NO: 245300 - DNA, 1006 bp, Cannabis indica
ataatgtgttgttattttacttaattgttcatccatacttgacttcatttcttattttattttctgcatttcttgtttcttggctgccttccgagttgaaccaaatatattgttgtaaacagaaaaacttttctgaacttaaagcagatgagaaaatttcatcttcatttgttgaagtagctccatcctttgaaagtttactagtaaccccatcattatattttacctaaaaaagattaaataacccatgactttattaataatattgtcttgtcagaaagttacttgttcaattaaggtagaaatatttccttcgtggaacacaagaacaaaagcatacgaggatatatgagtcttaaaagatctcaatttccctaagtcaaaacattaaagaatagtcatactttccagtttccattacaaaaaattggtttagacaatattataaaatttagttttgtaaaataaagacccaaaaaacttggtcatgaaagtatatcaattctgtactccgtgttcgaaattcacagaggcattttctactttacaaaaatgacttatatgaaaaacatttgttatttctagcaataggaaaaagaaaaactgaaaggaaaatatatgaaataaaaagcatgctaaaaagtaaaatttttctactatgttatttatgaatagagaaaattttggaagaaaaataaaataacaatcaagaatctaaaatattttatcaattactaatgatcgactttgaatactagctacccaaacaaaacaagttaccaacctttaatcgtctataattattatttaaaaaagtgtagagatcagggaagtgccatatgctaattttatatgaaatatattattctcttaggttcattaaacaaataagtcttcaatgttcaatattattaacccaaacataaccttatgaattctcaggttcagatcctcctcccttttctcaattgctttagttatcacaaccatcattaatttaacgaga

SEQ ID NO: 245301 - DNA, 891 bp, Cannabis indica
gagtggcctgaagatggtgactggctcaatgcagatatgaaaaaggctatgttctggattctagcattcgggttaccaactccatatctcaatggagtaaattctcgtacggtggcgtctaaggctgggagattcattagaaatgaccatgccagtgcaaagacgaacataagaagaggatttcttaaatttcaagttgagatagatacttctcatcaactttcctcgggtttcttcctagacgttaaaagagggaggaaggaatgggtccaattcagatatttcaagcttccaaagctgtgctacaactgtggttacctaggacatgacaaaaaatcttgctttcgatcgacggcctacgcatatccacctgaaggagcagcggttccagcttatgggccatggatgaaggcggagtcggcggttttcagctgctttaacactagaaaccaacttgaattcttcagggaagctgcaaattcgaccaggttgccggcaaatagaactccggcagatggcacagggaacaaggataagggaaaacgaccgatcgatgttagcagggatcattgcagggagccgttcttacagccagccaccaaattgaaacctgaaaagaaagtcattagggtcattgataattccccaggagctattttggggaaaaatttgaaagttgtggagaaaacccctttatgcccgctggttaaaagtgctctctcttcagtggtaacccatccttcatcaagttcctatagagaaagaaaagcaaggtcagcttctcctagggtgcgtcaattacacattcaaggtaattcaagtactctatctgatagtgacattttaaaaaaaattctcttcaaggcctcctcctaatcctgctgataatgg

SEQ ID NO: 245302 - DNA, 922 bp, Cannabis indica
agcaacgaagagtgacactgaacatcgtgcttgtacccgggtttaagagcaatccagttgaagaaacccagagcagtttggggatcaagattgagggtaaaaagggaacaaacatgagatggtgatatagaaggaagaagcttgttgagggaaggatgtttccgccaatttggtcgagataggatggagaagagctgggaagaaagttcgggtggttcggaatctgcgggaagagaagaagcaatggaagaaatgggtttttggagggagaagaggagaagggaggactcacctggagcgacgataatggccatgggtttcctcaacatcttggagtaccggacggcggcggaggtgaggactccattcatgaatggcggagaggtttggagtttcgtctcatagaagatgggttggagtggatcgcgggagcttgggatggaatgatgtgaagtgaaatgaaaatggcgatggggatagagaaggagagccgccaagaaaggggagtggactctggagaagggtggtttaggctggtgagtgctgattttggttttgctgagtccagccttgtcttcgcttggccttggcccctttcctttcgggttcacccatactcaaatcaagggttacaaatttcagctttgaatttgattccctattcgagcgttttatttttcatttattatttttttaagggtaatttggggcataacctctaagggtaatttgcagcataacctctggtcagatttttgtaattaactcctaattgtaaaattttggtgtaaaatcttttaaactcaagttatgttagcacttagccctttacatctatttttgagtgttaagtgtcagattagaatgtttacgtgtacataatatacacgtggcacaatttaattagtccacgtaataaata

SEQ ID NO: 245303 - DNA, 1048 bp, Cannabis indica
ctacttcatcaagcattctccaaaatattaccaacttgaaaatgctcttataaacgagttcaacagactagaacttactccatcgaagtattggtccaccataaggcctgatcacctaaagtgcttccaacccaatttggctatcaaagaaatgttaatcttttcaacaatcctattcttaatatatcatatcctattcttcaacaatacaacattaattaattttatttttctaagacaataatatttaatgtaaaatttgtatatatatatatatatatatatatatttggcatgaattggtaaataataactttcttaatataatcatatcttcttcttcaacaatcaacacaatattcttttttatcataccatcaatttgacaataaagtacttattgtagcatatttgagtgaaatattttccatttatttattattcaattttataaaaccaccactttttatttgattattatttattattgtattgttcactgttataatgtaatcaacaaagatttaaaaaagtgtaaaacttctcaccacaccaaattttaaagaacaagaataattccataattataataataaaataaaaggataattaaggcaaaagtcctcaaaaatttagggttgatgcatattagtcttcaacttcaaaaattggtaataatagtccctaaggtgacattttctgtaagtctgttggtcatttttctaactgatccgttaaacccaaataaaatgtacgtgtcaattttttattggtccaaataataattttaattaaaaaatttaataataaataaattattaaaaaaactttactattattttttatttttatttgtttttctttcaagtccccttcttattcgtggagcatagattcatccagatttatttgaccacttttcttttgtaagctttttgttctttttctgcttccaccaccacctatttttttcttgagcgcaaagcacgtaaccatcgccgtcccgagcccgttgacagtgagccaatcaaccctcacctctaacgtt

SEQ ID NO: 245304 - DNA, 951 bp, Cannabis indica
ttccaacggtgttcggtaggtcaatttaaacgatttttctagttttttggatttcatgctcagccttaccaagaacttgcccgataaaaccccaaagacacatttagcgaggttaagctttatcttgtacttccttagggtagtgaacgtttcatctaaatctttgattaagtcccccgctttcttggtcttcactagcataccatcaacatacacctccatattatgccctatctagccagcaaatatcttgttgacgaatttctaatatgtggccccagtgtttttgagtccgaacgacatgactcaatagcagtaaagccctctgtctgtgatgaaggatgtgtgttcctcgtcggctgggttcacatggatttggttgtatcccgagtaggcgtccatgaaacacaacaactcgtgcccgctgtggcatccaccagctaagctattcgagaaagtggaaagctatctttcgggcacactttattcaggttagtaaagtccacacaaaccctccatttcccgtttggctttgggactaggacggggttcgacacctagacatggtaataggcttctcgaatgaattggaacaagtcaagcttgtccacttcttctttcaaagctgtgtatcttacaaagtcgaggctcaccttttttgccttatgggtttcacctgagggtctacgatcaaatggtggacataataatgacacttattcccattatatcttaatgctcccaagcaaagacatcgaccgtctctttaaggtattctctcagctcacgtttgagggcttcgtagtatcctcttccaatcttgagcactttcagcgagtgctcaaatatcactaattcttcaatttcttcatctggttctgcatgaacctcctccttcatcgttggtgtgacagtcagtagtcccgtgatccgtaaggggaaacaccgggt

SEQ ID NO: 245305 - DNA, 1430 bp, Cannabis indica
ggaggatatgagatagtggacactactaaggacagcaatcaaatctactgaagaactacgcctaagcttaaagattcagatagttttaatgttccttgctttaagggttcacttgagacaaaatccctatgttgacattggggcaagcatcaatctaatgcctctatctattttatgaaggttaaaaccgggagaagctcgccctacaacaatgtctttaaaaattgcagactgctcaattgctcaccctcggagtataattaaagatgtcttggtgaaggttgctgaattcattctcctcgttgatttcttaattcatgacatggaggaagattaaaatattcccatcattttgggaagaccattcttagcaacgggaagggctctaattgatgtacaaaagataaagttaaggttgtgaggtaagaataagaaaatgacttttaatgtctttgtcgcaactaaaatccctacctattatatagtggatatggtaaaggattgttaagaagaagaaagggaagctcaaagaacgatttcaaactgttcagggtcgtatgaaaagtctaatgtgttgaaattatgaaggtgaagctagtcttgtggatagctttgacattaggaacattggagggaaattttattcatttggcaggagggccatatcagatgcaacagatagacttgatcctagttgaagttttctaaagaaaattagcgtctagctatatgatgttaacgacagcactcttgagaggcaccctaggtaagttctcttctgtattctttggtgtcacattagggacaacgcaacaatcacgtttgaggggtggacttaaaattttttttaggttgtgatttaattgtgtttctttaagttttgtgttagtgtcttggtaagccttagtgattgaaaaatactatctgttgttattcatttgatgaaacttgttaataaccatgtgcttggtctaattgttctttttcttaattttaatgcttgatgggaaattgattatgatttgtaaatgttgataattataattagatgcttgactagggttggaggtttgttgagttaaattggatagaacttgcattgtttgccctttgaggcaaaatccttaatgatatatgttgtgaaagatgatttaggaaattttcggaacatttttacctttcaaacttacccttacatgattttccctagtttacattgttgtgtcttgggttgttattcttgtttcgagacatattatgagctaaaaatgacttcattattatcttttcttgtccctatctatgccataagcttagcacaagtttggagaatgattgtaattaaaaaacttggggtaggatattgttggatattattttaccaggatctagagtttactaacaagtatgtttcattaacatcctaatat

SEQ ID NO: 245306 - DNA, 1370 bp, Cannabis indica
ttttttttggtttttgtcatcttaattgtagatggagagagagagagagtattgtttgtgtattgaagtggtggtttgtgaaaatccccataacatttgagctatgtgtacagaattggtagctggttaaaccctcttatcttataaaattttctcttattttttttttgtttggcaagaaagaaaataaataataataataataataattgcaatcgaccaacaaagaaatcaatttcaattccagctgccatgagagatgaaaataataataagataaaatagagaccacgttgtgggacatgtacctttttgttgtgatccatgatccatcactttttttttttgagtaaaacagctaagctatgcaatgtgattacacctaattccaacttctttctagcttttagggaaaacgacaacattatggttgtgactcaagatatgggcttgattttataaaaatgcccaatagaatagatcacatgatttaagctataagcctatgatggcttcattaatactcaatcaaataacatgtattttgattcttgcattttggtttccaaattgtctatttttaggtatatgaattttcaatctatacttgatggtactttgatagtactcgatggtgttggtaaattatgtcatttaatttaaagtatttgttgaatttgatgatactcaataatactcgatggtgaacttgatggttcttgatagtactcgatggtgaataaagtttcacttattatagctgaagtaaatgtttatatataaaactattacaaccaaagataataacaaataacaactaattgaactgaatcttaactaacttgctaatgacaactagcaaacttaactgtcactaacttaactaacaactctaacagagtacaatgaatgttttaaatcaaataacataacaacaccatcgattattattgagtatatatttcgaaaattcattcccaatctcaagaacatacttatatcgagtaaccattgaacctatcttgtttttgcaaaaagttccaaaaaatgcagaaaaaaagcaaatatatattgccaaaaaaaaaaaattcaacatagcaaataaataaaaggcacaaatcagttcaaaaaaacctttaaacatgtaaaaactaacaccaatgcataaatgttagagaaaggaacaaacttatgaaagcttccctctaagtacaaaaaaataatataatttctggtctaagacggactaggcctgtgtctaggacccactcgaatccatgacccaaagtttttatgcaatattataaatatgtagagaaaaaaatggtaatttcagttaaattttgtgaaataggcccactaatacccaa

SEQ ID NO: 245307 - DNA, 1944 bp, Cannabis indica
taactatactaatgcttcttctagtgttcatcaacaggtacccaacatagtaccctaaaccactccatttgagacacacaatgtcgcagctccagctaggacgagtgtccctcttccttcgaaattgaaatttggccaccccattgttcaccccactcacttacaggattacgtatgtgagtattctactgctcaccgcatctctcttttttttatcctatgataagttttcttccactttatgggttgccatcctatgcgccccttggtctctgaacccactagttttctccaatcttcaaaaatgcctcaatggtggaaagctatggacaatgaaattgaggcacttcttgccaataaaacttagattaatgtatctcttcccttggccaccacttcattggttgcaaatgagtttataaaataaaatacaaagcgaatgacgaggttaagcgattcaaagattgcttagtagccaaaggctacaatcaacaactaggcatcaattacctagaaacctttgccccagttgtaaagttcaatacattgaaagtccttcttgcccttgttgtcaattataattagcgattatatcaaatggacatcaacaatgccttcttacatgctgacttagatgaaaaagtttacatgtctcttcctcaagggtttaaatacaaaggggaacctcctcctaatgtcgtttgtaaactaaataaaagtatctatggcgttaaacaagcatcgagacaatggcatgcgaagctaagctcaactttaattaatgataatgtatcacagtcaccttccgatcactctttcttcattcagtctactaatgatgctttccttgtagttttgatttacgtagatgacatcgccatagctagcaacaataccaccaatgccgatacattcaagaggtaacttgactccaaatttaaactcaaggacctcggtccactatgctttttccttggctttgaaattggccactctactaaagacatatttgtttccgaaagaccctttaccttataactcctaactgatacaggctacttaggtgccaaggccgcttcactccaacagaacccaacactcgtctcaacaaggacaccaacttcctcttggctgaccccatctcctataaaagcttaattggtaagctcatttatctcactatcactcgacctaacatctcctttattgtcagcaggcttaatcaattcctttcagcacccagtcaacctcatctacaagctgtccaatgtatcctccaatacctaaaaggcacacctggccaaggtctcttcttctacaatagctcttcacctcaactcaacgcctatgctaaaactagccttgttgggaatgatatccaacttaaggtcttttctgatgtcgattggggcacctgtcccgacactcaaagatctatcatgggttattaccttttcttgggagaaactctcatctcgtggaaattaaagaaacaaaacacagtctcttgctcctctgctaaagtagagtatcatgccatggccaacactacctgggagctcatatggcttctagctatcctcaaagactttggtatcaaccacacgacacccgtccttatgtattgcaataacaaggctgccatccacatctctgagaatcctgtcttccatgaacgcacaaaatatgttgacattgattgtcacattttttgagaacgagttcaaagtggtcagctcaaacttctccacatcaacacaaagcacaaccttgtcgatctactcactgaccctctttttttctcccaattcgaagagttactatctaatatacatgttacaaatatgtacattcgattttgaaagggcgtattaaaatcatttagtctgactggttatagatttaatattatacttgtaacgccctaatgctaaggcacgctac

SEQ ID NO: 245308 - DNA, 921 bp, Cannabis indica
tgtatttgtataaaagtttaaaaacgggattccgaaacttgtaaatggttttgtaaagttataaaatttaatatttaatataaaggtttgacacgatttttgagtaagttctttgattagcaaagatagcactgtaattgaaaaattactgtagcgtgtcttagcattagggcgttacagtattgaacttacgagatgactactttgttgtgtaaaacgtgaggcggttgagtgttgttatcttcaccctgctcgtgtgggagagtcaatgattcacgaaatctttggatatcttcgtctcgtatattttctcttattatctcgaggtggacatatgtctcgtcaattttagttcaatagttattattcttgtctcccataagactaagtagtcagcgagtttgaataattctatcaagcttatattgaattggaacaggttattttaattacatttaatgatatgatgtcattattatattcctcgagttgattcatattctttctgtaggacacgtgttagcttctggcacataaacaatttcgggtataacaaggtggctcaggtgtatagggttcatactaaatcaaacaacaacgagatttaccataagaatatatgcttagtgcatctaatcaagtccaattttattcgaatttaaaacataaatagtaaagagcaaacttcaaagtcatgtgttagttaataatcaaagttttccacctaatcgaactagcgattcttcctcatactctctctcctcgtactcatatacgccgttcccaaaatttttacccatttcagaatcgatcttaatagctttggaatagggggctatggtgggttttaaatggatactttgttctctctgctttttctattatgagaatcaatttgaacataaatcagtagtaatattg

SEQ ID NO: 245309 - DNA, 2037 bp, Cannabis indica
gtcattacccactaacagggtcgaacctctataaaaatccatgtgttcttttattatctagttataaatgtgtaacacatggcaagaataaatttaatacgattccattgtcgtttggccaatttctgaggtcaataaatcttatcttttattaataaataatagaattaagattacattgaaattgagttcttgtttgcgcacaaaaacccagcaaagttatcattatgacactgacatctaagggatagttgagaagactaaagggtgactgttcacccctatagggatattttgccaaaatacccacgtgggactcaaacatgtggcactctccgagaaaatattaactccatatctggataagtgtttgcacgaggacttggggagaaaattttattccaatttttgcccacctggcatggcactgttacgtggcttaatccagatcacatttggcatgacgtgggacttccaagcaggtacatgctggatagaacccacatagggctggtattgatgaaatactcattacttctagagagcgcctgactggattattaacatgtcagccaggtgagaaaagaccaacacaccatacaagattgcctcataggtgatcttcttgaaaagacaagtctttagaagaacctagacaggttgaccacttgccgagcaaggtgaatgatcccaaaaaaagccagacagggtaaaagggccttgatttcttcctcaacaaactctaggaatatctctaacaacaacctacatatgcggattcgactcctcaacttgagattataggagcttcaaatggattgtaactcccctagaaaagagggatttttatgtatcttttatattttaaaaattttaatgtacttccctacttcctttaaatagtgaacgtattcacaaggaaagggacttaaaattgttatctcaaccctaagagcacttctacaaagaatattatttgtaagcatcttgagagttatagctagaattcacattgtcttccttagtgatatgcacgatattatcttaatatcaatacaactaaaaggggagtatgtcattaccaatatctaagggaccaaatctctataactcctagtgttctttctattacttaatttttctaattatttcttggtgacgaattcatttattagactccgagtcggttggaaaattctttagtcaaaaactactataaattttgtgtctctctaaattatatacttaccttcattatttatctcgccaatctagcgagctggtgttggctacttttcagcgtcaacataaagcataattcacattttttagtccaaaaataaaaaaaaaaatacacaaagcatttaaagtacttttttgtatggatttatttaaaaaaattttatagacattttttttcacttatattttttaagaaaacaacattattttcacgttgcgaaaatatagtataatggaaaaacaacagtaaaaacggcatacaaaaattaattcgtaaaaaagttttaaatattgtacatctgtattttacgataattgcaaacttttgaatgctatattgtgttaacttagtactatagtcttatatattttttttaattaatgtgctaatctttgttaattaaaggatttttaaagaaaagtgactttttatgagactcaaagttgaataagcacacttaatttttatgccctcgtactaactagctttgggctattggatctcgaaatctagttctaaaacatacataacatatacagtataaaaaatttcatccaataacataacacaaaaaggtgtcaaggatgtatcaaagatcgcaaccctctagacttatgcgacttgatatgtacaattttcacgaagctctgccctcaattcggtttagactttacctttacctacacatggaaacatatatgtgagttaataaactcaataagaaaagacataacataaaaatcatacatatatctaacttgtaattgagttcttatacatcaaattaccgtaag

SEQ ID NO: 245310 - DNA, 662 bp, Cannabis indica
gctaaaaatcaaaacaaaggagtttacaattagcaaagtgtttatggactaatacaaatgataatgagcatttgaaacaaagtgctcttcttgttgctaagttggttgggatagcagagccaaaccaagtccctaaagagatatttggactaagtttcttatctcaacctatcaattttagtccttactaaaatttaactaattgggttgtaatgatttttcttcttcttcttatgatcaattgtaatttaacaaattctaatagtgaaacaaaccatgagattgtgattgtaaatcaaagtcactataatgtgtatttatgtgtgtagatgattcaaagagaacataacatgtgtttttcatactacttctccaactacaattattactagtaatccttaggttcatttctatagtactattttttttgtgtcgtgttcgtgatgacccaaatcttaatttatctaactcgataagctcgtagtgtgacattttatggtgaattaaaatgttgagaaaattaagctttttatgttgtaataaggttttcttttaatgtttaatttagttttttaaagtttgaattttctccaaactctcggttgttcattaatttttattacattatttgaatatgttgactaatttatcttaaagatata

SEQ ID NO: 245311 - DNA, 646 bp, Cannabis indica
tgcttaagatgcaagtttgagcatccaacaagagtgttcaaagtgtgttcaaaagagtgagagtgtgttctaaagtgtccctaaagtctttcaaaagtgtgagttatacacaagtgtgtagtaaaggtgtctagtgataaaataaagagtgagtgcttggtgtgtattgtggtcaagttaaagtgttcaagtcttggtgtaattactttttcaataataaagtaattacgttttcacgtgttgtggtgtccaacaagcaagaatgcatttttttatttaatttacataatattgtttatttataatagaacataaactcatggaacacaacctgttcttagatccatattgtcgtgtttggttaaacacttacgatacacttataatgaactaatcctactctaagctcgaacaatgcatattcaaccagatatcacttaccaatcaaattctataaataggttcatgatctttagaaactaaagatagaaacatagttaagtttagtgagataaaaaaagagaattttagagggttgtaaagagtaacttgtccttctgatctagttttctcaatcagattcttatgtattaaaagaaagttccataaagtatgttcaagcaaagcaactatgttaatgattttg

SEQ ID NO: 245312 - DNA, 638 bp, Cannabis indica
atcaaatcaaatcatgtatactattgatgattcatatatattattggtagtcgtaataaaaataatgagtagaaactataatatgatcagttaaaccaaacattgaattgatcaactttcattatctaaatttgaaaaatattgatatatagatatagtacatgcatatgatgtatatatggtccattttctctttcccactttcatatatcaaattgattattattccatatataactactatatatataccccacacaccatagcatagcacaaaccatatatattgtttttccaaattggcgtgattgaaggggccatacatgaccaattcaagttcattcacacattgaatttgaatcactttcccaatcggccgtaaccatgatcctatcacatgataaaccaaagtcaagtctatatatatatcatcttaattaattattaagcaataaccctaattaaagaactcactactcgactacattataagttaaaagtcatataattttgacgtgtggaaaatattcctatcccatcccccactcccttacactaatttgtatattgatcgatatactgtatatggtccctacaaatgatacaaataagatttaaaaagaaaaactgaaataaga

SEQ ID NO: 245313 - DNA, 1308 bp, Cannabis indica
gaacaattgacatattagtcgtcattattcttcattgagctcactgggagggttcttgattgtatttttaaagtcttctagtttttggtaatattctttgaaatgtgccagactaatgttctttctcattttgtatttatcggtcatctcaactatcaaaatagctattaattttagattgttgtctttatagtaataatactgcatatgacaaataaaatattataataacatggtaataatgatatttattaattaagatataaatttcaaaaaaagtatctaaagtttagttaagatgagttgttcttggcacatgtaatctaatctctctccttattaaacgagagaaaactttactctccaaccttactactttttttgagacattgttaattaccaatagtaatgggacaccagcgctcttctatcttccaactctaaacacttcattttcgggttagctggaaatgagaaataaaaaattgtgaattatttttctaacttcataaatcattgtcattgtgaaaaactagacaaaaacttgaaacggtataagattcagataagcagaacccagcacaccaggccttttgtcaacctgggcactgggtacttactcttgagctttcgagatttcatttttgatactttcaaggcttttgaactagaggatgaggtcgccaactacttttttgaccattccagattaaatggtcacatcatatttggcatttgagcaattgaaggcagcgtcccatgttaattgtcaacctgggtgttaggcccagtcctaggttgacctcagcgctggaccctgcttctagggacatgggattatggtcttctccccaattttgcttgaatcttcgttatttctaatgaaaaaaaaaatgtctagaacactttttgcaaacttgataaaaaatagcccaggttgagaatatgtcaacctgggcattgtgcccagccccaggtctcaacttgggcgctgggtcccccctttttagtccttccaaaaattctatttggtcccttgaaatagttaaatctcaatattttcttaaaatagagaagatgctcaaaggagttcttgtaaaaaatctatttgaaatgacctaggttgacaaaatgtcaacctggacgcagggtcagcccaaggtatcaacactactacaaaattggtttttctctacgttttcaaacagtcgtttaaagtattcccgtcaatttctataactgtcgcatatacgaccatcgtaaaacgggcaaaataggcgacggtttaaagtacgtcgctaatgtgga

SEQ ID NO: 245314 - DNA, 1160 bp, Cannabis indica
ttttaatccatctcagtgattcctgaagaattgcatattcagtatacattaatcattcgatgtatttcttaaggaatacgatatatagatgaagcttcttggtgaaaaagtgataaagatctagatgatcataaaataatagttattcatattaaatgttgattgaaaattgttctcacctattcaaagataaatgaaacatgagaaatgtctacttactacaaaaagaaaggttttgccggtgagtcttctcaccggtaaaagtaggtgtgtaagttgcttgaattattttaccgacgagctttgtgccaacaaagggtgtcagtattgattcgttgacataaagtgttttgccgcggcggtggaacttgccgtgagaagtgcccttttagcccttgccctcagtctaaacaaagggtcaatgcctcttaggtggcctaaccactcactaagtatttgtattgattattttccctactggttagctgacttgtgtcatgctgatctgcaccatttttttttcagtttggtttgttgtgaataaagctccactttctcaaaaaaaataataatcagtaaatacaataaatattaatgatcaaatatcaaagatatttttcttgtaaaaaagaaaaagatattttcgttaaaagattatatcgaactatgaagatattattttctctttgttcatgaaatcatatcatagtgaggtgtggtgttatggctagtttttgtttttttgtaataggtttgaaaaggacatattttcaataaaaatttaaagcgcaaaaaaaaaaatactctatttggaaatatttaaactatacaatatcatcttttacattctagaataaaaacaccgatccgaaatctgtatggtaaattatgtccactcgattatgcatagtctagtgatagtggcagagaccaaatcaaagaatgggtgtgttttatctttgaaatttcataagtgcttattttttttcttaaaaaaaaaaaactacttaataaataaatagcatatagcccaaatatattataccctaaatattaagattattattgttattataataattaagtatatagtaattgatacttggtttataatcaaagttttatgtatggcactggttcccatccccaccacaaaacag

SEQ ID NO: 245315 - DNA, 806 bp, Cannabis indica
actttgtagaagcttatttatcataaaaaaaatatatttatagctatattataatcactcttactaaatttatttaattttgtgaggacttttctactattttggcttataattattaaattaaaaaatatacatttaatttcttaaaagataatatttttattagtgggcactatatcttaatgggtccatcccctaagagtactctcccaacaacttctctatacccggccattcttcaaaatatatcaccaaattttttactttttttatttgtttaaacttttacattgcacaataaaatacatcacaatacatcaccatatttcactttctttcattttgttcatttcaaatatacatatattcatatgtaagagaaaaattaaaataattaataaaatataggagaatttttattttttatggtttttaaggaacaaatttataaaaatgtacttttttcaataaagttattttatgggaaaaaaattatatataaaaaaaggttaaaaaatgaagggtaaacagcataaggtaacaattacacccttaactattttttctatatttatacttttttttttgtaattttttcccttaaaataacttattaaaaaaaaaatgcatatttttgcagacattgtataaaaaatccaaaaaaaaaaatatgtaatttcctctaaaatatatttaaggtattctataaattaaataaaattctaaagaacaactttaaaatgaagaaacaattccaaatacatatgatgtaacgtgttctttgtttggtttttttttaaaaaaaa

SEQ ID NO: 245316 - DNA, 1101 bp, Cannabis indica
gtcgtcatttttgtcttttttgctggatagttggggtcgatgtttaaatgatgacaaattacattagggtttatccctatcaatctgagtggctccaggcaaatttatcctggtttgccttaaaaaactcaattaattgctcttttagttcttcctctaaattttcccaaacgtaaacacatttagtgggattatttagatctataatattttcttctagctcctcaataggtttgagctagttactctcgtcttggattctaggatctagatcttcttcttccctttcgccttcttcagttaagattactatcaattgatgattggctctcctgttcggaagttctattcgataacactcccgagccaataattggttgcctctgactactcctactcctgctttggttggaaactttagggacaagtgtttgattgaacttactgcccccaatccaattagtgttgggcgacccatcaatacattgtacactgatagaagatcgacaactaagaactcttgcattagtgttgttgataagtgtggctcttctacagtcaatagaagttcgatgatgccaaggctggcaacactgtcgcctgtaaatctacataggctcaccatgcacggattcaactttgcattctgtaatcccatttttttttcaatgtatccttgtaaaggatgtttactgaacttccgttgtctaccaatactcttttcacccttttattggcgagctggactgtcataacgaggggatcaacatgtgggtactatacttgttttgtatcttcctctgagaagataatcagaagttcatttgactttgtcttttttagtgattctggagcaaatgtcaattgtccattttttatttcattgatatacctcttttgggcattattactatttctagcggggtacgaccctcccgaaatgacgaggaatcctcaccctcaataggaggagattgtattctctagttatttgggttattagggttgtttggctggttaggcttgtttccttaatatcttacatactgtctaaaatattcttgcgagatcagactttctatctcgtcttttagttgtcga

SEQ ID NO: 245317 - DNA, 609 bp, Cannabis indica
tattgagagtactaggatagaacatagaagaagaaagagagctagagtagcaaaagactttagttcaaactattgtgcttacaccttagagaagatctaacctccaagaagctttgtcttccctaaatgctgacttgtgataagaggtcattaatgatgaaatggaatctcttatgactaacaaaacttgacatgtaacatacttactacctggctacaatactataggttgtaaggggatcaaaaaaaaaaaattaaactaaatggatgagttagcttattcccttaagttttcttgttcattgaccatgctaaaatttggttgttggacttgcctagtggtctttagttgtttggactaatctttgtttagttatattggctttttgaatgaaaatcctttcaaataaaaaaaaaaaaaaagaactctaaaaaacttatttaacaaaactcaattttagaaagagtttcctaaaaagctaaaaatagaactagaagcttaaccataccaagctttaagtaactctaactcatctctaattttgatatttaaaatgcaaaatgatttacattataagtagagttttttacttaatattcacaattcac

SEQ ID NO: 245318 - DNA, 1429 bp, Cannabis indica
gatttgttagaggaggatgaaggcgatgctcagagttttggctgatcattgaaaagtaattgtagcaagtcgtcatcaattcagtttttacctcctcaaaagttgtatggattcatctacaaatgaaggaaggggaggtaaataccagacagagtgaaaagaaggttttttagaaacaacctatatataccgactaaaggaacatacagatcaaaaagaaaggattttgtccgaatgacgaagagcccaattcaaagatgatcaagaacgagtttgaaccctaaaaaaaactaaacttacgtgttatgcaagtgctggtttaaccaagtttttcaaggaaaatgtacgttggctaatgatttagtagattaactctgtgcaaacaagtttatcaacgtatatcagaataaattcaatcatatacccaaacaacgaagaacattcatggcataaacttagatttttgcagaaaaaagaaagcacataacatcaaatgtaagaaaatgaacgaaaatgtatttgaattcaagatacttactcgctagagaaatggttgtttgaagttctttggttaggatgcttgaagatcaccaggcgcgttcttgcgattcaaggatgaaaataatagctctctagttcttgaaaaagttaaaagtaccaaatgaggttttcattttcattttataaaacatttgatgggtacgggggtaatttgggcacccaaaccaaattttcatttccccccaaaaaattgataatgagtaccttatggaagtacaaccgtcagtacaactacctagggcacgaaatcccatatgagagcattaagtacctcacatgattgaaggtataacaaacgacaacctattattacttactccaccacgtgtcacattatttatgtaggtcgtgagccgagcaagtcctcacaccaaccagaaggttcctatgtagacttgggggtaaatgtaattctgaattttggtcgaatgacgtggtagatccctttaggtgacacgtatcttcacctcgaggccaaggcggatgaaagagtctcatggatcgactgcccaagatgtattcaagatcagtagaaacaatagagaaatcaagtgtaacttgtcgcacaacattatatacctgatcggaaagaagcggtccaaattgtgcacgatccaaccaatgggaaacgcgtgacataaatgtatttaataaagttcctattttatatgtaatcaagacctagttaaaggaaaattccattcatatttccagtattttaggaaaatcagtttattccctaaattggtgggttgacaattgaggaaacccaattctattttaaacatctcctataaatagtggaccaattctactgtaaaggagatcgatttttgagaaagcatatacactactcatttttcttgta

SEQ ID NO: 245319 - DNA, 1438 bp, Cannabis indica
cacatatcatccacaccccaatgtcccctttgccaaatacatttggagacagttaatcacgctttattctggtgcaatcgggctagacaggtctggagaaattgggaatctgacattaattggcatttatcaaaaacttgtcctttctcagactttttagtctatgtttcttcactcttgcaatcggataaggttgaacttttcatcactgttctctggtgtatttggacagcaaggaatgctgagactcattcgaagactcctaaaactgctttgcaaatttggcaatttgctaataactatattgctgattttagaactgctcaatcttctcagattctcactgccctcaacttcaaaggttcacctgtagctgctcaacataacactactcctactgttaagccaaaatggctggcacctccttcaggcaggcttaagttaaacactgatgcagctgtgaatgtcaacactggtatttttggactagctgctattcttcgtgactcaaatggtgatatccttgctgctatggttaaaccaatgaaagggtgtgttaaaacagaggaaatggaggctttagcaatcgcatggagtctcaaattgctactgacactcagactcagtgttgattttgttgagacagattctctaatggttgtaaatggtttaaaatctcaatctaagggtctctctgctttttatgttttacttaatgatattacatttctgttatccaatttcccacgagcacagatctctcatgtttatagatctgctaataacgaagcccacttgttggccaagtttgctcttacggtggattcagattgtacttggttagaggaagttccaccacctctaatgactgttatgtaatttgttttttctcaaattaatataatagtctcttctcaaaaaaaaaataataagaaaataacaacatagaaatattgaataaaatctgaaatttaatccaaaaaaaaaaaaagaagaaaaaaaaaaagagaggtgcgaagaagaagaagattgtggaacaagttggaaatggctcttctctcgtccattaccaccatctccacctctcctcttctggtttgttatcttcttcttcttcttcttcttcttcttcttcttttctcaatttctctaactcacttaattttgattatatgcttaacaacaacaacaacaacagtcgaagcaaaggccaaggacactaattcaatacccattttcatctacatcccacttgacaactccaatcgctagttttcggagaaccaatcggttgacagcgttttgtttcaatcccactgatgaacccattctcaaagatgcattaaaggtgctttctttcttatgctaatttattggggtttttcttgtatttattgcttttatgtttggttgaaattctaggtctcagcatgattga

SEQ ID NO: 245320 - DNA, 535 bp, Cannabis indica
tcaacttacttttggttccctcaagctgttatttaaggcgaggcctcctacttccatacttaattaattttgtcaggaaattaaatggtcagaaattaaagaacaaaagattataaaatttctacatttttagaggtacatagttgcatatcctacccaccaagtgagttgggaattggaatgtctccaaattccttgtcactttttgaaatgcaactcaaaattttaaagaaaacacttttttggaatagttcatttgctttcatttaatttgtggttagccgagaggcatacatgaaaagggaaaagtaaaaaatgaatttaaaggaaaagatggttggatttggacacccccaatttatagatagcatcaacacaggtggtctgcattccaagctcgtggaatctctaatatgtccagtgttttcaattgatatgtcccattacgcactttgtgctggattttgtaaggtccttccagttgggtcctagaacccccactttcggctcctgagaggctgggaacactcttctc

SEQ ID NO: 245321 - DNA, 1911 bp, Cannabis indica
tcataaaagggtgtaggagagtacgtgtacatagaaagctctacatttcgagtatcaaattatacaatataatataatgtatatataagcgtttcaataataaaaaaaaatattctgaagaactagctagctagggagtatatactatatacatttattatatatatactaatataatttaatatatttctctcctcatgtagctaccatgcatgttccaagaattttctcccccaatggccacattctttatttgagtgtatatttaaaagactatctaattgattaaattaaagacaaaagagagaaattacaatttgcacctgatatatcagaataacattgatatatataaaacgaagggttcgaataattattattttgccctctatttttttttttttttagaaataaaagaaaaaaaaaaatattccatgacaaccattaaataatacacacggtctaaatagcaatcaactaaattacatattgtttatcatattaatgacatctttttcagctttattaagtctagcaacattaataagctgggctctaattttcaagcttatcttaattaattaccaattgatcattgagacagaaatatacaagaggcctcaaaaaggcacctactttgattgtaccaaacaaaataaattacaaatgctgccaaagcagccgagataaccttcacggtaatgcctttcaaggagctgataatcattaacccaatcagccaaatggtccagccatgttgtcaaactataccacttcacaacaacttgtaagatttttctaaagaaaatgcagtcgaaaaatagatgctcatgagtttttaaaactgcttcacagacagggcagagagaagagtctatagtgatgaatttgccaataaaataacgagttaacaagtgcctatttgttatggattaattatccaacacacaagtactatacgtatcatttataagtaatagacttacaagagtgaggtcgacgccacaaagattgtagttaattaccaaacaattaaattactaattctatttggtaacaataaaaataagaaaagatgtttactttctactaaaaaacaaagaaaataaataattaagataaaattaacaatgaataaaatttagagtgattaatttcgattacatatactttatatatatagtttagtataatttaattctcaaattctaattttcatgtgatagtggatttaactaaaaaaaattatagttcgggctaggacatataaatgttaacctatatgtaaattttctactgtcgttataaatttaaatacataggaggcattaaacatataaatcttaaatgctacataaactatataggtactctatggctacgattctttggggtatttggggggctcaaaatgacatgctttggaacaagaagaatgtatatgtggaaagagtggtttctgctgcaattacttaccttgatctctgtaaggttgctcaggttaatagagttgatgtcccgatatcttttggtcaaaatttgaccggtattgagcactgggtctaaaccgtctattggggagttaaaggttaattgcgatgtcgctctttttgcaagagagaagagccacgatatggggtggattgctcgaaatcatgatgatggtagttttattgcagttgctgctgtaaaaaagagtgggcagctcgatccccttgttactgaagcaatgtcgttgaaggaggctctaagttgggtgaaaagtaattagggaggggtggttactgctatgggtgatattcctgctgctgtggttatggagactaattgtctcatgttggttcaagtcatcattcaaagcaacaagcagatttcgtcacctcttagccttattatctcggagtgtattta

SEQ ID NO: 245322 - DNA, 1896 bp, Cannabis indica
agcaaagtgtttctcgacattggtattgtaatatacgctttgagcaagagtagttttaccaatgccacccatcccaactatagaaacaactgagatgtttgagcttgtagcatcatctttacacaacaataacttaagaatagcctctttatcagcctctcttccataaacttgtgaatcatctagcaaaggagcgtgtggtctatgtaatgttgttttatggtccacttttttcaaaccaagatattctgtctgccccaaaagatcccttagagtatcaaggatctcttctaattcagatttcacagcacttatttcaaatagatcattaaagacaaagctgaacgacttacttcctgaagtactttcgagtctcaaagcttcagtactgatcttgtccatcacatgatccgcttcatacaagacttccttaagctcgtcaagccaattcctcacgttgttgtctccaagttgtttctcctcggcatcatttagcagcgcattagcagaaagcagcatagtcttcaactttttgagcagcttttgattgagtttttccccttgaaagaagcgaaggacgtctttggaagcaatcctatcaaagagtacattgatgaaaccagagagaagagctcctcccaccattaagtcagccattgttttcaatttaggatcttgagagagaatcagtactgtatagcaaagaagattaaaagtagaagaaaaaggagtgtgatcgcttggaaaggaaagtgattcaataattcatttgaacataactaaagttggtagataatgtgagcacaaaatggagtaaatggaagtgtgtgatgacatgtgctttgtttttgtttggtgggaaaagtgatctaataattcaatggacattattaacacgttcagatgatgtgactaaaccacatctacctttattactttggattcattatggggtacaacacgttcataactctacatgactttttcttttgaatatgaattttgtgtttgcggtgcaggtgcggttttaacttttttaaaccaaactacatatgcaatttttctaatttctcaaaccgtaaccgcacagcgagatcttaatactgcaaaaactacattgtaaaaatatggtgtggtgtggtgcggtgcggtgcaatttgagcagtttatactattatcattatcaaacataataataaaaatttaaataatcaatctataaaatgttaacaatataaaaaaattattaaaattttaataacatatacaataatcattaaattattatattaaattgtcttaaaaaaaaaataatgtaaatgtatacatatattcttatatgaaaaaaataataaaaatcatattgtaaaaattgacagtagtatataatacgatacggtttgaaccacaattattaagttcaaaattgcaaactgcattacaccgcgtggtttgaaaaaattacaaatcgtaactgcactgtaaaggatttttaaaccgaattttttatgcagtatagtgcagtgcgggcggtttatgcaatttgataaacacccttattctgttctcttcataattcaaagacaaatgctaaaagacattgatttttcttcaacattatactgttataagtataactaaataatcatatctcacgtagcttaagaaaatgatttttaagtaatatcaccgatcaatagagtatcacttataaaaaaaaatactaaatactactgttaccaataacaactcttattcatatgatatcacttttctttgtcttgaataattaatgaccacaaaaccataatagtaccaagaagttgcgaggaaatttttcagttgcgtctttcgtctacggtggcactcatatcaaattaatatgaaaaatgttaa

SEQ ID NO: 245323 - DNA, 2048 bp, Cannabis indica
  modified_base (64)..(64): a, c, t, g, unknown or other
ccccccctcccctcctctctctctctctctctcttctctctctcttctttagttttttttttcnctcttcaaagcataaaaaaaaaccaccatagccaccaccattggcgcactccggtgaccattttttggcacaacctaatcccacatgttgtaccattcgaacatccgaccattggtgatctcaacccccgagtggcgccatctcattcgctaccattattgagagatctcgacttaaagttttgccacccgactttcaacgcttttttggggctttccccgatgtccatttgacgagctatcttaaccactagactcatctagtcgaggagaacaaccttcttaaagctattttcccaactcactatttttttggtgacattattttagctctacccctttctgaacactttctaacgatactatgtactgttttgacaaatggttggcatgggcgtgatctactcgtcgagattattgttttgatatatagtacctctattattggtgattttctagtacactgatttctaccgtcaacgattattgttgtgcacgctgaaatgaggtttcagaactccaaactttatatatagttatgctctatgttattggactcggttttgaatgtagaatgcaatggtgataatcttttactcatttcatggtcataagagaaagtgatgtctaggattagactaaccaattgaagctcaggacttgagagcttatgatcgtctttttggataaagtttaacgactttggagaggtggggactcaacttaattattgcacttaattttattgtgatgaatatcatgacatattctaatttatttatttataaattttttgaaatataactaagaacttaattcgcatgtttttttggactattctggaggcactcagtgccaaatatatgtttttacatatatctatgaaggttatgatttttgggttttatcaaataatcattatgctgtcgaattttctaaaataaagagtatgtacttttgttactcttgttacctatatttatttttactgatgagagtcatatttatcatggcttatgtatattgttgtatcacgacttagtctctgtgtcatcataggtagatcaagtgtgcacccacctataggtgtaagaagtagaatatttacaggaagtgaattgaatttgagccttagtatttcaatggttatcaggcgtgacgacctggattatgatgtcattttgtatgactcgtatttagagctaggggtctagtagatgatgtgatatgcatttaaagtttgattatgtgattattatggtcttaccttctttttgtttatacgtgacaataactattagatactttttatttccaaaatctatccaagcaagggttttattaaattaaggatcttttgatattagttatttttctactgtactttataagctcaccccttatttttttccatttcaaaaactcaatttaatgctagtggatgagaattgtaccgttgagaaagaaatcgttattagttgagtcttattctaattattaaattttcattgaaaacttattttgtaattaaacttgaatattagatggcatggatgacttaattagctatgtactggttaggattgaggagtgatggatgctagaaattattttgttgtttattgacttattaaatttatttatttggtgactacataactgtggcgatatcattgttcttttaatatgataagtggtcttgattttagttactaatattttctaatataattataagagttgttcctttaattttaaatatgtaattttgttatataaatcaaaggatcatttataagtgctcttttccaacaaagctcaaaatgtaatctttgactactcaagttatgaatattacattatttgtcatggtctaaggtttgggtaaaattattttctcttatttattttacggtttatttttggataaccactagtctcaatccagtccctttcttttaacgaccttctaaggttaggttgac

SEQ ID NO: 245324 - DNA, 1642 bp, Cannabis indica
aatccaatcttgttcaatccaatcttgagttccaaacaggcccccccttatatgataaaaaggagaaaaatttgcggccgaatctccctatgtttcaattgttatacacttaatcttgcaaatccaatacttctatcaaatttggatgtcaaatgccagcatgaatttgttaaataattatttacagttatttcaatcttattttattttactcttttatattacttgcttatataaaactttcttattagttgtattcttttacttttgactttgtaattaaatgaaaccctaatttctttgcatctttttttattttttattggttatttttctctttccaaataattatcatggtatcagagctagatttatgagaatgaatttcataagcgtaatcacaaatttcgcgtaatcataactttcgcagatccaactttcccaggcatccatacaatcattgtccgtacaacatcaacacagttcgacattctaattttcgatattaatttcttcgagttttttcttgattcgcatagcatttttgggtattgattttcgcaatataattttgaatttgcatcaattttgtatttgaaaacatttgcaatttgctctattttctaaattggctaccaataaggatgattcccttcgagtgatgaatgttatcgaatggaaattattcgtattggaattatgttatgaaaaattttcagaaagaaaaaaaagatgtggagttgtattttggaacaaaaaggaaaccagcagatggttatgtaaatctattagaaaatcagggagtaaccaattcaaatattctcacttggacaaataacgctgtcaaacaatctattggtacccaattagcatagtacgagacaacaaaaaaagtttgggaccatcttccgagattgtatacacatcttattttgctaagcagtttcagttgaaaactgattttagagctattgaacataaaaatataaacattcaagagttctattttgtaatgaaagatctttgggatcaattggcactcaccgaattagtagagctatgtgcttttgcacattatattgctggtagagaggaacaaagattaattgagtttttaatggctcttcgtagtgattttgagattgcatcattctttgcttcctttggttgaatcagtaattactgaattgttagcaaatgaaattcgtctcaagtctcattcagggaaaggtattctcccaaccccaattttttcattttgacagtctcttctactacactgttttctccacaaaagaacaaaactcgcacaaaggaaccttttatattttattaggtggcaggagagaaaaaagagagcattaatgaaaaaaaaattcaatagggcactggtgccctttatattttaaattgtaaaaacaaaagaaaaattgtaattggctttaaaaataatagtattgagtgggactaataaaataaacataaggtcagaatgtgatcgaagcatacacgaaaatacgaaatcatggacaccctgagaaaaataggttagagcatctccaaggagcacactaaatttggtattacactatcaccaaatttagtgtcaaaaagtattaccactccaaccacaacaccaaaa

SEQ ID NO: 245325 - DNA, 2361 bp, Cannabis indica
agtgtgccttattggtctattagtgacaatagattcaagtatgtcaaggacatcaggactagaaacataagaggaaggtgctggttgagattgaggagaactttctgtgaaattctgggaagcatcagcttgaaaagaatcagagaattcagaagacataggaccattgatcacaaaaggaaagatatgttcatgacaaataacatccgtagaacaacacttttttggtattaagatcaagcaatttgtaagccttcatatcgatagggtatcccagaaaaacacaagtagcagcccttgggaaaaattttgaccttccagcacctaaagtagaggcataggctaaacaaccaaaagcccttaaatattcttaactatgaactttggaatgcaaaatttcaaacggtgatttgtgtttaagatttggtgtgggaattctatttatgaggtaggttgtagtgcttatgcattccccccaatatggtaaaggaatatgagattgaaatagaatggctctagcaacatttaataagtgttgatgcttcctttccacaacagaatttgggcaaacaatgcctgaggatgagaatagagcgggaaattattactctttggcattatcagacctaaatcttttgatttgggcattgtattgagtttttactaaatgtatgaaggttggtatagctaattgagcatcaaatttgcttttaatgagatgaacccatgtgtacctagaacaattatcaacaatagtgataaaatatctaaagccttcaacagtttgagtattttatgccccctaaatgtcaacatgtatttaggtcaaaacagattttgaaaatgttatgattgctaacaataggtaactttctttgttttgcaaaatggtatatggaacaatgaaagccagaacaatatgaatattgaaattgtaagcttttatttaaggaatggttctttacacaagaggcatgaccaagtctataaagctacaaattctcatcacttatattggaattatacatagaacaaacaataagagattcttgctcacacatatagtaaagattgtcaatcctttcatccatcccaatcacttgattcttggtgatatcctgaacaatgtatttgtgaggaagagaaagaaaagagtagttacctgaattagacaaggcacacacagaaattaaattatgttggaagtcaggtacacacagaacattagtaagtatgatattacgaaacttaacatttccaacaaaagaaaatttagtgttagtttcatttggcaaacttactgatgtaattttgtggttattctatatggaataaaataaggaaagattggagcaccatgatatgtggcactagtgtcgatgatcctactagatttgagaataagagatgccttactagatacatttgatacaataggctgatcagattgctgagtttgggaagatgttccttgtattttctgtgctagcattgccatcaacctttgacactgtgcagccaggtcatgttcttcattagtgccttccttcatttcactccctgttgtgaaattgtcaagaggatcagccttgctgattgataggttgattaagagtttcccttggaaatctgccatttaaatgatgaccaaggaatattcatgaattctacagcatttcgcaatggtgtagctaggaataccacaatgagaacaagtaggtcgattgtcagatcgatcacaacgattgtgaacgtgactatcagatctgttgttgccacgattgtcatgtgtacttccagcaaattgattggaattgtcatttgaaggttggttgttttcagcttaaggaatgatgattcctctctgttttttctccaggattatggaagcaaaagccttattgacattaggaaaaagatcttgaagtaggatctgagatctagtcttgagataagattcattgagtccaatcaagaaccttgtcttcatattggtactcttgaatgattttcattgcttcacaggtacaaacaggttgtggcctgtatttttgcagcaaatcccacaatcctttaagtcgagtgtagtatgatgtcacatcattagatccctgagtcaacttctgcattgatcttttcactttaaaaattctaggagcattctttcggtggaatctttcttgcaatttaaatcagattcgtgaggcatttttcatgtacgtgatactatcagcaattgtaagggaaaattcatgatattaccaaactgttgcatatgatccatgagtcatagtcctcatcatcttcatctaggttctggaaaatctttctattaataaacttgatcttgtttttcgccaa

SEQ ID NO: 245326 - DNA, 1171 bp, Cannabis indica
caaacttaaaattttgagtaattgtgtcgctatttagcctattaatttatattaaacagtcagtactgtaacactactcccctcgaagtctgcacctaacacccagctataccctccctcacctgatgtcacctctcttcaaaccttcttctattgggccccgccctacgactctctccaattatatttaatactctctattattaaattaattaatattattaggttatttttagcatttttttcttaattaataattttctttagctttatgtcgtggtccatatcttacgatattagatcgacggtcatgatcaataatagttggaattttgtttagcaacttggagagttttttataaacatgtttactgtggttaattaattataaataaaaaataaacaaattacatggaccctctacacagtcgaaagattataaacaaaaagagttgcttcctatcttttaattgttaattagtaacatttttactaattttatttggaaaaaatgttattggagccatgggagttggcgttattgacaaatctgcatggtacatatagatgggtatatatatgtctagtatagatttattacaacctcgtatttaacgttattgacaaatacaataatgcaaaattacaaataagatattgtataataaaaataaatagaaaaaaaactttgaccattcattttattttatacaaaaatcgtaattaattaaaggcgtccttaattaaatatcattagtttacagtacgtatgagtataactgtataaatcaatcaccatttgtaaagactgcgatcccagtacgtctttagtttcaaatttcatcattctattttttcaaataaaaaaatgttacatattacataaaataatagagaattatttaaggagattttttatttttatactttaaaataattatttttttttatatttttttatagaattttacataaaaaaaatttattgcaactagcgctgcaacttaaattacaacaaaaaaatcgtataaaaactcatattacacctagcactgcaaccaatttgaaaacacaaacactaaatttaaaaaagaaattaaaaaattaaattatataaaataatttcctattatttaattaggttgtatattaatttgtcacgatattatat

SEQ ID NO: 245327 - DNA, 951 bp, Cannabis indica
gtgatagctcaggcaataaatcaattcctgctaaatgctgggcccatttgtatgggcgagaagttctcttttcatcaaatacaagagaatcaccaacaagaagtttggctgattggtggggaagctcaaggccagtgtcatcagggaataagttgctcaagatggtattctcaggcccttcatgggatccttctatgccaacacatacaacattcagcttaaccaaatactcaaacttaatggtgataagttttgcagacttggaatcagaaacctcatcatcatcatatacatgaagcaccacttttagagggtgaactagatgtcctgcctgttcaaggttgtccttcggtgaaatcctccttgttcgttttctccttctctgtccatcttcttcctcatcagctgcatcatcctccattctagaatactccagattagaagaaattccagtgtccacattagcttgttggtgagctaaagtttgtgcatccttcacgctaccaagtatctccatatcaacttgttcaccgaatgcttctttctgggccagcaactgtgagtaaagcacatagagaggaggtggaagcaactctgctgagtgctgctgcttcagtttctttgtatgtagcacccctaatatgttttgtacaggcaatgatgctttcttaagtgatttgaggtgtgatggaagactagacaagaactttttgcgattcacaatggtctctgaaagacttttcttctgctgttcaagtttttcacggagtttgcataactctttgcgctgaaaaagttcaaaatcaagcctcttcaacatgagattgtgcgcaggatcatttgacaatatggacttttgtatatcttcgggtgcatcacgaaaaaactcttcctcaggaacgagctcaatatcagggtattttgatttgaagtctttgcaagcttttatgg

SEQ ID NO: 245328 - DNA, 1280 bp, Cannabis indica
aagatagaaagaaaaaaagttgttcagtcatcctctttactctatatctatctatcaatctgttatatatttcatgtaacttctgcatggcaatgccattgggttaccgctcttccaatccgaacagagtgaacatttggtgaacaacatccttgtgagaggtcaccaaaacctcattttctcccgtacagggggagaagaatcgtctcacacgtgaaagtgaaagcacaacgtaacatcatacacataattgactacattttctaccccaagtcttccccaaaagtgagcttcattactacaatcattagcaatagtttcttcacccattgcacagaatatgtagacaccttaaaattgacttttaagcatcttacgaataatgacatgtaagcatttcatccaattatgaagtacacaacaaaataaatgtccttgagctgtgtaaaaaatttactcacattagaatctactgtgaaaaaatactgaaacgcgactgccaagaccaagaacacagttccaacaacaacacccaatgactctggcctgataagcacaagtgacactgttaagcaagatgaaagaatcacacacaagataataaatatcgggttcatagcaatataacggtaaagatcaatagccaccaacaaaacattctgttaattggccatgaaaaacagtaaagcaaataaaatgtcatacatagatgaacttaatattgatcacttttgggatttgattgagttgatgacatgacacattatccaaatgattaactgtttcacatttgaactacaaacaaactagttgcaactaatttaggataataaccttataactgtcttaatgctttatagtctattaaatcaaataaataaaacacaaaatcattttcatatgtaagaaatatcgtaggagtgagcagttaaatctatactattctgaaaatctatcataaaattaagcctctttggtatatgaaaataaagaaagaaaggaaaataaacaaacaacaacagtaagtttcaaattgacatgaaactttgaattcacctagatttttcttaaaagaaagtgaattgaaattatggtaaaatgccaataaagatgaaatttttagcacattcccagaatataattagattgaaaacaaaaaaaaaaaaaaaacaatgattagaaatattaggtagaaaataagatcagggaacttaaacttacacctaagttaattcaaaacccaaatctagcctacattactcactaaaaatccaaaattt

SEQ ID NO: 245329 - DNA, 877 bp, Cannabis indica
tcaatgccatacttgaggtgcattgctcgaacagaaattagctcagtgatccatgagattcatggtggcttttgtagaaaccatacttacgagcctagtctctccaagaaaattcttcacaaggggtgttttttacccacaatgaagaagaattgcatagagtatgtaaggaagtgtgagcaatgtcactggtatgctaaggttctgcttgcacgacccactaagatcacacttatgagtagtccatggtcttttgtagttttatgatagacaaaataggatccttccccacaagcaaaggaggagtcaaatacgcgatagtcccagttgactattttaccaagcggattgaggtagaaccaatgaacaccgtcacgtccaagaaggccttggactttatcattaagaatattgtgtattgatatggacttccatacaagattatctcagataacgggaaacattttgatagcgagcacttcactgacttttgtgcccatcatggaattgtgaaaggctttttagctgtagcccggccacaagccaatgggtaggtggaatccgtgaaaaagattttgaaaactacattgaagaagaaactccaagcctacaaagctcactggccaaaagaacttccatgactttgctgggcctaccagacaacagagagaacttcaataagacacatgccttatgcaatggcttacacgtgtgaagcattaatacttgtggaggccacagtcccgtctcatcgatgggacacttacgacccttcccaaaaccattccttgctccaagaatcattggatttattcaaagaactctgggaacagtcacaggtccaacataaaatgtaccaagggaagattgcctgaca

SEQ ID NO: 245330 - DNA, 1476 bp, Cannabis indica
tttctttctcaatagaaatttacacaaaaaaaattcatctttaaatttcaatgttatgttatgttattagggacacgattttatcctgcgatgttcttttacataatgtattctgtggtacattaaatgggtctcaaagtaaattaaatgagtgtcagtgtacgttactattttttaacactaattacccctagatcaatctcagccctcagatcaaataactctctcatctaacggttgtcgtacatcacggaatacattctgtgaaagtacaatcacgagacaaaatcatgtccctatgttattaatagtgaggtatattatgttattgaaaatttatgtagtagatacctttaaagaatcgtgttggtagatatttttttttagttttggcatttagggaaaccttttagtttatttttctaagatcgcatatgttgtaattatttaaaattacttgtaaatttttaaatttttttgaatagtttacagtactaaaaataaaatttaaacagttagttaccacgtatataagaaaaataatagaatcgtgtgtgtaattacaaaatatgtaaattttatttttgatatttataaactatttaaaattttatgaaaatttacaagtaaacttaaatagttacaatatatgcaagagaaaaaatagaatagaaagctctcatgaatgtcgaaaaagataggagatctacaaaaagaccattttaacgatgcgctgtagacttaccttctgttatgtatgactatctagccctctttatataaatatttatatactgttagatgcttttacaatgcactccgttaaaataggtgtattgatgcaatccctaaatgttttaacatctaaaagaatttcttagcctattatttttcatagtcatgtacgttatagctatttgagacatcttgtaaaattttaagaaattcgaaatgatttacaatacgaaattcaatgttcaaaccgtctattttacacgtgtataaaataaaaaaaaaaaaaaagaaaaatcacgcgtgcaacagacttcttgaactctatttttagcgtgttaaattttttcgaatttctcaaaattttacaacatgtcttaaataactacaacgtatataatcataaaaaaaattaagactaatattttttttctagtatacccaaatatataaagacatctttcaagggatgcatttgtacaatttttctatattatttatgacttattacacttaactatttaaattcatattttcaaatttatacatcataattaatcatttgggatgtttcaaacctagccacaatatttatatatataaacaaataaacaaataaaataacaattgaaaaataacatgtgtaagttatcaataatgacaagacaaaatataaaaccggttcacatatgaaaaacatgcagcttttatatgatgattcatgggtacctataaatatatatc

SEQ ID NO: 245331 - DNA, 3000 bp, Cannabis indica
ttacatttagaaatttaatacgtaattctcctataattatatacattcaaattaataaatagaaaagatgataacgtaaaagtattaaaacatctgatctaataaattattatctcatatatatatcatattatattgcatatctacaagcatacttaagggcgagaagttggtgatgctcttggttttgtgtaaggtctttattattattatttttttgaaggaacgaaagttcattaaactaagagcgaaaagtgagaatcacattgaggatttccctccccttaaaatatcagctactaggctagagactctagcacttctagccagtttgtccactgtggtaataagactatgcttaatgtaaaaaaaaattacaggtaataaaaaacttaaacaagtctaaaacggcaagagaaatatgaagacacccccaatcaggtgcacaattgtgcaaggtctttaagagagaaagattaggcgacgagcgaagaaggaattgctagcctgttgtctttcaaatagtaattcttcctttaatttatttgtagctttctttcttttttaaagactcttgctttccctttgtatttatctatttgaactatccatttccttagaattctttttggtgtcgtaaaacacaatctatttcctactttcttgctgaaaatatatataaaaaaaaacacatttagtcatttggatttctgaaagaaaataaacttacaagaaaaatcataaacttggtcttcagttcattataatgttaatttaaatttttaggcattttattcgtattgaatttttaaatgtcttggtcatttgttgttatataaggctttcaacaaagaaggaagaaaaattatgtatttgaacttgaaattgattatattttctacaaaaagaaagggatttaggattatttaagtccatttatggtgctcttgaagccattgagtcaagtttaatggtatgatattccaaattagggaaaaagtacaagaaagaaaatgtttgtggtgcttaatgtgtaggaagtggtaattactcaagtttctcaatttaaaaaaatatatttgagaaaagtactcatcaaatgcatttgttgtaataatttttgtgcaattaatcagcaaagtgaaagtcgtgggcattaaaggccctggtgtaagtgaaccattgaggattcacagaatcaataaggtcattttgggttatatcatcacaaagagacacctctattaatttgagttcgggagacgaaacatgccaatgtctaatgtttcaaattaactttctatcagccatgtagagcagaaaataaaaattaaaaaaggtcacaactcagcaacaagaatagtttgagggaatatttagcatcaataataatttagagaaaaaatatcaaactatttattcttataatagtttaagttgtatcatgactataaagttaatgtgagtatgaacatgaactccttattccaatccggaaaccggggctgacagcatccgcatgcttaaaggcttaatcctgttccggtccccaaccgttatacctttattctgcaatgattccattccgcgcttcgcaaagtctttaatgatgcgtctgtaatagcctatgtgtcccaaaaaagaacgcgctacgcccggccgccttttcagtagatgagattaggatgaaagggcttgctttcattaacattcagtgaaggtgcatagcttctttgaatgtcccgctgattgactactacatcatgatttgaattgtaaaatatataaaatttaaggaaatttatgggatagatccttatatgttagatttaatgcagataaatctccaagctaaaaaaataacagcaaaaatcctcaagctctcaatttttgcaattccatgagtacccattttgaccattcctttagttgctttaaaaagtgctgctgagttccattcggcagtttttttgatgcctgaaccccctgctatctttggttggcatacatttttccatgccaataaactagcttcctgcattatgtattgacccttccaaataaaagctctacaaatagcttcaatctcatgaattaccttttttggaagcttgagaatcttgcaccaataagagtgtattgttgttagaaccaaattaatgagaacaaccattccagaaaatgaaatgttcctagtgctccaagaccaaattcttgctgtcattttttctgtcgaaacagtgcactcctgtctcgatattcttttggtgcatatgggaacaccaagatatctgaatggtgtctgttgcttagaaaaacctgatgcctccatcactctagcaacatcagaatcagccatattgctgaaataaatcgtagattttattttgttgggttgtaatcctgatgtggctgagaaaacttcaatccttggagtaaaaggatgatgcttttgtaatcatctgtgcaaaagagtagaacatcatccgcgaagctaagatgattgaccttcaaggcttcacatctctcatgaaaagcaaaatcacctttgcttcctacttttttcataattcgggtcaagtattccatgctaataacaaataggagaggtgataggggatcaccttgtcttaatcctttcttggattcaaagaaaccatgaagggatccatttaaaaaaagagagaattttggagttctgacacaattcataaagaaattttcaggaaagagtagcccccttagaacctcttcaatgaaatcccactcaaccttgtcataggctttttgtaaatcaagtttgatcatgaaattagccttgggtgacttcctcccataatgtctgaccaagtcttgacagatcaatatgttatggggtacgaatcttcctttaacaaatctactgtaacgccccaatattttacgttactttacaaaataccattttaatgcataatttgaaaagatttaaaaatacttgaaatacaacagtgggtttta

SEQ ID NO: 245332 - DNA, 1578 bp, Cannabis indica
ttctttccttcaatggctcgatatgtgaagctaagcatctttatttttgggttctacatggaatagatctttactaacacgtctaccaattcagccttgaaaatgaaattatgttgtttcaagtgtattagatctagcactgctagtacttacgttatgatatgtaattaatctcaaccatacacttgtgatctttactttcgaaatatcccggcttaggattaattacacaacatttgtgtaatttttgaatgtacaaattcagagcgtctatcattcctcaaatagaaaaaaaaaaaatggtactatcagcattttaattggcaagagtacaatattgtatgacccctttcaagtttctagaaattcactttagggaagcttcaaattatcattagttattaaacaacatacatattagagttaattgcagtgacaagcaaaccttctatctagtatttgacatgtatcttagtcgtagtgacaagcaaaccttctatctagtattgatatatatatatacatattttttaagggttggcatccgatcgaatccaactattttaaagtgaaagcagagggctagcttgctagtgtgttcctcctttctacatgtggcccaccattcatatcgataattgagatggcaatgtttctatttctttactctgacaaccaataatttaacttacgacattcttaaaaggtaataacaataatagaaggaaagtagaaatggtaatgaattcatactcaagtagaataaacttaaccacctcattcatactcaaacgagatacaaatacaatttgagtcaaagtaagctacttaggctaattgattaacgaaacgtctatgactttcatattataagatattttttcacatcaaaagcatcacatctttgttcatattttttcacaatccttcccactccgtatcacaactaagttctattctatgttgtgccttcactccatgtactttgtcctaaagtgtgaatcttttcatgcattagccaaatgagcttatgcccttcatcttcccaaagttgttgttacactaacaataattctttctaaattacattttgtattcataggttagctttagagaactcacaatagagtagctaaaatagctaatagctaaattatttagttaagaggtaaaacatgataaaaattgttgctctattaaatgagctattatagctattaaattattatatttatatatttacatcttaaaatgaaaaaaaaaattattaaaataaataatttttaaatgatatagaaaaaatatagagaaattgatatattttagttatgtaaatgtgtgaagtaaaagaaaaaaaaaaaagtaaaaattttagtgaagcattttaattgataaaataaaaacatgtgagtgctcttaacaaaatacatgaccatatctttaaaaccagatctcacctgatcttccctgttaacttgtatttgcatacttgtctcactctggcctttctgattaccacatgtgtttgcaactttcatagcctattttatgttccttaaactctacatccctactaat

SEQ ID NO: 245333 - DNA, 1368 bp, Cannabis indica
ccatcaaaaaagggcgtatgaaaaacccccattttcaactttctcaaaaaaaaatgcatacacaatgaaagcagtagataaaataaaatgtatgatgacaaaagacacaagtcatcggacacccgtcaaagggggcgtcacaccaacaacaacttcgaggaaaccaagcaaatcagataaaaacacattatcactactttccctaacagatgaaacaaatgtataaataagaaagcttacacaaaggcagcaaggcagaggtcgatgacgtctggtggtggtaatactttgcctgacaatggaagagaaagagcagaagaaaatcagggcgtcttgaattttgtcgagtgggtttgaaaatttagaaactaaagggtagtagaaatgacctagttggggaaagtgttggcttttatagaccatttggggtctgaagcagtgtcgatcaaataacattgtgtagtgagggttcacaacggttcagattccacgatctaacggatgggatgaatgggtatgatgaagagaaagggcagttgaaacacttgagtacctttctgacaccggcattgatggaagggtctgtctataggcgggaagcgaattgttacctgcacaagaaacaaaggccaatgatgacgatcataaatattgcccacatgcctgaggctcatttattgataccaaagaagacttaccagtcttatttacctaagactaaataagacttgggggggtaaatattgccccagtttattcccaatatacatggcagatgttgtgtgtgacatgtggctgacatgggcacgtcacccagagatgagttgaagatttaactaaaacaccttaagaaacaataagtatagttcacgatgctagctcctgaacatgagcaaaagaaccagcttctcctccgggagttaaggcgcggatagggttctctaggctagaaaggatggagctaaacagtcacttgatttaatgcggcatggagaaaatgtttgagaacccccataagaagacgtgttagatgtcataaacctaatttggggcgattacacaacaaccaagggagctagtgacggcttcatcatgaagaaacacatcaatcaggaaaggatgaaggctaatctcacctaacacctacacagcctacaacgtaggttgtgcatgccctattttgtacctcatgggaacttgtgcatgcccataagttggcacttaaaaaacaagttactctttttcttctttcaacgaatcgctataaataaccctcgtaaaaaatgaggagggaataaaaaaaaaaagaacacaaaaaatattctctgtaagaaatactttctcattaataacaaagactcgtggact

SEQ ID NO: 245334 - DNA, 1652 bp, Cannabis indica
aaaaaataaataaaaataataataataataatagtaatagcactcatttattatagagtattaagacatacacatacgacgtaaaaatgggcgtaggccacatgcaaatgctcccccaattttaatgttatataaattggacccctaaaattctagatatattaaaatcattatgtatgcattaaaaataaaactaaaattggaaagtaagaattttatcaaataaaagaacaatacaatcattcattatttttacattgtacaactggaaaatgcttattttttttagctacaaattattatgttactatttcaaaataagaatatttgttggaaaattatattattaagagagttataaccgtggagtttactctgttgaataatgtgaatgattttaatgaattgtttttcatgccatatgatatttgacttgatggtaataataataatatagggtaggattaaagcttaaaatctttgttaattaggaatggtcaaagaaaaaaatgcaaattatgtatgtttctcatttttaatgtcttactcacaattccttaaacacattccatatttcataaagcattgaatatatactataaatttcaaatcacacttcttaaggtctagtcatccgctataattaggttgaaatgactttaattatttatttttacagaagttgaatgaaattaatttaatacaaaaaatattaacatacttataagttatatatatcctagagtaaatagcaacataaatatttaaatatcttaaggttttttttttttttgagatatttaaagttttaagttaagcgacataaatctaatagttattttagcggcataaatgcttaaatgtttataaaaaattattattttcgtcaatactaactccattttgaatttattaaaagaatatttagaagtaactggtactacataattctgtctaaactcaatgatttagaatatgggccttatatactttattttaagataataacagaatctgtactgacgaaattagagaaaaattacagttttgtaaacatagggtactcatgccgctaaaaataaatattagatttatgacacttacaaatttaaaactttaagtaacgatttatcttataatatagacccaaaaatataccagttgtagaaatatatcacatataaagaaataggggagatttggaccttgggtatcatcatccccatacccataacttggatagtgatttttatcaatttcatacaaacatttcaaaaatgttagtgtacaatatttattaggggcaccaaagaccattgttttttgtaatgggtttaaaaacagtcacaatcaaatttatatatataaatatatattgtggagctaagtaaaaattaagtttagtttccaagtaaagaaattggccaccacaatactcgtcttcattttgtcaaaaaactttatttatcgatttaaatacttttcacatgtggtaaaagttagaagtgtagacaattacacaaacaacctctttgtaaaatatttatcccaaaattattaattgaccaataagatttgtttttcctttcattcaaagtatctagtcttttataaaattagaaaagaaagatcaaactttttttttttttttt

SEQ ID NO: 245335 - DNA, 1204 bp, Cannabis indica
aataaaatagaggtagtaataaacaaaaagtttcttccagtctaaagtatcaatttcgacaactataataaaaatcaccacacaattattattgaaaaaaataattataataattaattgcttacgtgacatctctacaatcaaatgttgaatttttggtagatgacattcatccactcgctcttcttcctcagttagccacctcagaattctgacaccaaaagtaaagtttgactagttcgatatatgcatctttctaataatttttataacaattctcacatcttcctaattaaataattaataataagagtgctaattaagcatcttcgtcacttttgtaatataatttagtaatataaactataatcacagcattagatacctgtgtttaatatagttagagttagtaaagtaaatagcagaatcaactctgataattaaaactccaggaatttgtcttgcttctgggtattgcagggtgttcctgtacacactagtcataggtaactttccaagtactgcagttcgtggccttgtcacttgcaaaagaattttagcaagagatagagaaacctataaaaaaaaattatagtagtcattgtttatatgtataataattaaagttatgaagtattaactagaaaacaaataactacatatacaaaattaatatgggttagttaattaattaccgcaattagtaaaccaatctcaacagaaatgaaaacaacgccgaagaaggctcccatgcaagcaaggaagtctagtttgtcgatcttccatatgagaattgcagcctcaaagtcgagcaagcttatcacggcagcgatgatgatagatgcaaggatagcgctgggtgtgtacttgaataacggcgtgatcaggtgtagcgttaggaacaccacacccgccattaccatgttcgacacgaccgtgtggcaccctgccatgttattcacagccgtccgagcaaaccctcctgccattttaagttaataatcaatttctgttaattaattcacctatactcacataaaatagaacacatgcacaatcgttaagtgtagcacttaaaagtacggtgtaattattgctttgtacttttggtacatcgcattagttggaatattttatataatggctaaatcatatgtagctaactagtgctgtcaagatattatatatatgtctgtttgtgaag

SEQ ID NO: 245336 - DNA, 973 bp, Cannabis indica
gatttaggtggttaatttttaaaaaatataaagtataagtagttttgccgccaatattccttctaaaaaaatatttttcatgacgtgtttgaatctgtaggctgtaattcgaaagaaagattgtctcttttattgttctgatgcatagtgaaaaatcagtaattaacttgtgttttgagctcaatgtagaacatgagagagttgttacttagtagttttattggtattgtttttggtgacctgttaacatatctcaatatttttttccatataatttatctcaatttttatcaactaaaataaattctttgagtaaagaattagttagaattagtatttcacacctatacttaatcacacccataataatttattgaaaaataaagttaagattttatggtaactggattattctttttcactgtgaataatcaaaataaaaataaaagttacacctcctcatggttacataaaatattatttggtaacttggttatgaaataatgaaatttaagatgtactgggagactttatcagcaatgggcatcatatcacctataatcttctcattagggtaaattagttgccaattgaaccttttaactacattgtggggtttctctccagatgagatgattggaggtttttccaatttgacggacatttgtctttaataggggttcttattgctgagtcttttcaaaagttacctttgttgtccctaactaaaagcttccttttgttctgttttattgtgccgttttttttccactgtgtagttgttttggtttaagttttttgagttgactttaccctgtgagtacatttattattcaaaggttggttattcccctaccaacactgctgcattgatgagtgagttggtaaaccaggtaaataatatggaaggcatcattaatgaaggaatgaatgtcaaccaaagggaggagactcaaactcccactctgatccg

SEQ ID NO: 245337 - DNA, 1803 bp, Cannabis indica
ggggaattctcttggcttggaagtttggatttgattttgagtgtatagattgctctcataaccatatcactggtcttgtttattcggatcctccgtcacacccttggctcctctcgtgtgtgtatggccctccttaccaaaatgctaagaagaagttttggtctgagctgatggacactggggataggtttggcgggccctggttgatattgggagatactaattttgttttaagtagctcggaacgggaaggatcctcgggtagagacccctttatcccctttattaccacccttgtggattctagaggccttattaatatgcccattcaaggtgataagatgacttgggataatcaccgttctggtaggagccatgtgaaatctgccctcgataaaggtttgattaatggagcttggttgaatctgttccctaaagctgttctttgctcctcccagacttgtaattctgatcatagacctatttgtcttatctcgagtggtgtggagccgaaatttaaaagaagattcagatttgaggaaggctggacgagagatgaaaggagtaaactggtggttgccaatgcgtgggtgtcggttgttcacccctgggccccagcgcgagtctacaagaaagttggagcgactcgtgttgctcttctcaattggaatcgattgcaatatggtaaagtggactcgaccataaaggaactggaacaacaacttgatcagctgcagcgtttaccggcgggagagagggattggaacacggaacgtgatattcggtgctccctgaatgagactttggccagaaaagctatttattggaagcaacgggctagaatttcttggctgaaagaaggtgacaagtgctcaaaattttttttcctctcggctgcattaaaggaagaagaaatgccattgagagtattctggatcggaacaatgtctggatttctgatcgagaattaatcggacgggaattcatgaatttcttctctaatatattcttgaggcctgatgatggacaaggatttgattgtagacatttgtttcaagaaaggatatctcaagtggatcaggacgagcttatccagactccttcttttgaggaaattaggaaaaccctctttgatatgaacaatcataaggcgccggggccggacgggatgtcagtgcttttttacaagcattactgggagtctgttggagatgatttttgtgaagcggtttctgatttctttgtgaatggcaaaatgcacaagggcattaatgccacgaatattgttctaattccaaaagtccagaacccaaagagacctaatcactttaggcctatatcactttgtaatgtggtttataaggttatatccaaaattgtggccaatagggttaaacctattctacctagcctcattcatcccactcaagctgcttttgtcccaggtagaaatattcaggataacaatgtcattgttcaagaaatcatccactcgtttaataggaaacgaggcaaagaagggttttttgcaaaaattgatcttgtaaaagcctacgatagattaagctggagatttattgatcatgttctctcgagctatggctttcctcagaaattctgcggctgggtatctcagtgtataactaccacttctctgaatatttgtcttaatgggggtcaggttggtaagattaatcctacatgcggtctgcgacaaggggacccgctttcaccctacctatttatatgtgccgctgatgttttatctaggcttttggaagaggctcttggtttgggcactat

SEQ ID NO: 245338 - DNA, 857 bp, Cannabis indica
caaaaatatataattaaatagatcaataatgtgttaagaaatcaaaataagcaagatacaaattttgtatataatctacaacacaataataataaataataattaagtatgcgtacctgattgatccataataattacaacaatttgataggacaatactatcaactaaatttttctccttaagtctctaaatcagaagcaattttatatatttaattatcaaaaatatacaatagtaataaaacaatatgaacttaactacataactttaattgaattgcatatgttcatcaaaagcttcagttaacaagaaaagctcatacttctgcttcaactagactttacacacagatgttaagttcattaactactgatcactaacaatgtaggcaaacacaataaaaaactatccaatcaacctatattttaataaaatcaatagttaatgtaagcttaaataaaaaaatctaacacaatgttcttagattgtgtaattttgcggctcataatgtcgcttagtgagtgtttgctcaaaacttaactaatatggttgatgtgccaacttttctagcaaacattatctatatataatgatgatgaaatctaattttaaaatagatcaataatgaaaaaattaagaagcaatcatgttctttttcaagtcttaataataagtacatacataataataaatgattaataacattaaattaataatgtaaacacaaatataagactagaaactcaatgaattattttttggtcgtaccagtacaaattttccatgtgcaaaagaaaaacaactgtattttttttagtacagtatggtctccttttgaaaactacataatatgatc

SEQ ID NO: 245339 - DNA, 703 bp, Cannabis indica
ctgcaaaaccatgtaaaaatctatgaagttattaatttctaagttattcattattatttctgtaaaatatttattacgtaaaagctcattaattttggttaacaaaaaatttgcgttaacaataaaatactaaaaatttgttggactcaagttcttcacacaacaaagaaattctctctaactttgaaagtaattttagaattgactcaccagagagctaaccaatacgagcgacctaagggtgtctttatacactttagaaaccctctaggtcgtggtcaaacaaccaagaaacaatcatgtcaataaatgaaattttttccaaacaggaaagtcaaaaactgtttaaacagaaagtcgattcgttcaaacaggtacattgaacctggacagtttttttttagcaaaatttccataaaaaataaggcaacttatgagaacctttacacacacagctatacacggtttcttggttaagaaatcagataaaaaagaaataaatatgattaagaattttcttaaaaatacaaagataatatcaaataatctaaataagaaaaactcatatttattcataaataaagtcaaaagagaataaaatttgatttttaaagtcttttcacactaagaaaagaaattaaaattttgaaaataacaaatacacaaataaaaccaattttgaaaatactacaaatattatttt

SEQ ID NO: 245340 - DNA, 1272 bp, Cannabis indica
ttcctcaattattcataattatctaattaggcttttgctaatccacttcttaaatccagggtattacaatgggtaatacccattaaaagtacacccatatatttatatatgggtgactactcaattgttatatttttattgtaatcatgattgttacatattttttacctataataataggtcaacaataggtaaaaatttcttatttagattttaattaattttaattaattattttcttaaattaattaatattagatttaaatatttaataaaacccttttagcaatttacatttatatgaaaaaattatttttacaactaattgttacaattcttttaagaaaaagggtgtgaggtgtgattttctataacgttgaagaaaaaaaaattgaaccacaagccagctagattgggctcaatcgatcgattccatctttatttgacgatgcacaagactcggtgatgaatgaagaatcgattgctgagtttgtggatgccatggatggggattttcccttgttacaggaagaacacaatgttccattgtctacaaatggttatcatcagtcacttgtgatgggagtttctagtttgaatcagcaaaagcaggtgtagaacctctagacgaagctggctcggaaggcaaatcatattggtgcaaaacttctttttactccaccgactaaacatgagggcaaggtattttctaaacttgacataactaaaattgaagttgaatctgattactggaaaacagcgatgctctatgttgttatgggggctaaccaccattaaagtttttgagggattccccagaagagtttggggggacttagggattgaaaaaattgtcagaatgaataatggagtaaaattgaatgaaattaaataaaagtccttaaatctaacaatctcaatagttcaaggggaatttttaacgaccacaaaagataagggggcataatttggtacatgttgaagtttaggaggtaaaaatcctaattagccaaaaaaataaagttgttgaaatattgttgaaaaaaatttctctcatggtattagaacgaaaaaagggatatcaggattgtttttgaaaaaattattaggtgacatgattggagaagcttatggtataagcgagcctaaatgaccattccatctacccgtacctaagcctatccttacaagtctagaaagaccttttgattcttaattatgtatctatttatattagtggataatagtgagtattgcaagcttatggaatat

SEQ ID NO: 245341 - DNA, 1468 bp, Cannabis indica
catttttgattttgattgtacccataataagcatccatataagataatagcttgaaactcgaggtggcatctaccattttaatcgattctgggcaatgggaaacaatcctttgggcaagctttgttaagatcggtgaagtatatgcaaacttgccacattccgtttagtttaggtaccagaactgggttggccaaccactctggatagtataagtcccagatgaaaatgttggataataatttgtccacctccatttctagggtgttagcctttaccgggtctagtggatgtctcttttgttgcaccagaggcatatgtaggttgacatttaggacatgggtgatcacgtgaagacttatcccgatcatgtccccatggcaccaagaaaatacgtctgtagatgcctttatggtgtttatcattttactccactccttcggttctaggcttttccctcgatgaataactttagatggatcgaggtcacataccctcacttccttaatatcctccatgggttctaacgctgattcaaaactaatatgagggtcctattcgtcctgttctgctaccaacatcggttccgacccctatattgttaagaccaaaaaatgcactgcagcgttataacattgtcttgcttccccttggttcaccctcatggttcttactcctgcctcctgggtataaaacttaaggcacgggtgtcggatggatgtaatggctctgaagtcaaccaaggccggtctaccgagaatggtgttataagcagtgggacagtccactactacaaaggtgcatatttgaacgtgctcttgggtgtgtcaggacatagggtaactcgaagcctaagcctttgcatagggatgagggtcgtcccgttgaatcctctgagttacaaaccgctgggtgagagatctctgtcagtgagcccaatggctgtgaaagcgtccttgaacaacaggttcacagaacttctattgcctactaatattctattcacgactttatttgcaatgggagtctcgatgaccaaggggtcatgatgcggaaagtgcgctggccttgcatcttcgtcagtgaaggtaataggttgatccatgagcctgggcctttgagctggaagttgagtgacctcccatatttttttatcatgttttaaggtcccagcataactaggggtgtgcagaaagtcatccaatccaatcccaaccgaccgatccaattctaaccgatccaatagaatcggatgtccaatcataattggatcggatcggatgcaaattttaaaaatccaattggatcggatcggatgttggatgagacatctgatccaatggataaccgaaccgatccaatccaatgtcatccaatatcatccaatgtccatccaatcatatttaatatttataattttatatatttaattattttattttaaaaaaatatattaattattaataggtt

SEQ ID NO: 245342 - DNA, 755 bp, Cannabis indica
attaacaactcgcaataaatagttggtaccattattatttgtgtctttattggaggtgtcattcttctcttcttctaataattttgtaagctttatttcttcatggattagagaactgctacttgaaatggttactaagcgcgagcaagcaaactagaaatgtgcctctcccccttagagagcatatatatgatttctgtgaaaaaacgtatacaaatgattacccattcatgtcttgctcaaacaatactaacttaaaaaatgaggcaaattaatcctactatacattgtaatatggctatttaatatttttgtccacaaaattatgatctatgcatcatagtacctttaatttttcaggtcgttaaaaatagtctacaaactatttagagtattgtaaattgatcattttgtgaagttttattacacgtgacaaacagaatgatgatgtggctatgtagacaattgtcacgtcaacaccacaaaataatttacatgtttttaatttttataatcattaattgtttttttagtttaataatcttctaaaaatacatttttgtgaaaaaaaaaatgtaactttgatacgacaatttttaaatagatatgtcattatttcatgggatattggtggctaaaccatctgaattttacgttttataacacttaaccacataaagtcaatttttgacggcaaaacctattgaacccccattccgttttgctatgtaccccttcgtccaaaaatcacagtt

SEQ ID NO: 245343 - DNA, 1738 bp, Cannabis indica
aaacactcgtgttggtttgtagggttagtcgttattccatgaagcagctagagtgacgtactcatgtataagaaccataatttggtaggtgtaagagcccaatgaaggcttgaagtggggacgttatatttttgttaactaaataaatagccttttttgcaataaatacactatagaatttaatgataataaataacaccagatattttatgtggttttatagttaaaatctacatactccacgagtccttattattagggatattttttagaatacagattatatatctcattatttgaaataatagaatttctctctatcttttttcctcatttttccatggattctgtctctatttataagaatataggttgacagttacttttattgggattgattcatttacaactgagtgattggaaaattagaagaggtagagaagagcgattggactccaaactcatgttgatgagtggaaaagattaggcctagggatatatgatcgaacggagctctgatactgctgatggtttgagaataaatttatattggtttatacctgtataggttggatattaggtagtttagtatgatgatattgataagttgataagttggatgattggtgggacaaggaagagttatgtgtttaatttttatgtatgtagtaagagaggagacaaggtagtaagttagtagtaaaagacttgatttggctactcaagcttggttacaatttggaagcttgatggggtatttatagttgtttacccctacatttaatttcatctagattattctagttctacatgatttacaacttttctagaattttctaactgatttacattcttcttgattagttacttctagttttctaaatattttaagcttttctagtttatttattttggtagatttctaaagttttcaccagaatattctaagatacaaatattctaaaaatgtgtagcatattttaacagtactaagagcttgagctatataagacttactcttttgtaatctcgatggatttaatataatacaatacatctattgtttcttttcttttcttttgttctctgttttgtaataataatagatgtacttaaattaatgcaacttgctctatatgtaaagaataaatagtgtatttttaaaatttattgtcatgatatttatgtataatttaaatatgttcaaaaattattattttaatagtgtagaaaataagaataatattaatttaatgatataaagaaaaatataaaaaaacattatagataatataatgtaaaagtatgctaatatatgccttacgtaaaacctcactttttttttgaaacatgtaaaacctcacttgagtttgaggttttacatccctcacacacgacaaggaaaacaataatgtagatataggttagtataagtacttttataataggaatgtacaatatttattgtcagacaaataatatttaatctttgatttttgtttatttgaaattaagtcactttttagggataaatgtgaattggttttattagggaatatttacacaaactaactaaaaactttatctatttatatttttcctttgattgactgattttttcttttatacggattcaacataaaatgtgatgggtcaggtagagtccacttgctagtggtagaaggttgacgcgccatttggcgcatttggaggttactttatttatttaatttttttt

SEQ ID NO: 245344 - DNA, 545 bp, Cannabis indica
tttttttctctctgaaaaattaattttagtacgataatttttatacgttattagtgtcttcggaaaattttacaaaagggagatcatttttgtctctactaagagagatttattataattaaaattttcttatataattattcacatttatagttatggtaagtactttatcatataaaatttagaatactttatactatatcaaaaatgatttatatctacatttttgtctctacaaatagggacatacttatttttagcattaagagaaattataataaatttttttatatgattatctatattatagttatggtagacacttcatacctattttcgaaaaatgtagaataatttatattgtcaaatacaaggttcaaaacttcaattatacacttgcaatataaaatcaagcatacatgaaactaaatctttaaattatgttttagacatcataaattatttagaaattttaaaaatagatagaatgtctactaaaactgtcatattgatagatgttcgttatatatatatagaaaaataaa

SEQ ID NO: 245345 - DNA, 1895 bp, Cannabis indica
gtaaacagaaccaaaccctccttcaccgagtttgtttgtgatattgaaatggtttgtagcagctaaaacactattcaattcaaaaatacacagctcggatggatcttgttgtttggcaccttgcagattgtgtaatggagtttcccttctcttggccaaaccaagtttccttaggatctccttaacggaccatgctcttccagctttgaaatttggagttagaaccgtcagataacaacttaacacttaaacagactaactaactctaataaaaactgaattgaaaatttacactaaagatttatcattttacttacatctgtgactagttctccatctatgaaatacgaagacagcagcaagaagaagggcacaagcagaaacaactgtgaggatgatgacaatcttcctggttttctgtcctctcgctaaataataaatgaatatatggatcatataagtgttggaataaagaagaagataaatacctttaatgcaacaattctcaccaagttcagctggtgcaaggcgaataaaaagatctgcaccgccatagggaaagacctgaatgtcaataagatcttctgaccagaccaaacatccaattccatttacataagcataagcaacgcaagaacaattgtttagacaccacgtgtagcaatcattggcttcattaatattgttcacaaacgtatacaagtctggaaggtttaacatattcatcatgtgaaatccatctgttttttctccatttgatggttggctactatagtttttctgacaaagtaagttggttcttcttttgcaccctccgctccaaattcccttcctccactcttggactgattttggtacaaacccttttaaacacttgcaaattggaaagtcggatgttttgcataccccgaaggctccacaagttccatatgcgtcgcatctagtttttgggaacaacttgacattgtttttgcaagtaaatcttagaagaccttgagatgaaacaaaaaaattcgtgggaaagtaattatcgaatgaattaaaatagagaaaagttgttcctttctcaaagtcttgttgaagatcaagtacatttagatatgatccacccatccctggaatacctatgaacttggttttgtcccatggtccacttctccattgaggcatttttccattgagccaatgataagcttgcgggggagactgtttcgagattccaagtgtgaaattccctggtgatggatcctcgtcactcttccaagaggtcaacacataattagctccagttttgagattgtaacctaacgttgctccaggtaagaatgtgtcccctgaatgttgaaagctctgccataagttgtctcctgttttgtcatctttcaaaaccaagttaccactatctgaaagctctacaattgaaccacttgatcggacaagaatattagttgaccagataacagacttgtttttactactcaccagctccaaatttccattactaccaatcgtgagactttcggaagatgagtctacaacttttaatggtttctctctgttagccacccagacaacagtacggggtgacatattcttataccaaatgcccacatacagatttgcagaattatttggattaaagaaacctaactcaaaaatttggtttggggagactaaagtttgtgttttagataaggactgggatgaagttatgttataaattgcatagcaatattgggactgaaaccagaagaaggataacagaaatatattgaacatcgacatgctacacctacacaatacaatctcttgtgaatggactatttttatcaaaataacattcttccatattattaaattggtatgactatatttaatgtttctcaattttcctt

SEQ ID NO: 245346 - DNA, 1290 bp, Cannabis indica
tactatttcagtgattgtttatgtactaaacctctccccagactatgatatctaccaagtcatgcctcttgaactttcacaaatactaaatcatatcccttgaactttcatccatattagattttttgtactaaaattagacaaaagtctttaaatccaacaatctcaatagttatgggaatttttatcgaccttaaaagttcagggaacatgatttagtacaggtcaaagttcgatggtaaaaattttaattagcctatagaaaaattaatttttaaattattcgaaatattttaataacttgagaccttctataatttcattaagaaccatcgtataaaattaaaaattgaggttacaatttataatttgtttgctgaaaataaaaaatattcctaccatagaagccacatgcattatctgttttaacggaaagaactttggttttacattacgattattagtatacttcaatattgggctgttcatgttgaggttttgacataatttaatctacacatataattagattttgattatataatattactaattaaactatcattttctttattatttaaaaattagtgtaatttgtttcaacaatgaacaataaattaattttaacaataaactgcatgaaatgcgcaacgcgcaacatgaactaacaactatttacgtatattataaaattgattatcatatatataaatatagctcattattttaaacataatttttgcttcctatctcctttaaatattgtaaataaaataaatgtttattgggaggcagaggcggctatactatagattgccacaaataaaatagctttcttattaaaataatagaaaaaaatttgtaaaaaaaataaaataaaataatagaaaaatgtaaagggtgtgccaattccaagttatcaaattattgtgcaattaaatattaggtttatgggtgagttctgccaaaaattgctaaagctgtgatctttatttaagaaagtgctttcgtgattaaagtgagttttttagagttagtattatcgagtttgattgtttggtgtttgtgcaagctgtccgaaatgtgaatgtattgcaatctactttaagtggtgttgttgataatcagtgacagacccagaatttttattctgtgggggcttatttatcattcaaaaatattcatacatatattataatcattcttattagatttatttaattttatggggggctttttctacgattttaatctataattatcaaatttaaaaaattacatttaattttt

SEQ ID NO: 245347 - DNA, 1198 bp, Cannabis indica
aaaattaaagatttaaaaaatgcccttacatgtgagcaaaagtgaaaccctcacctaaaaaaatctaatatatatttatattgaaaaagaagttacaaatgacataaggtggtgtttggtttacgtaattgtaatgataataggaatagaaatagtaatagaatgtaatggtaatagtaataggtagtattgctatgtttggtttattttgtaatgaacattgtaattagaatttaattgacaaaaatatccttgctttatttattatttatttatatttccaaagtaagaaagagaaagggtaaaattatctttttattatttagctgtcattgtaatccttatttatgagtagtaaaagtgtaatgagaattcataaaattagtgtaatatccattacattacatagttattaaatcgtcatattatcgcgtaccttgaatcttaattaggatctaataataaactagaggtgactgagtattttgaaatgaatgtttaggtaatgctgactttgttacgaaatgataatttgaatggccttcttcacagtcacatgttttggtggaatacttatttcttatggcacagttgtccccaactccttttgcttaatcaaatacatgatttttttttttgaaagaaaatacaatatatatagattcatttattccttaaaaaattgtatttccatcctggataactattcccaagccttgaagcaaagtacttttacatgttcccaacatagaattttattcaagagataaggtgtctctttgttcttgacaagcatcatggcaatttcgtagaatttgtgccaatagctgttgcgatcatcgatcaatggtgggtcttattaatgattaatcaatgttgatttaaatgggttttgtttaagaaaaagagaaaaggctattgtgtttgacataattataatcaagcttgcagctcaacagtcacttttttttggggggctaaagtcatacaatcattcacagttcactcacttcacaaagtaacattatttatcaaagtttgttagtaatgaaatttcactcactcacttacagttcacttttctttaagtggtgcaacacgagctagagctataaataggtgtcgtgttataaatatgagtcgtgtcgtgctttgttatcaaaaaattcagatagtgtcatattgtgccataaaaaaa

SEQ ID NO: 245348 - DNA, 1175 bp, Cannabis indica
tggttttttattttggataaatatcatagttttttttataatattatttattaactattttctaaaaaattgttataggttactatgttgttttcatacttgtattaaaatattattttaaactaacctaaatgcacataaatattgtcattaattagtgaattaaaaattacttttaaaacctaactatttcttatatattgtatataataattaattaataattaattgtttagaaaatattttaaaatattttgatttaaatattaagtaaattccaattatttaattgcaattaatcaaaagataagattaaagtttgaattaatttgttgaaattaaattgtaattagaaaaggtacttctaattacatggtggtggattggaggatggtgtgaaattccataagttacattgatgaacaacaaagaagaattcttatggagagagattgttctactgtagcttatttcttttatttcaaaggttgtaattttaaaaatacttaatatttacttggttcatatttcatttaatgttttattaattattttcttatagttgattagtacatgcatgttaattgtcatacataagatctcacacagtttgctttttaataatcatggatctcatactagaaacatgattatttaggattatcctatatattttatgtgtattgtatttagagaaattaataacataaaatgttatgtgaaattaaatagtttcatgacctcgtaattcacaccaagtgactttctccaaaagctagtgacataattaaccagtattttccaaaaatgtattttgttagttctatttttggcctattttattgaaaaatatattatattatttattgtatattttcgactggagtatttaaattggtgtctatattttgtgtatctaaattttcaaggaaagttgtctagctttcctatttatggaaattgaggtaaaaatggtaagtttgattacacaatttactcatctctaactagctgatatattctgatcttgtgtgagtttcccattttgatagatcagatttcttgaagagtgaatcgaagctaaactttcattttctataaaaggaaagttgcacttactggccacgattctgtaggtatagaaatggaaattcctgggctgattgaagatttat

SEQ ID NO: 245349 - DNA, 734 bp, Cannabis indica
tattgtttattattttattatttgttttggtagtggtgtaaaacactacgataataatatcaataaattagaaggtaaaaattatttattctaaaatactattaattttctatacataaaataaattagttatattccgtagttaattttaggctaaagattttgtgtactatatatacttactattattgacagaaggaagtggaatacggccatctatccaaaaaccgttgtcttcagcgaaagagactgcattgcaagttttcccaacaactgcaatggaggcaaggcctagtgctacccttcttgttgtttgcatgctgtgttgttcttcacaatcatccttcttcttccctagatacccaactatttctactccttttttggccctttcgaggcttgcaagcctaatttgaatcctcgacagtgtttcgaagactccattcaagtttgccaaacgggccatggtggaagaattgagtgaaaagaatgcaattttcagaaaacactcactgagtgtggcactagaatttcagttatatccgttcgtaaaaagcttaggccacttgtgaccacaagaaacatatcccttataaagggtaatttggtcattttctatactttacatagttacagctgaagtggtctattcacactttccctccatttttttttttcattttaaaaccctaactctaaaacttgagaatactcccaatcgaagaaatcagtga

SEQ ID NO: 245350 - DNA, 1620 bp, Cannabis indica
  modified_base (1585)..(1585): a, c, t, g, unknown or other
ataatataacaatctattggtatatttctgagaaattattaaattaataagtatttattttttatacttgtagtgttataaatatgagctgagttttttgacccgacacgaaaaaatatatgtttgggtacgacacaaaaaatataggtttatacataacacagggccggccagaggatgaggcggtcgggcatgataagcaaaaataaattagtttgaaagtatgagacattaaaaagtccaataatttaataataataacaatgataaatatttatttatcaaaataatagtagcattcaaattacaataattacaattattttttatatgattatgtgtaactatatattgaaaaaaaaaatataaaaataattaaaactgtaaaatacacatgatgttttagtatttagttcatcaatcaattgtgaaaaaaaaaaggcaaaaatatatatggagcacgaagttaagtccgtataaaaaaatatgtgttagtctatttaagaaaaataggccgacacgaataaaatacgacacgaaattactggacttgcaaaccgtatcgcggatctaccttataaaattgttgcatggtatggtacggtccatatttttttatgacatgatatgacacaacttatatttttctattatgactcatcacaatataactcgtattttaaaaaacataaaagatataggccgaattagcatgttaacagatttgtacaagtatgcttgtctattattactttgtctataatttcatcacatattattttgatatttattatacacactctgtgatttaaatcttaatttcaatgtaatatatgtatattataccatttcttcctttcttctatttcttttgtttaagttaagaatatttccttttcagcttatatttaaggggaattaagcatgcattaatgcacatctcaagttttgtgttgtacatacgtacacacccttatatatatttatatgagagaatctttacattacgttttgctctctttatagaacacctttaaataatcaatttctctattttatctttcaaaatatatcactaaaactctattttttctatttgaccttaaacttttatattatactatatatcgacttctttaaaatcacctctgtgggatctggtgtcagaggtgatgccacctcagattggtcccaatcggttgatgcttcgcaatctccctttgattactcttctaggggtatccgtttacacaccctcggatgttccatgatttggttgtgtaaagcttccagattcatctgtctagcttttcccatagcacaatcttgattgaatccgagccccaatctcgttttattcttggaccgagttgttgacttatttgggccttatggataggcccacaaaagaatagagaatgttggaccttacgcatgtcacgttcccaaaaataaagataacaataattaataaaaaaagcaaaagtccaaatatagtctttcaaaaagatggacatatgcacaaagtcgttacagagctccaaagctcaaccagaaatctcattggtctccactaatatctagntaaaaacctcttaaaaagcctcaaacaatgagaag

SEQ ID NO: 245351 - DNA, 957 bp, Cannabis indica
tttacactaccaagttgtgtctcctgtaatatacgatttgttaataatacctatcgaaatataaattttacattaatatatgatccttttttttatattttattcaattttattgaaatgagtgacacaataactgataattgataattaaatataaattaaatacatctcacccttcttttttactttaatgattaaaaaactaaaactaaaaaatattaattattctaaaaaagaaaaagtattttattctattattcattgatgtaaaatatgggtgaaagtatttaatttacaagttacaactatttatcaattgcttaattttgattttcctatgtttagtgttagaatttttaaaataattaagaaatacaaataataatagatctaaatatatttcaaaagtactttaatataaaaaactataaataagagcctttgctagatcaaaaaagaagaacatatctaaacatattttaaaagtgcttcaatataaaaagttctaaatcttattttataaaacctttgctagatcaaaaaagaaaaatagagctaaatatatttcaaaagtgatttaatataaaaagttctaaatcatattttatagaacctttgctagataaaaaaaaaaagaatatgataataagatgagcgaaagcgctaactattttctctgatagggaaggagagaatcataaaccctagtgtttcttgaccactacttatttatagactcatcttaaaaatgagttttgagtatttataatttagcctttcgacaaattataaattaacttatggtatctacacattatttttcatgataatttagtatctttttgatacccataacataatttgtctcttaaatttgtattacactttataataatactaggtgaatgtacgtgtcgagccacgtattgctagttttatttaagattttggtctttt

SEQ ID NO: 245352 - DNA, 626 bp, Cannabis indica
ttcaattctcatgaaatggaggcgctaacaatgtttcatagcttatatttgggcacttcaacttcaattgcctataactcaagttgaaatagatgttctacgaatctcaaatgttttgtgcaaaccttcatctgtaatttttttttcaagatttaattatagatatttctagtcttttattccttttttctaatgtgaatgtatctcatgtcaaacgtataattaatatagctgctcacaaattgataaaatctgctttaaaattggatgaagtttatttttggtcgaattatattccttcacttataaattctcttattgtaaataacttatcatcttaatttataataactaaagaaaggggtgcaaactaaagtaaacttagccttattcaaaaacagaaaaagtaaacaaccaaactatagtaacaatattgacttctttggtgacatggtgtcaggtaatgttagagcagctccaatgctagttgctcatcaagcctttatcagtctaagaaaagcaatcttgattgtttgaccactaaagaaaattgtgtgagctactgcaattgctactgtcaagcaatggtagttaaattattttttttataatttttctatcaaaaa

SEQ ID NO: 245353 - DNA, 2926 bp, Cannabis indica
tagtttttatttttccatatttttagttttgaaatctcatctttcttctaccagcctaattgtaatgtagcagacaatttttgtaattgtaaatgtaatgtgagctacgtttgaccacgcgacaaactgcattggaggctcgacagttcgataaacggtgagaagaaaatgaactcggtacactgcttgtgggttatgcactcaaattacttatatttttttattattttagttgttgtctttgtggattgagttttagtgaggttttgatgcaaagttccacaaaaaaattgaagttagagacaactctatctcttcaggaagtttcttgaccaaatgcattcgcaagtggatttgttcaagttttttttggcctgtaagaggttatgtttgctttagggggaggaggagtactgagtgcatgtggtattatggctagttgtacttattgtatggattgatgctaccaacactagtacgactaaagtactgagtgcatgtggtattatggttagttgtacttattgtatggattgatgctaccaacactagtacgactagagtactaagtgcatgtggtattatggtcaattgtactatggtcaaaaatgtttgagactcaattatatatgttggacatggtttacgacttggtgataggtgtatgggtgcttaaccgcaggttagtttatatgtttatgttttatgatttttttaatgagtttgttgactcacagatgctatgttatgtgcaggtataggcaaagctgttgttgaatgacagtgagtttggagctgaataaagattgtacatatcaagccagttccacctggagtattggatcttcaggacaactagggctcacgattttatagtcgtgtgacatcttttaattatgtacagttgaaaaatgtaaatatgggatctcagattttgaaaatgtaatacagtacatctttattaaagtttaaattttatcacttttaataaaccctttgattagcaaaggttgcatagtaattatgaaaagcactgtaacatgctgaaactagtagggtgttacatgttgtgtcgagggtatgtgatcactaggcatagaaccgtagtgaagatcccagagcaaaatagtgttattgaaaggatgaaccgaatcaaattgaacttagttagatctaaactgttcagctcaggattatggaaatcattttggggggaggccttagcaactacaacctaccttattaatagaatcccaaaccgagttataggcttaaaaaccccttattaaatgtggtacaattgaaccctaaacctaacacatttaagaaactttgggtgtgcaacatatgtacaccattccattgacaagctggaacctatatctattaagtgaactttcctaggttatgccttaggtaccaaggggtatagaatttacatatccagaaagggtagaccaaaggttgtgattgctagaaatattgtttttaatgagttagaatatcctcacttgacatctgagaaaggtagtgtatctccatgtgatacaggaaaaataggaaataaaaacactacacacatggaaatgaaatatggaacgaaacatctggaagaaggttcacaaatggaagctattgtgaaactagaagacaatgcgcagactaaatctgatgctgagttggaagataatgaaaaccaaatagaggtgctggaaggattcagacagataggtctggaaggttattggttgacacgggatagaagtagaagagagactcacccaccaacaaggtttgtggaagtagacttaatagcatttgcaatggctgtagtacaacatactgaaattgaagagccataagctatgaagaagcatttttgtgtggaaacaagtcaaaatggctcttggccatgtatgaggagatgaactcactccagaagaacaagaatcgtgttgttgtaccaaagctaaagaacaaatagattgtggagtgaaaatcaattttcaaagtgaaagagggaatcaatgagaatgaaccagtgctgttcaaagccaggttagtggctaagggttttactcatgtggaaggaattaactagactgaaatcttctcacctgtggtaaagtacaaaatgataagattaatgctatccttggcagctcaaatggagtttaaagttgaacaacttgatattaaaactgcctttctgaatggattcttagatgaagaaatctacaaggaacaaccacttgggttttaggaggaatggaaaggatttgaattagtgtgcaagcttaacatgtccttatatggtttgaaatagtctccaagataatagaataaaagatttgatacttatatgcaacaaattgggttcaaacaatcaacatataattactgcttatatttcaagaatctggagcaatctacacctatgttttaattgttctatgtggatgatatgctcatcatgagcaaagataaattcgtgatcaaaagtatcaaagacaaacttaaaagagaatttaagatgaagtagcttagacaagttcaaaatatacttggtattgaagtttcaagaagctggaaggaacggaccatcaacttgaaacagtccagatacatcaagaaagttattcagaagttcaacatggaagatgcaaagagttcatccaatctgttataggggtgagcataaaatccaaaaaaccaaaaaaaccgtttaaaccgacctaccgaacatcgttggaaccgaaattgactaaaccgaaaatcaaaaaaatcgctaacagttaaaacggccattgaacgatcggtttttttagtaataaaccgatcgaaaaaaccgaaaccgaacgttatacatatatacatattaattaattaatttttttttgcatgtattatagttactaataatata

SEQ ID NO: 245354 - DNA, 1863 bp, Cannabis indica
acctgtggtggtgtcaagaaatttcaagaacaccatcacatggagtacatcatgtcttttctcatgggtctttcagattctttttcccaagttcgcaccagtatcttgctgatggatcctcttccagaggttaacagggtatttcatcttgtttcccaagaagaaaaccagaaaagtaacaacaacattgctgcagaaccaaacccgagtatggcctttgcctttcaaggagacaaaaacaacagcagcatcaaaaaggataatgctgctggaaacaagtcttatcctcccaagaaaaacagacctttttgtacccattgcaatatactcagtcacaccattgagaaatgttataaaattcatagttatccacctggctacaacaaaaacaacaactccaaggatgctacagcaaatcaaattcaaaccaataatgacagcaataaagcaactggagataaccaagctattttacctcaactcactgctatacaatataaacagctgctgaacttgcttgcaacacaacaacctggtatgacaaatgtggacactggaaacactacaggtagttcaggtatcgtgctctcatctatgtctaattttcccatgaaaggctcctggattattgacacaggagctactaggcatatttgtcatgatatcaatctctttcaattcatttgtaatactaatcctaccagattaatcttgcccaacaacaatcatattatgacacatcaaagtggtattgttagtataactaatgatcttgtgctagaagatgtgttgtacgttccagattttaaatacaatatcgtttcagtaagttgtttggttaatcctaaatctttatctgtgctttttactgctgatcaattttctatacgaacaacaagagggtgattgggagaggtgaaaccaagaatggtctttacatccttgattctacacctactgactttcccatcctcaatgttgctgttgagatttgtcattcaagattaggacatctctcaaaaaaacacttgaatttgttaaacaaaaccttgaattgtaatactgctgccatacataagaactccccttgttacatatgtcccttagccaagcaaagaaaattaccttttccccacaataacaattttgcttgtaagatttttgatttgattcattgtgacatttggggcctttaccatgttcaatctcacttgggttatagatacttacttactcttgttgatgatcactcaagattcacttggatctatcttttaaaacaaaaatctgatgctttgtttgttatacctcagttcatatcttatgtttaaactcaattcaactgtatattcaaatgtttcaggtccgataatgctcctgaacttgctttcaaggaacttttcaataaacatggcatattacatgattttacttgtgttgatactcctgagcaaaatgtcgtggctaaaagaaagcaccagcacctccttaatgttgcccgtgctctatgttttcaggctcatatgccaattaaattttgggccaaaagcattatgactgctgcttatctcattaatcccacccctacaccgaatttgaaaaataaagctccactgaactttgtacaaaaggaacctaactcactcacttaagagtttttagatgccttatgtttgcttctactcttcccgtcaatagaacaaaatttgatccaagagctagaacttatgttctcttgggatatcctcaaggtgtcaaaggatatcgtttgtatgacattaaaaataagcaaattttcatctctcgaaatgtcatttttcatgaaaatatttttccttttcataaactaaatgagaaatcttc

SEQ ID NO: 245355 - DNA, 745 bp, Cannabis indica
ccaaatcgagactttgtattttttttttaacaaattagaggttatttttaaatagagtattcttaaataaagattccactatattatatatataaaaacaaaagtgtgcaatatataatggtctgtatgtattctacaaattaatttggacgtaaaaaaaagatatatatcattatatatacactacacgtcacaaatttaaactaaatataatagtgaaataaataaaatgaaagcattagctaatttgtttattttcaatatcagattatgttggatttattctttaccttcagttttatatataataaaaaaaagagagataagaatgtaaaataaagcctgcgaaatccctgagttatatatatagaaccttcctacgtttcaaagcttaattaactctccaaattaatcattatttctcccactagctaattccaaagcttaattcactttaattttattgttttataatttgctgggagctattgtactttattattgttggcatgcttcaaagagtacaataatacaatataataatcgtaataatgaaggaaatattatttataaaatatataaatttgtggtataaatatttaagattaaattctaattgtaaattaatgcttaagtttaatttttgccataataataaccaaattataattatagaattttggtaagtatataactattaagttgccacgtggtaatcactgattgatttaagtaattaaatttt

SEQ ID NO: 245356 - DNA, 1612 bp, Cannabis indica
tattatttttattttatttatgtatttttgagatttttgtatttcacagatcgtcaggtatcttgaggttatagttttggcaaaaccgtggcccaaatctcggctcctcggggctcttaaggccaaacaaaactctcatttgaagtgttcgccggagaagacgaatgactattcttttattgttatgtttctttttatctgtgtatatatacagatatgttgtggatataggtctgagatttttgtatttgtattgtatatattgttcatatggacgtgaagattttttttccaaagtaatgatttttcctgattatgcaaaactatcggcaataatagtataggcattttgcatcgtcgcctatagtataggtgactgttatatacaatcaactataatcctcagtatcctcgatggttttataaagtcgggaaaaaaatttctcgacgattttgcatagtcgggaaaaaaatttctcagcgattttgcactgtcgcctattttacttaattttcttgacgaataagcgacggttgtacagaccaactagaatactttactcaactctttaaaacagtttgaaatctaattctttagtagtgcaagtttcgagtatcacaagacttgataattcactcatccagatttgagggccaatcatcttaccttaaccaattggtaattattttcaagaatcactttctttgagtaagtgcagtaaaaaaacaagtgaaagtgagatttactaactccccaaaaaatcgagcaaatagaagactcaactgaaaaaatttcgctagtaagtctcgagttaggaggttctcattcattgcttgccagtatatgaatcagtattttgggaccttataagcttgtggcaaacattcttgtgatatgaaatttttgaatctaatattatttcattagtaggtaatttaaatttataataatatatattttatttatgaaagctctaaaatatgaaggtttttaaaatttgaaattttattctatattatttgttaaagttttttgttcttaaatatttggtagccggatgttgtcgtaaaagaatattaaaaaatagtgcaattttatgtgttttgtgtaaacgtttctaaaataattttatctgcaattctcgatttttatttacaattttctctatgccttacttgtggtagatacgatctggaaggtccgagatgataagttacacaaccattttttgagtaactttaaacagtgtatggactctattactttctgttacgcatattatgggtctggtttatttttcttgttggaagttgctgtttctcataggtggacccctcctctgtaagattgggtcaaaatcgattgtgatgtgaaagttggttgcagttccatgtgtagagtgactttggctagggatacacaggttctattttgtgggtgcccactaacaagcttaacttcgctgatcccctgattagagaagttgcggcttgtcagttggccatgtagaaggtcgtgcttttgaaacaccattttgtgtgtgattgtagagtgacttggagtatagttatcaataggggtgtttgcggtgcgagtggtgcggtttttgac

SEQ ID NO: 245357 - DNA, 749 bp, Cannabis indica
ccgaatgggttggggttggatagatcgaagacgaggaggataatcgccagagcagaggagaggcttcagaggttgaagatgaagtgaagtgtgtgaatcagtttgggggttcgctagggtaaaatatagaacattagcatcgatggatgaagcagttttcgagtgaagctaggaaagttagcttcaaatttaaactgacgcgaaaactaaaagtaaaaattagaaaatttgttattagcatcgggtattttattagcgacaaatgagtaaacgacgctaattgatagttttttgcgtcggtttaaaaatgacgccccaatgttttcctatactattcacgtcggtcaacgcaatgaatagtagcgttgaccacgtgatagtactttttgtagtagtgactgctgtaattagttttttacgattctcactaccaaaatttttatttttagtcacaacaaaatttgtaactaaaaataaaaaagttgtgactaattataaattattattattgtgttgtgacaaaaagatccatggctaaaaatattagtcacaaaaattacaatttattacgactaaatgtgttttaagtcacaatatttgtttgtgactaaaactaaattagtgacaacttgtaactaaatactatatatgttttaatcactagtaactttttgttgtgacttaaagtcacatttagtcacaaaaaacttatgttgtgattaaaaaattgtcactaaaagtaacagttt

SEQ ID NO: 245358 - DNA, 597 bp, Cannabis indica
gaggtgctgcccaattttttttacaccaaaaattagaattttagctagttgaatggtatggcgactagaagaaccaaaacccgagcaaatcgccatatgcaaggatcatcgtcacattctcctaatccccaagaagaccaatctcaacagataaataggagtatatataattcgggagaggggttttgaatttcaagatgcaccttttgaaaggaaccaggggtatgaaatcattagaggagagattgcataaaggcaatggtagagattatgtgctgagtagcacgtgggagatgccaatcaaaatgtggtgtgtgaattctatgcaaattacccatacagaggaagcaacaatgaagtctatgttcgaggagtgaatgtgccagtcactgtggaagctataaataactcctttagccttcctaccttagagatcaagatggaagaagaatagcactgggtagggagatcctcactgatgaggccattgcaatagagttggggcaagaggagactagattccaggttgaaggaaaccaaaaccaaaagtttatctaccgatggcaactcaactcggaagccagagcctggacatat

SEQ ID NO: 245359 - DNA, 2159 bp, Cannabis indica
ttttaaggggcaattgttatactcgaaattcggtaagcacatcagagcaagacacgtgtcgcgctgggaagaacgaagaactcaaacacgcaaacgaaagtacgcttggcatggaacaactcgttggaaacataattcgcagagtatgtttacaactcggctggctgaatagccttctgcgagacagaaatgtacaaacatctaacttatgtattgacgagaaaccatgtgagtgcaagtgtgcatgacgaggcctcaacctcgctgcgtggaagagaaatgataacactaaaaacacttagcgtatatgacacgatatacaaactgagtgtaaatagtttggcgagtcaagataacagacgaggcgtttatctcgctagaagaaggcatgcatgggtgagaatctcgacaccagaaaatatagttattagagttgaaacaatattaatcttgggaagtcagatgacaagcaactgctcgccatcaaagttaacttggctctattctcagcgaggcatccttatgggataaggtttaccgtatatctttaattacgcgttcatctcggcccaataaaagcaggatactcatagctgtgtgattgatagaagcctcatttacttagcttgatttgtaatcaaatcccatgatttgagagaataattgttgtaacgattattgtcaacttttgtaaattactgcccactatgtaattataaatagtggcaggcaagatcaagagaggggacgaaaaaactcatatgaaagaggccctgaaaaaaatactcagaaatctaaataagattgactcgtggactatgcagaattttaactgcaaaaccacataaaaactatgtcttcatattctatattttgctagctttaattttttctatgtgaaattaatattgtgaggctcaaatttggttaacaaaaatctgcgttaacattagttatatgacccataaaatattttgttggtagcgtctttgtgaatggatctaccaagttatgttctgatgcaatattcaagaccgtcacataacctctttctactatatcccttagtagatgatacgtcctctcaatgttctttcttctcttgtgccttcttatatttttgtccacgtcattatatttttgttttttatttataaattaattttaaggttatttaggatttttaccctatgaattattgtaatccttgaacttttcagtctgttacaaatgatccctgaactattcacaatattagtaaattggtcattctatcaaattttgttaacatttaacaaacaaaatgataacatagatgcttagacagttaccacgtcagtaccatgtcaacacatcatgtgtaatttattttaaaaaataaatttttaatttaattttacgtaattttcttaaccattaattaatttagtttaataattttttatcttttaatgttaaattatacatgtgaaactattatggtaattgattaaacaatatgtcatcatttttatttattactgacaagatagaaggactaatttacaatattgtgaatagttcaagaactatttgtaacaagctaaaaaaaactcaagaggcacaataaaacatggggttttttttttattttgagttaatattaaataaatatttatactactataagcaaaaataaacatttatattgtttattaatttcaaatatactatttttaaaatttattatttataaaaatactgtagaaaaattccatcaaatgcgcaaggagaagtgtgacacacatgtggctatggaggcgagtgagactcacacgcgagtgcggacaaagccttcagagttgcctgacgctcacaagctatagcgtgagaacgcaacagtggttgccacgtggtaaattcggacgaaatgggtttcaacgtgcaaggcttcttttctcaacgcaaaataactaaataagaacacaaaaataactagaaaacaactcaactataacataaataaattaaagttcatcatattacgcaaacaaaaataaatttataagacaaaaatttcaaaaaatactataccaaaataacgtaatagcaacgaataaacaacacgataacaattctattttaacatgaaaattaattgagcatcaacacttacgtca

SEQ ID NO: 245360 - DNA, 1502 bp, Cannabis indica
tggtgatatatgagattagattgttgtagaattgctaacattggttgttgtataagaagtgtagttgctaacatagttgatttatttaaatttggttgttgtaagtgttgctaaaatgattgttgtagggattgctcacatggttattgtatgagattatagttgctaacatgattattgtatgagattgggttgtaagtgttgctaatatggttattgtatgaggttgagtttttgtaatgattgctaacacaattgttgtataatattagatttgctaatatgggtgatgtatgagattagattattataaaggtggctgacatatttattatataatttagcaacaattttatctcatataaactatgttaagaatatgtttattagtaactcaaaatccttgtaagccatttcatgtggctataatgcaatcgatttaatattcatttaattttattagttaggaaattaaatttataagccaattgaagcttaacctaacttactaaaatttttacataaatttgaatgctgaacttattaaaatagttgcagaaaatgattcgtggttaactaattattgtgctgagtttttttttttaaatttaatccaaaattgattgatatggtgatctgaattttaaataatcagttttcagcaaaactttgacttcgagttgttaggttagaatagttccttaaagaagaaagaaaaaaaaataaagaagttatttgattataataaattagaccgtattattgcatataaaatttaaatttatctattttgaattattttattatttaccgtaaaaaaaaaaaaacttcaaaaaataacatgtaattattgtctataataaacaacacttcacagcaacttaatctaaaaaaacaatgtatatgtgagtatattaactaacgtggcagagtataattggttaaaacagtccgagataggcgtgttaatttataattatatttctctctcatcattagtacaataaaaataatataataataatagttataattgtatatggctaatgctgcgtcacactgttctttcttttctaatttagtaaatattgaagagtttttggattttgtggagagagaaagaatgaagttaatcttgaaaataattaagaggaatgagtaaataaatataattaagcaaacataaacaaatactttttcgttgaagaaaaaacaaaaacaaagaaatatatgtaacccaagaaaagaaagaacgaaaggaaaaatgggaaggaacctacgacagatcaaaaaggtaaaaacccaaaagagaaagccacaggcaattcattcatcttcgattatatgtatatagatatatttttttttctctacggcgaatatatataattatgtttacgtgtgtatatatatgagtattattatgataatcattatcctttttgattgataagttggtggtggagtattgattgtctcatttggtatatatcttcttcttt

SEQ ID NO: 245361 - DNA, 2680 bp, Cannabis indica
gaagaagaagaggcagaggagactttttatgaggataacgaagcagaggatgattcaaatattgacaccagatggtgtttggttgggcgactacttacagggaagatctccgattttcgcatctttcaaaacatcatggctgacctctggaaacctggcagaggcatgtacgcaaatcagcttgatcaaaaccgattcttgttctagttttaccatgagttcgatatcaaacatgttatttcgggcagcccatggacctatgatcgcaaacagttaatcataagccggctgaaggatggtgattaccctcgaaccattagtcaattctcttgatttgtaggtttaaattcacgatttgcaaaatggtttcatgactaagaaagtggctacggatgctggaaattatgtggggacttttatcgaatcagatccgaacaatttcactggggtatggcgggaatatcttcgggttcgtgttaagctttctcttgattctccattgaagcgaaggatgaagttccggaagcgtgatggtgtctcattctatgctacttttcgttacgaaaatatagcaactttctgtttcatctacggtttgatgggacacgcagagagattttgtcctagaaatttcgacacaccagcccacttgattgttaaaccttacggtttgggtttgaaagctctccctcgacgacatcaaaattttgcagcttcgccatatcttcggtcaggcaaagcacctgcaacttcaccacctagtgtgaacacaagcgatgctggagctaattttgggcaatcaacagatcctatttttatgggaatatcttctcctgatatttctcattctaaaaccaagaataaagggattatgctctatgatagtcaacaagctgatgtggaattgactcaagctgaacttaaaaggaaacgttttgctgctgagaaaaatgatgggcctgctcatgcttcggctcttgctgaattgggctcaaaaaacttgaatatggtgggtgctggtatctaggcccaccaattgttatgagtaaattaagctggaattgtcgtgggcttgggaacccacgggcccgacaattccttgagaacattgttgttcaaaagaaacccaacttcatctttttatgtgaaactttgtgtaaaagtgatattattgaaggcttagggtccgcttgggctttgaaggagcccattgtgttgaggtccaaggtcataagggtgggcttgcccttctgtggagatgtagcagtgttgttcgactccttcgatattcaaacaaccatatcgacattgagataaccacacccaatttccttgtttggcgtttaaccggtctctatggggaactaaatcacagcctccgattcaaaacatggcagctcattaccaccctatccaccgaatctcagcttccatggttcataattggtgatatgaacaacattggcaatcaaaatgagaaaagaggaggccgactgtacccaacatctctgattgaaggctttcaaagtgttctatgtagttgtaacttgatcgatatggacctccgtggccatccttacacctgggaacgtggcaaaggtacaagtaactgggttgagatccgtcttgataaagcactcgtctcctccctctggcttcactctttcccgtctgcaactctctcaaatggtgaagtttcttcgtctgatcatctgcctatttttcttgagccttctcctgcgattgtcacttgttcggtgcaccagttccatttcgaaaatgcttggaccagggagcctctttgtgctgaaattgttaaatcctgctgggaacataatgctcatctgactcttcaaggaaaatctctctctgtagcaagcaattatctgaatggggaaagagtttaacttgcaattttaagaaaagaattcatcaaagtaaagaaaaacttgcttctcttaaaggtaatattgatcctttttctattgtcaatttcgggcgtgagcaaaataattactttgaaattctagcacaacgagagttatactggaagcaacggtcgaagcagttctggcttcatagtggggataaaaattcaaaaaatttccatgccatggctagcaatcgaaaacgcagcaacaacattcaattccttcaaaataattctggtgtgcggacagcttggaacagtggtcttgaagaggtaattgtcaattattttaccaacatttgtactgctgggaatgtcaattacaaccaggttgtgagtggtatcaacatctcaattaccactgctcaaaatgccaagttgctgaagccgaatactagtgatgaagttttcttcactctctttcaaatgcaccccgacaaggcaccggagccagatggtatggggcctggttttttttctaaaaacaattggcatattgttggttcggatttgattactactgcttgtgatttctttgagtcatgcacttttccttacaatttaaacgacactaatttggtgctggttcctaaaaagaaagtctccaaccactatgagtgatctccatcctacttgctctgtgtaatgtctcttataaggtgattgcgaaagttcttgctaactgaatgatgcttattattgattcagattatctctcccacttcagagtgcattcatccctgggcgctt

SEQ ID NO: 245362 - DNA, 1246 bp, Cannabis indica
tgttctactgttgttttgagttattctgctttgtgttttactgatgttttataaaaacacagtatttttgaaaaaatttccatgtgacagtatttttgtaaaaattcactcaaattccagtatttttgtaagttcccctattattattgaatagaatccataacaataacagagtggattggaaaaggaattttccccaaccaagaacaaatattatccaatcgaagagtgaatctcgctaagtcgtgtgctgctttattagcatcaggcttaacatgcgaaattgaaaccctaggaaaagaggataataaaagagaaatgtcatcaataaggtcataaaaaagagaaacttggcctacataagatcctttgttgatggcatttgcaacaatgagtgaatcagtctcaatatagtcaatatgcaatctgttgctaataatccaatgcagactgtgaataatccccatagcttccatttctttcggtgagtagctgcctagcaagggcttggaaaaagcaccaacgacatcaccaaagtaatctcgaaccactgctcccacgccaacgatagaaccaaccgcatcaaaagcagcgtccacattcattttaaaaaaaccagcaggaggaggagtccatttaatcagacctatgtgattagtatgtcctttatatgtaccagcaggttgataggtgacatttgagtcaaataaatggggctgcagagtggagtttatgtattggttaacataattgtctgcaaaagaacaaacaatagaagcaggtttcggttttgttccatggatctccttgtttctttcggtccaaacactccacataagacaaagaattctctctagctcagagttcgtgtggacagcagccattgaagagaaaatctcaaacccattcaaatggtatagatttggaatagcggtgttaagattagctatggaccaaacctgtttgctctagtacacaagaaaagggcatgacccaaagattctctctggcaatgacacaaagaacaagctgcagattgaagaattttcctatgcataagattaacagcagtaggcaaagcatcattaatcactctccaagcaaatagtttgacttttttcggtagctttagagcccaaaggcgattccaccagttgcggttagatgtcgaggcagaggtgtcatttatcttatcaagattttcagccaaatggtaacccgacttcacagtataagaaccagattc

SEQ ID NO: 245363 - DNA, 640 bp, Cannabis indica
aggggctagcaattgctagatacagaaagaaatgaaccattcctgtttggttcaaatgtgcaagtgtaactaaaccatgtcaatcatatgagaatggtacactcagattaagtgtactgcttaaaaaaaagaataagcatttctaaaaggcaagttaaaaagtagagtaaatgaaagaaaacataatcttacggagctagatattcgcaaaaagaggacattgcagcaaccacttcagcgtattatgataaataaacaatgtattgcagaacaagaaccacacattaaggaacatgtaaagagatgtcaaacaaactggtatcagattacaacaaaggaagcttaaaatagatagtaagaaataaaagtttactttatgcagttctcgtgaatgctaccaccacgtgatcgtgactgttcaactccgccattatttatattgtgcttgggttgtccatagagcttaccaaatgcttcagaaaactaccacaggggagaaataaatgtaaaaagaggcctatcagactagcacaagtagaaaaatgctgagtagttgaagatcagagaaatacaaaataaaaaatatatttaatagcaatagcacattatgacacaaaaaaagtcattattagttagtatt

SEQ ID NO: 245364 - DNA, 917 bp, Cannabis indica
ctttgtgaggatgaagaataagattcagcatcatttacctcattacgcagttgggcccctctttgagggtttgcaacgctcgggatcctcctcttattgaacgtcacggttagagttttgtacgacttgttccctctgcgtaggctggtttgagtcgattccctcttgtccagtcatgtgttctctgcgagagccattattagttcatcgcttcgtgtttgtcacctggggttattcgaacgtgtgtgtggtactcatggaggacatcgggtcttgacccttccattgacttcagcatgcaaagcctacattttcttttgtaaggtcgtatactgggccttggtcaattgtatgataccttcagataccacagcaggtgtgataggcacgaactgtcctacggtggccgccgatgtcgatgtttttccagcatgagcggcaattttagggaataggttgaggggagtaatggtagtacatcccactcctccgttgatggtgttgacaggtgttgttccattaccagggagtggaacattcattgttccgacattgaatgatccagtgttgttgttgttatctccattcgtctagtttcctgccatgatgattttccaccaaaatcaacagaaaatttctttcccacaaacggcgccaaatgttgttggagaaatttagacaactccaaataaaaaaaatatattaaaaatataaaacagaattgcgcgagtactcaacctagaaatgacgagtattcaaactattgatatatggacgtgctggaaagtatagagaacagaaagagatgatagttgttcaatcagatcacgatctgcttagtccactgttgcaagggttttctgtcctgtccatttcatttcggatcactcttttatattcaaagcaagtgtcctttg

SEQ ID NO: 245365 - DNA, 1042 bp, Cannabis indica
tcctacaatttatgtttagtattcaaatttttgtactattattataaatcaaatgtcatttacaccaatagagaaaataagatgtgaaatctctcccatccagctatagcacgtacttcactaagtccttgatagtttgatttgcatgcctacgaacacaagtgataaaagacaacatacatctaaaatgaaatatgaaaagaagataaacataatgtgtagaagacaaagcagaggacttagtctgcgaacctataagtcaggtaggtcaaacaacgatcacaataatccaattaccgcatacatgtattttaggcaacatattactcaactgacatagaattaacatgcttcctatcatgcttttctaattaaataaattgctaaacaagtaaaggcttactgaatcgtgagtcgagcttttttctaatgatgattgtacatctcttaacgatctttggtaaataacttaacgactctgataccaaatttgtaacaccctatttgcttaggcatgctacaatgattttctacttactgtgcatgccttgctaattaaagggtttctcaaaaatcgtgtcaaatttaaacttttataaataaacaaccatacataagagttgggatcccgtctttaatttacaatcatatccaaaatatattttataaacatgtcgcccagcaaccacaaaataaagacccaagttgtcccgagatcgaactctccaggtctaaccatcttgatatgtataatcatccatgagctctggactcattggtgctcagtcttagcctttcttttacctacacatgaaaaaaatatttgtgagtcgacaaacttagttagaaaagtataaaacagataacataatatcaacttttatctaggctcccatatacctatttacaaggcttcaaatgcatcaagaacgttcttaacaaaagtacgacccctgtacaacatgcagtaagtactcatctgttgggttttattgccctaaataaaactctttacaatctaattagttatcaatataagaaa

SEQ ID NO: 245366 - DNA, 712 bp, Cannabis indica
ttaaaataaattcagatatacctgaaaagaggccacactaccggtgttctcgaaaactggtgctccttgaggctccgctaacctgcctgaattgtcaagttcttctatatggttcgatttggcaatatcattgtcaggagactggtgttgcatattcaaatcaatttgatccccctccttaattcaaaagagaaaaaaaactatgataagcaacactaagatctaagataaatattaatattgatgtaaattatcttaaacaggatcaacatcaaaatcataatgtaaaattaagtctctagattttcaggtatatcaaaatagcttcagatataccttgtaagaagaagtcaagtcgccggtgttctcaaagactggtgtttcgagattggtgcttcttgaggctggtgatgcatcttgaggctccactaacctacccgaattgtcaatttcttctattaggtttgacttagcaatatcattgtcaggagacaggcgcttcatattcacatcattttgatccccctccttaattcaaaggaagaaaattataataagcaacacttaaatctaagagaaatattgatgcacaaaataagaaaataatagcataaaattaagtctcaagatttatctttttaggtatatcgaaatagctttagttatacctttaaagaagaagtcggtccacccaagcgctattctcgtaaaa

SEQ ID NO: 245367 - DNA, 1519 bp, Cannabis indica
ataaataccatacctttggtagaatggtgagttggtaaggtattggcccctcaagagaattgttgaagagactcaaatattgaagctctgacaattggcttatctccactggaatttctccttcaaaataattgtcactcaagtctaacaaagtgagcttggtgagattaccaatggctgttggtatcgaaccagcgagtttgttgttgttgatgttgaagacggtgatgttaagtaatggagcgaagttgaactgatccaatgtcccattgaggtccatgttggagagatctatttgcgagatttctccaataaaatcatcacatacaacattagtccagttgcaaagattcccaatgttattgttggaccatgagttcagagaagatggtctcaccaccaagctgttcttccatcttataagagcctctgcttgtgctcttggtgaggaagcaaccttcaatggaagtaatgaaatcacaaaaatatgaagaagaagaagaagaagagagaaacaagttattggagctcttttcatggtgttgacttgatgatcctaataattttctgctctctctcttatatacatatatatagtaataacacaatgtatgtatcatgttttcatcttataacttattagtattaaacacacatttatatatacaataataacaagctctcatatagtaataacttaactattaaattagtatcacgttcttgattctcaaaagtaagaatccaaactctctttttatgacatttttataataaatttaaatcctacacatattaattaattgagttttgaccaaaattctgtagatggtagttccaaatcgtgattcaattaccagaaaaatattttgggtaattgataagtaattagcaattgccatcaaagcaaacatttgtattaaaatacatccaaagccgccactcataatcaataatttacagaaattactaataattaacaggaaaaaactataaacatcacacttctctgtcacacgcatagtcaaaactagctctacaatataataaaaaaaaatttaaaaataagaacactttgaaaaagttcatgcaagcactaattattaacgagtaaaatagtaattacctggggcatgtaaccgtaagagaattagttaattaaaaaaaaaaaaggaaagaaaaactcaaaattttcttgctctctctctcttcccttctagcctagcaagaacctggggtttttggtgtgatttggaggaagtgttaaaatcaagtggtgtaaatcaaaggtaaccaatatgtatgctctttgtgatttgtacactaccaatactagtacggtagcagtactgagtgtattggtatagtgtatgatgcttaaaaagtacagtacgacattaccaatactagtacggataggtacggagtgtgtgtacgtggttaacacttagggttactcgaggtacgaggcaaaccttatcaacactcgtacagtagcagtacgtagtggatgtagtac

SEQ ID NO: 245368 - DNA, 1572 bp, Cannabis indica
attctacttttctttcagctaacgtctagtttttgttgttggtatttttttacaacttattttagtgttttttcaattccttcatgttagcagaatctagtgaactcgtctgaatagaattctaatccattatcagttctaagcttctttattttcctcactgtctagttttcaataagtcttttccaagtgacaaaggtgttgaaagcctcattctttgttttgagtaagaaaacccaaacttttctagtatagttatcaactatactcatgaagtaacttggacctcctagtgttttagtcctggaagccccccatagatcagagtgtatgtaatcaagctttccctatgttgtgtgttttccaagtgtgaactttaattggcagcattttccatagacacagtcatcacagaactcaagtttctcacccaatttccctttgagtatcccttgttttttcaattcactcatatccctttcactccactactacaaaatagacttttggtgtcggttcgagggacgattttttttaaaaactgacactaaagatcaccctaactctttggtctcagtttataactgatacctataatgactttaagtgttggttagtagaccgacactaaaagtataaccgagacaagaaaaagttaagaaaatatacatataaattgagtataaatgtcggtttataaccgacagtaaaagatccttttgtcttgtttataaaccaacactaaaagattctttagtctcggttataaaccggcacgtatagacactttattttttttaaaaaaagctttagaataaaaaaaaagtttcaaaatgaaaaaaaggtgtatagagaaagttatgaaaccctattagaaaccctttcaatgctccatctctctctaccgcctctgtctttatctctctttggtttatctcactcgaacaaacccagtcgctcaaaccaaatctctctctaccgccctctcatcttttctaatctctatctctctgatttatctcgttcatccccgaacccaattcatccccctcttcttttctgttatctctctctagtttatctcattggagttgagtttgaaggttggagatctctcactcatgctccctgatctctctctcttggttcctgatctctctcgcttggggatcgatcgtcatgggttttgaaggccggttctcactgggggattgctcatggttttattgttctgggcttctccttggtttcagatctttcttagtctcagtttcaacatcaaagttcttccttcttgggcctccgatgccaacgaaccaccacgtggagatggtagtaactaccgtaggaaggggaaatgcatcgttttttagatttcatttttcttattaattttttcaatgtaaatatttattattattatttctcttataaaacctgttatggaatgtttgctgaaatattgtgaggaaataatttatttatttgcttcaatgaatttattttgaataaaatctaaaatttattaattaattttgaataaaatcaggtttaagcattatgtaaatattt

SEQ ID NO: 245369 - DNA, 887 bp, Cannabis indica
agagctggaccaattactaatccaattccccaagctgtgctactctgaaaattaattattctttctcttatataacaaaattgttaacaacacttcaaaaataaattatgaaaaaaaaggagacacaacttcttactattgacattcccaaagcttggtattctttacggcaaatttctgaagcatatgcctaaaaatagcatgatttatagcatttaattagacggaatgaaaatataagaatgtaagaatgaaaatagggatagaatcaaattttaaatatataaaaaaaattaataagaaaattattaaattttttctgattttgcactggaaggatattttccttcaattttcaaatagaatagacattctatcaaaataatataaaaatcattctattgaaataacattaaaacgaagaaatggaatgaaaattgtttcatttcattattttcactagtttgattggtaagaatgagaataaaaataagaatgagatctagaaattaaaataaagtataatctatataagattattactcttaaaactattacaactattcaatggtgcctctaaattttgttttcatgttttttttttgtccttaaatataagatttaccaacaaaatgttgttgtagatgtttaattgtcatatgtgtcccatatacaatttaaaaaaaaaaataaattatattgttactaattatcaataaataaaaataaattaattttaaattttcttatattgttgataaacaaggatttttttaggctttaaagtttgggtctaactcacataaacacaaaattagtgggcttaaaaatttagtgtctatctaaagagcatgctgtctattaagaattatatttctgtcaaaatt

SEQ ID NO: 245370 - DNA, 1102 bp, Cannabis indica
atcatttgaaatgaatgaacatcattcatttgaatgactttgatcgttagttgtaaattgtatgatcattgcttatgtatgtacataaaccagttgccatgagcacttggtttggtgataaacaagaaacttatgtaagtttccaactgcagctcaactcagatacatcaaggaatgcgaagagattcgtcttgctatgcagccctttgaactgattaaaagggtatggatggcttcagcattgtagttgatttgtccttactcctttttctttcttctttcttcaaatagtcttagtggtatgtcaataggtgggatgaattgattctcttggtgggaatctaaggacattatgttttctgctttgatatgaattggtcttgctcttttaggtaaaagaaattcagcaagaagcatatgcagaaccagaaactgtccaacaaaaggatgcaaagcaaactgcagcagccgatctctctaaaagattaaaggatttgcgctccattaatgatgcaaatagcttgaaaggttagcattactatttcccgaataggaaaagaaaatgagttgatcagttctaagataatagatatgtactatatctttacttcatgggatgaggacaacatgctatatagtttttagcagcagagagtcttttcggtctttcagataataataagtatttttatatcagtactgctaaactaggcttggttcttgtcatttttgctaatctaaagccaataactcttacaccatttttgaactcgtaagttaggatattcgtcataaaatttgatttaagtacattcattgttgtctaacaaacctcgccttgtgtaattttcttcgaaaatctcagtaatatatcaccctatgtttcgaaagtcttgtaggattctcatgttgtatgcttgtgtatgttgagattttatcttttaccttctctgatggattatataccgatttcagctttggaagagtggcgtaaacggaagatggaacgagcaaggcttcgtcaactagagaaaaatggaacattatcctcctaagctttacagaagaatatgtcaactagagaaaaataaaacattatcct

SEQ ID NO: 245371 - DNA, 2057 bp, Cannabis indica
atatattatctatcacaagaaaatgtagaatataaagaacaagaaaaaaaaactaactaaaaagattaattctaataaatctctctctgccttaaaatacgtaagtaatggcattaaagtataaaaattgattatccattattgatttatataaattcactgcaatttcagaatccactgaaaaattgaagaatatacataaactggatattaaattttggctaattatgatttatgccccctcaactttgacatgtaccaaatcatgtcccttgaactttccaggttgttaaaaatacccctgaactattgagattgttagagctaaggacttttgcctaatttcattcaattttaccatttcagtaattgtttatgtactaaaccatgctccccagactttgatatataccaaatcatgcccctcgaactttaaaatatactaaattatgccccatgaactttcatctatgttagacttttttactaaaattggacaaaagtctttaaatcaaataatctcaatagtttaaggggcatttctaacgaccttaaaagttcagaaggcataattggtacatgttaaaattcaggggcaaaattcctaattaaccttaaatttttgtcaaactactcacaaatttttgtatatataatcattagtcattaactttatttactttttcataattttcactgttatttatagtcgtcataatctatctctccaaaactcttagtttcaattttttaattattattttatttaaattgatggttactcttttgctttactatttttgcattggaagaaatatggaaacaagtaaattaattataaagttatacttatttaatgtctattaattatttaatttttaatcattagtccttataattttttataatctttgtgggaatttttttgatatatatgctgtaagtcttttatagtttttcctctaaatcaagaatgatatattattatttattttttttttgaaaaaaattatatattacatttaaagtaacctatttgatatagttctttctctttttttctttgcatcaaaaattacttaattattatttttatatatataaattaggaagcaaacttcgcttcgcgtgcagctatattttatttattgataattaaattataaaaatacattaagttgtttattttttttttagtatgagtaattattatactaaaatttttcataatttttatgcagaaaaataaattaatatggtagaaaaatttatcatataatttcttatcaaaaaaaaccaacaaaaacatattttcaaatgttatagtaaaattttttttttaaaaaaaaaaattaaaaaaaaaaaaaaaggaagttggacaattctcacacaaattagatatctacaaaaaatcaattgataaatctatagaaaactcctcatctgattttaaaactattgtcattcagagccgatgtcattaccgtatctcacttgtagtcgccactacagtcaaagtcgctatcattatcgtatcttatatgtagttattactattgattaaaataagtttactctgtacataaaataaatagatttttacgctggatgtcaaatttgacaaaattttttttttttcattttctcattcttctcttcattttatattgggatcagtatttttttttaaaaaaaaaaaaactaacgtgtattaatgataaaagtgacataattattaaaaaaattaaaaaatataatatcttttcaaatattttttttttaatttttttgtcatagtaaaaaaatatatataaagtatatattaaatataatattagaatttttttgttctatttttttaataatttttgtattatcattttttttaatatactcaaaagttatttttcatataaaaataaccgaatataaaaactattttaaaataaatatacatataacatcaattttacaaaaaatattagatataactatttcaaaaatacataaaaacataaaaattcaaaaaatacagatgtttagattttaacatttta

SEQ ID NO: 245372 - DNA, 1402 bp, Cannabis indica
tactaaattatgctctccaaattttgatatctattaatttatgtctcacaaactttaacatgtatcaaattatacctcctgaactttaatttatgttagacttttcttactaaaattagacaaaagcccttaaattcaaaattcttaataattcatgaggatcttttaacgaccttaaaagttcagggagcatcatcatctagtatatgtcaaagtttgggaaggcaaaaatctagattaacctaaaatcaatagctaaaactaattttgtcaaaaaaattataatttattgtgtctaattttattaaaaaggaatgacaatttgcatctataaatattacttttaagtaatgtgactatatatatagagctaaaagttgcaaggactaaagaagtgtataaataaaaagaaaatgattattttaggagagaaaataatagatataaataaacttacagcttctagagcagcagcagcattgttgttgttattattataataatttagagtagacgtagtagtgttggtgggaatattgggagggagacgaaactcatgcatcatccaatcagttttagtccctttgccagcgctgcctcgatagtaaaccaatgactttttcagaccaataattaaggactcatcattattatgattatgatcatcatgatcaccttctttgactaaggaggaattatatatgggcttgtctattccagtggctttccaaaatccagacccagtcactctgtttggtcttatactgttcctgtattttcttcctcttatgcaaaagaagtaccattctttctccccaaccttgctaacttcttcattatatcacattcagacatgcaaaaaggaaaagtcaaatatcttttatactcttttttatttcttttagtatatatataatatagttaggtgtagcctcctacatcttgatggctacctatgaaattatatcaaacatgtccaaaatcatgcagatgataattataatatgtttggggtctatgtgggtgggacatgcattaattggtttatgaatattggaattattggacaacaacaccaaaaaaaatcttaattccgagaaaaaaaaataaagatccatttcccccaattttcactcattacaaatttgaaacgctagtaagcaagttaattaaatttattatattttttgactttataaataaaagtactgtttgattaataaccaaatatatagtaatatatattttatcgatcatatatatatatatatatatgtttcttcctttacgtttttaatttgtattgtgcttgatttggcaatatatatttggattattaaaggttttgtcttgattgcacctctcatatatgacctggtaatagtgatctctctctctctct

SEQ ID NO: 245373 - DNA, 1051 bp, Cannabis indica
attgcaaattcccattctttctttgaggatttcgaattggttaggaagtaaagcttttgtacagatgtctgttctttgctctttactgctagtatgaacagttttcacaaacccctcttggaccttttccctcacaagatgacaatcaatctctatgtgtttagttctttcatggaaaattggattggcaacaatttgttgagctgctttattgtcacaatgtaataaggcatttcctatgtgatcaatgtctaattctttcagcaatgatgtcaaccatataagctcacaagtggtgtttgacattgctctatactcagcttcaactgaagaccttgatatagtatgttgttttttactcttccatgacactaaagatctcccaagaaacacacaaaatccagttgtggaccttctcttgtcaacgcatgctacccaatcagcatcaatataacccacaagctgaatttttgagtcggttgggtagaaaagcccttgtccaagtgtccctttaatgtattgaagagctctaattgttgcatccatatgattagctctaggactgaccaaaaactgacttagtttgttcacggtataagcaagatcaggcctagttataatgagatattggagttttccaataattctcctataaagtttaggatcagcaagcttttcctctccatcttggctgagtttcaagttaacttccatgggagtactagcaactttacatcccaattgtcctaagtcttcaagaagttgaagagcatagtgcctttgtgataggaaaattccttgattagttctagcaatctcaatgccaagaaagtatctcaattcaccaaggtctttcaacttgaatctcttatttaggttctcttttaagctctttactactgctatatcattactagccaatataacatcatcaacataaacaagaagtatgatgatggttgattctttttttttgaatgaacaattaatgatgggatgttgaatgcttgaaaccttcttcaactaaggctgtagaaaacttttcaaacca

SEQ ID NO: 245374 - DNA, 783 bp, Cannabis indica
aataaaaaataaaataaatgtaagttaccaatcgtaatcttaataatcactgagtttactttagtatatatttgtatatatatattatcaaagtatatacacgattagattcacaatataatctaaaattaaagatttattattatgcaatccaagtaaagtaagaagaaatattcaaaccaataaaatgatttgacaaagctccgcatattttaaaatatttcttttacacattatttaaagatttaaaaatgattataataatattttcaaaatcatctaactaaataattaattaaaaaatacttttgaataaaataacaattctacctttaagtggagagtagtaacaatctagtataatctacttcattacatgatatgattacgattaaattttttacgacaatcaaagtgcggtgtagttaaacaaaataattaaatatttaaaaaaccataatattcgtattgcaccttatataaactattaatattttatgtataatcatagattaacagaaaaatgtttaattaaaatttttctatgatgaagataatccctctcttttgatttttttttttttatatatattattagcaataaacaaagaacttttataagtaagaaaattaataaaatagataaataggcttgtagcgattttaggttactatcatttaaagtcgttgctatcactgtattcttacttataatgtgactatatttatatcgggttatttgcggcaaaacctcttaaagtggacaggtttttgcaactaacc

SEQ ID NO: 245375 - DNA, 1087 bp, Cannabis indica
acccagatggaattgaagtaaaattgttaccatcaaggtaaattgattaaagaagagaaagattggtcattgatgggaaagagcccttgaaatgattcccttgaagaggcaaagttgtgagttgagacagagtaccgagatcggaaggaaagagttttgcctgagctacatttatgccatcccaacactaaaacactttgagattataaggcctaatattaggatagcataggcagccaaacactttgagattagtgtagacaggttttgtattgaacaatgtttcaattggtgaaagttagttgaggacaggggtaggtaatcaattatgtaggtagacagcacatctaaaagcctcatcccaaaattgcaatggcatagaggcttgagcaagtaagctcagcccatgttcaactattttcctatgttttctttccactaaaccattttgctcatgagtggttggacaaggatgtctatggacaataccagcctgtctaagtggttcaaaaaagctcctatattcccctccccaatctgattgaaacactttaattttctttcccaattgtaactcagtttctgttttgaatgcaagaaatgtttttaaagcctcagacttatttttcagtaaataaatccaagtgaaacgactaaaggcatctacaaaactcatgtaatatttgtatccattataggataagttgtgggaaggatcccatagatccgagacaatgagttgcaaaggttctgagtacattgtattagaaaattttggaaagggcattttatgtatcttgcctaagcaacaagcttgacatacaccatttgaggttttattacatgagatattacaagagtttaaaacagatgtgaccaccttgtgagaaggatggccaagtctgttatgccacaaatcaaaatctgaaacagtaggctgagtacaatggctgctggaagctgaaacaacaaggtcactggtgacaacgagcagattttggactggaaaattgagcaccagaagtgagagatgggtgggaagaagacaacactttgaaatggcatggatcaaaagtatacaggccat

SEQ ID NO: 245376 - DNA, 2542 bp, Cannabis indica
aatatgctcttgggttggatgtattggagaggagaaatttctactcctattttctctgttgttgtaaacgattgttgattataataacagtgaaactttttcaaaaaaaaaggtaaggatagtatcgccccgctaaaccgttctacttctattgtgcactatttgatctaaggattgaaaatgtattacatacttgtgagtaaagtacacatacataggggtagaagaaaatataagaaaggcaactgttatatgaaatggtacaaggactagttagtaaattgttaatattacctaactattataaataaagtaatttgcggtataaatatttaagtttaattgttgcaaataaatactaaatttaattttttgtagtaataatacttaaattataattcttgaacttttgttagtacctgagtgttaagtgttatgtaaattgtaacgtggtaatttttaattggtacaagttattaaatttttatttttttaaaaaataaatttaaatataccaataagaaaataacacgtggataatgacttaatgtttaatggataggtacctttcaaaaatataagttaggtattaatacagctaaaaattaaacttaagtatttatttacaattgggagttaaactaatatatttatgccgcaaatactcttataaataggtaaagtcattgtacaaatagattaattatggattgagaaaatataactttagtttaattagagattgatactgtcttaaagagtgtattcaaagatttgttcagtctcgaagagaacatgtttacctaacattggtgcttccattgaatggacaaatatctaaatacactcttcgagacaagacaaatctgctggctgctaaagaccaaagttaacagtggcaacaaagggtgctacttcccttgcagaaaacaacttgaaacagtcatttgctggctgctaaattatgaaggtgactgagggtagcatcaaacggaccccggccgagccagccactctagcaacttaccagcaagtaagcccttcaccgccaattgacagtccgagaaaatggacacacgcacggccaaccctgctgtagaattctgcagcatccctgcaggatagccattaactccgcttcgaacgaagacgacaccgccctcttgactgtgacagcctcaatcaccaatcccgagcgatcacagcagccaccctaaacttacctcggactgcagcgtccacaaaaacattaaagtcacaccaaggtatcatttcatataacagcaaccggttgtggtaaatttatataatattaattatttgtaaataaaataataaagaaagtaatatttctgaattcatttgacatgtactcattttattcttcaattctctctggttctttttattgtacggtctctcatgtttacctattcgagcttctctcaaagttctagccattgatagagaaatgattatgaaaatggcatagaattagtttaatattttttttctccttgtatagtttcagatttttattgttggttttctatgtaattcattgccatttttttatgtttggttatgcccatatttttcgagtgctaaggcataataagtgtccatatagatttaaaagaatgaagagaataataaatgcgagaaatgaataaatatcctgcatcgagataagttacaattaaaagatgtattgacctcatgtgacgctatcaatacaataattcacaataataacgggtttataagctaatcctcgaaacttaactaagataaatgagacaggtgagacaggtgaatagcgtgaaagaatgagttaagtggaaaaggtaggtaaggaattttttaaagactagctcaagaattgtcgtaaaagacagtagcaaggataaacatcttaactagcatctcgcaaaatatgactaactattcctgaacacgttaaagaatgtgagccaaagttagaatatgttatatcgacaacgacaaattacttcctgataagaacaaaaaatagttatcaacagttattttattttatcatgttgtaaatataaaatgtgaggattgtccatgttttatgaacgatcatttaaataagattaaaatagaatgattggcattcctaaaactcctataaataatagggacaaaatctatgggctttctgtagtccctcgccgcagccactaaaagtctcgccgcgacgacaacactttttttttccttgcttcgatctctcttagtaaaatatgtataattttcacatataaactctaaatgagttgattcaagatgtgttagaaagctgaaaaagaaatctaaaatttttaactcataaaataactttttagaaagaaaaaaaatctacaaaatttgtaatttcttcattattttattaaccattaatatttgttcttattaaatcctaattcacttgggtcacataagaaaatattgggctttatatatatatatggaccgaaggtccacacatttagcaagctacaattaagataaataa

SEQ ID NO: 245377 - DNA, 891 bp, Cannabis indica
ttgaagagatatcattatactgataagccattcgattttgttgttgctaaaatcgatcacaagatgtggttctacgatttattaacactgggaaggaataatatatgtcatgctcggttagtcatgtttgaatatgtcatgctgttatttttttgttaaatgttaatttgttgtttgttagttgtatattaggaattagtttttttattttattaagtattagaatagaaaatgatgggccataaatttatgccgaggtgcagaccaataatttaacttgagctcagagagaaatttaaacaaaaattagcagacaaaaataaagctcaattctattgcaacaaatttgtttgaaaatatccagtttcatgttgtcagaaaatgagcaattagaacttgtatgccattaacaacacaaaagaaaatataccacaaaatccatccaattcaacattggaggaacagatccccattggtttatgcatatagattctttagctcatatttgaaattggctttcagctgttccctctttatctttagagcagtagtaaccaatccagactctggtgtccatggatctggcaacaatttaatctttgcaggaagttcaaacttgtatagttttgcagctttttgcaacctgcatgtaagaaacaacttaaaaaaaaaatactacaatataaaaaatattattaataaaactaaaattgtgctggagtgagtgaacttccataatgagaggcgggtggcttccctaacatattttccttttaaattataaagcacataatcttatttgtgctcctagtcttattaacaccactaaagtaaacatagtaacttgtacgaataacttactgccacctttaaaagttatatttcacatta

SEQ ID NO: 245378 - DNA, 1877 bp, Cannabis indica
tggaaaaattattttgtcaactatcttgccaaaaaggactttacagggatggtgtggcggacataaagtctacacatgttgttagaattttctccatttttcttgcatggagtgcccgtctcctcatgaagtgtaatgtgatgtttgggctcaagccctttgaaaatttcttccttaatatttgtacccttatatttacctcttacacttttctttttatcagagcttccacctgttacagacatattataaataacgaacttatttttaaatttaaatttaataatcatattcatcacatattatataacaaaatatttgtgaattattatttaatatttgaacattattataattacaattcataatcatcatcagctattgatacaacattatcatcactatcactttctaattttaagcactcatcatttttctcttggaaattcctcttcttcgtcatcgacaatgaaataatctaaaccttgagtttgaggattaacacattggatgttttgaacttcaattgggtcaacatcatgatggacatagtcaacatcatctaactgtggaagttgtacaactaacttagttccagtagagttattttcctagataatacatgtatcccatcattgtttgggaaatctcacacattttgcaagatgtaatcattgacaagtatacagtctttaccattcttaagatcaaggatgtgatatatcaacttagtgtgagatgaaagtatgaacgatttattttgatacaattcccagttgacagaaatgctagtgaaaacaccataactatccattctagtctcatttatgtcaaacaacttgactatatgcgacggtttaaaacctttcctatacccaggcccgaccttgggcataggcgagctaggcctatgactagggcccacctagtccaggggccaaattttttttccccttttaaaattgtatattttttattgactttgaaaaatacaacattttttctaacataaggacccaaaaataaaaaaatttcctgtggcccactttgtttcagggctggccctacctataccactataggtgctggtttaaaattgtggcctatagtataggctacggttttaaaccatggcttataactatggcctatagtataggctacagttttaaactgtgtcctatactataggttacggttcttaaccatcgcctatagtgttcactataagcaacaaatttaaaccgtggcccatactattttcccaaatattttcaaccattgcctattctacctagcattaatgatgcttgtataggcgatggttttatggactgttggaaattctatacctgacggtgtaaaaccatcgagaattcggggttttttagtagtagttttgagtctctcattttcacagaacaacatctttgagaaatagtgactggctttgccagaacacaaatacaaactaagtgatgtcaaaatatcacttaggcatcttaaagtatatcccttgcatgtttttgtacttacccaatgtctaggttgatgttatatgtcaacctgggcgttgggttgtgaactgtcttcagtaaaataaccataactcactcaatattgatctgattgatacgattcaacttgcgtttcgaaaatatttcagtgctctgagttatccgtagcgggtcctgtcgggctccgtaaaatggatatttcattcgaaagttaattttcaccgtcaaatcatcatatatgatcagaaatatccaatttttattttattactttattcctatttttgtgggcctctttcacctataaaaggatagctcccttagcttattttttcacattcagaaaactacccataaggt

SEQ ID NO: 245379 - DNA, 1194 bp, Cannabis indica
tataaaataatttatattcagaaatatataataatattttaataatataaaaattttattttaatttattattatttttattagttttggataaatttttttttaaagagttggccgagttgatcgggtcaacccgccaatccggtcaacccgaccaaccgaatcctgccaacacgtgacccgccaaccgtgcccaattcgcgttcgggttcggttttatttttttgaacccaaaattcacaaacttaaaactcgataaaccagctcgatgttcacccctagtacaaagtattactcttgtcgagttttcaataatgtgggtcatatttttgttttgtttttcatttccatactttttaaattttaatagggggctatttaaaaaaagtctttgactaatataattttttaattcgaggaatctaagcattttccacatttaaaatccatggctaatcatagcaaatgattttgatctgtcagatcatgtgcctgctgttatgataataattaacaaattattatcaagtaattaattaatattaaaaaaaatataatgattcaattcaaagttttagggattgaatttaagttattgtgtatataaaattaaatcgaaatataaaatcggtaattattacaaattgaataccctgtaaacaaaacagattagattacatagaatacttattatttgttgctagcttgaaaacccgaccatatgtttctctttctataaatatatatatattctttagggttactattatatattatctatgtataataaatgttgcttctcttattaatggatcaaccaaattatatatactgtggaccaataatcttgatcaaaacacagttgaagaagaattaatattagagaagtcaacttaattattatatatgccgaactatgtaattattgtttacctaaacaatttactttttttatttgagagagcttgaaagtacgattacacactgtaatccgtttttcttttaatttcttttgcaaatccaaagttcgtgtaggatataaaagctcaaagaatcaatggcgcctagaagtatttcgattcttaatttaattatatcgtgtatacgttcatttaatttcgtattttcatacacgattatgcatggttcatattatattcatataaatttttaacaaattatgtccttgaaatg

SEQ ID NO: 245380 - DNA, 1034 bp, Cannabis indica
agagagagagagagagagctactaataaaggaaattaaataaatacagatattatacaaatagtaaaataatataatatatgtgggagagtggggtttttagtgaatgttgacatttatttctgtattattagttattattatatatatataatttttttactaaatttgtgtattacttagtagaacatgaaagcacctgtaattatgtgatcattctaatatgataatattaattgatgcgcaatcggtgaaggcgtgactagtgagcgtagattattagctagggactcggtctagtacctgcttttatttattttattaaattcctcaaagttcgaagttcacattcagattacaagagtcaataaaaaaataaaaattatactttacaagttttatgaaacatttttaattgtttgttattttaattatgatcttttatcatgaaaatgtgtgttcaatttgtatttagtaaaaattattgttttttattttattttagtaaataacaatgtaaaccgtgtgggcctgattatttataactgtaaaaattgttcttcttatataagttttccctaactctaatactgtggttcaatttctattctattcttaattagggccactcaaatattgaacataaattactgcacaagacctcttatattaaaatgtgcttttttctttatcattcctttatatataataaatattttcttttattatatctattctatataaagtgtgtctatataactgaaattcttgctttttgagaaattcatggacttttaatttttatttaataaaataataaaatattatttatatataataaaataataataaaacaaatcctattaatatttgaactgatattaaattttctagaatcacacctcatttaaaaagaaaaagtcacctgaatctattaatatttgaactgatattaaatattctagaatcacacccccatttaaaaagaaaaagtcacatgaatcacccctgccgtcacctaaattaggctcgcac

SEQ ID NO: 245381 - DNA, 1281 bp, Cannabis indica
gtattgatcgcccatcaatttatttcatgtatttgacaatataaaacttgcatgttcataatgagttatcacgtacattagtcattcaaaccaattgctataaaaagacacaatctttatataaggcgcggatgagaaacactagatcatcacatataattgatatatgtcacttcactattgtgctaacttttttctatatagtgcttttactatgtgtggtatagtgtgcaactaggctctgtcatactcacacattttagtatgtttctattatgtaagaatactctgcaagaatttatatccttgacatatcattcttttctattagaaactaaataaaagtgttgagtgtcgattaaatacgtaactgtatactttattgaaaataaaaatttcatccaataacataaatatttttgataaattttactttcattcacgtacttttgataaacctataaaaatatattaaatttaaattacatattgttggatcaaccaagaaattatgataacaaattataaagatgggattccgatcaggcgtgatagctaagtttcaactctaataaatctaataataattttcatgaaaaaaataaactccaataataatatatctacagttgaaattactaaaatacccttaattttagaggaagttattaaacttgttacttgtattcctttgcttcaatcttactctgtaattttattattattattaaataaattaaaaaagaaattcaacccaaaatcagaagaaagccatttcggtagagaagaagaagaagaagagtctctctctctaccagaagacttgggaagcaaaaatggctgaatctaaggagtcaacttctattccgctcagtcaaactgactccgaagatgagtccaaggctcccccaacctcacctagctcctcaactcgtaaggtttgtcatcattttgttcttttctttcgatttcacattattcacggatctctctctcttaatcgcaatatatacacttcattgttgaaatttgaaaatgcaattctttcaatatgatttctcagtagttcttcgtaagatgtgttgtatgctatgctttatacaatttgggtctaatcttagaaactgagtgtgatcaaaatctaggcaatgtctatgtttaagaacagtattgtgtgaattgtgtttctaaattggacttcattttaacttaaacctgcttaatttgatgatatgctgaagatattttgtatcagtttaagatttaaccaaattatttatt

SEQ ID NO: 245382 - DNA, 899 bp, Cannabis indica
ttatctgaaggaagttggaaaaaagctttctcaatttcgtccaaggaaaactcctcagcaaggaaagatttgtccatctcggagagggagattgtgatgccttgaagagcttgatggaaatcctcctcggaggggttagtggacgagaagagttggttaaaatgggattccatttcgcgggtgatgccttcatcgtcagagacaatacctccattagcaaggtggagtttgttgattttattgattttctttctgtgggaggcatgacggtgaaagaatttggtgttcttatcaccctgggctaaccactgggtcctagctctctgcttccaataggtttcttctttgtacagaagagagtcaagcctggattggagctcctttattttcctgatggtattgtcatcccaaacggaagcagatcgggcaaattccaagtctctctctagcctggtgatgtgctttttaaaattaaaatcctttttatggttccaattgttaagcatctcagcacaagaggcttgagtcgagacaagcttaaggatggggtcatgctggttcgggtgactagtccaagatcggtcaagaacttgattccaatttggatccttgagccagacgttctcgaagtgaaaacgtttgtttttgttattaaggcaagtgcccggaggattagaagtgttgagttcaagggcacggtggtcagagccgaagaatcccaaatgggcaagggtggcatcagggaaggtatctacccagtggttgttgacaatgccccagtcaagacgctcttgaatgttttttggggatgcaacattattattccacgtgagtaagggtccagtaggatcgagaggggagagattaaaagagtcaaggaaatgtctgaaatccgagga

SEQ ID NO: 245383 - DNA, 1159 bp, Cannabis indica
agcttaattattattaatattatgaagtagtggaaaagagctataggtaggcatatattattggacctttgaaagtaacgtatatataattgataaattgatcataaagaagcaatgtgtggtttattaattcttatgtatttgtatatttatatatatacaaaagagaattgtttatatttagtttttgacctaacaccaataataaatgcatttgctttaagatatcgatcgctggctcttatcttcttaatcagcaaatcacacttaattagcaagacggctcttctatgcttaaaaggatcaaaatatatataattttttgtacttatttttaggtgcatgcattattattattattattatttatattagtatatggatatttaagagacatatataaatacttataaattctttctttcttatatatgcatgtgataacttatatataagtacgtatgtgtaaccaaataagtacaatacacacacagtacttaaggaaatctaataagtttaattaatttggtccaagtataggataaccaatattttaatttgctaataatatataaggtatatgatatgaagcaataagcaatagagattgatttttattagcacatgggaaaaagttgaaaatcatgtggatccatattaatctttttaattttgctaactttaacaaaaatatataacgaatataaccaatgagggcaccaaagccatgtaataataaaagcaattacttttagatattctcaatttacatctcaactcctatatttctcaaagacatagattctcataatttacgtaattaattaaaggtgtttaatggattgaaaagattggaatcaaacctgtcccttttttcacaggaatatcattctattttttttttattattttatattgggcattattacattagtgtttgaaatttgatttacaggacctatctcgaatgggacgggaattacctgctttaatgggtaacgagtcggggatggaattttatataatcgaagcaggtttgggatggcatcggcctaatcattgggccattacacccatttttaaggcccattttttttgaagaaaatactttttttgaaaaatttaaaaaatactggaatttatgttaatttttacaaaa

SEQ ID NO: 245384 - DNA, 1369 bp, Cannabis indica
aaattggacactgtattttttaaaatagtactaccgtgaattgattttttgtcaaaataaatcttaataactcaatctagaggtgttatgacaaaatttattatattttttgtatttgttcgtgttaggaattattttcaaattggttatatttaaaaaaattgtcgaaaattaagttgaaggtcctatttgtactattctagaaaatatagagtttatttttgccatttaacaaaacagagagtccagccaatctcggcctcagatggttttttcacgaaggacaacctacgtccctctggcagggtgtctaggacaccaggctagacaatgtatgtccaagaagttggaaaaaatttcatccaaccccggttcagttcccaaatgaaccgactgtagttttctgctctaatcagttcagagtagtggtagtgttagattttaggttcaggagaaccactgctgacttccaagttagaaaagctacttgaagagatggtcaaagaatgaccagatgaacttacttggggtacgggctgatcttcaaagagaaaactgagcatatctgggtctatctgctgttcaccttcctagtagtcccacgggtttatctgtgtagatggaaagggagatgaacatacagacagtataaaagaacatctagatagcataagaaccatccaaataacatataaccagccgaccaacgtaaaaaacaccttgaatgggctggtcaagattcctaacagatctaaaacaatctattctacaaaaagaaaccattaaaccctagttttctgtgttcttcaagacccataataaaaaattaggaaatagagccaagattcaaccttttcaactaaaaatcctacatttatttatcctagcacacccatgcaaccagtgagggtgggttttccttaaactcgtggcatagaagtttttagcaacctccaacaataggtgtaaaaatcaaaaaagaaattagcaaaaatattttcaataagaaaaaaggaaggataaagtgacttactcactaggtgaatcttgaggcgagatctaaacggtgatgaagacaaactgtagatttcctcatgcgtgggtaggaaagaatacaaggaagaagctttggctttcttgaagtatttcttggttttctctctggattcttttcaagaagtaagaaatggaagtaaaaggatgaaggaccccccccccccccccccccaaaaaaaaaaaactattaaatgagaaattaatttccaataaaatcattatggagaagtgagaggagcaacatgggaaagtatagccgttagcacaatttcccacaaaatatgctttgaaattgccataatgaagattgaca

SEQ ID NO: 245385 - DNA, 798 bp, Cannabis indica
ataaaacccaacactttgttcttcatgcgagtgggcggagtggggttggattgtggtcgttcttcgcgcaggtgggtggaggtggggggggggggggaggtgggctagaaggtatgggcaactgatggggctgtaaagagagattatatttttttaggttctttaagttttaaaatatatcaaatatctaatattctgatatagttatttaagcatgtattaaaaatagtaaaataatcaaatttaaatttgaatatagttttattacatcacatattaatttaattcgaatttaaaccactttcatatctaaaattaacaataaacaataaataagtagaaattaattttttatttattaaggtatgatatttaactttgaaattaaatatataaatattttatagtgttaaacacattcttgacactgttatttgacagatatattgttagttagttagttataactacttgtatttttctgattttctgttatccacttgtatctctttatgcagtataaataaaggattgagctacttagttgagtaaggctccttgttcaattctcctctgtttgtttttgtttctcaaggtatctaccttctacatggtatcatcgtccaattggcttacgtccatggagtcttcctcctccgatcgtcacacaacgcttcttgctggacttgctcagaatatcccatggagtccattctccaattctctctcttcttctttaactgtaaggcccgcttagttaatttagaaattagcagttgtttatgattaattatgaaa

SEQ ID NO: 245386 - DNA, 1927 bp, Cannabis indica
agggcataaaacccaacacattctccatcattacaagaagaaacacgcattgccatgagtgattctttcacccagcagagacgtgaattccaagaatgaatagatcagtaaatcgtgatcctacaagcccaccaggcatggttaaaccatcagaataaggaggcaaatgaactgatcagacagctcaatgaaagggctagatctcgggttgaagaacgaccactctaaagagaccccgttcagagaaagtcccctaatgtgtcaaaggaaaatcaatgccctagggattgtgggcgaacctcaccctcagtgggctccactgcttcccaaacaagaccgcctcccatttggccaaatgatgaacaaattctttttaaaagggcatacgattggactgaccagttacaagacctgccaaaagatgaaaggaggaaatatattccacctaggcaaggctgaagtaggtcacgcagtggggaatcttggcccaacctcaatgaggatggtgtccctaaccacctaattgatgggcacactaatcgaagaactcataataagaccgggctcaataacaatattcttctttgaaattcttgaacacattctaatctgaggcccagagattctatgtttgatagaatgggccattaggttggagaagatctttggaataacttaaactaaagaagaataatcgggatggatacttcctaccataaaatgatcaactaagaatgcatgataggtcaatttctgtcgacaatagtattttaagttgtccccaaggagatttgattcttaggatgctttccctactaagttttacaagcaggatttatcctccaaacaaataccatctcaatttgaggacttggttgaaataaactaaggttgggagaacctttgaaagcctatatccaaagactcatgactgaagccacaaaggtcaaagttttgatagaagaagggcgatatactaccatttttaggaggcatcctacctttgaatgaccgttggaggcacatcagaaaaagattaaccaactgtatgagagtatttttagacctggctggcggtttcataaaatttgaagaagatatctggcaagtgcaaattggcaggcgaaaaatagctaccccatttatacacctaccacagctggggccattagtaccgcccaactccaaactaacaacaataatggatgaaaatggaacaataatggttccggccaaagaaatagcaagaagggaaattcaataattcccttgcacaacaacatccttagaaaaaaggagaagttcacctactttaccgtactgacagagacccccaagactatcctagttgtcacacagaccatttttccatacaagaagccccttttgatgaagaaagacattagtaagagggatcccaccaagttctactaatttcataaatatttcggccacaacactaatgagtataagaacttgaaagaagaaattgagtttctaataagaaggaatattcccacttacactggtatgtccaagccgaccaaaaccaagcataagtccaagaaaataatgactagttgtaaccacttatttctagccatttataggtcatcacagtggaccctaaatcgttggggatcaaacaaagtattggagaaatatgctcgaactcctagtcatgagccaagaaatgaagtcctagttataaaggaagaaatccaaagcagccaaaggtagaagagtctgccatcaccttcactgaagaagatgctgcccatgtcagattccctcataatgaccctctggtcataccactcaaatgggaatatgacggtgaagttgcatggttgatgatagagcctcttgcaacatcatcctcaagactgtgtacaagagatggggcttcattcgaaagcctaacacc

SEQ ID NO: 245387 - DNA, 1834 bp, Cannabis indica
tatccaggacaccatccaaaagaaaaatgattggcaaaggtgagtccaagcatggtctgtacctgttggatctctcacccattgaatcacccgttctttccatagctgctgatctttggcactctcggctaggacacctttcgaataaatacttgcatttacttagcaataaactgaaatgtaatgttaccaacttgcataaagattctccttgttacatttgtcccatggctaaacaaaggaaacttccttttcctaataaaaacagtttttcttctcatacttttgatctcatacattgtgatatatgggggccttatcacattacctcttattctgggcataagttttttcttaccttagttgatgatcattcacgttttacatggacttatcttttgaaacaaaaatctgatgctcttaatatcattccccaatttctttcatatgttcaaaatcagtttaattgtatgattaaaaagtttagatccgacaatgcacctgagctggttttcaaggatctttttcaaaaacttggcatcctacatgacttcacttctgttgaaacccctgaacaaaatgtcgttgctgaacgaaagcatcaacacttgttaaatgttgctcgcgctctttgttttcaagcccacatacctattattttttggactgaatgcatcttaactgcgaccttcttaatcaaccgaacacctactctaattctacaaaataaatccccttatgaactcttgtttaaaaaggaacctgattatacttacttacgtaattttggatgtttagtttttgcttcaactcttgcagctcatagaacaaaatttgctccacgagctagaacttgtatcttcatgggttatcctcaagaagtaaaaggctacaaactttatgatattaattccaaacaattttttatttctagaaatgttgtttttcatgaaggtatttttccctttcacaaattaaataaagatgccattaacatattgatccttttgtaggaccggttttaccatctcctgctatacagaatgttcccattcatgattatcccattacagatactaaccctgcaggatctacccaagatttcactactgaagacattaatgacagcaacacaccagatgccgttgatgacaacaataatctagctgctgctatcccacactctccacatgttactactccagctgcttcaatcccaccatctccacatgtcaccttcgaaacaccacatgagacaccccctgtgcccctaagaagatctagcagaagtgttaaaaagccaagttatttaaaagattttgaatgctattctaccattcaagatcattcttcaacaccacacactcttgataaatttcttgcttatacttggctcacaaactcttacaaagcttttatccttgctgttacttctcagaaagaaccctaaacatatcagcaggcaatacaattcaagaaatggttggatgctatggatctagaacttactgctcttcgcaacaacaaaacttggtctgttgtgcctcttccacctggcaagaaagctatcggttgtcgttaggtttataaaatcaaattcaacagtgatggttccgtcgaaaggaacaaagctcgccttgttgctcaaggatatactcaacaagaaggccttgaatttttttgacactttttctcctgtggccaaaatggtcacttttaaactattaattgctgtttccacaattaaaaattggcatatgttacaaatcgacatagacaacgccttcttaaatggtgacctccttgaagaggtctatatgaaattgccacctgg

SEQ ID NO: 245388 - DNA, 1015 bp, Cannabis indica
ggtagtagtggtagtagttgtagtagtgggaataaattgtgggtacaagaaattaggagaaggcaatactactggctgagttggtggcctcatagtgttgtagttccaccagttagggtttccggccgccatcatttgttgcaccggcgagctttgttgcaacacaccagctctattcataatatataattatatttcaactgaaaatgatcttctaactatgcctatatcctttcctttagcttttctttcttcactatttttttttcttggctttgtaagttgttaacaaaacaactctttgtagaacctttaagaggtcttcttactctagattaagtagtaagagagatgtggggtgaggataaaaaaaaaaaaaaaactaaggtcctgtttttgagagaattttgaattaatcatggagttttgagaacctttgtctctttgggtttcctttctctttctctttctttttctttctttctttctttattggttttgcttttgttcttcttctttcttttctttttttttttttttttaatttattttttatcttcttctctctcctcctttttatttatttatttattttctattttttttttctgtgaataaacttttactttatctcaaagtgggacagaaaaggtgtagcagttcccattaattaagaaaacaaaaattatatatgggtgttgctagaatgacagctgagtgtacgaaattcttcatatttacaaggcatgtgtcatgttggtgttgatgacgttgagtaaatctcctcatacaaataaataatatatgacaaaattataaatctctcaaactacaaatgcgtatatgcatatatgtataaactttttcatgatcaatagaaataaatttctcttaattttattgaaaaaagaaatttaacaaaaataactaaaaaataagttagtgtgcatgctctattcagctataaaggtaataaataaactagctagccattaaggtttttttaataagaata

SEQ ID NO: 245389 - DNA, 3042 bp, Cannabis indica
tttatttatatatttcatataatttttatatactttcattaaaatttaatgtttttgttaattttttatgcgttttttttcaaataaaatttattttactcctaatgtatttgaacacaattgtaaaatttgggcaaaatataatattgaccattttttaatcaaatttaatataatatttataccatccattaaaaatggtcttaaggtgtcaaacgccacaatgtctcaaaccgctaacctattacaagatgttacatcgatgtagtgttcgacacgttaatgtgtcaactaacaatactctttacaatacctaagacgtaaaaaatgttatatttgacacaaaaaaaaaaaaaatgactttgtaatctctttgtatcaattttagtattgtattttagtgcacaattaaaaaatttgatgtaatatttttataaaatagttttagcattgtatttcaatattttataaaatataataaaataataactctattattaattttaatatataaaataataaagaataaatgtaaaacgtttataatttaatataataattaaatattaaaaataacatcataataaatataaaaataatacattcattgatgcaaattttacatagtgacatattgtgatccaattttaaatcaattttttatatgtgacaaattcatataaacttatggcacaccatgaatacatttttttacaagaagaactatattttagttgttattcgtgttttcgacaagggacatgtggacataagacaagttaaaaaagtctatcagtgggctctaaacgataaaaattgggccagaacaatatcaagttggccttttaggagggcaattgcattgcatgaccaaacatacctctcccaagcataatctgtatttggagaacttaaagttttacgtagccagaaagacccatcagtgtgtatcttgaagccaacaatagtttttcatttatcgatctgcacagaataagaaatttacctttcacggatctcggacaaagaataatatcaaacttaaaagagaaactatataattgaagatcaaattattaatgcacaattaattatccacaatcaaaggacattacatgaacagctatcaccgtacagtcaccgcctcatgggctaggcttcacacgataggctcaaagtacagtatgatttgtaaataccccattagagggaaaagggtaactaagtataacctttttttttttggaacaaactaagtataacctttattactttataaatacgcggtattaggactgacaaaaattaccgcttatttcagacagcccagcccggaccatcacttttatcgtcaacagctcgataaaggaagtcggctttgggaaaaaagaattcctttgccaaaggggttggaatttcttaactcataaacttgagaagagaatagaggaactatactcattataatccttttggcttttctagcctaataaataatcaaactgactcgtggactaaggttctttaacgcccaaaccacgtaaaaaatttgagtgttctctcccgatctgtttcttttgattatttttcttcagttcttacattaaataattcgtttctaaaaatcttggtaaacattttggtactttcattaaaagctgaaggaagtagtgatatcatctcaaaattacattcagtaatcatggtactcacccgaaacaagattggtcttcattttactgatcctaatgctaaggcaagagatacaaaagatccaactaaggcgaccagtcatcacaagaaggatcaaactagtaaagatcaaaatcatgaagatcctataattgaagacgatgaatcaggagaaaatagttctaatggtattgaagatgatcaccaaaacatgcctgctgacggtggtactgaaaagaaggacaatccaaacgagtcaaatcctatggtcattatggtaaagaagttagaaagaactaaaaataaattaactcaacaagaagaattttatttacagttgcttgagaaaatgtcgaaatggaagttgtattaataacactgatcactggaaactaaaccaaacagacgaccccataagataacaccaccgaaaaagttgatcctaaaaattctgaaacttatgattcacgtaaggatacagggaaagcaaaagtgggcaaaactttggagaagcctcctcaagttgaacagtaaaagaaatctaaatttaccagccaacctcaataaaagaaagaaatcatgcctcaagacagggtgaccaaactaattctaaaggtagagctgcgtagaaagataaatgtgatgtcaaagccaaaatgcctattacctagaaggatacgaatcactctaatgatcttatcagtcaaagtaatgatgttgaagaagtgcatccagtattggaccacaatagtggaagtctctccaaagatgatcgatctgaaattctttgggtggccactaaaaaattgagttttaaggaccccctcgttgaagcggctgcaacctgtgaactaaaaaattattctgaatgtcgaaacaagtagagggtgcatcagtacattcattttaaggggtgcagtgtaaaagcacactatatcatcttatattaaatggggtgtacctacaatgcacccccttaaaagaatgtactgctatatcatctacctgtttcgacatttagaagaagtttttagtctattttttttttatattcgtgtatgttatagttatttaagatattctgcaaaattttgagaaattcagaataatttaaatataaaaagcagtgttcaaacagtctatttcacacgtataaaataaaatagtcacgggtgcaacacaatgtttgaactctatttttggcgtgttaaatttttataaattttttaaaattttgcaaaatatcttaaataactataacgtacatgactataacaaaaattttgattaaaaattatttcggataccgaaacaaataagggtgcaccagtacattcattttaagggggt

SEQ ID NO: 245390 - DNA, 1203 bp, Cannabis indica
atgtcaatggggggaatggcaagcatggtgattacaagtgactaagtcttggttcgtgaaccctcaggtacaatgctttccctagaaatctttgacaagtttctttatatgcaatgctttgttctgtccttagtcatgctgttgctgttaatacttattatgtcataatgcgaggggctttaatttcttatgtaatgataggtaaattgcttaacttgtgtgactctaatttcatgacatggtcatgactcatgggaagtagggtagaaagtatacccatcagtgttttgggaaccattatgcatctcggagaggcgtttggggaatcaggaaatgaagaggatgtcaacaaattgaaacttaaagcagagtgtttgaggacttcaattatgtttcaatatatctatatactacatgcgtttgtgtacaaattaaacatttgagggttatttcttggtttgggattcaatttcttctctctttttgagttgtgtattattattgtttcttagataagataagatagcagttctatttatttatatttacagaagcttttacttagttcttgtttaacttcttttacaaattaaaaaaccaaaatttttctagtgcaaatgaaataataattattattgctagtgtttctccttatattttgtatcttctattaggggttattgttcttaaacccatagttgctgaaagttgtcttttttctccagccaggcctactggccctccttgcgcttaggcgtggcttggttggggtctgtggtttcgctactgtgattgggttttgctactgcgactggattttgctatcgcgattaagtttttgctactgtagttagtcttgtttttatgacatggttgagtatcttttgtttaacttattgcgattagtcttgtttttgtgacgtgtatttttttttttttggtttgtattctttgttctttgatggctcatcatcaaattgttgttggttgttgagaataacaaacactgtgcggttgaaggggttagtggtgcaattgtgcatcttgcataataattgattgttcaagctaagtggttgagtgaacctgctgcaacagtttctactattgtgtcttttgaatagtggaagcaaatggatataggtgtttttaaggtaaattgttggctgacttgtttttttaattttaatcctagatgtgttt

SEQ ID NO: 245391 - DNA, 971 bp, Cannabis indica
cgaccactacataagctaaaagagaacacaaaaataaatacaaaacagagtaagtcaatcatagacagaattgaacacaacacaaaataatcaatttgaactaacataaccaagcataaaacaaggtaaatggaagatatattatgtggttcgaacaagaaataacaatatgttatccaacctactccactaccataaacagcccttagggcctttgatctttattgaataaaaagtcactaaatacaacaaaagtattgttaagaacagtttgacacactcaaatgaagctatgcttcaattacaaagattctctcatcttctttcctctcaactctggtttctctcttgctttctcttaattctttctctgcaacttggtttgaatcttagtatatctagctcgagcgatgatgacctgtttttacaagccttgaactgagttaagtggcataactgtcatcacaaaatgttaggtaattctgtcatgacattgcccaagcttgagaataggtttgtactaagaactaggtacctcaaaatgtgtagccaaacacaacactcagttattcttttaatcatatagtttacatgacacttcctcaattatattatttcaatgtagttttaggctcaatcacaagtgccaattacctcaagagatgacattttattattagtgcattctaatatgttgatttcacaaattttattctaaaaaaataatataaaaaactaatatatggctgtgaggtgccacttatcataatcgtcttgagaacctcaaggtactaaatagtattagtgataaattaacataaataaaaatttaatcaatgcatgtaagttattttataatttagtaatatattaataaacactataattttcaacttctttttttctttattattatagatttactataaatgaaggatttatgttgatgacaatgtacacattataaatgt

SEQ ID NO: 245392 - DNA, 1116 bp, Cannabis indica
ccctgaaatgcaacatatagaccaggatcatatggttccaactaccaagggtcagcctctagtttttgcgcccatcaaactagtagaagcacaagttgcccccaacatcctggttgacacaaaaatccaacaatagacacaaatgctgcttctaatccattagcaacaaccccaactttaactaaatttggcaggcatcttcaaaaacctgcatatttgtaggactattgctgcaccatgaatattcatccttcaagcacttatcacccccgtgcaaattacctatcctacaacaagctctctgcttcttttagagtagccatccttgctacaacacatttcatcaaatcgactacatttgcacaagcttgcaaacataaagtatggaacaatgcaatggacaatgaagtagaagctttagaactaatgacacttggattgttgtcccattacttccaagacaacataccattggtaataaatgggtctacaaaattaaatataacttagatgagtttgtggagaggttcaaagctcatttagtaacaaagggtaataatcagaaacaaggtattggctatttcgacacctacgctcctgtagcaaagtttaacaccctcaagttactttttgcacttgctgcaatcaaacaatggcatctccaccatatggacataaataataccttcttacatgatgatttgaatgaggatatctatatgaaatttccccaaggctatactcccaagggtgttatacctccaaatgctgtatgcaaattaaagaagagtttgtatggcctgaaagaagtatctagacaatggtatgcaaaagtcagcaacacacttcttcaacaaggttttaactagtcaaaaaatgataactccctctttcttcgacaaaaggcacggaatttcatggccttattaatatatgttgatgacataatatgtagcaccctttcccacagggacgccacatgtatgcttttacaaacttatttttaaattaatttaattaatttacgaaaagtgcagataattaaaatttttaaattaaaataaaaatataacccttataaaagataaaccactacagggatcccctgtataaaac

SEQ ID NO: 245393 - DNA, 909 bp, Cannabis indica
tcgttcaaataattatactattttaattattaattaaaataaaaaactaaaatattaaataaaactaacactacgtagcttggcacgtaacaatcacctagttagatatatattctttaaaatatactcacttttatagatgatgtctccattatacctcttaagttaatataaattatgtgttagatttaaatagaaagtgagagtgtgttggccaacccacccacaaaagtagatacattttaatgaaatataattttgtaagtatttttgattaataaatataaaaaataagtattcctcaacttattctatttttttaagggctaaattcttagaattagaaaaagacctgcaaaatgttttaaacgtctctattttcaatgtttttgaaaaatctctattttaaaagagttattaagagtggtattgacaatgacaacaaagcaaatccctttcggaaaggtgaaaatataaaactaattccttataattacgtatcatagattgattccaattaatgcttcattcacaagttattaatttgaaattttacatacatattaataatactttgttccatatatcgaattaagcttttttatggggctttttctctttccatctagtatgataagtttaagtataaccttttaataataaatggataattcaaataataataaaaataatgggtaaatagtttcatttatgaatcatgatcttacagaagtagaagtgtgcataaatcgatctaatctaatgacaattcatcgatctcattacaatcgatcgttaaatattggatatttaattgtgatcggatcatattatatattattttaaaatatccaatcggatcgaattggatgttagatggggtgtccaaaaatttaatatatccaatat

SEQ ID NO: 245394 - DNA, 562 bp, Cannabis indica
  modified_base (469)..(469): a, c, t, g, unknown or other
ttattttatttccttaattagaaatattctaataagcttcgggattcaccgacaccatcagaacacgatcgaggcacgtcttcagattggtccgacgcatagcagcgacttcgatacgcttcgagagattcgcaacgaaacaatttaacaaatttcaatctttgatcggagatgctattttactcatcctaagagctctgtcaaagattcttttgttgctcgaaaacgatgatataacatgtgtctgacatctttttcaaaggtcacgattggcaagattattctcatcttcatcgtcactattgatctcactcgagttgacagccatgatgaaatgaaaaaacaaataggagccatgtccaaagagttgaaccactatcggacaattgggccaccccgtcgaaaatccaacgcctctaatcggagacgccttgcacctccaatcaaccatgttacacctctctgcacncccagcgcctcaaagcgtatctgtagaactctgtcattccacaaccacggtcggcgtataccatatctagttgaatcgatggagctcattcca

SEQ ID NO: 245395 - DNA, 691 bp, Cannabis indica
aggccaaaatctttggcctttcggtgaggccccaaaaaaaaataacattactacaaggaaaatttatccaattacaaacaatagaatagtgtctagagtccaactacctctattctatatcaataaatatagattttttttcttttcagtatttcttgatcacaaaatatttcttgaccacatatttcagtatatttcatatatatctatacaaaatatttcttgaacacatgcactaattaaatatatatatattttcagtattatcttcaaaatatttgtaaactatacaaataaaaatatacttagataaaaaaaatgtacttagtttccatgatggttttttattattatttttttaaaagcaaaatgtataattaaattaatgaaatctctccatttccttaataattactaactaattaataaattaatatagaaaattaagctgacacaaaacctaattaattagccattggttactaaaaaattggtagtgatttaattacttgatatatttagttaaacaaacgagaaaaatgagttaggtgagaaataaatacttcactatggtgttattattggtcattaaatgaggtagcttggttagttatgaaggaattttgctgtctctagtcacagctataaacaaaggaaaggtttttttcaacgagctgggtgtgctatttga

SEQ ID NO: 245396 - DNA, 980 bp, Cannabis indica
ttttcatttattccgttacatttctccattaaattattccgatttcgattacagtatagtaaacgtgccataatattagtatatataaaaaaataattctgcaataggatgtggtgcaaacaagcacctataagaacacaagattaatcaagatactataaactaaaacaataaaataacagattaagaaatcaataagagtttaacaaggttcaatcacaaattttagataaaacttggatctaatccctggatttgaagcaactctatggctttattaataattggcaatgatgatgattaacactcaaatcaagctctcacaaactcactctaacggtgattcacacaagttacacataatcttacttgaagctatccaatcaaagacatgaaaaagctttttacatccctcaattttcactcaaaaaactagagaattattatgtcaatctaatatgtgttttaaagacttgatcacccctaaacaagttctaagactatcatatatagccccagacagttaggaaatcccaactgtattaactactagttggtagttattatctttgtgattaggacgaagtgagctacgatggtggttttgtcttgtaaggacaatttattgtcctttcattaatgatttaagagtgatgagactcttgggtacagaataacaaagtggagtctagtacatacaatatgaagttttaaataatattttaataattattgttttatttgggtttttttttttttttgtgatttaagcgtttatatattacatcatgttttacctgggactcgaaccaggacctccaacactcacacaaccacctatggccacttgagctagccccaagtttgttttatttgggttagagagaagcatccttgtttaagagacctttactaagaatgaatcagcttttctactttattctttaaaataactctctaaaattctttttttttttttt

SEQ ID NO: 245397 - DNA, 573 bp, Cannabis indica
aaaaagataattttgccatgataaattcattgcaaacaaacaagaaagaatatttttgaagagtctaatttgaatgatccacatcaataaaaaaagataagaaaaagatagttgttggggaaaatattaattttagtattttttttttctttttaaatgtctttttgttttgatttatgttctataattgaatcataacaattgccttactgattgtaagataataataataataacaataatatatttattaatgaattaaatgtatctcttgaattaaattaatgtcggctataaaaaataggtgtaagaccaatatggtatcaataatttcataaaacgataattcacatcttatcgtttgcataacaatatgaaagtcaaagttttggaaccttgattttttttttttttgttaaaaaaaataaaaaaaactttttttctttttggtatatttataaaaaataatattggtcaagtttattaaattctctctgaaagaaaggcaaaaaaaataatgtaagttttgaagaaaatgttttctttaatgttaaaattaagaaaaaaaatatc

SEQ ID NO: 245398 - DNA, 664 bp, Cannabis indica
ttctaaatgtgaaatttttgcttaacacatataagtttacttaaaatagtatgaaaatagatatacaaatgggtcgacccgacttgtatttagtaaatgagaaatagcagtaaatggccttatttttcactatactgaaagttagtgtctcttttttaaaataataaatcatatatccttttttaattaacaattgtttagtcaatctgatacattcaggatcccatattatttcgattctgcttttttagttagtataaaaaaaaacttttgctaccttaaatacccttgattacatataaggtattacccatgttttattcattgaaatttttttatgcagaattaaacaaaactctgtgaacaaaacacagcgcctttttgtataaagagttacttcaaaaattatattgtcatcacgtacattaagaagtttgtaaattgtaaatatgaatcttagaacgaataacacaaattgatgtaagatggtatttacatattacaaaatcagacaaaataataaaatactcattgtaattttttaggagctcacatggtggaactagtttaaaaatctaatgacaataatgtagagtatgttttcaatcactcttctactacgaacagagatttattttaaggttggcaaaaatatataatacac

SEQ ID NO: 245399 - DNA, 877 bp, Cannabis indica
actgaagttctacctgaaaaaacataaaaaaaaaaacagcataaaactttaattagaaaacttgaatatttgatcaggtattaattagagaaaattgaattggtataataagaaaatcacacttacagctcacaattctgtaggtacagaaacataaatttttaagttgattgaagatcatttttagggaagttttttgtgaactgtagtcttgttcagaccgtgtatgggctttctataatgtgtatattaataataaatacatgttatagcagctagatttagcatctctttcatctctttgtattgcattcttattttgtaaaaaaagagtgtatctgttgtgtagaggagatggtggtcatctctttctctatgtttatgtattttgtattgtctttagtatgtaatcaagtctacaaagaagaagaacaaataaagtgcaagcctttaggggaaggttcatcaagctttcgagagaaagtttttcaagtcttacctcaggaggaagcaagcactcttcaagtagatcgaagggagttcgagcacttgaagtttcagtaagatttatttgagaaggtagaatacatcaagcttgcggcatataacaaaagggagtctatttgtagataagtcaattactttatattttttagatctatctaattaatcttatatctgggcgtagctatgtggactagttacaatttaaagaattgttgatatcacgtataaaaaccttttgggcccgtttggtacgctggattggactgaactagacaagattggattatgctgaaagtaatcctgtgtttggtttaagaatagactggaattttatttatttctttttgaaagaaaaacttaaattaaagta

SEQ ID NO: 245400 - DNA, 552 bp, Cannabis indica
ccccttcaaactgagtgtggtttccacagtttgtctcaaagttcagagaacctgatgctagagattgacttggtgagacaatcatgaatctgagtagtagctggaacatgtttgtcattgatatgttgttgtaggactttctttcgaacaaagtagagatcaatctctatgtgtttggtacgagcatgaagtataggatttacagcaaggagaattgtgctctggttgtcacagcacacagagggaacaataacttgaggaacttgtagttcatgaagtagaaattgaacccaagtgacttcagcaacagcattggcaaggcttcaaaattctacttcagaggaggacctggtgtggtgacttgtttttgagattttcaagcaacaagatttcttccaaaatagatgcactagctagaagttgaacgcctgtcatctggatcagatgctcaatctgaatcacagaagacatcaagagaaaagtttgatacatgtattaggttgtttttagtattatttttaagttaatttttagtgtgtttttaatttagtt

SEQ ID NO: 245401 - DNA, 619 bp, Cannabis indica
ctacacatgacaaaccaataaaccatatgggattcagtcttcaccacaaccacacccacaccacaccaaagaaaaatataatatttattttacattacaaaaatatatctctacaaatttaataatgacgactttgcttacctccttatttcctcatttcctacacagttacttattatatgacttaatcatgtttttttttttccacaaattaatgttcagatttgtgatcatttgattctcgtctcttcagcatttttattattttctaatatttaacttgatatatataataattcagagatttcagtgttggaagattggatttcgttataagtatgtggatatatatatatagcaatttgctgatttctttcgagcttcatatcatatgagatcattggtatggttactatgataagtattgttattcttttgtgtacaaataaaaattcacatatataggatttgtgtggaaaatgtttctaattgttccccaactttttccttaatttattgctttttgtttttggttttttattcgttttcagtttcagttatatatgtaaaaagtgctaaccgatctgagttgagtggtaactcctaataattgaaagaa

SEQ ID NO: 245402 - DNA, 1664 bp, Cannabis indica
attagattcatacatctccaaagctctttccaattcaccctcacaattctattcctcactaaccatggatttcagcttacaaagacgctccgccatcaatctatcttccattgatattagccctggattattttctccgatcatcttcggcgctgctttctctgattccttctttgaagtttcagaagtagaagaagaagaaaactccattttcttcacttcagtctccttactgttctttacattttgttcaatttcaactctctgtttctcgttcctttcgcgaatccgatttctccatttcttcataatcatagccaaacacagaatttcttaatcaacaatttaccgttcattcagaattcaagaaacaaaaacattaagagaaagaggcaggattaccttgagcttaggtgaattcttgttctggtttgtcgcttcgttccttttttcgaaactgaaggtactgtcgaacaaggagattatcagttttctcggttcgaaatatggaaaacaatttaaggaaaaatgaaaaagaaaagagagagaggcgagattgaccttggagaaaaggttgatgatggtggtgaatgggaggaaagaccgagtagagccatggatgcagtgatttcatcaggggttgaagataaagccattgcctttttcacaaaagctctttctttctcttatgataagaaacactcattcgcttttccttctcaattttgttcgagtgtatgcagggcgggttataaagtatatagtgcctactgaaattaaattttggatcactatatatatataaatagtttaactattataaaaattatacttctagtgattaatttaattgcacgtttacgtttactacacagtattaagaattggaataaattaaaggagaaatgtaacagaataaataaaaaataatcagaatcaatatttataatatgttgtttactaattttttttggaaatggaatagtagtgatttatcttatttaatttattaggaaacgtaatcggaatgcttaaattgactaaattgcccttttgagttaaactatattatatggtagttattttgtaagacatattttaaagaacaaaattatcattatatatttaatattaaaaaataaaataaaaataattagaatccattacccttaatgacattccttatagaattggtgggggaagttctccctttcttttctcctttatttaatcaagttctccctttcctaattttaataatgtaagtaaacaaatgtaagggaatgattaccttactattcattcccattacttattagtaaacatgccattaataaagtttttaaaaattgttaagagctctaagaaattagtaattgatctcatgacttcttttagattaaagttaaactttttaccactacactaaataatttttattatattttcttctaatttaatattttatctatacattaatatttttttttcacaattttggggccttgagcattcgggaacccaaggtacacgcctagcctgcctactctcaggttcggccctgagtgtatgttacaaatgtctacgggtatatacactataaatagtacagtaattttcggcataaatacctaactaataggtaataatacctaagttataat

SEQ ID NO: 245403 - DNA, 824 bp, Cannabis indica
aaaggccttcgacctggaagctagttccctgaccagtgtcaaacaaaaattaggggaaagcctgaagaagtacatccaacctatgatggatgttgctgctaaaactaaggtaactgatgacatgaagatggtggatttgacatcaagattaaccagagggtccttgctatggggagatctccaacacaaaaaggtaaatactttgactgatgtcttaacaagagttcaaggattcataaacttagaagaagcttatgctcaagcctatagagtacttctagtaccttccacaaacatactagcaactaaaactttacagatgactactccatcaattttggcctccgaaaactgcctttacaactcttactgtttatggactacgtgctttcgcgcagccagctgcacaggttagtttttccaaatttagagcagtacaaatcggatgcagaacggtacaaacagaattcagagcgatacaaaccgaatttagtgccgctctcagacaaacgaaccaaaaaatagaagctctagagtctaatgtaagccaattccggagcaagaggacttctaagggtccaagtcagaatgattctgcggaaataggaaagactcaagagtctagacactccgagtatacaagctttgtagatactcaagagaatgataaaataatttaacctagtgtatacacaaaaaaggatatatgtatatatatgtgtgtgtatgtaaatataatgctataaaaaaactaaggtggtggttgtattattgtgtgggtagtaaaattaataatagtaattgattctcatgttagacttgtt

SEQ ID NO: 245404 - DNA, 2712 bp, Cannabis indica
ctaacagaccaaaaaaagttcaggggcacgatttagtacatgttaaagttacggggggaaaaattactaattagcctaataattatttaaaattttctaaaaatttacaagtatataactaataattacatgaacttaaaaaaatattgactaaaaaaatctcaaaaaattctagttctacaatgactaattaaaagatgtctgtccaccaatacgctttttatttgttttgatatttagaataattttttagtctaatttttttataattgtctatgttataattatttaatacaataagatataatatgttgaaaataagattaatctatttcacgtgtgtataaaataaaagagtttcacatgctaaaaaaaattgttttaagtaaaaaaaagtccaaatctaaaacaaataaaaaaaataccaaaagctccttatgagagtgcaaacttttcaaatactttttcttaaagatacatgtaaataaattagatgaaattactttgtatattcactttactttatttattttaatttttacttctttttttatatttcttaaaatatactcacttttatagatgatgtccctattagtgcaactccaatgcagttgttattgagaagttgcttcaaaaaataatattaaatgtcaaaaaaatattgacttttcaaccttaaatataaggtgggttgctgtaggagcaatgctgcccactttcttttctttttcaattgattaatttattaatattttaattaaaaaatattaaaatacaacaactaaaataactagcattggagctggccttagatcccttaagttaatctaaatttttcaactaatctcaataattaattagtgtggtaaaagctagagtaaaaaaattgtggttgtggtaaaaaaaaatataatattttttaaaaaatgttgcgtggctttaaagcatacatgtaaatatggctctctcttaaggtttgtaagctctgaacctgtctgaccagtcttattatgatatctgtagaaagacccacccactcactctttacttaactcaccagtcaccacactccctctttctctatgttttttttttttttttataaataattataggactttatttacacacatggcattcattagtgggtcccactcccagtcccaataaacataagaaaagactaagccattggtggttccacgtcccaactcggagaaagctctagtttggctgattaagacccgtaactcccacatatataaatgctaatagatactcccatgcctctaatattattatttaaaattaaattttattttatttattttaataaatattataaaaatatgtaaaataattatagagtaccactttatattgatactagacagtctagtacccataataatacaaaaattaatttatatttggcataaaatataattttgtgaaattttttcgtcaacttttactattatatattagtacataattataaatcttcatacaaaatttaatatgtcatttaatgcttacctaataatttattaaaaatataaagtgataataataatacgagcattgttattgagtactagtggtgcttagcatttttagatatgtcgtcttgcgattgcctagtgatattgtttaaaagttattatattaaactatatgagactcgatacttatttagaccaatagtgatattgatacataggaggcataatttgtaccttttagtatttctcttataatacaaaagtaaatataaaatttaataataattaaaaaaatcatttaatgtaaattagcatgctaactaaactttaataataaaatattaaaaattgtataatgataaatataaaaatataatatttattgtaatacaaattttgtatcatgctatattgtaattcaaatttagattattttttgttatgtgagatatttgtattataattaggcacactattagagtagaattttgacaaagttagctatatttggtatttgcatcacttatttgcatttatgctatacctttaaagaatattatttattgctctaaatatattttattaattgttttgggagttaataattagggatttttttttatttttacatttcaaaatagttttttttttacggaatttcacacagaatctcctatagcaactaacaaggcaacttaaatcgcaactaaaatttgtatagcaatccacataaaaactaccagagaaaccaccggaggaatccaaacagtaaatttgaaaaagaaagttaaaaaatagtatatattgagtaatttccctaataattattattttttggaataaaaatcataagatctattaattaataaattcgttcaaaacaatagaacgtacttcagaggaacagtcctccaactgaagcacacgacctgtagagaaacaagagtctcttgccaagtaatgagccaacttatttgcagatcgttttacaaaacacaaattgtgaaggcataaaataccgctttgaatcacttggacacacaccaaactatctgtttccaacatgactctatcccacgaatgagttgcaatccaactcaatgcttctttaatgcctattatctcagcaattttgggttgaacacatccaatcttccccttcttgaatgcttctaccatagcaccatgatgattctgagctaca

SEQ ID NO: 245405 - DNA, 1199 bp, Cannabis indica
attaggttggattttgatatagtccgaaaaagttattatctatgcgtctaggcaattgatggattatgaatagagttattctacagatgttgtggaattggaagcgacgatgggtggaacttgtcaaagattatgactgttagattctctaccaccgtggaaaagtaaatgaggtaggggatgctccaagttgaaaaggatctagggaaagcctatgaaatgaagagaacttcactaaagttaatcaatattacaatacagtatgatttattagaaagaaacaagacaaccaaaaaaagtgatccataactacatgagtataaagaaaagcctaaagtcggtggtcaagtatgaagagtgacattgtggaatatgtgtcaaatgtctaacttgtcaacaagttaaggaagagtttcaaaggtcagtgggaatatttcaactctatggtactcctaggttgatcacttcagatcgagatctaaagtttacatccaaatactagaggagtctgcaacgagcaataggtaccaagataggttgcagtataagttttcaatgtcagactgatagtcagtctgagagaattactcagatgtttggggatatgctacgggggcgtgtgtattagattttgagagttcttgaaatgagcatctccctctgattgagtttttatacaataatagttataagagtactgttgatgtggcaccgtacaatatattttatagaaggaaatgaagggaacacagaaattggaaagaaaggaaagttaaatcccagatttattggtccgtttgagtgtctaaaaagggtaggtcaggtagcttatcagctagccatgctccctgctgtatctagagattacacatgtatctcaatgtttcaaaagtatgaggtagatgcgatccgtatatggagttacgagattattaaattttaaacagacttgtcgtatgaggaataaacgttccagatttttgaatagaaaagaggaagcgttacgggacaaagattatgtcgctagttaaagtgttgtgcaagaacaacaagattgaaagccgacttggaagttaaagtcgcaaatgcgggagctgtatcccgagttgtttagataaatttcgagggtaaaatttatctaaggaggggatagttgtaatatctcaaaaaatataatgatatttaatcagacatatttt

SEQ ID NO: 245406 - DNA, 2241 bp, Cannabis indica
agcttaccgtgaaggttaaacaggcagccgtactagctatcgacaaccccttccttgtaaaatccaatggtcctagcttcataattgaatatgaataacctactaaagatgaaggaagatttggcaatcccgtcactgaagaaggtggagttcgtgattgaacaagggatggcacgccatctgaacccagccccaacatgatgaacaaaattccagaaagcaaggacactcttcccagttggtcctagaggtgttgacaaaaagagaatacaaaatttttaatttgttattcaaagacaattctatgatttatccaagctaagatggatctattagcatttactaaaactgatatatgattgtggtaaggtttgtttttgaatcaaaccaaagtcctagtagcatcgataaaaagaaccgaagaccagttacaaaaggaaatttatgatgcagaagccaaacaggggttaattaccatccacgtctgtcttggaagaatccatattgacaaaatggccaagaagattactaatccaagtcgtaatattatatgcgcccttgctggtaaaacaactaaggccaatagccatacctgcagcatcaataactttacatatcaagagctagagaaaccatcacagaactagtacttgttgcatataataataacctcttttatcattttccttgtatgtatattgtttgaaaagggttaagccaatttacttttatggcaatgaagtgccaggaactttaacatagtatgtaccgattacagagccaatagttatcaaatctagtaagttaaacatgaagtaaaacacttgatttaataaaatttcctcctgcaaagtgtttttcatcttgaagccatttctttgaataaatgatacttttgtcatcactggttagcaaagattaactaatgatatctttacagaagttgttttctttttttgaaaattctttacagaagttgttaagtacacatatatttgagaaattccttaataatttctatgaacaaattgggctacttaaaatcaaagatgagatactagaacataaaaagtccttaatctcgtactggtcacaaaagcagaaagaatgaacgaaaccaaccttaataaatcatatactttgtactttgaacctcctaaattgcgaatcagtgagaaaacaaatttctaaaaaaaaatgttaacaaatttgatacgagctaccattttcattcatatattccacgaaaagaaaaggatcgtgaatttgagctaaattactaaacaaaggtaaatggtccaacatcaaaacccacaactccagcaattcgaattagaaaactataacaaaacccaaaaccgataaaggaaaaaaatgaagcataccaatttgattcttgggtcaacagaatgaagaaacgtgaaaggcgaagagacgtactggccaatgggactggaagtggcaccggcaattagtcgaagaaccttatcggcggccaaagctccagtcggcaaccggttgacccagttcctggctccactactatcggtggccgaagctcgcgctcgaaagcttatgttcttctgaaggtggggtgttttaagagattggttagtgaaagacagaggtagaagacgaagggttttgggggaagcgaggttcggttttgcagggaaggtaaccgttggtacggtacagtgcgtgcaattcattggtgaggttccccaacagtggagctggagagttcgatgattatatccggttcgggttcttatattttagtttggcgggagtttaacgatttactaccgttggatttgttgatcatctaggtgatgaaggctcaggcccatcttgaaatttagataatgattaggggcttttccataaatactactacttttttttatttatttatttaactattattattattatggaagattatgaaccttagggatttgaggtttttaattcttcaaaacattacgttcgttgaatgataaaataatgtgaatgtttagaatccagcagggaagaaataaacactatgaaataaaggtaaaaataaagaaaaatagctatagttgtttactaaatttactgaacaattggctagagatttcttcatgtaaatggctgcaagcttcgtccaaaaacccatcaaaaacttctcaaagtactccatctccaaggcttaacaagattgcattgtgaaccttcgatctaatttcttaaatc

SEQ ID NO: 245407 - DNA, 1161 bp, Cannabis indica
tttcaaattcgaaaaaaaaaagaaaaagaatataggcacttttaggcttattaataaattttgcatgcatgttaccaatgttatgcactcctggatttccttgataattatttatggattaaatataggttgttattggcgaggaacgtttccatgggatttccggtatgtcatttgcaattagtttgtcacgacctgcactagccttcaactctgattccattctccaattatgttctggttagttcggtctttatctctgtatttgtgtcgccatagagtcatgctcgtattctactacttgctgagtttcttctggaatgttctttcattactttcaggaaatacaaaatctgcagactttctcaagacttatttgttgtcaagggatcattcgaatttgaagtctgagtttcagcgcggaaatggcaaggttggtttttcggctcttcttttttcctcttccagtagcagcagcttggttgtgtctgttggtactatgtagtgtttttgttttttcctctgtttttctaaacgtttgggatcatcttatgcagataactgttggctgtgttgagaatgttcctgcggtggatgtcttattgggggaacatgtatttttgactgtcggggacttctgctctacctcaaaatctgggaaatattgatttgttgtctcactttcattaatatttttttctttatagcgaaagggtgggttttgtttttcatttgatttttaattatcattgaaatttcatattttgtataaactaggatcagtaattattatcaaattggggaattatagattgaagcataatgaaattttggaatttgtttcattcatgcctttatttaatatgacttgatatataggtagtgcccaagttattccgaatccatcctgtgcttcattttttgtctaaatcattttttacaccttgtattttgtggaaaaacaaaagtagaataaagttaatttcggggaaaaaatagttgatctttatatttttaatagttgatctttatatttttggccaataagccattggtgacaaaactcacaaaatagatcaaaatggactagaacataacaaatgcctcgagtttttttttttaaataatgaatttattaattaattgaaaatagattttaaa

SEQ ID NO: 245408 - DNA, 2129 bp, Cannabis indica
attgatattgattgatattgattctttgaaattaaattgttgtacctatctatttacacaaataattatatgattaccctaacagtaatatatcataattttattaatctttttgccccttaaattggtgcaacatcttacaaagatgtgtagcctttttttatggtgctcatgacatacattattttgtctcaacccaacaaacattacactttacatgcttgaatcatgccataattttcatacaaagttctcaacactttatatgtttttgctttcttttttcctatgcacataaataagagaatagtaaagttttggctttttatctaatattatgcaaaaagttgtaaaacaaataactaacactcacaaaaaaggaatattcaaattcaatgaggaaaaacagtaccacaagaaaaaaaattaaagggaataaaagttgcttgtgagaaaagaaaaaccacttatatattcttcatcacttcttaacagctaagaaagaagtgattagcattgttcataaacaaaccaaatcccaagtcccaacaacatatctaaatcttccataaaatgtaattacatgaccttaaattagaaaataaaacataatataatttggcttttcactagaataaataaataaatataaatatgtaggtcacagctgttgattagtaagcaaacttttccgccgttggatcatttacaagcaacgcggtcatgccacgtggattctcaggtgtacgaaccactttttagtgcctcaaacttacgctaaccattcccactacttgaatttcaattaactttttgcatcttgtcaatgaattcgtttattccaatttatctcttttttatttttgtggataattatagtaagaaagcacataattaccaaattaccctcatgcattatctcaattatgagagacttttcatgtgacccaattgcatgtattttttgtgacagttggaaggtattcctaaatttaggtacatggattaataccatgttagaaaaaatgtagccatacatgttcaaacttgacatagtttacttaggtagagagagactaagacctcaaaaaagttatattaaatatttaatatttaattaaaggtcatctactaatcaaactagttattatttaattgaacgtgatagcttaacttctactaatcattgtttttaaatttagaatggttaaaataatccatttgggcacaattttttaattattacttttatagggacattattgtcctattcaaaaaaattcagtctccaggcaggcccgtaaagccagggacaactattaatgggctgcaatgcaatcctttaaaaatttaattttctaatatagaattgtatagaaaaagcaattaaatttactaattataattaggtttaaataagccaataaaaccactaataattgagattgatgaatgacttactgcaaaaagcaaaatccaaagttttaaagttttctaaattaaaggctaagacagaaattaatggagatttgttcaatacactaaaaaaaattggtgactcatgagtcatgaccattggtcttcttatgttctttattttaattaataatttatttattttaagtggccacgattataactgataaactagcttattcttacacatattttcattctccaaaatgccctttcactaattttaggtacgtggaactgtccatgcagcactagtaacaacttagtaatttattcatttggcgaaggttatttttgtaaaaagtgaaagggtgattggtagtgaaattcatttatgttttaatttttatttatttatggtaatatcttttaattttacatctttttgtaaatttatgatccaattaaatttaattattaaatattaatattaattgagattgtcactgtatatactttgtatacatgatagtaaaatgaagttaaaaaaaaaaatatgtcacgtatatacaaatatacacattcactatccaattagtatccatcgataagattgaattcatgtttcaaatttataatgctctttttgatatagcatgattttcttttttagatacttagcatcaaaattattaaaaatgacaccttataac

SEQ ID NO: 245409 - DNA, 1213 bp, Cannabis indica
cttgtctttgagagcttggaactctgttggaaacagtagcattgttaacaagtctacaatctgatccttggttgagacatggactgtctttatgactcctgcttgaattttttctctcacaatgtggtaatctatctcaatatgctttcatgttttctcatggtaaataggattggctgcaatatgttgtgctgccttgttataacaatgtaaaattgatggtccttgataatcaatcttcaactctttcaaaacagaacttaactaaacaatctcacatgttgtgtttgccatagcacgatattcagcttcacttgaagatctcaaaacattgtgctgctttttactttttcatgagatgattgagcttccaagaaagatgcaaaagccagtagttgacctcatagtatctggacatgcagcccaatccaaatcagtgtctgcctccagtttaatctctgatttggatgagaagaaaactccctgtccaggtgtgcctttcacatactgcagtaccctttgtgctgctgtcatgtgactagttttaggagtaacaagaaactgacttagtttgtttactgcataggacaaatcgggtctagtgatagttaagtaatgaagtttaccaatgattctcctatacagtgttggatttgctaaagaatcatccttgttatcttggctcagctttagattagcctccataggtgtagtgacaggttttgttctaaggtatctaatgtcttcaagcaattgaagtgcataatgcctttgtgacacaaaaattcccttgacagccctagctatttccagtccaagaaaatacttcaagtcaccaaggtcttataacttaaatctgtcattcaatctcttcttcgattttgccaggtgttgtagatcattggatgctagaataacatcatctacatagacaagtaagatgatgaaactagtaccaaagaacttcatgaagagagaatgatcagtggcagagtgatgaaatccttcctcaattagagcattagaaaatttttcaaaccattgcctagatgctcgctttaaaccatataaagacttgttcaattatcaaacaatgtaacaccccgatttcccgagatgtcacataggatagtccgtataaaacaatttaataagataaagacaatcaaatactgctttattgaaaaatatccaagcatgagatctcattgtt

SEQ ID NO: 245410 - DNA, 2104 bp, Cannabis indica
agttaattatgtgactaacttttggagaaatttacatggtgtagattatcaggttattaaactatttaattcaatatagtattttatgtaattgatttcactaaatacaatgcacataaaacatataggacaatcctaaataattatgtttctaatataagatgcatgattattaaaaaacaaactacgtaggattttatgtatggaaattaaatatgaatgtcctaacaattagcaaacaaataatcaaatattaaatgaaatgttaactgagtaaatattgagtatttttttaaaattataaccattgaaataaaagaaataaactacactacgaacaatctctctctttaagaactcttcgttgttgttccttgatgtagctttaagaatttcacaccacctccattcaccatttatctaccatcttataattagaagcaccttattaattgctaattaattttattaaattaatttaaatcccttatcttgtctttatttaattgtattaaatagttaaataattagaaatttatctaattctttaaactagaaatagtttaaaatatgtcccaaacaattaatcattaattaatttatgatattagttattatatacaatatataacatacagttagattttaaaattattttaatttacaaacaattagataagataaatatgcaattagattaatttaaagtaatattataatactattttaaaataaattataacaacctataacttgtttttaagaaaatatttatacatattaatatatttataaataattatcatattcatttaatataaataattaattaaaaaaactataggtttataataaatttttaaaattattattttaatataatttgaaaaaacatatcactaaccacttttcaaaaataatattattttatatagaatatatttttcttttatataataaaatataatttgacaaataaaatatataccccaaaataataataattaatttttagaaaaagatttattttaacatattaaaaaggataatacacataactaaaatatctcatatttttatctttattttattttctcgattaaaaatctaattattaaactaaataacatataattaatatatatctattaacacgcatatatatatatatacatatatatgcggttttagggggtgttggtcattagggccttgatggtggtggtctgagtgtcaagggagaccggagagaggaggagttggtcagtcagtggttggaaagccacctgagctagtgccaactcaattgaacttaggcgaagttcaagggtcaagacgacccaatttatagctcaacaaagcctcatggctcgggaggccactccaccatcatggtcgactattggaccccataggtccggttgaccttcccttccaatccatgggatggcgccggtcccttctgtgcttgattgcacggactcggaccctgataggtctatctcttttttctcgtcattcttacgtgcatgggcatgcatccttgcatgcacacatgagaaatcacgtgattaactcttttgagcctcatggcttgcaacaataactctttggaattcgtggctcatcttttgaggttcaaatatcgtcatctcaataaggtcgagagttaatccttaaacccaagctcactcctcaatggaggatttatgtattttttaatgatacattatttaataaaatttataaataaatttaaaataaaaattatatcaaaacctataccacaaaatatggtgtacaattcgctaataaaacttaaaaattcttaacacaactttgccatatgattaacgattcacattcatgcataaaacaataattccatccattcacaatatatctctgtatatataaatgtataaatactcaacacattatttaatttatacaattatgaagatagctcggatactaattattagtttttatgatccatattaaagttagaaaattgtagaagaaaaatttgataaaatagtttaatctaatatgaaccataggcccaaggattccaactataaatttataatagattaaaatc

SEQ ID NO: 245411 - DNA, 800 bp, Cannabis indica
atataagtttttatgtaaatttttgtaagatatataaaaaaaattattttaaagtgtaattttttattttaatttcattatgataaagtgatcctaattatattttcgttatatgtaactataattgaaatttgtactatatttaactttcaactatcttctcttctctctatataatttattttttttcaattttattttgacacattataccccataagataaaattcctctcgtcaatcagttctgttttcccttttggttcatccttcctattattcacatatgttcttatacagagctagtggcctatcggctatctcccttgcctcccctataaatttgttaattatttatataattatattctctcattacattaggatatagaaatgaggagcagtaggttcatgatgataatacttcagatacatttggtgattaaaacatcagttaggccttaattattaactctatataaaatcaagaatcttttagcacaaaaggttcactaattattttaaacggtacgtatataatcttttgtgttattacatggaactcgatattaaaatataataataataatattaatagtatgttatgtggtacttgaaacgaacaaattatttatttgtatgcgtaaaatgtaattgtagccttctaggtataggtttatttatactatgggcccgtttggcacgcagtattggattggattatttatcttaccctgctggatgggataaataatcccagttagatgaggttagctgtattagttatccagatttctaaca

SEQ ID NO: 245412 - DNA, 934 bp, Cannabis indica
aagaaaaccacaaagatctaaattgatttttgtttgttagagaataaaggaaaaaaatgaaaggaaaaataagagtagaaacaccacaataattgattttggagttccctctaaaaccaaaggtacgtctccgtcaagcgaccctctaagcagcttgattctccactatcggttacaaggttttggagattccttgccacaaaccagcaagtaatctcaaagccttttctcttttcttccctctatttttctggttttctttacaacatatatctctaactctctttatttttctctcatgtttctgagcattatttctcctctagatggcttctacaactcccaaaaagggttagaccgaagctaacttcaaatgagcagtttgatactccttttatagtgttgttgttgtatgtgatttaatgtgttgagctgagatgagctagttgagaaatagttataaaactgttatttgatttgcttgagttgttgacagtttgttagagtcttgaatgttgttatttattttcttgtattgtaaagacctataagattttagtctgtgaaacagaatcgactactccaagtgttataatggtttgttgaggcttgtaaaaaatcttgctttatattccttgtaacttgtttaaggtatttccttatgagacagttagtatggatatttatccaacacctatagttaatattactattcaaagacttgatattaatgatatattttgtatcttgagatggaattaaccattttttgaatttattgttttatttaaatttttttatgagcatgttatttatataattgtatagttccattttgacaagttgcttttgtatctatatttgctaatcttaattcagtacaggccttaatggtaataactataaggactagaaggagaatatttttattatt

SEQ ID NO: 245413 - DNA, 1364 bp, Cannabis indica
cacttataagattttttgcaatagcaggtacaagcaacacatcttttagagctagggacttagaacaatcagcaacagataattgacttgagccaatgtgagagatagttatttgatgaccatctcccacaacaagcttatccttaccgacatagtcagatttttggttcaaattgcttccatcagatgtcacatggctgctagctccgctgtcaacataccacatgtcactgtcaacaacctccggagaagcagtgaaggcagatggaggattctttggctgtgactgattgtggttgggatcagaacccatgaatgattcattgtacctgttatagcacacggcagctgaatgtttgaacttcccacacacttgaaaagtgggtttagagttgttgtttgaacatcctctgcctcttccttgatatccagttccacggctgtttccagatgagtttgagcgtccagtattgggattgtgagaggtattaggacctcgaccacgacctgagttgtcagatctgttggccaagtttgcagtgggagcaacaggaggtttcgagttctcattcagtgagtaaagacgctccactttactatcaaaactcaagagaagttcctccaattcttgccaagtagtacttggtcttgcctcaatttcagtacaatgggtaagtagctagcatcaagaccagatagtacattagatatcaaatgagcctcagggtacgggtcccctgctaaggtaagaacatcagaccaagctttcttttgtcgaagatagtcaatcatagatgtgttaccttttctggtggtctcaatggcagtacgagtatcatccattttagctttagagtgtgcaccatatagattctcaagcgctttccaaagagcagctgatgtagtgcaccccatgaccttcgttgcaatggtttccgtcatcgagctatacaaccaacccatgagaagttggtcactcacaatccaaagttcataatcaagattgagttgcacaccaaaaccagtctgaccttcttaagctacagcagggaaaaactcggggggacacaatcgtgtgccctagacaaagccatcaagacgatgtcctctaattatggttgataccatagttttccagagagagtagttgttgcggtcaagtttaagaggaaatggctggttcagggtattgaagtgttgtgagtaatttgtggtgaagctagactgagcttgcattgtatttgtggttacagcagcttggctggaccctagggcagggacatttcgagcagcattgtttgctttcatgggagtctgagaatcgccgatcgacattggcgtaggccaagcttggctctgatacc

SEQ ID NO: 245414 - DNA, 685 bp, Cannabis indica
gtaatccttacagtatagttaaaagaaagaagaaaaaaaaaaatacgtaataattttaaggccaatatagaagaggcagttcccgccaaaaaagcacgcatacacacgtgtgtgccacacaccctttgcgaagcacacgtaccactcaaaattctacaagtaaaattattataatgtttctttgaaagaggtagatcaaacttgaagcaatgatggagaccatggccatataaatatttgacttgaaatgaaatcccatgaaacagcagctgctcagctcaaacttcaaagttcaattaatccattataccaaaacaccttttgatttgatgatcaaaattaaaaacctatcttcctctttatcatcaaacccataaatgtctatatatttatatatatatagtactcattggtcccactaactccaccaccccttttcattcaataatcaatgctgtctttgaattcaatcaccccacttaactttcacactccatgactccactattaaaacagatctgtctctgtcttttctctccctcactttttttttctttttttttttctaacacaccaaaattaatattaacaaaaaacaaatacccttcccttgggaatctgcaaagccattaaatgaaatgaaatggctttgcccacctcaaaaaaaattaacaaatctaaaaac

SEQ ID NO: 245415 - DNA, 1386 bp, Cannabis indica
atttttcataaaccaagaattcttttatgtaggcacactttatatagaatagatatagatttatgtgtatactacgattgtaaatgtgaatgaattggctatacctatttgaaattgtttttatatgtatataaattctgtattacgtacatgcatgcatggttattatgattttttttttattgttttatctttaactcttgttattttaatttttcttttaacaattcaactcttgttactttaaattaacataaaatcgattctcttgcaattgaagatctcaaagtaaattaaattggaaaaaattattacgtgaattgtgaagttttcatatgtgtgttgaagttgattaagagggactgaacttgtccaaattaatgagaaatcgatcaaattaaaatcttgatcagtcaatgagacctttagaaattatcttttattatttttaaaaaaattcctttgatcatgtacaattcacgcattacttttttttagttattattactattttcatgtaaataatgagagaggaatataacatcacaatatttatggagggacataattaatattactacaaaaaaatgagatttttgccagtacatttttatgctagtgttaggtattgtactggcaaaatagaatttacttttgccagcgtacactagcaaaaaagaaggttcgcaaatccatgttggtattggaacttttgatagcgcaaaacgaaaagcacttataaaaataacttttcttagtgcgtaaatacactggtaaaagctagattcttctcagcgcaaatgtgtgtgggaaaaagttttacttttacgagtacattaatgcgctggaaaaagttttacttttactagcgcattaacgcgctgggaaaagtctaacttttacaattttgtaatttagattaatttataattgatattatttaatttaaaattttattaattatttattaaaataaattaaaataataaaacatgaaagattaaaacataatttcaaattgttctaattatatatgtttatagttataattgtctaaagttagttgtaacgccctaaataattaggcacgctatccaaaatacttatggaatcctaatctcctaattcgggattactaatcaaaatagcgcagaatttaaacttttaaattacacggagtgaaaataaaacttgtaatatatttaaacttttaaacggttgggatcccaaaaaaatatttataaacttattacaagtcatttttctttctatccgacctaagcggcaaatcagaattcaaaagttcaatactgatagacccataacccgcttggtctgatatggcttgaacatgtacattcctcgccctgctcctgaaactcatgg

SEQ ID NO: 245416 - DNA, 1658 bp, Cannabis indica
ggcatgatttggtatatgtcaatgttcggggggaaaaattgctaattagccctattattttatttagttttagaagttaatcatcagaagctctccctttcagtgttactttgaggagcaggataggctaagcattctaccatacgttcacacttttttttttccaaatataattactaagggtgttcataaaatactcgatgcaatccaatccaatctaatctatatatttatttatcttcattttaaaaataacaaatatattattaatattttaatgtaataaaataaaattaatacatggtacatatatttatcaaaacttaatatatgaaatgtatatattgtatgaagaaaaaaatataatttaaaattataactaatttttatttttatatacaattttttttcatgttattttttgtttatttattttaattttgctgttagagtatcgagatacaacaacaatttattttatcttgttgttaaataattaaaaataaatattttatgctttatatttaagtgattttggtgatgtcaaaaaaaaaaatattgattccattgaattcaaaatatgaaatttacatttaatgcaaatcaaatgtactataaacaatataatgcatattaggtgctctcaaaggcacatgcaaaaaagaaaagttcttttaattaagactaattaggatttgtacttttgaattttgacatatactaaatcatgctttctaaacttttaaggtcgttaaaaatgccttatgaactattgaaattgttaaatttaaggatttttatccaattttagtaagaaaatatctaacatgatgtaagttcaggagacatgatttaatatatgtcaaagttcgaagggtatgatttggtagatatcaaagtctagggagcatgatttagtacataaataatcactgaaatggtaaaattaaattaaattagacaaaagtccttaaatataacaacctcaataattcatgagagaatttttaatggccaaacaagttcaggaaacataatttggtacatgtcaaaatttaggaggtaaaaatccttaattacatgttacttccctttctaagtatatgatatcaacattggtatgattatgtcctttataagtatttatttcaacattttctttgcaatgaagagaaatgtaatatacaaagttgacattaaagaaggtattttttttcctttctaattagcaaacagttaagtaaatctagaatattaaattaaaattgacacttttgatccttacaattatattgcaaattaatttatttttaagtaaatatagtattaagttattattagtgcagaaggtctatcatctctcttgcgaaaatatgaacaccatggttatatccacggttgcaaggtcgctaatggggcgccccgggtctctcacatgctattcgctgacgatagttacttgtattgtaaggctaccttggaagaatctcgccgcattcaggaattactccgtaaatttgagcttgcatctgggcagcaagtaaacttggcaaagtcctcaatcttctttagtggtaatacaacaccagcggttagaagtcaagtttgtacatctctaaatgtttcagaggtggttgaaggaagtttttatttgggtc

SEQ ID NO: 245417 - DNA, 1000 bp, Cannabis indica
gtaataactttgttaataagcatgcatgattaacacttgattgaatatgttagacaccaattaatattgtcattttcttgaagatcatataattaagtaagaacttggtaaaactgtctttggttatatctcctttattataactttgttttcggttgctctactagggttccacgactcgatctacgataggggccatggcaggccatggacgtcctcggaaaggggcatctcaggggctgggtaagtcagggagagactcaaaattggaagctagaaacaaaagaagagaggtccttcatcaactacagacgtgaagaagacgaaatcgattgatgaagtgatggggatcgaaccaattgatttttcagatgatgaagatgatgaggatacgccttctggtttgaagcagggagaaccgctccaggatgtgtttcaagagccgctttccccaaaatcctcactgcaatcgattctgaggcaggatgatatacaagctgatttcacctattttctcaaggctaatcaacaatgctcgaggagcatttcacaaggtaatactgctattccccctgtcttaagatcaggtgctgttgtgagaaaccttgctagttcatttcagaatactgaggtggaaaagaaagctaagattactatggaagatatagaggatgaggtagaattttggaaaatcctcaattgtttgctatgtactaggtgctaatccaccattgtcaatcttggaaggattcattagaagagtttggaaggagaaagttgataaagctagaatgatgtcatatggggtttatatggtgtgattttgctcagtagctgacagagatgaaataataaatggaggatatgtcttcttcaacaaaagacctattattatgaaagcatgggatcccaataccaacttcaaaaaagaagaaattagaacagtcccaatttggatacaactccctgatttggatttgaaatattggggagaaaagtt

SEQ ID NO: 245418 - DNA, 1015 bp, Cannabis indica
ctagaagatcttgccacatgatagcgtggagctctctttgtcaaccgaaactgagagcgggtctcggtttcaggagattggaaacaataaactcagcttttctccttaagtgggcttggaaggctctcaccgacaattcaagcatttgggggagagccatacagactaaatatttgatgaatggtaacttcattgatgctgtatccaatagtaaggactcaagtttttggaaggctattctaagaaccagatccctcctagctgatcatgtgtgcagaaagattggtaatggtaaagaaacttccatatggtttgacccgtgggtgccttccgcaaatagatgtcctaccccgctcatggatgcaactaatggagtggcttgggtgaatcaattcatggatgataaccttcgttggaatgaggagatgattagaagatggttcgcacgggaagatgcgacagcgatcctcaatatacaactccctgaagaagatactaaggatgactggttgtggcttggtgactcaagtggggagttcactattagatcaacgtgccgtattgtcaatggaggaggctctgtaatccaggcagagcataggtggaaaaggatttggaaatcaacactccatcctagactgaaactgctgtggaggcaattggaaagagatgccttccaaaccagaggcaaacttgctggttttatggaaataactaacgacaattgccctgtgtgtggcgaagagaaagagactatattccatttgttatggcagtgcactatcgctaaagccatatggtttaattctcctttgggaatcagagtggatcgggttagtgtttgggactggaagcagtggcaagagtggttccttgatgattgtaacagacccccaaacatctcttttgaggacatcttgattgttgctctgtgtgttgtggaagctgtttggagagagagaaactccattgttcatggccagactcgaagccagatttcgcagttgatctctcg

SEQ ID NO: 245419 - DNA, 1137 bp, Cannabis indica
  modified_base (49)..(49): a, c, t, g, unknown or other
  modified_base (72)..(72): a, c, t, g, unknown or other
gccatgttagcttgtgctgagttggatggagtggagttggagcacttcngaatgtgaggtgaaacaccttgngaagctttttgcaaatctgtaaaagcattcaaagtgcagtgtgtccaaacttaagacagagttgacattgtcgtttatttgaagcagtattaactctgctattgcctctaccaaactgggaagatatgccacgatcatagaaaccaggaggggggaattgagagctatagtttccacctctcgaaaaacctcctctgaagttcccatgatgagagttgatgggcatattgtgtctaggaaaagcttgttgcttgtaaaaggcaagttgtcgattgaagttagcagcgcaatttgcttctggtgattccaactcgagtgaggcaacttgagcactgagatcaacatctttgtcagatttttcaattcttgattcagaggcaagaagtagagacttgatctcagcaacactataggtttcaagtcttgtatttgtggatatgacaaaggtgtcatattcacttggaaggcctttgaagatagcagcaacgtgatcacgagctgtgtacacttctcctactgaagcaagaagatcaactaaatgcttgactttgagaaggtaatcagacagagttaaggagcctttcttcaagttctggagttcggttcgaaattccagaactttagcagagacttgttatgtgaagtattgttcaagtttggagcagatctgcttcgatgtctcacaaccaaccattctagtgagtaaactttcggacattgacaagagaagccaagacatgagcaactgatcttggacttcccagtcaagataggctggatcgaaagtttttgaatgctgatcctgtttagtgagaaactgtggtggaggatcattagtgatataggagtagaggcgattgccacgaatggcagccataacttgttgtttccacaacaagaagttatgatcgtttaatcgaatggaaaggttatgagagaaataaattggagaaaactcatctaaattctgtaatctagagcgatgcaggggtggtggtcgttgattttgattgctgtgattgccggtagtgtctccagctccattgtaatctctcgaaccaggaa

SEQ ID NO: 245420 - DNA, 751 bp, Cannabis indica
cttagacaatcactctctaaactacttgtgtctgaattttgaagtatgatcgcatttcttttgagagagctaagacatatatataagtattggtgaggctttgttcaagttggtgtcaaagccaaatgttataactaatagctgcctttcttgttttaactgacaagtgctgagataaatctcctttctttatcttcttatgaactaagatcatctttattgaaatcatctttttcaaaaatttatttttttgaaggaatgccaagaatgagtggtacaaatatttacatcatttagggtacacagtatacatcctattgggtttttttaggggtttattgatgcctcctttcgtattcttgataacttaatagttgtaatatcaatagttttgtataacagtgtttattttagttatttaaagcatcttacaaagttttaaaaaattcgataatttacaatacaataagtaaggttcaaattatttatttcacacacgtataaaataaaagaaccacacatgtaataaaatataaaaaacttaattttcgacttgctaaattattgtgaacttctcaaaaatttgttggatgtgtttgataaatataatgtacactgtcatataaaaaatttaaacttaaaaccatcgaattttcaaaaactatcagaaagttgatatggtaagaagaggaacatgaacaatatatagggtaaataccattttggactctctgttttacaaaagttacca

SEQ ID NO: 245421 - DNA, 1020 bp, Cannabis indica
gacagcagccaaaaccagccagtagccacacccaaaagcactaccaacacttaattacatttagtaaatataagtttctttggaaaattttgaaaagacatttaatcataattttaagttgaacaactttcctaacttccaaacttaggcttctaggaagcacaagtcaactcgaagatgcatcggttcctatttatccaaagctggtacaaagtagaagttgtcaccatgttcaagacctgattttagatgtcttgagccttgattttgcacctgctaacaagatcagcaatcaaactaggccatttataaactcccagccaagagttcacttcctcaagcacttgtttagcaaagatacagctgaaaaatcatggtcacgagtttcaaactcagtatcacagactggacacaaaatattctgtaatgaaaccagtctactcaggaaatctctagtgagcagttaagaattaacaatcttccagtaaacaaatatgcgcttaggcaccaataagttgtcctaaatagctctagcatacttagctttagacccctctaacagcaggttgtaaaactatttggctctgaacttagtacctatcatagcaagccttaacttggcttcacccgtgttgtcacgaagatttcgcaacttcttgaaatacgagttggtatcttgaatttttgggaagcttcatatgtcattgtctttcagatagatagagtttatccattattcccacaaacattcttgtttgttagataaagtccaaagaaattttaccattagagccttgttccatttttcgtcttctcagaatccaactccaccaagacccttagggaggcaaactttttcccaagagacacggtgaagctttcccttattcctttggttctccaaagaaaatcctgacaactctcactactacaatgttagcctttagaggcagttttttcaaccccatttataaaaagggaagctaaagggtgtgaaatacccgctatgttcgaaattga

SEQ ID NO: 245422 - DNA, 656 bp, Cannabis indica
tgtcagcatttaacagtgctgttaaattgtgtatgaacggacaaacaaaaattgggaccttaggtattttcaccgccaatttttgaggttgaggactaatcgacatcaacctcaagtttttggggacttttgccgcaattatccctttgcaaaaatcgtctaagatattattctctgtacccaaggcactataacatattaagaggttgtaagttaggagataatatcatatactctgaccacattagaagtcaataaaaatattatgtttcaatattattaggcctttaaaaatatataatatttttgagagagatcacaatgctccacttttattttatccgactagtaaacaaaaccaaagaagaaacaaaaaataatcacgtttgtaggattttgacccttttgccgtacaccaacaaaactatataatatcagtatcaaggtcaaaaccaacctttatttgtctaaattaacccttagactaaaacggcatcgttcgaactccacgacaccaaacttagtgtcgtactgaactttgagtttaaagactctgatcgaagagtttagaaaccttagcatacacacaacacacaccctgcctcacaaactcgaaaccctagattctaagccagaaacccagaatcacacccaca

SEQ ID NO: 245423 - DNA, 820 bp, Cannabis indica
ttcatatttagggtgttaaaataacatacttgtgggtagatctaagatcctggtaaaataatttccaacagttgctgagtgtaagcttattgatatggaattgagaggctatccgttcacctgggagaaggggaagggcactgataactgggttgaagttcgtttggaccgggcattgatttctcaggagtggcaagtgttgtttcctacggcttcattgcatatctagaggtctcggtttttgaccattgtcctatttggattaatcttactgtgagtaaacatgtcccgtctcaaaagaagttccgttacgaaaatgcatggtctcgagaacctatgtgtcgcatgattgttcaagctaattgggatatggaggcgcatggttctttggatagaaagctaagttcttgcagcacgactcttggtgtttggggaagagatatcacaggcaattttaacaacaagatcaaccggtgcaataaggttctcaagagactgaaaggaagaagagattcagagtccatttcaatgtacaaagagacacaatctcaactcttcgaagttctctctaagaaagagatttattggaggcaaaggtctaaacaattgtggttacaagccggggaccaaaacaccaaatattttcactcatgtgcaagtagtagaaagcgtagcaatcaaattatttgtttgaagaatgatgatggcacttgggtcgattgggatagtggtcttcgagatgtgatggcaaagtactacacggagttattctctacttgaaattcgaattggcaccgtgtcattgattgtgttcatggca

SEQ ID NO: 245424 - DNA, 1058 bp, Cannabis indica
ataaaatagattacattgaaatggagttttatttagggcataaaacctaacaagaagttcatcctcccaaactcataatacccggacataccaaccattttccatttgttcccaaggacttcaaacctcaagtggagccagaaacgatggattccaaggctgaggagcttccgaccaatccaaatcaggggaaccccgtagctcgccatgggcgatcctcataagtgatcatagatcttgtgggcgatttagaaggtcctcctcaggctaataaagaattctagagaaaattttgcgtggttttagataaatccaggaagaaggttggcgtgctttctatcagggaatccagccaatccaagacctaaacctgtgcctggagatctttgtgccaacctctttctagtatcgagaaatttcatgaggctgggaaagtgatcttgacttcaggaattggatcttctgatgatgaggagaatgagttctgtgcagagatcaaggctctctacatgtagccgatctttttcaagctatgtatagtcggtctttctccgagctacgtgtagagggtctttctcaggctatatggacacggtctttcttgagttcattagcttctccgctgatcctttgtttaggcggatgacttaatggtttgcccttagtggcatttttgtaaatacaagtttgtaacccgattcaggtttttttttcttatcttaaattccttgtacgattttatttgaacttaatacaattgtgtttgcttgtgtttttattcacaatataataaattatattttgatcaaatgtacagtatttttgggtttccattgctcgtaatctttctatttaagtagttagtaatctacctaacttttttgatttttgagcagttgtcaattctgcctcgctatagcagttataatctgccttaagaaaacttaaatatactttaatggttttttcactttccatattcttaatttgcttgtatgaatagttatattatctatccattttctaggtcaagtgcttttatcaaggcgtcgcgatgc

SEQ ID NO: 245425 - DNA, 651 bp, Cannabis indica
tcctcaaataaggaaggcttacgtgcgtgtgcctcggacaagatgagtgtctaaagctcgatcacgcccacattcaccacgatcccgcacgcctagatgctgcaggtgaccgagttttctcggtcagagactaaatcctctctattccgcgagtgttttaggctgcgtgcaccctgtagcatgcccaagggtgattttcacccaaaaatccaaatttttgtgattatttcacaatttttaaaattttttaatttcaaatccctaagtatctatataaagtaatttttaatatttaaacataaatatcaaaatttgaaattaataatacttagttatttaatagatttttttttgataaatcaatgaattgtattgcactaacaaaattacaacctaagagcaccccattccaagggcctcaaaatatacatttttatctattcaacactttacatctttgtgatacacaatgaatgatatctataaagcaaaaaaccattctttatctacatttgatagtttctttgggcatagaaattggacacgagcctttacattccatttcacttcttcaacaattcggtttgtagccgaacttgcaccctgccaaataatagaatttctccatttccaaatgtaataaaccatggc

SEQ ID NO: 245426 - DNA, 1001 bp, Cannabis indica
ttttgcagttttttcctcttcgtcaaaaatggataaacaagtgctttcaagggataaaatagcccatcttgagtgccaaaacaagagactagcgccagattgacattttgtcaacctaggcaaatatcaaggaattttttcgagaattcttccagacatgttctccatttttagcaaggattaagattaaactatttttggggaccaaacgaaacttccaagtgacctgagactggacccagaaccaaggttgagacttggcactaggccgagcacccatgttgagatattgtcaacttgggccatttctatcagtttctcaaaaaaaagtgttctggggcattttttctgtcattagaaataatgaagatacaagcaaactcgagaaaaaaaccataatcccaagggcatcaaaactgagctcagtgcctagattgacaatcaacctggtgcgctggtttcgatcactaaaatgtgaatttccctccaagaattctctctgaagtagtcaaaaacgaggttggagaaatggcctaggttgagaaatggcctgatgcattggattctggttatccgattctgattctattttgaccattcgtctagtttttgacaataaatgagagtcgtgaagtcaaaatagtcaaattcacaacttcatatttcacttttttgacaaggtgatttactcgtaaaccgtgtagtttcgagtctcccctttttggagaacaacaaaatctttaagcactgttaactagctttgcaaaaacaaagaaaatggactaagtgatgtcgaaatatcacttaggaatcaaaaaatacatctccgacgcattttctcactcacccactgttgaggttaggcgttaggcccaatacaaccttcagtaaaatagtcttaactcagtcaatattaattcaattgacgcgattgtacttgcctgtcaaatctatttaaattctctatcaagtcttgtatcacacttcaatcataattttga

SEQ ID NO: 245427 - DNA, 1295 bp, Cannabis indica
ataattaactttttctttcatacactttttttcccaaattaattatttgtgtaagtgcttaattatgacttctccaaaaattattggtgatccctattaccatatagtaccttataatgcacccatcccaatagaaatagaagaaaatcgttggtttagcgttgtcttatacgccaagtttcttcgtgttccgctcgagcacgaagaatattccaatgttcttttcacaaattgtttacaattttcatacgagacactgatgaggttcaacagtactgaagccaaagttattttacaagacatgtttgctgaggtttttcttcctaattcagttttttttattacaaatgaaattattaattattgtaagaagatatgggatgataacgagtataatttaagtataaaagtagatgttgatgtttttgttgacgaactacctcaacccaaatggtctgatgacgataacaattatgatgaagatgaagattacgattacgatgacgatgatgataatgatgataatgacgatgacgatgacagtgatgataattcatatgagacagatgatcttgttgatttgattgatgacgttagtattgatttcatggatgatattcctattaattttgtggcggcggatgaaaagtcgatcgaaaaactagaaaaagtgtggatcaaagaagatcttatcttttgttcgatttgtttggaaaaagtttcggttggtttggaagtcactagattaccgtgcactcacacatatcatgaaaaatgtattgttgagtggctacaaattagtaaattttgtcccaattgtagagttgaaatagtttaataattgtgtagttacaaattgttttatataagttatgtaaacatctttgtgtatttttatttaaactaattacaatatatcttataatttttaaactattaagaatttttatgaagaaaagaaaatcattttaaatagttacaaaatattcttgtataaaaatacaaaatttgagttttttttattgagaaaagtacacttatattaattcacttaatcaaatataatacaagagacataattaaaggtaggcaatcatccaataagatcaaaaaagcaaattaagccaaaacataaaccacaaaaagtgtaattctatgtattatatttgttgatataaacctccacttacattgatacataaacaacatacaaaggacagaactgtaaatacaagtaaaatccctaagttgaccttcggtctctaaaaaccctaacagaaattagttagaatgga

SEQ ID NO: 245428 - DNA, 1046 bp, Cannabis indica
agtttagaataagaaagaaatttagagataggataagaggtgttagatttatcctgtagcagattgtagcattcaaaatcttgcaaatagctaggaggtttggaaactcttgttgatcttcttggtgcagcagcagtaggtgatgtagaaggttgctggtgctgtgttgtaggttgttcagcaatgttttcttgctggttttgagcacctggagcgtctgcatcagcagtaatactggtgttgtcgaaagtatcctgcaagcaagggttaggagagataacacaagtatcttcagctgggtaatcagtgatgtgtgtgtgagttatctcggagtgtggaagtacagtagttgtgaaaggatcaataatatgtggattagtattaagcctatgaaatgggaaaatagtttcatgaaagattacattccgtgacacaaatatttgtttggtgttcaagtcatacaacttatagcctttgatacctcttggataaccaaggaaaacacaagttcgtgcccgaggttcgaatttggtcctatgagaggtaatagtagaagcgaaagctagacatccaaaacatttgagatcactgtaatcaggaggcttaccaaataaaatctcataaggtgtccgtttttggaggttaggcgtaggagttcggttaattaagaaaacggcagtcaagaggcattcagtccaatattcgatgggaactttagattggaaaaataatgctcttgctacattaaggagatgctgatgttttctctcagcaacagcattttgctcgggtgtttcaatgcaggtaaagtcatgcaatatcccatgtttggcaaataattctttgaatgcaagttcgggagcattgtcagacctgaatctcttgaaaatgcaattgtattgagtttgcaaataaaaaataaagtcaggtataatagaaaacacatccgatttttgtttgaggagataaacccaagtaaatcttgagtgatcatcaactaaagtcaaaaaatatttatggttagaatgagaagtgatatgataagg

SEQ ID NO: 245429 - DNA, 1550 bp, Cannabis indica
ggcttttgtatcaaaatcgataaatgaatcaatcgaacatcgtataaagttggtgattttattgctcatgattctcgtttttacgataaggattacatgttctttgagacaagagaacgagctttggaaggagtcatgaaagcactgaaagatcccatggtgaagatgattgggctgcacggaatgggcggcatcggcaagacaacgcttgcaaaagaaatagctcgacaagccaagaaggaagcaaatttgtttgataaggtgatcatgggcagtgccatttctcaaaagccaattattgcaaatattcaatttgaaattggaaaagatcttggtgttgaatttggtaataatgaaaccatattaacaagagcaacaacacttcgaaaagagttgggtaaaaaagtgaaggttctgattattctagatgatatttgggaggaaattgatctgtttgatgttggcatacactttagcgataatccaaaaggaagtaagattctatttacttcgagacatcagggtttatacaatcctacagttgagttcgctgtccattctttagatgaggatgaatcaacaaagttatttacgaaagttgtgggcaaaatacttgatgaaaatcttgattgctcgagggaattggttaaggaatgtgggggacttccgattgtcattaatacagtggcagctgcattgaaagatgcgtcttcatccaaatggaggactttcttaaatgaaatgagaaactctgcccctaagagtattgaaggcatggagtcaaaggtgttctggtctataaaattgagttacaattttttggaaagtgaagaggccaaatcactattattgctttgcagtatatttccagaagatagattcatatcttattatgagttggtgatatatagtgtgggttggcgctcgtttcagaatgtcaacacaatgggagatgcaaaagacaagttaagcactctaatagatactttgaggaaacattgtctattgctgcccagtgatgaaagcgaatctggtgtcaaactacatgatgttatccgggatgttctcaaatcagttgccaaggaggaaggtctgttttctttatctaagtatgaagaactttctgaagaaaagcatgctaatcttgctgtagtgtcattgcttcctgattttgagactcagttgcctgacatattggcatgcccaaaccttgtttcattcattgacatgtcttttgatgaaaaacgtctctcagattgcttcttcgcagaaacgaaaaaactaagagttctgaagttaacaaatgtagatctgctcacaccttcatcctttagttgtctatttgagagtctcgaaattctttgtctaacctattgtgacttagaagacacaacatttctcggaagtttcaaggaattaaaatgtctagatcttgcagaatctagatttaaatcattgtcaaaacaggtgagtcagctaactcatctacaattgttaaatttagatgattgcaaagatcttgaggtaattgaacctgatgttatctcaag

SEQ ID NO: 245430 - DNA, 618 bp, Cannabis indica
tattgtgtctttataatcaagggaatctccttggcaatgcatgtggatggtccaaatagcgggaccccattctctatttacactacattataaatgaatatctacacaaattatgcattaatcattgtacaatttagtgtctaattatataatttattttattggcccgtttctatgataattatttaggcagccccatagattaatatctttatgttattcgcttcatttttatatatctttgtttcttaattttttttttttcagtttgattatttgattatttaggatttgttagtttcaaattaactcatgttttttttaatatttgatcttttttaggagaattaccccctatattattttaattcctttttaaaatttacgatttgggttgctccagagtctggtggcttctatataggttgttatacgaattttggttgagatttaagttgttctgttaattgctataaatttttttatgtgaaattccgtaaaaatgtaaaaataaaaactattttaaaatgttaaaatgaaaaaactactttcttttatttatttatttatcttttttttttttgtcagaacactttattcgattagtagaaaaaaaaa

SEQ ID NO: 245431 - DNA, 1058 bp, Cannabis indica
tttgttgaagtgcttgggtaaaagaaacttccacttgagatgaaaggtccaaaacacccttacccttatcaacatgattcaatccatgcatgcttttatgaaccatattaccacccacattctcggcctcaatcccctcagccgagccactacccacaaccatagaacactccccctccaccataggcttacccatgccacaatcgggtaagtcatgcatcaaagaacactcaccaacctcaccttgattagcaactacatcacccaatggctcatttatctcatccgattcacacattggcaccaccttccccaaatcattaccattcgtttgagccacacccgcctgtgtgccattcaatgaagacgatacaccagcagccacattaccaccttgaccagtcgcatgcctagacttcaccccttcatcacgctcacggccctctaacacagatgtgggagccaagtcctcttgtgtaggacctgaataacgaacccgccccctctccacagcagctaaaaatctcgaggcctctcccatagacatgatcggcctattagacggcgaattgtcacgttttctctggtaccgaactcgatcacgcggtggcgaactcggagcacacatccaagatccatacctgtgggttacataatcttacagtgtgtattagaacaaaaatatgaacaaaaatatgctgtttcattttctctttcccaagcctgtcccaactaattaagtactgacatgtcatttaatttgacacatcatctaacgaaggtcaagagtgaaaaccttcttccctcttctgttaattccaaacaatttttccttcatttatattctttgggtatgctatgccataataatatcccttcaaaccttctttctttattgtcatctttcttatttttgaaattagagagtttattctcgggaaattaaatatattgcagagaactttttttttttttgagcggaaagacccaaaagtgaaaaattatttagcactacaaatattcataacttctctcttaattcaaatcattttatgatc

SEQ ID NO: 245432 - DNA, 2408 bp, Cannabis indica
tatatatattacttattaaaaaattagtctgtgtaaggcttctcctctctctctctctcatcgcgacctgaacgggttggggctatggctaaaacgagggcaaaattgtacgggaaggtgagcgctgaagcaaataaacctatgaaaactaagaagaaaggacctacatctactacggatgtgaggaaaatgaaaacactggaagaagtgcttggagttgaggcgttggagttctcgaaggaagaagatgatgcccctgttcccacatccgaggagatgaagcagggggatttgtttcaaccaccatcaactcctcgatcatcactgagacaaatccaattacaggaagaagtgcaggcagattttgaatatttcctaacagcaaattgaaggtgctctacctctattgctcaaggtaatatcacaaccctccttgtagtgagaactggtaccattgtgagaaatcgggaaatctcttttaaaaattctgagcatgaaaataggccaaaagtaacgataacattgcaggatatagaggatgaggttgaattttggaaatccttattagtctgctatgtgttgggtgctaatccaccattgtctgtgttggatggatttgttagaaaagtttggaaaggggaactagaacgagttggtatgcttacatatggtgtgtttctagtcaggtttgattcaattcagactagggacaaaattctcaatggtggttatgtgttttttaataagcggcctgttataatgaaggcatggaatccagatactaatttccagaaagaagacattacctcggtactaatttggatttaggtcaaggacttggaactaaaatactggggtgaaaaatcccttttcaagatagttggacaatatggtgccaatgtcaatttttcgattacttatgagtggtagcctttgatatgtgcacattgcaaggggctggggcacgcaacaactgactgcaggaagaaggaagggaaaacatagcaatgggttgtgaaagagaagaataatctagaacaaaagggagcagtagatggtttggtggatgcagatggctttcaacaggttctaaagggtagaaaggagaaggggaaagaggtgtttgctgctgttgcaactagcaacacctttcactctctttcgaagcaagaagggacttcttactatgatggggagatggctgatatccaagtgcaagtaattacaaatgggggccatgagatactcacaaaagaacatactagaggagggggagatcctcctcttcaaaatggataaaatcttgagttggaatgtccaaggaatcaacgaccaacataagcagagtgcagtgaaggatttgattcttcgacagaaaattggtcttgttggtttgctcgagacaagggttaaagcccaaaaactttgggctttatatcttagtatgtttaaaggttggtgtttcacatctaatattgcatggcacaaaagagggagaataattgtggcttggaatccgaatagtttcaatgtaagcattcttaaatccattagtcaacttattcatttacatgtttctactattggacaattgggaaatcctctccaagtggatgctgccacgaaggaaaggaataaactcaattttcctcgagttctcattgaggtctcgatacatcaagactttcccgccaacatatcttttgaagatgaatatggtcccaatgtcaatttgtcgattacttatgagtggaagcctttgatatgtgcacattgcaagggactggggcacgcaacaactgactgcaggaagaaggaagggaaaactctacaatgggttgtgaaagagaagagtaatcaagaacaaaagggagcagcagatactttagtggacgcagatggctttcaacaggttctaaagggtagaaaggagaaggggaaagaggtgtttgctgttgttgcaactagcaacacctttcactctcttttgaagtaagaagggacttcttactgtgatggggagatggctgatatccaagtgcaagtaattacagttgggggccatgagatactcacaaaagaacatactagaggagggggagatcctcctcttcaaaatggatagaatcttgagttggaatgtccgaggaatcaacgaccaacataagcagagtacagtgaaggatttgattcttcgacagaaaagtggtcttgttggttttctcgagacaagggttaaagcccaaagactttgggctttatatcttagtgtgtttaaaggttggtgtttcacatctaatattgcatggcacaaaagagggagaataattgtggcttagaatctgaatagtttcaattaggggtgttcataaaaaccgaaaaaccgaaaccgaccagaccgtaaccga

SEQ ID NO: 245433 - DNA, 1501 bp, Cannabis indica
aaaaaaaaaagataaaaaattgagtttagcataaattttttttatataaacatatttttgatatagtgcaaaacgagatagtttttaatatttttaaattaaatagttaacttaagtatataaactcaaaattttattttattatttgttattagatcaaaatctaatgatttaatatttttaaaattaatatttatagttaaatttctttagtaatcatcaatgagtaatacccattgaaaatcgttcctcttatatatataggaaatgttttagtggagacatcacttttgtccttattgtaggaatgtttatttattttttatttttggtacctaaaaaaattgtatctcaatttttttatatgatggtttacattaaaagtatagtatgtatctattcaatttttgaaaaattctgaacaatttactgtgtcaaaaataaaatttaagataaccagttacataagtataaaataaaataagcatgtgtgatactctctacttaaatcctatttttgatatggtaaattattcacaattttttttgaaaacaggaagaatataaactatagaaataatgtacagtaccatataaataatttggtatataagttttgtatataccgaaaacaaaaatgttccacggtaaaggtaaaatgatttgcctccttaaaaattctcatttatatataggtgcactcttaatggatattatccatgaatgagtagtattagaaaatttaagtttttatgcttaatttttcaatctaattagaaaaatctctcatttttatattatatggattgttctatcgcttagaaaaaaaaataaaaaaacggctattcaaaataaaaaagtgttgagtttgacttaaatattttgtatataaacatatttttgatatagtgtaaagagagatattttttaattaagtagctaaaattaagcataaaaatttaaatttctattttattatttgtcattggatcaaaatctaataatttaatatttttaaaattaatatttatagtttaatttatttagtaactctcaatgggtaatgctaattgaaaagtgttccatatatattggagaagtcaatattttgactttcaatacttgaacaaggtcgttcaatcagaccttacgaactgaggtcttgattcaatgaaatattaagatgtgccttggtggtgcccaaagagagcctcatcagactgaatatttcgagcgggttcgacccgaacccgagcaactcgcctgaacctgaaccggtgaacctgtaatttttttttaaacaaaatgttcgggcgggtcgggttcaatgcggtaccctttgggcgggttcgtgggttgagttttaaggagtaccgggtttcgggctgaactcgaacccgcctgccaacccgcatatttaatatattatatatatatttttattttttcattacattttatatatatattaattaaaaaataaaaagaattaaaaataaaa

SEQ ID NO: 245434 - DNA, 994 bp, Cannabis indica
catccacgtcgcctgaatcatttgcttggctatccctttctttgttagcttgggcgtcattatccgcaactgcacccgctgcgatgtctccttcatgtggtggttccatgtgggtattgtcgtctgtagccgacggttccatattccacaccttatttttgctatagagtctgaaagcacaccaataagttggatcaccgatatctcatacaaagtattttgctcgaagaatcgttagttcgtggcagaattgtccatatctctaaagtgaataattttgtgtagttgagtttcacatgcctctacatatggttttcttgctcatattcccatgtaacccaaaactaataccaaacacccctaagaaaatttcaaatcaaggaaaccaaacttgaccaaatgaccaatcaagtggtttagtacaattatgttgaaaactaaattatgtacaataatgtagaaatagtacaaaaaccccttaggctagctcgtaagggagggatggaaaaaaagaaaaagaagacatggagtttgactcaaatatttttaagatattaataaattataatactattaaggtacactaaaaaaattgaaaagataatacaataataataaacaaagaaaaatctcatattagtacaattatgcagagatattatattgcagcagattcattatcaatattatttcaataataatttaaattggtggccgactatatacaatattaaagttgttgcatctggaatgtatatgcaaataagtaaaacaaagttaaaatataattgacttagattatctttaacacatgatgcatatttttagttaaatttatctaaaatatactatgaaattatattttgcttaatttttatatttgtgttctaatacacaaagtgtaaattagttataaaagtgaagattactaataaatataaaagtcaatactatcattaataaatatacaaaacaattagagtaatttgcggca

SEQ ID NO: 245435 - DNA, 1070 bp, Cannabis indica
atcgcatgctttaaggtttgaaagtttcttataaaacattgtatttacacctaaataaagcgaagtttgttgtatattgttctggaatggagttgcagggaagttcaacaagttctagatttctcatgggctattctaagagtgaaatgtaatttaagtattcgggggttccaatctgttcaaaaaggctacctagaaccgattctgaggttctagagaataaaatgagtaagtgaattagaacatggagcacatgcaatctgtcttttgcaagaagagctactttagtcaattcagttttggtggaccaggtgaaaaggaatggagcgaagtttgcttacaaaaatcagcatgtggacttggatttagagactttaatttcataggacacagtcattattggaaagtatatatggatcattgcaactgaacaagataatttatcgatcaaattaacagatctataatgtgtacttaggtacgagacacgaattggcgagtttataaggtcccaaccactagtagttggtactggcgtgaaatagtatcaatcaaggataaatttaagagtttcattaatattcaaagatttatgtccaggcgtatcaaataagttggggttatgcaaacttgaggctaattagaacaaagtagattggaagcaagaggtatgggagagattgagcataccaaaacacaagtttatgctctagttgtgtatgttggatcatttgcaaaaaagaaaagataagttgtacagtctgaatatagctaataatgatgtgtgtttggtgggtgggaatgaaattgatattctggaacatctatactactacaaaaaggggttttcgcatcgagtaacgtgccgggtcaaacttgttgactgacgcaaaagtcaacccatacttttttgcttcagttatctactgacgtaaataattattaattagcgtcaattatttatcggttgctaaaataaaaatcgaagtaaaagatgaaatataaatatatatatatacacactattagaatcggtgcacaaccgatgcaataagccattaaaagaaatc

SEQ ID NO: 245436 - DNA, 1377 bp, Cannabis indica
cctgcataatacaccctaataaaaattttccaagtgataaaacaactacccatactcagaattcaaaattaccattggtgagccaagctttgagttcaatgataacaattaataagttaaatgataagacctaaccataaggaccattaagggtttggcctaggtggacaaacaaagttattttttttatctttcttaattccatttaaattctaaacctaaccatagtatcaccctctaaatagaaaattatagctctttttcataacactccagtctctgttggtcaaacaattagaaaataaagagagagcttcttcttcttctatttcaaaattccctcttcttcctcctcataattttgaagcctatggtgaattgagagtatgcctactcatgtcaaagcaatacctagcatagtgaggaagactgtgtttaaccaaattgaaggagaaaagatccaggtttagatcttgataatgcaagacaggaatctagggctagagatctaaatggaaggagtcattatattctgctgccatcaatgtaaggatttcttaatctcttatgtgtctatttcattgtttaaggaaattctcatctaggatgttagatttatagattataatcaaacatacattttagtaaatctagatcaaacatacgctgcagggaatctttctaaaatttcctcctcctaatataagggatttggatgatgggccaatcaatcaagctcaaagagttcatcctttttagccgccgcagttatgacaatggctaagttggttgcaatggcttctttcacctcttttagagcatggcgttgccctcagaggtgaacaggatcaatgttctgaaactttgcaatgaggctagacctacaaagtaatttggtcgtgaccaatttctcgacccttaactactcctcagtaaaggccatgtattgatccttttttttttggctatctttgcagttttgatgctctgagatggaatttctggcaaaagtcaatcatttacaatgaaaccatcaataaaacaaccaaaacaaagtaaagtaaattttagaaatgggagattaaggttgtgtgtcaataatacctggcaactggaagtgtagctggagtgagggcacctttttcacagggaacccaaaagaaaataaccagtattcctggaggtcatggatacgattggtgcagctaattgggcaataagagttaggatgcttgtccaacctaaagaatctcagcttcttttttccctcatagggttagcctttacactataaaagtaaaggatctactctgggaaggtagcaccaacttgttcattttgcaaagatataccacccagctaagagcctgtacaacg

SEQ ID NO: 245437 - DNA, 1738 bp, Cannabis indica
gtaatgggttttatttagggcacaaaacccaacagtatgcaattagacttctatcaaagattcatgcatgaagtcaagttcactacagaatagccaagtgaatcctcagatacttgcgaggaacaaaactatatggtatatggtacggagttacaaatgagtctaaactgattggctacacagatagtgactgagcaggaccagttgacgacatgaagagcacgtcaagatatgccttcacacttggatgagaaatattttcttgggcatcaaagaagcaagaaactgttgcacaatcatctgcataaagcagaatatattgcaacaactatgcctacataccaatctatatggcacaaaagaatacttaaagacctgggaaaattacaagaagaagttttaaagatcttctgcgacagtaaatcagctatagcaatggcgaagaatctcgtatttcacagcagaacgaagcatacaagcatcaaatatattttcatcagggaagcagaagctaacaaagaaataaagttgaaacactacaagaccgaagacaatcaacaaatattttcacaaaggcttaaccaagaagaaaactcgagctactacgagacatgattggagttaaagaaatatgtaccaaggaggagtattagaatgtactacacatttctatagcaccttagtctaaaaatttctacacatttctagaaaaaattctttaagaacctctagtaatttctagataagatttaatctagaatatactaactatgtgaactctagaaattatttagatgtgtatagatacaatttcttctagtaaaagaagaatttagaagaactaactttaaccacaaagtagggtaagaaactataaatagcacatttaggtttttaaattgtgtaaccatcatccaaactatcactaaaacttactactttttcaaacaatcgtcttctaagctaaaccattttatactatatacacaaccaactattaaggtatgaccgtactaccatcatcatcatactacactagtcactaaatacattataaaattattaccaaaaacaaatcacaactatttagtctattccaatttaacaaaccatcatggggatccacttaatcgtttccaactttccaagaaagaaagaggcagcagttcgtcagcttgttagaattttcaaacttgttcacataaatctcacccactgctccatttcttgactattcaaaattcccaagagatcaacaaataatattacattttatttattcccgcaggaactaaactcattgtccagattacattaaagaacaattttttattattattatatgtatttactgcatgaatagtcaatatgtaatacagcttttattttagttttagagtattacaacttctattttaattagagtatatacaacaacaccgacgtggcgttttttttacaaataattagtcaattgaaaaatagcacatcaaagtggattcaactttcacttaaattaaataagtcgattttcatcacattcttgtgttttataaacgaataattaatatttttgcttctgaactttttacattatttgattttgcttcttaagttaaaaatttcctaattattctttgtaaactgggtagcaacataagcaaaattggtaatggattttggtgaaaaatgaaaaaagagaatgcaaatgtgggaaaatagccatcgtcgtgtgacc

SEQ ID NO: 245438 - DNA, 1100 bp, Cannabis indica
attattaaaattatactcacacaccatcacaatattaagttcttgttcattttttttttttcaaagcaaaatagtagtgtgattatttattcaatattagattctacaggcacctggaatattactttgtcatgagagaaatagaagagagtccttagtaaaaataaaacagtactccttataaatacattctggaccatcatcatagagttgaatttgtgtcgttaatgaaatcgtcatgtcaataataatgcatgtaatactttaatgctttttgtgattatttattatttcgagaagatattttatttttctaaaatacattaatttttattgttttttcccttcatttgttttgttattaattaataattgtagttatgatttattttattaatatatatgttttgacatttaattaagcaagtagggtgtgggttatcttatcttagattactttagaatttaaaaccagagacacactaatatatataagtaagtggtgctcgtttagatacaataattgattctctcataaggactaatattattaaataagttataattaattaatcaattgtatatatttatctacttgcagcatataaatttgtctaggaatgaaataagatgataaagagtgagtaccatatacctgaattaagaaatcaacaataccaaaaacaccaaagccaaaaatatatcataatcaaaatattatggattaattggctaataacattaattccttggatggagggaccaagcctaacaatcaacccaattaccaaacacaacaaaacccgctcctttcattctcctaaagtggctacacaccaaattcaccttctaaagtaaaagcaacgaaacctcatatctcattaactctattttaaatcatctctattattactatctatactacacttaaaacatattctcccctctacttcttatattatatatcttctatttcataatgaataagaggaaaatggacccgtttggtgcaatccaacataaagaatggagcgtgtcaagacaaaagataaggtaataattataaagggttttgctcctttttatttatttttttcttt

SEQ ID NO: 245439 - DNA, 2457 bp, Cannabis indica
gcatgttttctcaaaacagtttctttaaaatcctggatcatgccgatttctgaatacagcctaaaaataaatgttttaaaaatagttacaccccgatctagacaatactttcttcataaaaaatgtagctatttttctaagctttaaaacgagataaagatcttttaaaatggatcaaaattgagagagatattgaatttttactgaagacactttttctgaaacgaaacttaaaacgaaataccataaccgagtaaagatcctaacttttgactggtaagaactccgaactagggaaaggtttcttcaaagaaaatatggattattgaattatctttctaacagtacaagaatcgcttgaaaataatagatatcgagagagatatgacacttttactaaggcaatatcgaaaagaaattttaaaaaaaactgtaaatcgacagtctgtaaaacatgaattttttgacatcgaaatattcagaattaggaaagagtttcttcataaaaaatatagatcattaaattatctttaaaacggtacctagatcactgaaaacggacctatggggagagagatatgatagttttatgaaagcctatttctctgaaaacgaaaataaaaacaagtacgaattttacctgaagatttcgaagacacggaacgatgatcggttgattgctaaccccgaagctcttaagattaaaacaattgatttggttcaatagagagaataaaaaaaaagaaattgagagatggtgagaataaaggaatacgatactatctggctgctagggttctagagtatatacgtatataacatatcgtataataggtttaaatttaaaaataaaaatctaactacaaaataggtaaataaaatataaacaaaagcaataatattaaatttatagaaattagaaagttaaaataatatataaattgttgatatttttagtaaaaaaaataaatttatgtcttattgttaaagaaaacaaagtatgaaggttttcaaaattagaaagaaacttacaattttgaaaattaaaagggaataattattaaattaaattttccactactttaatttaatttaattatatagtccgatttatataaattgaatacttgtcgaatttttagttaataataataataataataatatgttttcataaaataataataataataacggacgacgaacacaaaccatcataaatcgacaataacatgaaacttatactatccggaggcggtagtaatggtgggaaggcaactgaagctgaagatgaaacaatacaaaattatatcacacttcgaataaagaattcttgaagtcgggagaatgaaatctgcacagtgcttgggcttcaatccttcgtcatcagagatgagagtttcgcgattcaccgactccattggaggcactcacaacttttctaaacttaaaccatatttcttctaccccattgcaattaattcaaaaatcaaataaaaaattttctaaatttgaaaaaaaaaatagtcatatttcttgtaacaaaaaataaatacacatttcaatgtacagaaagtcacataatatcaaactaaaataatgtatctatgtacattttagtagaacactcaaacatcaattcataaatgcaacaacaaaacaaagtgaggaaacctatggtggtggcggtgagtttcttgcgacggtgcgtactgaagtttttgttgaggctatgcaaaatttatttttctctattttattcacaagttaaataattatataggttttttaattttctttactggggagggcgagaaccttacaatagaagcagaatttgtggaattgtggttagaatttttgggggtttacttcgcatagctttaaaccaataatatttttttggggattttaagcttccattctcaatcgtataaatgacaatgtctatcttaaatcgttttttttttagatttattttattatatataaataaaaagttaccctataaaatatatatcgtattaaggaaaatatctgctccaagattcgctctgctagggctctgtttgggctctgctccggtcagtccttggactcctccctcgtctctgaagggttcccgacgtgtcgggtggtgtttctcaccttagcaatggatgaattgctgtcgaaaactcacaaacttcaggtctcgtatgaagatgagtgggaagtggacaagaacctgtctcttacaattgcaaaatacaatctaaggggacgattgtgcactaacgtagagcatagcaggggatttctgaaacgggtgctgggaggaatctggcgagtgaaagaggcggagtggaacataaagatcaaagacaaatttgattcaggtcttttcttaacttttacctttgcttctgagtcaattcagagtagaatcttatctaaaatgccatggtatttatctaa

SEQ ID NO: 245440 - DNA, 647 bp, Cannabis indica
attcatccacgtagtgatgtagaccaagtaatgttgtacctttcaaagcatattgacaagtcgatctgtaggtttacttgaattgaacgactctcgtcacatatgtatatttatatatatatattatatttatatagatttaataaaatgttattatttattttaaaaaaataaaatagaaaaataaaatgttttaattgttttgttttgacctccaaacgcgcactattcattaattttcaatcaatatgtattgagttataatgttacttcttccactaaaactagaactctaattatatacgattagtaaacattcaatgaaattattaggaaatcgatctaaatattttatttattattaattttttagtattattaaagttagatgttaatattatctaatataagatacatatatttgtcaaacgtctatatatctaatatacgattagtataacatttaatgaaattatttaaggaaatcgatctaaatattttatttattataattagtaaaaacgacaattagattttaatattattatttgtcaaaaaaaaaaataatacatatatagtgtcaaaagcgttgtaatatatatacgtagatctatttattaggagctaaatcgtcaaaaaatagctat

SEQ ID NO: 245441 - DNA, 1483 bp, Cannabis indica
tcaactggcccaagtgaatggacaagacgacccatcttccgaatagacatgaatccggacaatatgtctagagatgatctagatctttcgagttttttgatggataattcaactctaattaaatactagggacataagtaaaattgggaatccaatatagatgcccctaggggtcgtccgagagcagaagatgaaagagttatccagagtggtctaaccgttcagatattgcttacatggtacacttctgacacaatcccgaaaaatctagcatgttgtcccctctgctagctagacctgagaaaggctcatggcaaaaagaaaatcacattttttttttttggaaactcactactttgtcattcttttccccaataacgactcacccccaacctgtcattgtcaacaatattatatcatatggcagattatatcttggcattgggcctctcctacccaacacaatagttcaaattttaatattaaaataatgtattttaccccattgatgggctttattgtacataactctagcaaagcctagatcagttcgacccataaatatatacatgagagtactactgatactaaaatttcagatgttcaacgttccatgctctgtcgaaaactgaatcattgagatcaaaaaggcagtaagtcgcaggacctattttctcagtaattaggtatggaccctcccagttattgccaaaaaccccatgtgttgggttgcgagtattgggcatgacttcctggagtactaattctctaactcacagacttctctccttaacttttgagttaaaataacacattgggcgttgttgatcgatgagttatgttgtacgaccataataattatggcagttattttggctagacaccttttttctcttcaagctttccattaatggtatgtttaagtattttgttgactgctcggttttcctattgctttggggataagcaactgcagaaagagctatttgtatccataattcatcacacagagatcgcatttccttacacttaaactatttaatattgttagaaattaatttataaggtatgtcaaacctgcatattatagctcgaaacacaaactcacggagtttggcagtagtgatggtagcgagtgcttctgctttggcccatttggtgaaggaatcaactgcaacaatggcgtattttactcctcccttgcctttgggcaactcacaaagtaaatctatgccccaaactataaatggccatggactggtgatggaattcaaattactcggtgggctatgaacatatgtagcgatacgctaacacttatcgcatctcttgacaaaaatgattgcgtatacatgaagtgtcagccaataataccctttgtcgcataattttagggccaagtattttccaccagtatggttactgcatattcttccatgtacctctcggaggatgtagtcgcattcgtctccattaatgaatt

SEQ ID NO: 245442 - DNA, 890 bp, Cannabis indica
aaaaaatacctctatcaaagttttctatttttttattgcagtgagatgttaaattatttgatgaacaactaaatttaaattattaatgataacaaactaaactacttaattttggagtattgctattataggcatcagtggtgttcagcaccttttagacgtgtcatcttacgattggttagcaatacttcttaaaaattatttttaattataaattatatgagactcgatacttaattagaccaatagcaatattaacatctaagagagtgctcataactttgtataaggtgtatactcgtttcaataaatagtacaaacattaacacgagctgagttatattatacgatttttcttttattggtggacaaagtataaaaattgataattgtgggaaattaaagtaatgagatgggtgtgtgtgtggtgcattttctaagtattatttcgtagaagtagttgaagggcttccccagctctggatttggtggaaagtcttaggtttctgtaatgttgataatggaaaggaatatatagagaaggattttcattgtcaatcaactcttgtggtgcttccacaacctcatcttttggtcccaacataaatgaagctattgaaaccctaatcatagcttctttgcatacaaccctatgcttcacattgtagaacctcccattgctccatgcctattaattacaaccatacaatattcatttttaataagaccactcacaataatttttctaaaataaagaagttttaaaatatttaaagaactgtattcattgctaacatattttattaatttctgaattttaataattattttttataaaaatatgtgtatatattaatattttatatttaaaattaataaaatataaaaaa

SEQ ID NO: 245443 - DNA, 937 bp, Cannabis indica
caaaaatactatgtaagttttatattatatacgtgttaattaagttttcactgttgttccacggttattttttagttgttctactgttgtttttaattgttctattttgttgttttatgttgttttataaaaagataatatttttataaaaaaattacatgtaacaataaaatttttttgtaaaaatcccaacctaaaataataaaatgatatattgaaacaccaaaactagttgattaaagaaaaatatatcgccgtaagagaattcttaactgataaataaactcaaatcattgaaacaggttgctttaactaaataaataaaaattttgactcaaagaaaccagttacattaaacaaccaattgaatatcgtataaaaaaaaaccaattacattaaacaaacaattaaaaatttgacacaaagaaactagttacattaaacaaccaattaaaaatcttaaacagaaaaaccaattacgtgaaaaattgttatttaaaaaaaaaattacgtaaaaaattgaacaacataaaacaaccaaacaataaaaaaaattgatacacaaaaaggagttagtaaaaaaaaatataagtatgaaaactagtttcgaacctagaaacaaaataataaaaataaactgaaaatataaaataacatcataaaattgagcaatcacattacaaaaccctcaaaaaattggtgaaccctatgaaatcagcttctaccttatgaaaaatcataacaaaacataaatgataaacaacaaagataattgaaaccagtttcattagtcaacccaatggaaaaaaaaagcacacaaaaaaaaatactcacaaatataatcaaaacaatacacaattcacaaaaaaatctaaaaacaaaatataaatgtgaaaactgttagactataatgtagtgtatgtaatatagcatatac

SEQ ID NO: 245444 - DNA, 684 bp, Cannabis indica
aaatataaattattattattattttaatagaaatatgcaattttattaactcaaatcattcaaaagtatatcatgtaaactacttggaatcgtagaatatgaatatgtacagctaacatttaaccatgaagttctaatcaaatggtgagcaacatgattagtggatctcttgaacaaaaaattaaaaaaacattattcatcaaactagaaagaatctatctgtactcagaaatgcaaaatctaaaaataaaagccatatctaacgaacttcggatggcttagatcgtgaccaaactgtacgaccccaccaccacatcattttggtctatttctttcaaccaactcaacacctccttaacctcgatagctttagcaagaacaagatcaaccatcccatccagcttactgttcgagccataataagttgactaaaagagttctgcgccatccaatccgattgctaaagatagtaggagtgtttgcggtgcggtttttgactattttttcaaatcaacccacacatgcgatgttttcaattttgaaattccgtattttaatattcccagtttgattatttaattaaatgattaattaaatgcggaataataaaactggtactgaaaacagttttctgtagttacagaatgcaactccgtaactccagagaaacccagaaaaacaaac

SEQ ID NO: 245445 - DNA, 1093 bp, Cannabis indica
ctctgtttatttagtttccaaaactctcagtaaacaatatcatcttgagaaagccagtgtattagcagatgctttgagcaaaaaagttcccaaatagatttttagtactataataatttcacctcagttggctactgatatggttagggctagtatttagttcgtggtagggaaactgcataatttgacacttcagtcaaacatattagaaagaaacagagtggcacaagtagaatactctgagttagttaaaatttgagtggaggtattagctagtcaggataaggatttctcaatcttgaatactggaattttaatttacaaagccagagtttgtgttccaagtagtgatgagctcaagaaaaaaatacttgatgagctcttactacaccttattcattgcacccgggtaccatcaaaataccaagatcggaaacgttattattggtggtgtgaaatgaagaaagatttagtggaatatgtgtttaagtgtctgacatgtcaacagattaaggcagaacatcaaaaaccagcagggttacttcaaccattattaacgcttcttgagtggaagtgggaggatgttaaaattaactttgtggttggtttacgtagaaccacgggaatgtatgatttggtatgggtcatagtggaccgtttcacagagtcaacacactttttgcttgtaaggacaacttacacaatggaccagtatgcggagttatatctaaaagagataattcatcttcatagagctccgaaatccattatttcggatagatatctgaagtttacattgatgttttggataagtaatcagaaggctatggttacaaagctgaagtctagtacagcttttcaccctcaaactgatggacaatctgagaggatgattcagatactagaatatttactacgagcctgtgatatggaacttgatggttcatggagtaagtatttgtctctaataaaattttcctacaacagctaccagagtacaatagggacgactccctacaaaatgatgtatggtaggaaatatcgatcactaattcattgggacgagatcagggaaaggaaacatttgtctcct

SEQ ID NO: 245446 - DNA, 689 bp, Cannabis indica
tgctccatctttggccaaaagtaagaattagacagcaaagccaacattctggccacaccaggatgactagcccactgagtattgtggatttcttttagtagttcccttctcagaccaccactattccgtacaaccagtctgccacccttggcatataaaagatcatcctcttcccagtacctcattagttcaccatttgtagcttcccctaaaagctttttatgcacgagatcgagcagcgattgctccctcacccggttaatgaaagttgtactcatctgagacaatgaacaaataaaagcctatacttctttacgactcaattcatcaacaacttgattctgttttgtaggtccatgtacccaaacgaaaccaaattttgcttaatactcttgccaacaagcctgcttcgaggttaatttcttgtgggatttaaagtaagtgttgtccacattgtccgtcactacagtaaatttcgtacgcagtagaaagtgtctccacacatccaaacaatgcactactgtccccatttctttcatgtgggctgaataccttttttcgacatcctttaacttttaactctcaaaagctattgggtgtccatcttgtacaagtacaccccccaatgcacggtcaaacgcatctgtttgcacctcaaatggaagatcaaagtatgttatttaacatcc

SEQ ID NO: 245447 - DNA, 1254 bp, Cannabis indica
actctttatcttcatgttagacctctcttcctatatacatatatttaagtatttagatatatatattatgtcttgaaaatggtctctatttatagccatgtgtatatattttgagttaaagatatatatggaagaagaataatatagagagagaaattaagataaagaatcatcttgtctgactagaagattagttttgcctatcatgaaccagccaacctatttttttattaattaataaaataatatatatttttttatctttttaactatttttgtcatacttttttcttggatttaatttatggtttggcttcccataatggaatatattctttcatttgttgaagggaccatataacattataatgtagtataaagctatatataaaaaaaaaaaaaaaaacaaaaaaaaagactgaaaataatggactattaatatatataattgtattattaaataattggttaaaatgataccccaaatgactaaacttttatatgttaattataattacattatttaatttacactatgatgatatcatcaatcattgatcttaatttaaaactatagctagatcttgttagcatattgttatattttgaaagattagtattataattgttcaagaaaaaaataatgttgtaattgagacacttgtgatatcagtgatgagatgaagtcatacatatatatataaattaataagagcactcacattaaatattgtatcaaaatagagattttttaaagtatttaaagaattaattaaggtggtgtttggttggaagaaatgaaaatataaaaatgggaatgagaattagaatagaaatggaataaaatttgaaatgtataaaaaaattattaaatttttttcaaatcttacattggaatggttttttcttccatttcaaaataaaatagtcataataccaaaatgatggagaggcgatttcatcaaaatggtattccaatagttttaaatgcaaccaaacaaagaaatagaataaaaattgtttcttttcatttctatttcatttcattaattacctcaaaccaaatgccacctaaaaacacacttacgtgtatcaaattctctaaattctttctctattttaaaatttctttaaaattcactatatatactctacatttataaaatactattcattactataaacatattttattaattaattgaagttgtaatttactttttatatgggaaaatatgtaaatattaatattat

SEQ ID NO: 245448 - DNA, 1904 bp, Cannabis indica
gattctcttagccagggtatctcagatcggcagtgcattcgagagaacaccaccaaaggattttgtgtctctaaaggactttagagttccaaagtttgttccacaaggccggtgccaccacacaggcaggggctctctcatacgcctatatcagataagcagacttagtggtgaatttactgcatccctctttagtccaaatccacttatctctcccctgaccactaggtctaccccctttcaggatgttcgtaatcgtgacagagtcaaatagtgcccttaataaggagatgtcccagtccccatcactcaacagcagctccgctaccttcactaccctcccaggacaagaagagatgggtttcgggtagaaatcattaccatgaatcacccagggatctatccaaacgttcgtgtcttccccattcgagataagcttgcaagcgccttttctgaggataactttagtcttgaccacatttttccaaaacaaagagtcagaattattataggtagcatccaaaaaaaggcttacttttcaggtatttggctctcaacaccctgtagcaaagcgactgatcctctgtaagtagggcacatccccactttgcgcctagtttaattccaaagctttatggaaaccgagaccacctctagctttaggaaggcaaaggtggtcccacgcctttgggtataaaccacggttaccctgttcacagccccaccaaaaatccctaaccattccgtcaattttcgaagcaagtttcttagagagcttggtagtttgcatggtgtacactggcagagccagacccacagacttgataagcgtggcccgaccaactttagacagcaattttaacttccaaccatgtaacttcgaaataaggttatcgaggatgaagttgaagtccgcatccttgcagttagatctaaatagcgggagccccaagtaattgatgtttgtggtagtcaagttgagccccaactcctgcatgataccccttttcatcccctcactggtattattgctaaagaatatagaggttttgagcttattaacacgttggcccaaccagttacaaaatttctcaatgcagctccaaaggcctttggcttctgcaattgtcgttctacccacaagaataagatcatcggcaaagaaaagatgggacagagtagggccttctctactcagcctgatgcctttaatagttccttcttcaagtgccttctccaggatccgagaaagaatgtcagcagcccatataaaaagatatggggacagggggtcaccttgtcgtaacccacactcaggagtaagactgctaatccttcctccattaagatgtatattgaaagtagtagtagtaatacactgggaaacccatttcctgaataagtctggaaccttgaaactgctgagaacatgatcaataaaattccagctaagtttatcataccctttcactagatcaattttgattgcgaagaggccttctctacccttcttgcgtttgaacgagtgaatgatttcctggaccaaaacattattgtcatttatgctacggcccggcacaaaagtcgcctgagtagggaatatcagtctgggaagcaccggacgaattctattagccagaattttggagataaccttgtagaccacgttgcagagtgagattggtctaaattgtgaaaccttcttagggttatcgactttaggaattaggatcacatttgttgcattgatgcccctatgcatgtggccagagataaaaaaaatcatccacagcatcgcaaaaatcgctcccaactgaattccaataatgcttatagaacagcaccgacataccatcaggccccggagctttcaggctacccatagagatgttggaatttatttt

SEQ ID NO: 245449 - DNA, 747 bp, Cannabis indica
gagaaaggagttaagcagaccgtcaagaccttgaacaaccatgtctggtcggctaaggggaagtgtgtgagctgaccaaagaaagcttataggtcggccagagtttgagcacaagctggccagcccaaaatgtgtctgactgaccgagaaaggcctttttcactaaggaggtctgacctttgcaaggaaagctgtaaaaagaagataggaaggctggcaggcacatacaaaggctggcaggcacataccaaggctagcaggcacataccaagactttcacgcacatagaacggctgacaaacacatagaaagctggcaggcacataccgaggctattggaacaatacctggttagccatgggagagcataggccggcgaggccctacaaaataagtttggccgaccaaattttgtagacgattctgaatagctaagaaaaattgtgagacaggcccaacaacccacgaaaataagggttttctctcgagatatttgtccgattttctaggaatttagttatcctttttttgtaacttaattaatagataaaatatgttaatatccctattttaagtggagatctttacctatttgaattaggatcttttgtaagccctacctatataaagggtattagttcactctcaaaacctaagccattcgacaagcaataaagggtctctacaagtcctcccttatgctccctaaagcttcctacacgtgaagctctctctctctctctctct

SEQ ID NO: 245450 - DNA, 3639 bp, Cannabis indica
cgggttggtttagaaaaaatagtcaaaaccgcatcactcgcaccgcgaacacccctaattgttactatacattaatgattctttgaatgaataataagagagtagtttatttaatcagtgagtatagtctataataatatgttatttattatttgtgggaaaaatttatagtatgatttggttttgttcatttactgctgttttgatattgtaatttgatgagtttgtatttttttttctagtatgatggacaaattctttgtaatgttaatatctaagtttacctcacataatggtatgaattagtataactccctactctacctaagacacacaccatcttgcaatcaagtaatagtctagataataataaaataccagatgttaatggaatcgtggagttgggtgactcatttgtgtaatctaagctgtaattgataaaaacaataccacccaaaatgggcaaaatggctcctgcgtagagtctagtttctttttgaacttttggtttccctcctttcagccttagggttctccggttttggctttcatactcttttcttgggtgattgccttttgttgctttcgttcctcagtgctatagttttttcatgtgaagtgtgcttctttctttctttttgtggtttaaggagagtggttcctctgtcggtgttcgtctctctctagggctgtcctatggcgttggacaatgggaaggacgctgtggattcggctaaagttattcatgtggagtcagtggacgaaaccatgaatactactctgactcgtgatagtgccatggagatggagctcctggagctctttgaagacattactttggaagaggtagttgctaacagggcttgtgtgggtaaagttattggatgtaaggatatgcctgcctaggtggtgaagaaaatccttaccgaagtttggagaagactaggtcccgagaatgaaaaagtgtgatgaaggtgtgcttagtttcttctttgagaatgaggatgactgcgcttttgtcttggaaaaagaccttggcttgttaatggagtgttgcttaacctgaaaccctggccggttgaggggaaagtttgaggttgcaagattttgggtgcaattccatggtttgcctactagatgcctttcgaatgacaacgctccgatagtggaaaagaaggtggggtctttcgtcttggcggatgaccggagtaaaacagagcttgttaggagggggtatattcgagcttggattgatgtttgggttgcacatccgttccctgcgaggttcttcttaacggcggatgggaaaccggagtcctgggtccagttcaagtatgagaaactgccccacttatgtttcaactgcgggcgtttggcacactgggataaaacctaccatgttccgatggctatggttacaccaaagatgggaaaggcagttcagatgtatggtagttggatcaaaagcgaaacagggaagtccaactgctttactgggaaagggtctacaagactggtcattgaaactacgactatacccgaatgggagctgaacaaaaaacgcagtctaggcacctggaagagaagaaacccatcggagaaaaaagggggtcctgaggcaattgagaagggcaaagagttggtttctgcagtggagtggacgtcggtcccagaggtggtgagctgtcattcccctcgtacgttgcatggatgcaccgatccgtacgatggattggaggagaggggtgatcgagagaatgtcagaaattgtatagagggtaggtgcaacgttgatgacgtggatgctgtgcagatgccacctcgtggggaattagaagcacgtgttccccccagtattcggcctaattttttaaatttaccccagccagattttgctttggtcaataatgaggaatctatacctgatattgggcccactcttgcccaatgtattgaagtccttcatgataggctttgtctctctcaaaagccccactcctttcccgagtctttacccatttgttggcctaataaagactctgaagcccagaagctatttttccaattgtatggacctgatttccttaatctctataacgcccagcagtctatcatctgcaacccgcctgatctgtccgagatgatcactcacttattgggaaataatagaaaaagaaaagctcattgttggttacaacctttccctgcctcaccacactttgagcttcctgattgtcctgtgaaggagaaaggttctgatcatgataaaactggagcattctgtatgggctccacagtaaaaggggagggttcaattggtaaccgccgtggtagaaaaccaaaaggaaaggagaagaaaagatctgtcaagaaattctaaggagttaagactcgcagtgggaggaagaaaacaattgcttcggatgaacttgaattgccaggtaatctgtcaaacattcttgcaaattgtgttgatatccaaatcacttatgaacaaaattttggaggaggcgaggaggcggccgcaaccatgcccccactgtcatcatgaggtgtctctcgtcgaattgccagggactttgtagaccctcggcggaaaggactcttcggggtctgatccatcaatgtaatgcggatttgatcttccctgctgaaactaaggtggatggaaataggatgactgagattagtaatcgactgggctttgcaaatgtttgttgtatcccttctttgcgaaccgctggagggtttcgtgttgcttggagtttaggtgttcaatgccatgttatcgaaacctttgaagctagattcaaaattgaagttagcttgggaaatggtctgcccctttggagtctcttctgtgtttatggctccccatatcaggcacagaaaaacaattattggcaatgactaacggagaaggtggcagattgcaattctccgtgggttgtgatgggagacctaaatgttatcttaaatgactttgagaaggctggtggtaggcgctacaacaggaaggaaggggaattgctcaaaaacattttgtttaaaacaggaggggtggatctcgggtgtgacggggggagttttacttgggaaaactctcatgtggcttgtaatagagttcgtaagaggctggaccgtgccatagcggatgcgaattggtgtatggaatttttgagggctcgtgtttcaagcttccctatccttggatcggaccacgctcccattgttctggatgtttggggagatcaagctaaactcaagtatccgtttcatttctcggaggtttggacaacaagaccggattgtggggatgtggtgagtcaggcttggcagggtatgctaagcacctctctgcttgagaaaaaactcaaaggtactgctaaggagttgaaactgtggaaccaaaatgtgtttggtttttgtgatagaaaattaattgagcttcagaagcaactgggacggattcaaaatgagcctataaacgacaataatatcacgagggaggctgagatttagttggagatcctgagcacggaagaaaatatgaatagaatttggaagcaaaagtctcgagaagggtggctccgtttcagagatgacaatacaaaattctttcacaagtcgactctcatt

SEQ ID NO: 245451 - DNA, 1973 bp, Cannabis indica
cgtactcttttgagcaatgaggtatctacagatttgctttttgtaatcatgaatgattgcagttaaataaagtttgatgattttattcaaaaaaaaatgtaataagattttaattaatattttttatacaatattttttttactaatatgagtaacttgaatatattttgaatttaaaaaatttattacaaacttttgttttcttttcttttaaataattttaataaatttaataccacctacaataataaccataattacgtataaaattatatgataataatttaaggatattatatcaagttaaatttcggtataaatatctaaaattttgaaaattttaatttgtaactatttttagtgtataatatcgtttatttgttttataaattttatattttataaatttaaatgaccatcatttaatgatactatatcaaattgaattgatatttgataagcatctaaaattcaaaattttagtttctaactattaatatagcgtgtaataatttttcatatttttttttgtttatttttagttagttcgtttatttatatttcacttaattctatctctttttaatattttaatatattaattaattaagatatttatgtacaattcaaaaaattgattcctaattttttaaagtcgttaaatttttttaactaattctattatttaaatatctaatctattataacaaatatctcttaaaaatatctagaataaaaaatttattaatattattatacccgaaattcggctggaggacacatgtcaaggtaaagagaatgtgaatcggtccaatatctttttatagaataactcattagttgcgtaagtatcagagtatatctgtaacccgctgaccgtaaggtcttaggcgaggaatcaatgtactaattggcacttagtgtattaacgagaaaccatatgtcgctgaaggagaatagcgaggcactagagaaaagtaacacattcatttgcttgcaataagaaaactaagtgtaaaatttggatcaactcgaggaacaagaatgcgagatgaccatctcgctacgagaaaacttcatatagtttcatccaactaacgggagcgaggctcataaccctagcaagtcagaagatttctatacacccgcgatcgacgtaagacatatcttgtcgaccttggaaagaagaatggttccagctcgccattgggatcactacaatcaagtttttgtcaagacatctccaaattgaaaaattaaagacatgtttaatacatgatatttttgacccagtaaaagcagtaaaatcacagctatatgattttcaaaataatacaccgcatttacattttgtgatatgtaatcagatcccacgattttagggataatgactgtaaacatattctagtcatctttgtaattaactgccactatgcaattataaatagtggcaaacaatctcaaaacggggacaaaaaaaactcttatgaaggaggccctaaaaaaatactcaaaaatttgaataagattgactcgtggactatgaagaattttaactccaaaaccacgtaaaaaaaccttgtgttcatattctatttttctatagctttaattttttctgtgttgaattatcattgtgaggctcatatttggttaacaaaaatctgtgttaacagtttggtgctttcattgagagcctctatgaaaaagctaagaaaaagccttcccttcttttaaagaaaaaccttctcctttatggctgaaaatccagagaatattaacaccccacgtgaggaaactaaccttcgttccggaaaagagcccgtgggctctagaagatctaccaattcgcaatccagaaggaccacccgttctaggagggctcaacctgaggattgcccaatgctcggaccacacgtcctcgaagaactcaacacgatgttagtcctagtacgtggacaacgcgctcgagg

SEQ ID NO: 245452 - DNA, 2411 bp, Cannabis indica
caacagactgtgggaaattgtgatggtgtaattgacttctcttgtgactttccaactagtacaaaccttccttaagtgtcccttgaagaagagccctccttgttgccaggtccttcacaacataatgaaaagaaaagaattcaacagagacattattgtctcgagtcagtttagatatattgatcaaatttttagtaatatttggagcatgtaacacatcgctgagcaaaagtttactgttagcagaacataaagtattgcttcccacaggatgtataggaattttattaccatttccaataataagatttccttaccacgatactcagacttctgtatcatatttccagcatcagatgtgacatgattcgtagccccgctgtctgcataccaagctgcatcatttaccatgtctggtgtagcaacaaaagcagcagctccttgtgcactcttgtttgagttttgagatccaaaaccttgaggtggagaccctataaaagtctcatcatacctattgtaataataaacagatgaatgaccataacggccataatcttgacatgttggcttcgagtttgctccactgcaatctccacgacctttgcctttatttccatcttgtccaccacctctttaattaccacgattttcagatccattgtggttatggttaggtcctcttccaccttgaaaaccaaatggttgagttgtggcaagatttgcagatggagatggtgaggagttagcagctgcaatcttgtttgtgccttaaataacacttaatcttttgactttgctatcaaaacttagtagtatatccggcaattcttgctaagaggtttagggacgagcttctatcattagtacaataggtaaatattcaatatccaagctagaaagagcattagagacaagaagtttttctggataagggtctccagccaatgctagaacatttactcattggtttttttgtttgtagataatcaaccatagtcatgctccattttcgaaacagtttggattttggtacgacactcatccatttttgccttggaatgagatccaaacagattttcaagagcagtccataatgtagcagaggaatcacaccccatagcctatgttgcaatgcctttagacattaatccatacacccagtagcagttggtcgtgtactatccaagcctcaaaagctagattcactatgagagtttgaactcctgcatctgtcttagtgggtataaactcatctggtttagctcttcaaccagtgagatatccatctagacggtgaccacgaacgaaactataatttttcatagagagtagttattccaatcaagttttgaaacaaaagatttggttaaggtacttcctacctaaggtatgagtatatttggagtctttgagtctgtatgatccgacttggggcagcagttgaagattagccttcgacaccattgttaccaatggaggcttgagtgctgtgagcaaggttttgggtgttatcagccattgcaaagccacacgtccatttggctctgataccaagtttgaaaacaagaaaaatgtaacagagaaaatgtagtagagagatacagagagaactgtaaaagttcaactcaaaaaaatttgtgactggctgattatattatatattagtaaatggtacattttagaaaatacaataatacactaatgattacatactgaaatatatacaaaatattctaacaaattctgacatcagaatagaatattagagttgcgaccactctctaacggctctatttgacaggaaggcagaggacacaaagggaataatcccattccctatcagttttcctctattccctttttctacctaccatcggcttgattcttcttcttaaatttcccatacagttaataaattagatattataatgcattatttcccataagactccatctaattggtgaaagcagaaaagtcatcttttttaaaaaaaaatataataattaaaaactaaataaaagattgaaatttcttcattaaattaggattgcgatggtggtggtgttgtgttgaaatagaactattaaggagtcgttgtacttgtaccacaaaaccaagaatgaaatagtactaccaagagtttgtgtagtacatatttttggtttgattatggtgtcatgagctgtggttttgcttttgcatttcgcaatttagtagtacgcaaaagagagcggtagtagtgtagtactagtactctttacacaaggagctttaagtcataattgggatgtggatagaagagaatgctagtacacaaacgtacaattcttctctttgggccttcttttgggctctcttctcaagtgcattattataaaaacacaacattaagactcttctaatccacaaa

SEQ ID NO: 245453 - DNA, 1448 bp, Cannabis indica
ttttgaatttttaaaagttaattgctagtaaaataaaaatattaggaatttttaccgcaattacccctaaaaaaatatgcttattaatcacatttacacattcaagcaatcacacaccactcaacattgactcagttataaccaagtctaacacaaaggccaaagctaaagcacccaaactagttatactctcatccatattaatacaagcatcacaattgagtttaacattatcctgctgcatctatgatccaccaaacatgtcttagcattagcattatgaaatctgtcccagatactcccatacacatactccacttaacaacaacaagtctattaggcaagccaaactcttgattcataaaggtattccttctaaatcaaattctccacaaactgacaaaatacttctctaacaaaatagatttcagttcatccataactaaaagcaggaactaataaaaatttggatgaagtggaatagccaaatttacaaaaatactagatttttgataaatttacaattttattgccacaataattttttacaaaatattgtctttttataaaataacctaaaacaacaaaacaaagcaattaaaaacaacagtagaacaactaaaaacaaccgtgaaaacagtgaaaacttaacacataaaacttacacaattatttttttttttaaaaaaaaacatagtattttttcttagaaaaaaaatccgcaaaaaaaaaatttactagtgtaaaaattcccaaaaaattcagcaatttctttgatcgtgcttaagattaagagatcacaagtccaaagcccatgtaacacaatcttggggcccttagttattattgtcgttaacgattttcacagcaaatagccttaaataaatattaataccaattttttaatacttaaagttcaataattgtagtctaaaaaaataaaaaataaaataacatatttttatcaaaaaaaaaatatatttgtgtttatactttattccatgtgtgagtaattagtagctacaaagctttaatgccataataaaatttaatgttatgtttactgtaattttattaaaaaaaaaaattataaataaataattcatctatcataccaaaataaaaatatattaaatgtattgtttaataattttttaaaattttattataaatatatttttattttattataaaagtgataaaagctccataattacgtctaggctattcatttgtgtattcagaaaaaaaaggccatacattatattcatttgttttccctttgacttgtagctatgccaaataaataggttaatccaaaattcaaaaatactaaaaaacgttttaaaatagtgaacacattttctttttactttttctttttctttttcttttttctttattcttatcttaaatttattattgtaatcatattacaggtaaaatat

SEQ ID NO: 245454 - DNA, 891 bp, Cannabis indica
acgtgtataaaagtatgttttataatgctcttttactcattttaaaatttattagaatattaggggtaaaattatttgaattattttcgatttgtgatatttaattttatttatattttgctttggtactttattttttataaaaaaaaatttgttaagtgttaggttggatatgccatcatgtatacattaaatctctatttgttattattaatgaatagaattcataacaacaagtagattagagaaggaattttctcaaactagtatagttgatttgaagtcgatgatttctcgcaatcagaaagagcttttaatggctagtttctctagagatggtgttaagagagttcttttagatattccaagcaataaagtaccggtttcagatcgatttgagagttttttcttccaagataattgagagatgttgagagatgaatttgtaaagttattatgtattttttgcatatatgagaattgttgaaggaaattaattttattgtcttcacactcattcctaaaagcaagtgtctagccaacgtaagtgattataggtcgattgcatcggattgatggagttataatttcactaagcagttggtattagaaataaattatcttagtgaaaaaaaaagattaaataattaattgatgaacacagctttatagcaagtatatgcacaattaatcaagggtatttggctctgtaagaaccagtattttctgtagtgaaaacttatgtccagttgtgtttgggattcgtagtgttttgtctggagttcgtaatgttagtgttagtccacgtcaacaaagatattttgggttttaattgttcagatggtaataactatctattttggtattcttagtttagctaggtataaatac

SEQ ID NO: 245455 - DNA, 656 bp, Cannabis indica
aacaaaaataggccaaacataccaaagcatgcataccaagtaattcatctacatagaacctactcactccaagttaagttgcaaatgtaaaagggtaaggaagtacttacatgttgaaggcgaaggttctgaaatggagacttgtatgtcgtgctcatgccgatttaaaggcacaacgggaaggacttgatcgagatgccagagtctggactgaagggtacaagcatgatctagaagttcatcaacgtttgtttggaaacctagtgatctcagtatcctgagggatctatgttgagctcgggggtggtgcatctagatttaatcgtgaacatatttgaaaaagaaggtgaaggaactcgtttatgtaaatggacattcaccagaggcaattttggtttttttctccattcttaaacattttcctctcctctaaaatattcaaactcagaaggcaaaataagcaaaagtggtgaacagttgatttttaccgtatttatagacgagttggcgatccgcgtactcctgatccaatggctcaaattgtgccccagaaaatacaatgctatctgatggtatgggtatttgaagcattatcattaaatgccttatgtaggatcaaggtaatttaaattatgacactcgcttgagaacgctca

SEQ ID NO: 245456 - DNA, 1558 bp, Cannabis indica
cttagatccgttgacgaaaaatcgcgtcaacagtaacgataagaatcaacaaatacaaacattaattggagaaaaacagggatgaatagagtataaaaacactagaaacaataaagacaagaaaaaataaaaaaaaaatcaagatatatactaattcaaatctgatagatcgatgtgatctatatcgctttactttagttttggaacactaccaaatcatgtatattgattgagcaagaacaagtacaataaagttgagaaagattctctattaagttctctcaaagtatttcaactctcacgctcttactcaagaatcttcttcatctatagacaatttttcttacaaaatccaaatccgatctctctctctctacatctcaatcttaactctctcttactctcgatctcaatctgaaccgtgttacgttcgttattgacaaatgcttaagtgaatggtatttatagacttaggatcaagatctcaaagtcagtggctacaagaaataaaattgttaagttagttaggcagtaaccaacttaaccaacttttctttgagtgagatctccatgtcagtgtaagtcgtagtgcattcgaaaacttatgtgagcttccggaatcacgaaccaaaaacattcgctgaagaagtttccaaataggatagagccagctggagtcggctatccgggtgcttgccaaataaacacttttattacgaaaacagatttagagaaaatgaagaatgaattgtattgattaattaaggtacaaacaggggaaacatatatatatatatagctcaactgagcttacaaacatgaatgagaaaagactaaaatgccactgatacaaaactaactaacaaccagataataactaacagtaacggaaataactaactaacaaccatgtcagaaagggaaaagatcgcatatcgttttaactttcagtcttcttttacttcaatttttcttcttcttgaacacaaaataaaatgaactcattaagactgaaaagattaatacaggaagaaatattttattactgaatcaatgaactatgtacaacttatatacaagctcgaagagagttataacttgtaactgaaaacaatacaactatacacctgtatcaaactcttctaatagccattagtaacattaactgtcatataactaattgcctttacaaactacatctagaattttagtcactttataacgtgattgtactatatatatatatattccggtattggtgtgatgccataaaagaacaccatctcttggtgtttggcaaggtattcctatcccactatgtgtgatgtaatgcgacactctaagatatgaaatcccataagtacttcttatggggtataaataagaagttactattgttacacgtgtcattttcagaacaaattaattaattactttaggaatatggggtataaataaggaataagtactgaaaatgataagatctcgataattcaagaaagtttctctacatcaaaacgtcgtcgtctccggactgtcttcctcaggccctctgccc

SEQ ID NO: 245457 - DNA, 562 bp, Cannabis indica
aaaaagttgaactgaagttcccaaacaatccaactcaagtacaatccaactcaagtatactctgactatcgttaatgttgaattttttgtgccggagtagggttttgctctgttgcagttactagcggttatctccctggttttctgggttctcgtcttcgtcttcctcccctgttctccccttcttccatgactctggttaactacccactattccatctcttcccgttccagtgcctcatctctagttgcaccactttctccatgttgtgttctgaagcacgatataaatatcacaatagtctgtatgatttgtatctccgatttctattctctttctccttctctgatatttgtatggaatccatcttagaagacatgaattccactctctgtttgtctgaaaaagaaaggaatgttcactcccttttctgaatccgaccttcatgatccaaatcagcctcccaaatttttccttgttgctcgatgcctctataatactgttaacccgaagacttttatcaaaaaaatgggagaattctggagcaataaatgtcgtttt

SEQ ID NO: 245458 - DNA, 501 bp, Cannabis indica
agtaattaatttctatattatgtttgtgttgtgatgtatattttccatgtctaaacacatgaaagtgatagtcacgtcttctagactctcattaataattcagtagctacaaaaatgtagaaactaaaaccatagaaatctatttaaaaataataataataataataataataataataataaaaagaaaaaccgcagaaaacaaaactctacgttccatttccaattacattcatttaatccatggtactagaatttttgaacagattagaataataattttttgataatatttcaaggcatggggccacaatgcaaatcaaaattagtacaaatggataaaacatcattgtctccattaatccacgttcttttcatattgaaacatttccaaaactaaatcatattaattacaaattattcaagcaacctctcacagttatttcgtaattatatgaacaaatccaatcttagattatttataagtcaagtcttttgagt

SEQ ID NO: 245459 - DNA, 1026 bp, Cannabis indica
ccttccatcctcagactgatggacagtccttaagaacacctatatatttaatttcatctaccgctcagaagacacaacagtaaaaactattacaacatgttcattcaatctcgtagcttgagcacattaaaatatctaaacttattttcttattttattgtaaaataaaattagttagatatatatttttataaataaatttaaaactagattaaattttgtatattttaaaaattatataattgaattttgttagatttaatttttattaccattatttaaattaataattaggtattagcaactctaatacaactctaaataaacattcatttcatgttactatccctagtatatataggaaaatttgactttatatatatacattagtccaaaattaatacactaaacataagtgtatcataattgctaaaataggcacacttttcctaaaacccaaaattacccctctcaaatacccaagtcacttgtctctctctgtccctcaattctctctcgctctctttgtccaaactagcatcctaacccaaaacttcaaccacaaccaccgtctgaacccaaacttgtggccaggaccactgtctcaactaaatctcgcgactaggatcaccgttattacccaaacccagaccacaaccacgcacagagatgtctaaggtaagttttgaatcttttttataaaaatttatgcatatgtttgttttagagttcaatttttcattgatttagggtatatttttgttttgtaatgcctgatctgtgatgtgtgtgagtttgatgagatttaggatttattttgggtcctatatgtgttactgcgagaaatctgggttttagcttagatccaatacatgtctgatacaggcctgatataagtctgatgcaataaaagaggttgaagataaaggtctgatagaggacgatgtaggttcgacatagactcaatgctaaacgacagatgcttaggtctgatagaggacaatgtaagggctaatagtgagtctg

SEQ ID NO: 245460 - DNA, 926 bp, Cannabis indica
aagtttgtgttgttctctttactagacatttagaagtataagagaagaacacttttgaagtataagaaaagaaaacttatgaattagaaagggatttgcttttatagagtagaatacttgttgagaatgtaagaaaaattaattaacattaaatgtgtaattgtacacgtgtaacgcatgcaatgtgtatttatcgatagaatgtcgatacaatgtcgatagtttgtcaataaaactcgaacaaaagaaatttagtctacacattatcgatacgatatcgatattatgtcgatagcttgtcgatagtctcaacagatagagtggaaattggaaaggtgggaaaaattaattagccttaaatgtctaattgtacacgtgtctgacatgcaatgtgtattgtcgagtttatatcggtagtgtgtcgatagtatatcgataggactacaaaattccacaacttaattttgtggatatggtatcgatgatatgtcgacattctatcaatggtactaccacccgaaatttcgatatttttcgatggaatatcgatggaatgttgatattttttgaatatgttaaatggttgctgtttttagtattttttggtatttttctctaacttaccttttgtttgtttgaaattgcaagattgactgtgtttcttgttgtatcgtacgatggtgtttggtatgttaagggttttaattaggtttataaagccgaaggaagtttgacgttgacagttagaactgacacaaccatacaacaaatgcgccaaatcttatatgtagagttggaggttgatcctttggcgtatgatttaaaatttgagatttgttccttgtacatgatgggacaaatggttccaccagaggttattaagaaagaacgccaactaagaacgttcttagagatgagggcaacaa

SEQ ID NO: 245461 - DNA, 973 bp, Cannabis indica
ttcatttgagtaaactcagcttcaattttatttaatttctctatcgtttttgttcgatttcttatatataagttgacatttctggttcaaataataaacaaccaacattgaaaagtataaatatcaaaagataaacgataatctcaccaaaatacatatatagatatatgtatagagaaaattacaggattttataaaaaagtttatagatttaccacccttctatgatattttttcacatttaaattttttttatgctatttaatatgccataattttgtaattaatttatcaaatcccatattttatctttttccatcccaaaaagttactcaggagtattggagctatattgtttagaaagttgagttcgtataatttccaagactccacagaacaggattcgagctaccaaaggacacctctcaatctttcctggctccgacgggttgttcgggtcctgtctcaccgaggactgtggttatggcatggtcgagtgtaacggcgccggagctgcactgccaacgactctcgccgagttcactttaggaactggcaggcatgaccttttataaatattccttctctactccttgccttgaccatcaaagagagaaggagagtttagagcgaaggagacagaaatatgggggtgttaaattcgagcaatgggtatgcgtatttaatggacacaacagggaaagagcaattgactactagagaatgtgaagatctggatttcacaggccttgctttgtgttctgagtgcaattctcttgttgagtatgtcaaagaccaaggttaggttttccttttctacaattttgaattttctttctttcctattttatttttttcttcttcttttcaatttaattacttgtttttgtgattttaaagattaagggttgattgaaatttatggcatagtctccctcgagctttgttacgtttagagtatgttaaatttgat

SEQ ID NO: 245462 - DNA, 823 bp, Cannabis indica
cattgaagtcaaagtcaaactctgtcctctaggaagacatcccggatcaaacagtgtctgagaaatgcttaattgtttaacacgattcctaagacaaaacattgtagatgaccacttcagcgtaggtagtaaggtaaagctaccctcaaaatgaagatatatcaaatttaatccatactgttctgacattaccttttccctataaatgctaattgacggctaatccttatgttgtcccatcagccacataaaagacaagtcgtgtctcatcaaactcctactttagagcttagcctatgcacatgcatcaacattatttcctacacctatttcaaaggtcgtgcaaagcttagaggtaaagggaagatgtacacatcattaaaaaaatatctcatttatcaacctataaatacaaagggaatgtaagaagaaatgaattcagaaaaaaaaaatacagagaatatagaatatataatctcatcagaagtgggcgcatatactatagaatatataaactcaccttctactctatcaactactgtgcctaatttaaagctttttggtcataggttgccaattatatagaatgctctatatgtaccaagatatagatacgttatgattatgcattattccaatcctaatagtcaaagatcctttatagatgatccacattgaataggaacaaatttaccgttctacccttccatgtgttttatccttaaaattcttagctacctataaatgatatttcagtatactaatataatcactgaaatgaggtctcaatcattatctctatccagccaagctcgaagaaaat

SEQ ID NO: 245463 - DNA, 776 bp, Cannabis indica
ataatcttatatgggactccaaattgacaaataatgaacttgttgacaaaagagactacatgcttggcagctatgtgcaccagtggttcagcttccacccatttggtgtagtagtccactgccacaatggcgtacttcgctcccgcccttcctgttggtagggctcctagtagatccatcccccacacggaaaagggccaagggctggtcaagctggtgagctcagtgggggaatgccagctgtagtttgtgtgcttctggcacttgtcgcatttttagcgaatcccagcaaacctcgctgcaatagcaacagcccctacagccgcaccggtcactgctcacttagccgggggtattgaccaaagcatgctcctgcaggctttaaaaatgctcgagtagcagagaaagcccatatacaagctgcatgggacctcccttttcactgtggaagtgcgacaagctcagctccctaagggattccgattatccgaatccctaaaatacaaaggtacctgtatcccattgattatttagagaaattcaatactattatggaagtggatcatgtacctcaactcgccaaatgtcacattcttgtggcaacattggaagagaatgcccacgattggttcagccaatttcccgaggcttctatctcgacatgggagacctttatcgaccttttcctcacgcatttccaagccacgataacctataggccgccctataccactctggctaacatcaaacagaacctggtgagtctttacaagact

SEQ ID NO: 245464 - DNA, 1253 bp, Cannabis indica
ataacaagcgtctataagatgattgcgaaaatgctctccatcagacttagaggggtgttggagaagaccatacatgaaactcaatctgcctttgttgaaggtagacaaattctggactcggttctcattgctaatgaaacagtagaagactacagaagtagaggcaaaagcgggctggttttaaagttagactttgagaaagcctatgatcgagtggattggaatttcttggatctcgtattgtgcaacaagggttttggagtcacttggagaaaatggatcaaaggatgcttgtcttctacctcattctcagttttcattaatggaagaccaagagggaagttctctagctctcggggccttagacaaggtgacccactatcacccttcttgtttactctggtagcggatgttctaggaaggatggtggtcaaggcagtaagctcaggcaacttttctgggttcgagattggaaaagagaaggttcatatcagccatcttcaatttgcagatgacaccttattttttgtcaaagatgatgactcattgcagaagctgttacgactagtggaggccttttgtgctatttctgggcttaaaatcaacatgaacaaaagtcaaatcttggggatttgcacggaagaggaaaaggtggccaggttggcatctcagatagggtgtgaagttggcagttggcccttgacttacttaggtatgcccctggggggctcgcctagaaaatgggctttttgggagccggttctgaataagtgcgctaaaagactagatggctggaaatgctcatttttatctcgtgggggtagattgactctcattcagtcagtcctatcctcccttccaatctactatctttccctatttaaagttccaaaagctgtaactaaagcattggagaagttgatgagggattttctttgggaaggctgcgaatcgtcaggcggggatcatttagtggcttggggtgaagtatgcagatctcgagaggaaggtggcctgggaattgggaacttggagatgaggaacaagggcttgcttatgaaatggttgtggaggttttccctagaaccaaactcgttgtggcacaaggtggtgctgagtcgatatggaaagtctgataacttctgggacacaaaaaaaggaagtcgtctctctcccaaaggcccatggagggatatctctgacttgtatgacgagtaccttgggttagtacaattcaagttaggcaatggagc

SEQ ID NO: 245465 - DNA, 2191 bp, Cannabis indica
tcacaagaaattataatttttgtgactaatacttttagccacagaccttttagtcacaacatataagaataataatttataattagtcacaacttttgttgtgactaaaagtaagattttttgtagtgaaaaattaaagtgtgtgttgtgttttgtcttcttttgaggagataaattattatattgagtgtttgtttatttacattgttataattcatttttgctcatatatatattttcaattcgtaagtagaggaagattcaaattcaaacgactccaaatgccatcccgagttaaataaatctcaataattatcatacctattgacatcacttctttaaatattttcgtgtattaaaatcatttttttatgataaaaaattcattcaaacttttaatatatatcacttttggaatattaaatatccatttttttttaagaatattaaatattcttttaattatatgtttaatggatataacataatgggaaaaaaaatagaaaaaataacaaaaacaaaaaaaatgggaaattttacatttatatacctacaatttaaattatttacaaaataattctaacaaaactattaataaacatataccgatgtaatatgttttatatgaacgaataccgatgtaatatgttgaatgatataccggtcatacattaatcctttttgtatttttaatcaattttcctgtactcctttctttttttctttttttttttttgtccacatccacacaagcaacaactaaaatttcacagaagaccttctctctctggaactttctagtgggttgcatcccgttacagtgttctggttcacttccagtgtaatctctcccttgtggtgattctaaacctcatttcagctctttcgattacttgttttgtaatcttgactaattgatcttattagtttctctgtcctcatttattgtgatttaaccccaatttaattttactgtctccttcatagcgttttctcttcttctttctccttctctcttaattaagtttcttcagagaatcaagctccagggatttctctccttggattatctgctctctctcttcgtatatcccatcccatttatttcaagccgtcgttttggctttctcaaggaaggattgatgattacatctaaggattttggatttgggctaggattactgcagggtaggacgatcattacaagctttttcttcgtctctaagactgctacttacaggtatacttctcatttcatctatttaaaggtctgggtcacttggcgttctctactcttctgcctgactttgctttcttactctgaatattcctgggttatctacttatcttacttgtattgggttatggagggaattactgagaatatggctagtgtgttgtcccttactgagcaagaggctgttgttcacgaacatcttgatgatgtgggtgagggggttgaattggggaagtctttctgtcttgtttttagagtgttcacaactaggaatgtcaaacttgactggttcgaagaagccatgcgaaatgcatggattactcgtgcccctatttccttttctgagtatggtaatgggatgtttatggtggaatttgggtgtgagggggacatgaggagagtcatcgagggacagccgtggcattttgaccactgcttggtcactagtgccaatcctgctggtcttgacatccttcttcccaaccagatacgttattctcccttttggattcaggttcattccattccttttggaatgaaatcctacaagttggccaaaatgattggggatgaagttggagactttcttgaagctgataaaatgactcttcttaaagtctctggcttattcctccgcattcgagtcctgttagatgtttccaagcctatccctaggggtatccttgttgattttaggaacattcacaaggagaaatggcttaatttcaagtacgaaagcctacccaatatctgtttccattgtggtatgtttgatcacaccctcaccaaatgtgtctcgtacctaaagaagtgtgatgagtttaacctcccacctcctttgcactataaaattcctctcaaggcccctgctaaaactaactttaaacggaatccgtttgacctctctaactctcaccctcttgatgagttaccattatctcaggggcaagttga

SEQ ID NO: 245466 - DNA, 1035 bp, Cannabis indica
gcataaaacccaacagtcttctcttttcagttatggaggaagtttttgctgtcttttgtttgctctaaggctaagggtgtcattcgttggtttcatttattagttaagaggattggaactgtttgctttctttttggccacctgggtcaccatcagcgaggggctaagctttcttcctcggtcacgatatcggactcgcatggttccacatttacgttgtacaggccatggatggactcgtcattgtatgaagactacttctctggtatcaaagttgattcagtccatggctctgctatttgggtggctggacaaccatggtctccggtctctgcgacgccggtggccgagggtatgagtggtgctcctcgggctggcaagcatgctggtaatcgtccttgctcagtctcgcatgcatgcggggccttgtgctatctctgttaatgtttatgcaaatggtaatatggaaagaaatgatggaaataataatgtaaaattaccttttgtggagagaaccgttggtggaagtggggctttgattgatgagctgtcatttattttgaatggggaaggaatagctggctcaatgcccaccatggagaaaagtagggtgttgtgtgggcccattgaatgtcacatgggtttgaagattgggcctagtactttgggccttttggatcaatcaaaaaatagctctacttttggacaagagattaattttcaacaagatgagagctaaaaaattgggaaacttacaaaaatattggattttgaccaaatctttacaaaaatactgtcacacggcaaaaataactttttatactgccttgggacttttttttctttatactgtaaacactgaaaataaaaaccaggtctccatcttctacacccacaatcagaaaaaacagccaaaaaaataaccattaaatctatgagatgaagcagaaacattaaaataattaatattagggctctcatggtttttctaatgttatttttgggttgttctactattgtttcgtatgtttaaca

SEQ ID NO: 245467 - DNA, 1762 bp, Cannabis indica
aaaaaaaaaaacaagtacaaaagttatttttggagtgtaacagtataaaagaaagaaaatgggaaaacacagtaaactgtgtaaatttcccaaacaaaaatgtaaaagcttaatcaagacaatatatgcgatcatagatgaagctatagaatataaccaaagaaaatatagaatagtaccaattattaattgtatatagtttactattatacagtctagctttaagcattcatagatacgaccatatacatacatacatatataatcaaggacatgaaatcttttcctttatattatgacccactttacaattgatgttcccatacaatgatgattagatttaatttaattagagaattatttaattgtttacaacgaattctctagattctctttattttttgtaatcgtattatatatattgttgtatgtctaggtcatatctctttcaatagtacttcttaacttactaatattttatgttatagttggagttataattattaggccaaacgacttaatgcaaaagaaatatttaattaatacaaacaataatattcttaatttgttgtcatcaatacaagagaaaagcactgagcaagtatcaaagttgatatataaatatgtataacaccacacatataatctcaaaagaataacacacatacttgtttagttcatcattacacaaccaaaaaataataaaagaaacatatatgtagctttcttgtttaatattaaaacaaatccaagttattgataataaggaatgatcagaagtagtgtacgtagtactaatcacctatggtagtgtcgatattaaaaatgcgagcacaagtataaaccgagcaaaacgcttgcaaagccatcaaaagcaacatcaaaatggcagccaagaaagtcagaaactgccatgaaccaatcacgtaaagtttcatgaactttcctaatttgaccttccatctcccgttgtgatacttgttcacatcctcaatcaccttatccaagaagggcactctcgtcaatctaacggacttactcatcccattccacaagttagccacttcttcatcacttttcaaacggttcttaatgatacccctttctctaagaagcttaacatcttcgtcggtatcaataatcccattcattagctcagtgtaacgtgtaaaaactaacggcccagatgcgtttgatgcttcgtaagccactaagtttctcattatggcttctgcattaacatctaaactaacggtcgggaggtagagagtaactgttttaacgtcaaaactaacgtttgagaggttattaccgtttgttggcaagaactgaacaccagagttgaaaagctcagtcactgaagggataaagatctcctcaatcaatggtggcttgttgtttgaatcctcttcttctggtttaacttcttctttattttcattgaaaaacaagaactcaataggcgttttgagaagtctgaatccgggaaggttggacaagattttccatggcagtttcaaaaacactttaactggtttagagaaaagtaccctttttaggaaacatattggacctctatttagcttagaaatcatcttccaaactatagagagaaccttttttacagagttactattagtaaaaaaactatctttcccttcttcttcatcatgatcattatcatcactgctttgatcctccacaacctcaattacttgatcttgtcgttgttggacttccattttgggtgtgatcatgtcgt

SEQ ID NO: 245468 - DNA, 768 bp, Cannabis indica
taacccggacaccaaacttggacccgatactgagacctggacccgaacttggacttagggtcaggggtatggtcaaacctgggtttggggttcaaagttcgaggtcgggtctaaggtttgggtctggggtccagggttccagtcttgggtctggggtgggtccaggtccaggtcgtgttcggggttcgagtctttggttcggggtctgggatggggtctgagtccaagaccaagtccaggttgggattgggattgtggtcaagtttattgtaaatatattataattctacacaacctattaatacaagacaatactaaatatagcattgtattaaataatactaatataatataatacaatctaatataatactatataatatgatataacactgtatactaaacgaaccctaaaagatttgaccacaaatttatctctagaataattaagtgaaacatatggctccacatgccaccaaataaggctcataaaaataatcacgtcatttattttttattgacttatattatacatcaagagtaagtctttatatatttatatatttgaaattattaattgcttaatacatagattaaaccatattttttagatcctaaagtcttatctttttatatcatcacgaactataattaatgtttttaaacaatgacaccatctccaatataaaatataaatattatgtcaaatttaaaataaaaaattaacaaatatcatatttagtacaatatttatatttatgcttacac

SEQ ID NO: 245469 - DNA, 1382 bp, Cannabis indica
atagtcttaattcttcttttttcttttttcatattagtaaataaaataaaaatcccaaaaaaaataaaagaagggtatcaaactagggattccaaaagaaagatcatgtcacaaagattcacaacgtaatatatatgaaagcaatgaattgacccaacatatttttttggtagcagtaaacagtcttattatttggcttcatattagtataatttctatttgtatttttcattgtcatttttattaatattatgaatattgaaaactcaaagtagagagagaatgaaagtgatattttttatgcactaacacacataatacactcgtacgtacacacatgtatatatatatatattatataagcatgtgatatctctttctatatggagtggggtttctctctctccttctctctcaactatgctatgtttgacgaagattagaccataaagctactttgtttttctctttggccaaacttttcaaacgaataatatatatacgtatacatatacatatatatatattcaattcatttaaaataatatttaatcacctttaatgtaaaaagtcacatacattgccatttattgattttctacaaattaagtaaaatttgggattttattttgtactcatataataatcataatttctgttttttttttcatgtttaaatgttaatttcaaatcaaaactcttatctttttgctcttttctattttacttttacatagtatttattgtagtagaatacccacgatttttaattttttttggaatatgttttaataatttacagtcatagtaagaatccaaacagtatattatttatctatttttcatatatataacacaatactattttaaacaatgatttagtaccataaattatcttggcaatttttacaatgaattctttttatatataagtttttctggccattatattcttaagtgtagtttacttttttttatgatacaatttatctttttctttttaaaaattgctagaaaattcaccatttttgtaagataaaggagctatatactttcatgtgttaccaccactagcttggagagaataaatctaaagtaagtattaacattcattattattttgttgaaagtatacaatacaatactattttattcattatttattagaaaatatatataaaatatgatttttttttatttttacatttttaaactaattttattttttttatttttactagtaaactcacacaaaaacttcataacaagtatagagcaacgtaaatcgtaaacaacggaacaacttaaattacaaccaaaatgtacatagcaatccatataaaaaccaccgaagcattccaaatcgtaaattaaaaataaaa

SEQ ID NO: 245470 - DNA, 1025 bp, Cannabis indica
tagagtattctaaagcatttctgaatagtagtttttaaattagttttatttgttgaaaaaaaaaattgagaaacactcttttaattaactatctacatatttaattattttttttaaaaaattaccaataaaaagtcaaatatttggttgttttgactttttttttaatattatatatctagataaaaataatgaaggttcatataatttcatattgtctaatttttctttttcttttcaatatggcagaatgttcacagaatcatgcaaacgtatcagactgatgaaaagttcagaggctcttgggttaggtaataatacacacttatatacattaaaaatgacctctttcttttttcacctaattaattaatatggtttctatttactaaccattttggcctcttcacacatgcagcagctcgatccaagaacgagtcttgaatcaattgagcatcgaattaattatcagagctaccaattaattaattgtgccacacaaagcaccccacacccctccccagtacatatatattttctgagagttgattagtgtattccaccatgagagattaaggttaatattaggcaataataatgagaaatagaccacttgccatggttacatatatatggtgcctcgatcccttgtattaatattttttcaattgatgtattttttttaatgttaatgtacttttcctggctttttgttttgttttcttgcgaagagtttgttatgctttgtggaataatatttaggaggggcttgtttggtaggtaagtccaattgtatggtattatattaaattgggttacataacatatttttatataatattaaattaaatttcaatttaaaatactaaaatattatatatttaggtgtttataaaagttaataccccatatagttttgcaacaaaaatattgcataaatacaattcaataaaatactatacaaaataatacgttgtaatactatatttgcgactgagagcactctcatagtttctctactctgt

SEQ ID NO: 245471 - DNA, 931 bp, Cannabis indica
attcgaacacactctccatagcaacaaactcatccgtggatgtaccttagagttccaaatccatctccaaagctcatctttttcgccaaacctctccttttggtcaacccaataagccccctttacactaaaatttcccactaaggaatccttccagataaggaagtcactagaagcattcaggttaatttggatcatgccaatcttgttgcccacatcactactaaataggtatcgaagataacccacattccattttctggtgcttctatacatcaaatctgccacagatctcagactaggagcttttgaacgaatactctccatcaattcacggaattgatcatagtccaaccatggaatccacggttgccaccaaacatccacctcttcacccgagacaaggacagtacacgcccccttgcaaatcgtattcctagctcttaggatacctcgccacaaaaagctatcagtattcttttcttgcacactccaaaaagactctctaggaaagtattttccttttagaatattacacaccaaggtcgattaaccttgcaagccaacatccacacaagtttagcaagtaaggcatgattaatgtcttcgaagcggcaaaacccgagaccccccctcatcttggcttgacagatagaattccacgatttagcagcccacatattctgattttcaagaaaaccattccaccaataccttcgaaccaccgcatcgagctctcgacaagaagagagacggattctgaaagtagacatagcataatttggaagagccaaggcgactgagttgatgtacaccatcctcccagccttagaaagcgactttagtttccaaccctcgagtctctccaccagtttggatttgagaaaatcaaagtctttcctcttactccgaccgaatataaaggggttac

SEQ ID NO: 245472 - DNA, 1204 bp, Cannabis indica
ttttatcataaactcgacctcaactctctcccattcgagaattagagccaggttcgagatttggtctaaggttttgagtcaagttagggtccagttttggggtccaggtctagggtctgtgtctaggtttgagggttcatggtttgaattggggtctagttcaggggttgggatctgggttcgagtttgagttggggttcatgtccaggtcaagggtctgactttaggttttagggtccaagactccaaggttcgaggtcgggtccaaggtcaaggtatgttctgggttgggattggggtttggggtcgggttggggtttggatctgggtttggggtttaaggttcgaggtccggggcctgagttcgaggacggggctaggtctgagtttaggttcggggccaaagtccagagttcgggttaggtttgggatttggggctaggtccgggttcgagtttggggcttaggttcaggtttagggtttggggttaggttcgagtctggggtccgagttcggggtcgaggctaggttcgaagtctggggccagagtctgagtttcggggctgggttggggttcaagacgagggccgagtctggggtcgggtctccaactccagactcattataaatattataatacgagctaatacgtatcattttttttatatatattaaataatatgattcatattgaattaaaatttatggtcgtaataattaatacaatacaatattttatccgagcggagtgttacgttatttaatacaatataacatttatatgatttaccaaatgagatctaataatgtaaaatacgtgagactcgatacttaattagatcaatagtgatgattatggtagcgttggtcactactaaaatttttagcatttctcaaatataattaagtattgattgattaatttaaatttaaagagttttttcggagtaattatcttaagtattaatcaccacattgacatatataaagatattgctattaaacattagtattgtttgtgatagcataacactacaaataattaaaaaaaattagatacaggtaattatcttaagtataattaagtatcgattgataactttaattttaaagaattttttcggagtaattatcttaagtattaatcaccacattatattgctattagacattagtattatttgtgatagcataacactacaa

SEQ ID NO: 245473 - DNA, 1136 bp, Cannabis indica
actctaactcccaagttgcttcctcaacattgttgtttctccataatattttaaccaatggaatggtcttatttcgaagtacatttttcttctattccaaaacctggataggtgtttcctcatatgataagtttgtttgaagctcaatgtcattatagcacaaaatatgtatcggatctgacacgtactttctcaggatagagatatgaaacacattatgcactatggacaacgcaggaggtaaagctagccgataggctacctgacctactcgttccagtattttaaaaggatcaatgaatctagggcttagtttctctttcttccaaaatttacgtatctctttcataggtgatactcgaagaaatacagaatctctcacttggaactcaatatccctacgcttcggatcaacgtagcttttttgtctactttgtgaagcaaagcatacgagatcaaatattttcaatggcttcactagtcctttgaaccacttcaagtccaaggtgtcgtctctcaccagtctcatcctagtgaatacgtaatcgacattttctaccatacaacatctcgtaaggtgtcatacttatggtactttggtaactgttattgtacaagaactctatcaaaagtagaaatttattcctgaaaccctcaaaatctatcacacatgatcgcaatatgtcttttagtatttgaatagtcctctcagactgaccatccgtctgagaatgaaaggatgtactgaacttcaacttggttcccatggctttctgtaaacttttccaaaattagaaataaatttaggagcacgtctatattttagtaattttattttataagttttaggtatttatgaattatcattaaaattatttttttataaaaaaaaatacactacgcatttctaagtaagcatatacatatactagcaaaaagttacgtgcgaggcatgtatactaaaatttaggctaagtattttttactttatttaaaaataataaaattaaaaattaaagaaaaaatattattagttattaggtgagattattattatgtatatctaaataatataatttataattttaacaattaaaaaaaaataccagatgcaatatattagtgtttaagaaagc

SEQ ID NO: 245474 - DNA, 934 bp, Cannabis indica
ctttatcaattgtctgcttaaggactgaagcacatttcagtactctccatccgatcagtaccaataagcgataatttatcattataaagttccatatatccaaaggcatcagttcctggagggcactcaagggcagcttcaagaactctgtggtgtattccatgagagtcaattgaatgcccacctttgtgatcatgaccagctatgcaaacctttacacaagtgtacctgtgtatcagatccattacttcgtcgtagttccatagaagagcttcacgagatgttgagccgggatctaaaggcaggtggcaacagatcattactttttgcctcatgtttgttgcttgctgaaggatgccatctaaccatttaagttgttctttccctactgctccattaaacatgaggaaccttctctcgaggccaaccagtccctcggggctattcttttccatatttggattcttctcctggagaaatttcacagcctccaatcttttgggatggtcttgaggccaaccaattgcacttatgtcatagccatccaagacaacgaatctgaactcaggcgttggagaaaaatcgtagtaagcacaaccgtccttgcttggaatcttcaacatcggaagtaacttgtcacgaggaagattatagaggcaatgattaccaatcatatgatagacaggaccatcaaatttctcaaattcttcaactactcttttaactgtactaaaagattgatctttcgggcaaaaaccatcaacaatgtccccaaaattgatgacaaatttatgcttcttgtcctcattccatctctgcactgctctctgtaatataagaatactatgacgataataccgtggaacgccaataaaagagcggccatcaggaatatcagcatgctgaacatcagcgattacgccaaaagacaaga

SEQ ID NO: 245475 - DNA, 1396 bp, Cannabis indica
tttttcttaatttttttaaaaagtggacatttactaacttagttaccaaatttagggtcattttgcatttcacatgatcctcacattatttgggataatattgccttgtctcaattaattggtttattaaattaattataattctaaagaagactatgtctgatttatacatttttattaaggaagggcaatttaagaagtaaagagatagcttctttgttaattaagacgaatttaattaataaatatatttaaatagtaatttttttatataaatatgtttggattgcagtagattactttcacatgtaatgaactttccatagcataatatgattttgatgttattgtattgtgtaagagaatttaagtcttcttgctcctccaatgttttgtagttggttaaccgcaaatgggatgcgtctatcttgtgtcactcacaaagtactacgccccatattatatcaccaactctctatatgaaattgaaaattcacatgaagacattggttttcttcatgtccacacgacttgggattgatcatgtaaattcttttaaaaaaaactccatcccagttttttactttcttcccataatatttatctacttacaagttaattctatttgcatatgaacattaacaagttgtataaataattggccaaataataagcatgttgtcctaccaaaaataaataaataaataaatcaataaataagcatgttgtacaacgcaactagactacagttggtggtttctttacattgcataaataaataaataaagaacaaaacaatagagatgtttagttaccgtagcttcaattttcgtttgtcaaaatgggacatgtagggcaaaaaaatagagttaccttatgttacaagactttgggttgtgctatgctacagtttataaacaaaatgtgagcacatcattggaaaactaactagtatttgattacatgatggcgtaaccggaaagatcgtacatcaccatatgaaatgcatcgtatttgattggaggtgagttccattggaagtgcttttgaatctgatttaaacatgccatgtaaaaatatgctctttcaacatataaacattttgtaaacgaaattaagagatgaagttgcagatgagagaggctctcttacctgaattaagttcctatgaagagcaagaaactcttcattaggtatgtccttaagaatttgtttaagctggtagacatcactctccttaagtacgacagaaaattttcgccaatcaaggatatcattgaatggaagatcataatagtttgataatatcactggaaaagacatcacattaaattacgttagcatagaactcttcaaaagatggaccacaaaaggttttcaaataatgacaccagat

SEQ ID NO: 245476 - DNA, 1037 bp, Cannabis indica
ttaatttttatatatataagattaagtctacgtttaaacctcttaatttaatgttatcatctatacaactcggattcatacactttttcttatttatgtataaattatagtttaaccaaatgccataaattatacctactaacacatattcttatgatatatatatttattacacatctatatatatatatatatatatacattattcatttgtaaaattatatatatgtgttttttaacacatttattaattttttaataacaaaaaaataaagccaaaaaaagaaatagctcattaatgtataaatacaaacatttataaagctctcttttctgtttttttcaacattttttttataaaacaaccatttttttaacgaaaaaataattacatatatacacactaacatataccatataacatctatttaactttaatcttattggttataaaaattaacccatgccatgaggtacacagtcttatagtaaaattatgatctatatatatgattttcttttattcatttaatttatttaatatttttaaaaataataggttgatttatataatatttatttgtttataagccaatatattgatgtcatgtttagtcaaatttgacttgagatgaattgcaacaaatcattcaattaatggagtacagaacatcacaaaataaattatatatggctgtctggattgggttactatggtaatgtgaaatattattcagtttattttattttaacgatatttagccttaaattatatttctttaataatataactactcagaaaattaaaaaatggtaagtttaaattattctcttctttatattaatttgaacaatattttataggagttttttatttttatattttaaaacaattttttctaatttttattaaatttcacataaaaatttcatagcaacctaaatcgcaaccaaaatctacatagcaactcacatataaattactggagcaacccgagccgtaaattaaaaaaaaaatagtatatgaaataatttct

SEQ ID NO: 245477 - DNA, 883 bp, Cannabis indica
ggcactttgtatgtattccttaacggcacaataattaaattgtctagaaacgacacaatttcaaaaaacgacatctttttaggaaacgacatcattattttttttatccgagaaacgacattgttaacttgtaactgaaaacactgaccgaataatattaattagatgatgacgtggtagttggtactttgtatgtattggttaacggcacaataattgaacggcctagaacgacaaaatttcccataaacgacatcattttaggaaacgacaccattaacatttgttttattttagaaacgacatcattagctagtaaataaaaactcactgtcactgttaataataattaaatgatgacgtggcagttcgtatatatatcttaaattcctgattagcgctctaatccaaactcaattcctcctgtgattaatgattaccgctaaaacttcagttatttcttaattacaaaacccaaaacaccaaagtttctccttctatggctcaccataagttttcttgtgttttctttgatcttggcgtataaagattgtctgtggtggattttgattaatcaaattgcaatgactgtatttgaatcttttaaatagtctcgtattagtactttattgtatattgccatcgaaaagaatgagttttaatgataaattcagtttgtagattgtgtatgaaaatgatttgatgaaatgcctgaatgaatttaacgatcctaaataatccaaacttgaagttttttcagtaatccacacatgaacattggagttttagagtatgtatacacattcttattattatatatctatatactgttcctgtatcaataaaagcatttcatttcctgtatgaagagggctttttttcc

SEQ ID NO: 245478 - DNA, 605 bp, Cannabis indica
gtcttatgtaagtggaacacattacttggaccatgaggatgtaggagtttaggagtacacccatagactaacttcatcacattttgaatatatcattacatttgagataggggtaatagtatattccccttagactggttttattcctgtacgtgtgtggtgattgtttatcctacttataagggtgttagtttgtcgtccccttggggtagtcaccttcttcaagctaggagaaaaagtgactgtcagactcattttttaacgatcatgacaatcggtcatgtctcacagtcaatactttacacattcttcattaattcgatctcggtatcctcgtgccacgtatcatccttttttccacgtcaccatcgttaaatttgggtaaacaaatggtaatatagtaaatataaaagataagttatgtaaaaattaatgaatcataataataagtggcaataaaaatgtaaaatttattgtaggccaaatttagcacaatgctatattttgtgccaactgccaaatttgcaacaattttagcatgcatcaaatttggtacactttttttctttttttttgaatggtaaatcaaactttattagataacc

SEQ ID NO: 245479 - DNA, 584 bp, Cannabis indica
aatacccctcacatttcaaatccctaaactcggcctctctcttcctctctctcaactcactatcgctcaacccacgaaaaccccaaccgacggtgactttgcagccgacttcgacccacgctcgacccatcgaccgacagtggtggctgatccaatcgacggcgcagaggaggagcgacccacggtggtgacccgaagctaaaatgtccaagggatgttgtgatttttttgttttttttagaaagtgttaaaagatttattttgtttgtgattttgtttgggattgtttgtgaaacctattatttgttagatttaagaaattttttgtggaattgggattcagatctgtgaaaggagaagagattgggttgtttcgaatcttgggaagaagagggtccgatggtccgactgtgtgggtccaatgggtcccgatgcatgggtcagatgggtcttgatgcatgggtccgatggttctgatgcatgggtccgatgggcattttttttgggaggttttgaagtcgggtccgatgggcccgatgccgtccgatgggtcctgatacatgggtccgatggtctcgatgcat

SEQ ID NO: 245480 - DNA, 616 bp, Cannabis indica
caattagaatacaacaaaaatgttctcatgggtgagcgcaaaagtgatgctctcacctaaggagtaccctatatatatatttaatctgagttatatataagggtgcaaaaaatcaaacaatccaattacaactgactcatctaatcacaactaatccaaaacaatctttgtgtttggtgcataggtgccgctggtgcacatgacatccaccaagtgaacaagtaatagaaacttgtagtttgtaaagctaataagatttatttggataaaaattaaaagtaaaatttaagaaaacaagaaaaaaaacaacacaaaggtaaacttgattaaaaaaaatcttgtgtatggtgcatagacctctatgggtgtgcacatgtgctcacacaaataccaatttcacaaacagcgaaaactcgtggtttgtaaggccatataaaatttatttggatgaaaactaaaagtgaaacttacgaaaacaagaaaataaaacaaaataaagagaaacttagtctaaaaaatcttgtgcccagtgcataggtgcccatggtgtacagggtcatggtatccactaagtgcacaagtaacggaacacatggtttgtaaggccatataagat

SEQ ID NO: 245481 - DNA, 596 bp, Cannabis indica
caggccaaaagatttcgatcatcacaatctcagcatggttttgtggcaaggaatgcatgagcgagtattggttataggtctaatgctcttcacagcaaaaaagaatacttattttttcgctggccccataataatcaactaagctactattcctgcatcacttaaaaaaaaaaaaaaattgacgcaaccacgctccaatatataaaatagccagtgctatgctatcagcatactcaaataacagtttcaagtgtttagcaatattctcccaatattaaaatccaaaaaatagaatcattctaatattaattttggaagcgaaaaatatagttaaattttaaacttaattttagggtcttccattagaaagagcccttcaaaaataagcgtatgccattgaaagtgacaagcacacggtattctttagtaaaaggcgaaagaatagttcgctttgtgcttaacacatggctgcttggtcttaataaaattatcattagttgtattatagataatctcttggaaaagttcttaagctttcttcaatgtgggagaaatagactgaaaattggtacgtatatcattacattcacaatttg

SEQ ID NO: 245482 - DNA, 1500 bp, Cannabis indica
tgtattaattaaaatttattttaagataccaactatgtacaatttaaaaatatgagatactaattaagtattattgaaaacatatgatactaaatgagtatattccctacataaaattgatacagtgagcactctaattagcttctctactctatcatttaaaatattttattaaaattttattttatttttattttatttcacatatttatattatattatattgacttgtttattttttttttctctacatcggtttaaataatatatatttaatatttttataaataaaatataatatatatatatatatatgtatgtgatattaaatatggaaagagaaatgaataaaaattaattaaaaaatatttactttatatcaataccttagctacagtaatgattttgcattgtaatagtacacacgtattttagcttatctgatatgtgagcttcctttaagaaaataaaaataaagaaagaaagatatatatttgacccaaatcacatcttttattttagctattgagtagtttaactcacgtaagttctctcttaggcctaagttacattcaataatgagactcatcttaaatattagttgatcatatatagaactagtcaaatttataacaataataagaaatgtacacaatcaaatatacacgtgcgtatctttatagacaagctagtcttactacgttttttctactatattctactaattttttaataaatttttaaaaaattatataaatctacaaattaatattttattattattttaattttttaattttatatttttaaaaaaaattaaaaaatagaaaataaatttacaaaaaatattaaaacttaaatcaaatataattaataataaattttatttatatacatatataaaatatcaagcaatatatatataaatctaaatctatatatataaagtggagatataaagcggtaacatagtactttaaaattgctttaaagttatttttcttttctctctttaattttctcatttcttttaatttttaattcatataaaattgtttaaaaattatttttctcttttctccttaattctctcacttttttaattttaattctaccaaaaataactccataaaattgaaattatagtaataataatacaatatacaaccttaacattttttattatttttttttaaataataataatttaaaaatgataattctaatatgtacgtttttggcttttctttaaaaaaagatataataataataataaaagaatcagttgtacgtaatacttgaaataatatttcaattgctttttaccacgtttaaatttttcattaaaaaatattaattaatttttaacaaaagcttactttacgttttttttaaatgattgattttaatgttcaagtatcacataattataaactaaagagcattaagtattgggcatgagtgatgtcttacaccttttcatatgtgacacttttacga

SEQ ID NO: 245483 - DNA, 1734 bp, Cannabis indica
agtaatttgtggcataaataaagtttaatttttaattacaaataaatacctaaatttaattttttacggtaataatacctaagttatatatatttttaaaactttgtaggtacctaaccgttaaatattaagtcattacattcacgtgtcattttttttattggtatatatttgaactaatttttttttaaataataaaaatttaatgaatagactaatcaagattgtcacatggtaatttatttaaccaagtacctacagaaattttaaaattataacttaaatattattactgctaaaaattaaaattaagtattaatttataattaaaagttatatttaagtatttatgctcgaaattactattttttaataattttaaatcattgtttagaattaagcaattacttattaaaaaaaatagaaatatttctaatttatgtttgttggacagataatataattacatatagattaattgtacatacttttaacaagatattagttgtatctaatacctttcaataatatagaattatatagttacttataaaattaaatatcaaatctcatataatttaataaaataacttttatataataattatattttaaaattgatgaaaaacttaagattttctatattatttggaaatgtgtttgattttattgcagcactattatattttcaattaataatttattacttttaaaaatatataaaaaaaaaaacaacaatatcgtttacacgtttggacccacttataaaacaaaatgtttgaccaggtccccactaactggtcaatcaaagctgtgtacgtatgccacgtggacaaaagctagaagaagattaattggaatcaagatcgaaatctatggactaatttggactctgaaattggctgcccccaccacctttgcacattaatgtttatagttgatattgctatactttgcacctcaatatccaaatggctgttaattaatagaaataataaataaataaataaaagcatatatttaatttagtttaaattagatatatattcctctttaattacactataccatatatttttatttatctctcaatattgttgatgtttttgtgcctttataatatattcaagcaaagttgggacttaacttttattaatttttcattatataatcaagtggaaaagtgggttggcttagtgttaaggccatgtttgcttgaatttcaagcatctttatttgttcttggcatttattctctaaaatgaatatattcctttgaaggtgaatttgtgggacctcactttatggaattttaacactttacaaagcttcttcttttctatctaactcatcatccctacctagggttttctcatatacatttaatcatatatatattgcccattattgcttaaatttgcagcaaatagtaaatgcataggtggaaaatgatccctcttcgagatattatcgggaccaaaatgtgaattttagttatatattatacaaaaatcagagaatgatgttattatatgtctattgtatttaaatactttaagtaattttttttagaggtttttataaatatatagattttagataaaaatttataattttactgtcacacagaattttttataaaaatactctttttataaaataactgtaaaaacaatttaaaaataaccgtaaaataacaaatgaaaacttaacacagtacacagtataaactta

SEQ ID NO: 245484 - DNA, 763 bp, Cannabis indica
ccctatcattcacatatctatccgccatctccatatctaaagaacttcccgctgccatcgataaaacaccagaaaaattacgccagaaaaaccagaaaaaacacaccagaaatcgccactccaatgcaccagtagccaatgaaacagtagccaatgagcaacagttgaacgcaaacaagaaacgacacaaactcagacttccaaaacactctcaaaccatgtcacgagacaagacaaaataaaatgcccttttaataatttacttagacttgctaaataaaagcatcaagaattaggctaaagagaaatttactattttatccattgaaatagctactattttatccattgtactatttaagtgtacattataagaaattagtgtcatcaactgtttcaaatgcatccctagctaattaggagaaaattactaaataagttttcaaataaagagattagtttaaagtttgcaatttagttattagtttatgttaatattattagtgagtatattagcttggagtttgtgaatagtgagtataaataatgtggtttttgttataaacttattataaataatataaaataaataataatgataagagagaaagagaaactgaataagaatttttcattaatttattttactggggtgaattcttatttatataaaactttgactagaataatgggaaactaagtcaatgaaataaataaataaaaaaaaaacaatagtatttatggtataattgatttgggtgat

SEQ ID NO: 245485 - DNA, 1464 bp, Cannabis indica
aacattaaatgttatttctgatctttattaataagtaaatttgattatatgaaatgagttttatttagggcataaaacccaacactggccccctcaaatgtttcgcgagtaagtctccctggtggataacaactgaactctccagcaaccaccgatctaacccaggagtctcacttatattcaataccagaagtcctgagggtattacttacatagtctctgatggctcgcacctttgactctattagcgtggcctcgaaggtgattttagggtcctggggagtctttgatttacatggcttggaagacataatttcaaagtccaggtcacctggttcaaaagcaatcatgaccttgtgtaaaaacaaagacttagccaaaggaatagaagacaaacgaggaggttcgggccaagcagcgtctcgcaagaaacgtcatctcccttctgtaatttcttgaaaaaagcgtctgtggcgactagcaatatcttctttgtgggttttcactaaatgttccccaattttcgcatcatttatctttaatttggatttggcaactgaaattctgggtttgtatgggatggcaagttcagtaggacactctatttctaaatattctggacgataaacttctgaactagattgggacattgctgcaaagagaaagtaatccaaattcttggatgaaatttatcaaaccagaagtttgtaaattgcagaaactcgaaaacctatgttctgcctaaaccctaacatttacccagatacaattcaaccctaaaattactagaaccaaatgacgtaacaaaggtgctaactaggaaattagtaatcaaacccagaaacacaaaattaaaagcatgtaagaaaataaagaggagtgtcacttgctgtttgaagttggtttttgggacgatgagtggttctgcaatcgacgaaacaacggacggtgtgaagatccttctgaatgcttaaagtcaaaaattgaataagatgatattcgcaggaaaaatgttaatgacaaagatggcatgcaaggttttgagctaatctgggtttgcttttttctgcagaaaagcttgaaaaattttcagagcttttgaaatggcaaaagtagtgtaacggtggttccttttttcgttttatactcttgggttaatctctgtcagatcatgagacaattgatccaacaggtagaatttaaaaaagaagtgaaaaagataatcattaaatgttgatgtacatcgaaaccgcaaaactgcaaaaatcaaaggacatgcatttttccaaaagggatgatgacaaaataccctatgtaatcatttaaaaagcacttttctttaaaaagaactttttaagaagcaattgctatacctgaaattcggctggcacttcagaggaggacactgttggatatttattttaccagaatcttagatctactcacaagtatgttgtttaaaca

SEQ ID NO: 245486 - DNA, 1368 bp, Cannabis indica
atgggtggaaatatggtagtataatgtcaattgaggttcattgggaactagtgatcttcctttaatttgccttaaaattatataaattttttaatgtcttagtgctacctcatttatcttcaatttcttttgaagactcaattatcataacaaggcattctatggtcagttagttttgtttaaaaggaaaaaaagttaaaaacaattatgaattatcttaataaggcattctatggtcataaaaatagcttaaatgtcaatttccaagaattactctttcaatatatatagatacacaataaatatacatatatatttggaaaattctataaatatatatagatacacaatgtatatatatatatttggaaaattctatagaccaccatatatatttcagggtgctctagaatgcactccttatctatttcagcatctagtataattttttagcctaattatttttaatgtatttaaaacattatgtaaaattttaagaaattcagaataatttataatatagaaataaataataatgtaatgttcaaataatttatttcatatgcgtataaaataaaagttacgtgtgataaattatttgaatcatatttttcagcatgttaaattattttgaatttttttaaaattttgcagaatgtcctataattataacatcacgatcatgaaaaaaaaatacattaaaaaattctctcgaatgtcaaaaacaaataggatgcatcgttgtatttcttttaaaaaatgcattgttagaatttttttatattttatggtgttcaacacaacatatgtatcattatgaaatttaagaaaattacttcaatgccccagggcattgatacatctctatttgtttgacatttgagtattttcatcatcttcaaaaaggaaatgaatatgtatgtgattgtttgtaatttttaaaaaataattataattaaatgtcaacttaaaaatattatttttttaaaaaaattaatttaacaataaataaaaaattaaatttttgtacttaattttattatttaattaaaaaaaatattttttatactatattaaaaatatatttgtatttagtattacttttatctctctctttaacttaactttttttttatttatttttatcttgacctaatggaagaaccaacaactaagccaatttacaaaaacattcatccacttgattattattattaaagtaataatagaagcattattattaaagtaaaacattcaaacaatgaaatttaataatgatgtgtttcatccattttatggcctttttttttttttttaattttgattagcaaaatttattatagaaactcaaaattttctaataatacc

SEQ ID NO: 245487 - DNA, 1003 bp, Cannabis indica
ttattgttgctattgagaacccccaagacatgattgtccagtctgcaagtccttattgtcaaagagcagttctaaaatttgctcagtacactggtgctcatgccattgttgaaagactgatggataaaccaagttaatcatgtaccgagcgagatgacacagcgagatacacttagtagcgtgtcttactccacctcagcattgaccctttaaagtgatttatatcacagctgtgtgatttttaaataataattggagtaatttatgtggagcgtaataaaggcccataatttcaggaaaatattattgtgggattcaaatttgaatgtaattaactgccaaccaatgttactataaatagcggcagattatacaaaaaaagggacagaaaatccttgagagaaaaaagaatacactgtttgtaaagaacccttgttctgtattagaaaagtctggataagattgacttgtggattatgcagagttaactgcaaagccacataaaaaaacctggtgttatttctgcttttgtgattctttcttgaatttctataatttttgtgctaaacctatcacgaaaaaaggctcattatcgttaatgaagatctgcgttaacatcatatctcaaaattatgtgtaattaatcgattttgcctcaaatgattatcaaagaagttctagagttgtttagatgagaaatgaacaattacacatgagcttgtgttttcaaatatttacaaattttgataattcaattattgtgaaaaataaaacaagcttgagtaataattaaccacaattaagcacacaattgatgaggaatttatcatcttcctagcattatcttgaggtcatttaaaagtctcatcattgattcattactgttaactaaagtcattgctcaaattcatcacataaatagtcataaaaagaaactaccaaaacataaaaacataaggaaaagacataaagataaatgccacataaaaacaacaacataaaa

SEQ ID NO: 245488 - DNA, 742 bp, Cannabis indica
gttataaggaaaaaaaaaaaaaaaaaaggttgaccaaccttttcctttttcatttatagtggttgacatgtacaacttgttaatattttggaaatagaactaattcggtttgtggttttcacaatgtgcgcgatttttaacagtgtgaaaaatttctttatattgctaaaatctttgtaccaaattaataatgtgtatttccatatgacataataaccttattttccaatagttacatattctaacgtaatgttcatctattatgctctttcaagagatcgtcataaaactttttggaatcaaaatgtgacatttaaaaattcagttgtacccagcgacggacacacttttattaatgtggggctatactaataaaaatattgttttttaaaaaattaaatgcaattttttttaatttaataattataaatcaaaatgattaaaaaaaattcccacaaaattaaataaatctagttagaataattataatataggtataaatattatttaataataaatgagtcccgacaaagtaaaaattctagatccgtcactaattgtacctgtttaaaaaaaaaaaaatcagttgcacaaattattaaaagatgagttaaatatataattgatcaattatacctaaaaaaatgaaagaataagaccatctctaggagatgcaaaaattcatctatatttagtttaaaaaatagttttgtgatattttggcatcaacttttattattat

SEQ ID NO: 245489 - DNA, 1661 bp, Cannabis indica
caatggctctcttgtgtttccttagaatcctcaacagctaatctgtctccatagaagaaagggaagccgacacaatgacaagaagtgtcttattttctcccaaatattcgtacctcatgtgatttggtaagacacttaactccagttttggtggattttcaatagatggaactgactttgttgggatgactcctagttcttcataatattttctattcaatggcccataagagtcaagccacataacatactcatttacttctttaccgtcttgttccactacatcctcttgtaccaaagtcagatttagagggtcttcactgtgcttcttcgattctaccaacttgtccaccacataaattgagaaacaattatcattagctgtaggataagtcatcgccttgagtacgttgaatacaacttcacctccttgaactctcaactttagctctcccttttggacatcaatcagtgcttttcctgttgccaataaaggtcttctcaagatgatagggtcattgttctcttcttccatgtcaaggactataaaatcagtagggaatataaatttttccaccttgacaaggacatcttcaattactcctcatgggtgagctaaagaacgatcatctagctgcagtgtagcaattgtaggttttcttctccaagttccagcctctaaaatactgacaagggcataaggttgatactagcccttagatcacacaatgcatgaatattttcaagcctcacaatagtgcaaggtatggtaaaactcctaggatctttcaatttaggagggagtttcttctaaagaattgcactacactcctctgttggagctattgtctcaaattcttccatctttctcttcttagacaaaatctccttcatgaatttgacgtagcttggcatttattccaagacttctgcaaagagaatgttgatatgcagctttttaaatacttcaagaaatttgctaaattgcttatccatgttagcagtctctgaggatagggaatttttatgtggtggtcaattactaataggaggagaagtttctttttgttgaagaccatcagtagtcttcttctttttcggtgtaggtgctagttcatcatcttcttcctcctctagcttatcctggcttggaccagcatagttcttaccacttctcaaggtaattgccttacagttctcttttagattgacttcagtagtgctaggcaagttacccctgttagtgttttgagaagccaactgccccaccttagttttcaagaccttaatggaatgaattgcaaaaatgtgtctatttgagaatagactttccattagagtcttgttgttgttgatactgttggctttgctgagattgatttttctgaggataaaacccttgttgttgttgattaggaaacttattttggaagttctgcagacaacccccttggttgaacccacaattattctgatagtttccaatggcttggacttactccattggcaaactgtctacatctatagggcagatttcaatagtaagaggtcctccacacagctcgcagataacttgagcttgtttggcttgtgcagtcactaacttcgttaatgcctccacttgggttgtcaacttggttatggcatcgacttcatgcata

SEQ ID NO: 245490 - DNA, 1006 bp, Cannabis indica
ttagtggtgtctcaactacaccaagtttgtcaaccaagaaatgaaatatatgattggttaagtttttggttaggcatccagcaatttgatcactttatgggacatatctgattttaagtgttttgttgatgaacttgtctcttaaaagtgtatatctaatttgatgtgctttgtgtgtgcatgataaaccagattcatagccaaaacacgagcctccatattgtcacaccatttcaatgatgtaagttgcaaaggaaattcaaactcatatttagcaactttgaatccatgacattttagcagccacttgagcaagggcacgatactagaattttgtactagatttggacatcaatgtctgtttcttagatgatcatgacaccaaagtatctccaaaataaacacaatcagcaacacttcttctatcattggggcagttgttgaaacttattttaccaggatctagatttactaacatgtatgttgattataattttataatctaacaccctaaatatgaatttcctaatacgatgaattaaacacatataaagtttagaaaatcttacattgatggtagtggaataatatgactccttctgttcagatctctagcccttgattcctttctgtagcagagcaatatgaagatctgaacctggatcttctctctttcagtttggttaaccaccgtcttccacactatgattgagtacttgacttactatgagtgggcatggtactcgtcactaaaggctcgaattgatgaagaacaataagaaggattcgaaatcactatggaaggagactctcatttactagttgtctgacaaagaatgaaaactaggtttttggtaggttgagaatgagagcatcttatttctttgtttttggtaggattgaatgttggttccctttaagtttcattctggaactgaaaagttgtgcacaaatttagattggatctaaattatacttttatcagtgaattaatggtactaaaaga

SEQ ID NO: 245491 - DNA, 1558 bp, Cannabis indica
ggagaacatgttggatctacaaccaagaaggatattttaaaaaggattgtcctcaaaggaaaaataatttacaaaatgaaatgcaaagtccaataatgattctgcaaatgtttctgattattttgataatgctaatgtcttgaatatttcacataattatgatgatgctcttaatgtttctatgacatattttcaaaatgaatgagttatagattcagggtgcacatttcacatgtgactaagataagagtggttctttgatctcaaagaagagagatcaaggcaagtcatgatggggaacaacaatccatgtagaattcaagggattggctcaatcaagattagaatgagagatggcacttttgaggtatttactaatgtgagatttattcctaaactaaaagaaattttttgtctcttgacgtgctaaattcaaaaggctacaactaaaagaaaaaatgtatagtcttgtaggtgaaaaaaagttccatggtgttcctgagaggtgaactcaagcaagggctctatattctacaagtagatactccaactaatctagctagagtgtcaactgtagattacaatatgcaactgaggtgtggcatagaaggctaagacacatgagtcacaagggactcgttgaacttagcaattgcaagcaaggttttcagaaatccaaaaagtcacaaatcttcaattctgttaaaatagtgtgattggtaaggcacacaggctgaagttcacaaatgcattgcatacatcaaaagggagtttagattatgtgcacttagatctatgtggatctccacatgtacctttatctcttagtaatgctcaatattttctctcaatagttgattacttctctgatttatccatcaaacttggaatagttaggcacaaactagttagaaaaacacctcaaagaaaggcctagttgaaaactataatgaacaaagttagatgcatgttaattgaatatggtttgcctaagtctttttgagcagaagctgctcccacttcttgttattttataaatttatctccatcttctgcattggactttaaagtctctgagcaagtttggtctagttatgaacctaaatatcatcatttaaaaccttttagcttcattggttatgttcatattggtaaaggtaaactggatccaatggttgtgaaaggtgttttcattggttaccttagtggtataaaaagttacaagttgtggttaattgatgacaagaaatataagtagagatgttgtctcaatgagcaagtgtttaataaatctaacctaaaatctagaaatgaagctagctctaaacaagtcgagtaagatattgcacatatagacttagaaacaacatcacatgtacttgatcaatgtgaagctcagaacctagatcatgatgacacactcaaccaggtgacattgaacatggaacaaatgagactagagatgaagacttgcaagattacttactggctcgagatagagttagaagagaaatcaagccctacaagggtttctcaagttggtgttacatcatttacc

SEQ ID NO: 245492 - DNA, 1736 bp, Cannabis indica
ccagatctaggttggtggcgcctagggccaactctattgttcctggtttttctggcgagtggtcgccgatcttagttgctgggcgtctctattgagatatctctcgctcgtggctgggggtcgcaagttgagccgctctcttgggtcgcgagacgatgacaatggtgagcttctaatggctctccttctcttgtttttgagttgtcgttttgcgaaggtccttttcaggcgtgtgcttgagctgtgttgtggtatttctcttctatttttcttacaaatctcagtgtacatccttgggttattattcatttgtcttggctccgatgcacaatggttcttggtgagcttccagagttttgtagatgtagggggagggactggggtttaccccaaagagatgtgtttctcttgtctcatcaccttcattgttcagaacaacaataagaggtcgggcatggacttttctcattggaagatggcagtgctccagtgcccgtggtctgcctgtcttgggcttgtgtattgcctcttgtgcgttaggggatggttgttgaagttgttctatctttttctttctttgtttggtttggtttttctattagtttatttatatgtcactagtgacattggtgttaggcctttttttggggagtctgtccctctagatgctcctgtgtgagctttgagcttattactccttttgaattggtgtagttggcctgcaattgtcatcttttagtgagattgcagtttttgtgctattagggctcttgccctttgatcaaccttgaatgaagtttccattacaaaaataaaaataataaataataataataaatccttatggttcgattgtaatgaaatagaatggaatgaaaataaatttattttattgtattttgaactattagaatatcattctaacaaaataatttttctatcattttggtgaaatgattatttcctttctacttttgaaaggaaaaaccaccatttcaatggaggatgaataaattttaaaaattctttttatgtatattaagactataacgtttttcttattcataaaaaaacgttttttttttaaatttttctaaatcacaaatgaaggtaaaattttgttattttttgtttgtgaaaagtaaaaatagtgtttcgtactttttttttaaaagttagtagataagagaaattaaggtccagaatttgggagttcctgttgggtagtggggggtcgaaggtccaagtttggatttaggtcatgggctggaggtcggggtcctaaccaagagcttgagtccatggtatggggtttggggtctggcacaagtgggggacggaggtcttggggttcgaattaggagcgagggctgtaggtccaagctgaggtcgaggttgaggttcggattgggttaagatctggtacgggtctaggctaggggctagggtcctagacgggagttggggtttaggttctttgttggggtccaagtcctgacaaagagtcagggactaggtctgggtccaaattggggtccgagtttgggttggggtcttagctaggcgtcaggggttaaagtcaagggtctagttcaggatttgtgtccaagcaaaggtcgagatcctagctggggagttgggaagccaaaaaaactggggtccgagtccagagtgaagtccaaggttcatgctcgatacgaggtcgtggttcgggggagttcggggtttaagttcaa

SEQ ID NO: 245493 - DNA, 1805 bp, Cannabis indica
tctcaataattcgagaaatttttaataagttaaaaagtttaaagagtatattttaatacatatcaaaatttaagaaattaaaatcctgattagccttaaatttatgtgtacatcattataaataaaaattatggtatacataaaatatcgtttaacaaattataaacttaaatgcgctatttttcataactaaatgaccattttacgataacatgaagagtattgttattgggtaccaatagtgcccaacacattctatagatgacgctttaggattagttagtgatattttctaaaaattatttttttaaattatatgagactcgatacttaattacaccaataaaaatactagtcacgaatattaccttttaacaattctcccatatgaaacgtaaaggactacccaaaagttagaagttacaagtgtttattggcatcccaattctcaatccaatggggatagaatgactattgctgttttcgttttttgtgaggagaaattgatgagacactgtttaataaagttaggggagaaactatagagttaggtgtacggtaaatgaaggatagggagacaatgaagaagatgggtagtcacttgtcagttcaagagcattggaaatgataggagatgatcataattgttgttgtaggatgtaggcagggttttttttagctcatccataaataaatacccaaataataataatgataatttggtagaaattttacatcacctattcctggtatttcaatttttagcaataaatagttttgtctcgtgtttacttctaactaaaacaaaagggttaataagtcataagtttatgggtgttttttattttttattttttttcttgaaaggaaaagtgatagctaatcaagtttatggttggtttccaagctccaactacttgggatacactctcaaaatccaaatttctaatcatcaactatttgcaattatctcctgttttgtgttctaccttgcagtgttcagcctaataaaactgtttttggtcttttattagaacagtaaatattcaaaagcactagggcatgtaatctggtcatgacaaaacatggggatctattatttaacgaaaacactgaaacttcattttcaaatgacagtatcaatcaaacacaaataaagctatgaggtcttttattatttttctacctaattttcatatttagtttgtacaagcaagtgggtgaattcatcatctcccatttatggaaaaataattgggaaaaaacaccaaactagcatgattagaattacatgcaaacatatttaaactctatatcttgatattaaaatattaaaatggtttaactaataattttaaaatttttagaagtccattttggtatttgatattttgttattgagtctatgaatgtcacatattatcatatctatatgatattggtgaattaaaacaatattataatatctaaataaattttctatatttattattaaatttttataattattcaaatttattgataaaatataagtttaatcattatttttttataatttataaatgtccattgatatcaaaaatatttgtgatatttatataatctttatagtaccgatatttcaatagacatcactactttctttttcgttaatatctaataaaaaaatttcatacttaatttttagagaaattaacctatttttaattttttttttaatttacggtttagatttccagtaatttctatgtaggttacaatgtggattttcgttacgatttaggttgatccattaattgttatga

SEQ ID NO: 245494 - DNA, 1284 bp, Cannabis indica
tctcgaaacccaaggccaccaaatttcttcggaagacacagtttctccaacgatgtgatgtgaaacttgcttcgattaccattagtaccccaaagaaagtccctacaacttttgtcaatagccgctgtaattttttaagggagcatgaaaaaactcatccaatattttctaacccccaaaagaactgagtgagtcagttgcgcccttcctccaaaagaaaattttcttcaagcccagttatgtaagttcttatgaacttttccaattataatcccacaatcaaaggctcgccattttgttggtctaatttgaacaccaaggtatttaagggggaatcttccctcatccatttgcagcacattcaaaagtaattggttacagtcatcatggacccctccaaagtacacagtggacttggatttgttggctacaagacctgttgattcactaaagacaataaaagccttatgaacaagcttaacagattttttattaactctacaaaagatgatgagatcatccacaaaatagaggttcaccagccccaaggtcttgcaaagagggtgaaacccgaagtctatcaccttagatttttggataagtaatctagtcagatactccatgataagcacataaagtaggagggacattagatccccttgacaaagacccttctcacctttggatgacccttgtagctgccgattcaacaaaagagaataagaggctctatgaagacattttatgatccaagaaatgaatttggaagggaaacaaaggccttttcaagatcagggacaaaccaccaatcaacagtatcatacgccttgctcaaataaattttcattatgcatttaggagacatatttttctgagtgtacccttaaataaaatcctgtaagatcagaatattatgggctaggtacctgttcttgacaaaagcacctttattatcatgtataagacaaggaagaacttctgatagtcttgtacaaatcatcttgtgtaatatccaaataagtttaatggtaaatatttagagtttatatttatattttgagttaatcatgtaataagtgggattatgatcctactaatttatttcagcataatttaaattttgcaataaatgagtaaatattcgtaatttgttaattacggagatttattcaaaatacgtggatataatatgagctatttgtgaaataataatattttcatgttcggcgaccctggaaacccgattggaggtcaaaaactatcacaacaattttagttaaaaat

SEQ ID NO: 245495 - DNA, 755 bp, Cannabis indica
taatattattttaataattttttgagttattaccgttaaattattttagaataaacaaatattaaaaataatataaaagaaaaaatgttaaagggaatcagtggtcctaacactctcctatgtgttaaatcgctattggtccaactaagtatcgagtcccatataatttaatataataatttttaaggagtatcgctaactaatcacaacgcgacatgtcgagaaagtgctaggcacctagtgcctaaaatgctcaataaaataatatatttcacactgttaaaaataatactattggagatgcttaagcctataagcattaatgacgttgggaacttgagagttcacagagtgggaaaatgaaatatctgtttctcttcttcaagtaataataaataataataatagtaaacatcttatctcaatactccaatcttttcatattcatgtcattaaattactccaataacctctttagtatttctccaacaatatactccttttttaaagaaaaatggtaaatagtaattatggtggctaataatggtaatattttaaaaaatacttaattaggtagttagcataagtagcaaaatatagagatgttatactattaaaaataaaaaaattctattattgaaatttacattaatgccatacaatggatgctatatttttttatacaataaaaaaatttaatgtgcaatatatataattgtttaataaagaacaaattatatgtataataataataa

SEQ ID NO: 245496 - DNA, 1521 bp, Cannabis indica
gaaaacgatcgttgatgtggtttctcagatcgttcccatagggtctagcttagtctgctttggctttttctttcttagcattcaatcttcttcaaagatcatttgtggaaagacttccataactgtcatccgatactggatgtacttttccaacatcctcgtcgtgattactggaatcactaagagggtgcttatccatccgggactttggcttttgaactttggcattagttttatttttctctgtgactctacctctagagttggtctagtcaccatgccctgaagcatggtttcctttcctcctctattgaggttggtcagcagttttagactttttatgctgcttggtagaaggagtttcttcgattcatcgacgactatctctttgcttttgtcttaatttacactacaacaattaacattattagaagcagaggagtccgctggtaataatcctttaatccaccggtatttggctttagcggcgggggtccgccagtattggcccgccgataataccccgtcgctattaatgattaatagcggcggactaacacattcgccgctattaatcattaataccggcggaccattagcggcggggctcgccgatgtttaacatcgaattttaaatttttgacacattattcccggcaggggtccgccggtaataatgttttttatataaaaaaaatataaaagtaaatataaatattaaatatagtaataataataaatatttttttatatttatttaattaattttttttttcaaattaatattattaataaatattttaaataaatattaaaattaaaattaacaataattcaattactacacacattatgaattaaaaattatctatcataaaaattaaataattatcatccatacattatttaaaacttaaagaaatccaaacataattaaaaacttaaataaatccacacataactaaaattaagataaagtaattattattgtcttgatcaaacaaatcatcttcaaaatttgagccagtagtgtttaagttaatatcagggtttgacgcattgtcctaagctcgcgatactggcggttatgggtaatatggttgctgggaagataaaatctccacaaattgtcaagtctgtcgttgttgtggtaaattcagagattgttgttgttgcgaaacatttggagattgttgtggcgaaaagttcggggattgttgctgaaactgaccagggaaaatatatgtgttttgtgaaccaaaaaattgacctgaagaagtttgctgcattggacccccaaaaaacatcggctgctgagatgaactcccaaatttaccaaacatcggctgttgggactgtgatcctccaaaaaaatcagagtagaaaaattgaggagactgggaggagcgtccaaacatgttcgaaataagaggagattgggaggcacttccctgcacattaggagattgctgagtctgctgtaaaggttgttgttgcggccttggacatgttgcactaccc

SEQ ID NO: 245497 - DNA, 1018 bp, Cannabis indica
aaagaagcatcagtttcatttgatcatttcaaattaactatataagaagtttaaaacctaataatacaacaagaacagaaactccaaccaaaatttcaaatttcaggcctcaaatatcctgcccaatcaacaaaatctttaaactcaaaccttaatactaattaaacatatgataaaacctactatgctacgcttgaacattcctaaatcaaaattgagttaagattttgggtgctgcgttgcgtttttcgataggagagaaagatacagacagaacagaacagatcaagagggagagagcgaaccttgaggtgctgttgctgaagatgaggatgtaggcttggtcgaaaggggaagagggagacgaagctttgggttcgtggagcttgttggtttcgacgatctgcgaccggtgagaggcgatggaataatttttttctaaaggaaaataaaattttacattaaaaatagagataattagaaaagggaaatttgaaattccatacttacaatactctaaaattttattcctaaatgcataattattaaaattggtcatatataactatattactaatttcttaaaaatacccctaatatttaaaatccctaatctcatcagcctctctctcaactcactctcgctcaacccacccgatcccaaccccaacgccagctaacggtgacggcagacccaatcgactcacggtgacggaccaagtcgacccacggtgaccgacccaatcgacggcgcagagcttttcgacccacggtggatccacgccgacgccatgtttaattttttttgtgtttttttttagatagtgttaaatatttattatgtttgtgattttgtttgggattgtttatgaaacctattgttagatttaagaaaatttttgtagaattttcggtggattcggatctgagaaaccattggggaagaagagggtccgatggggtccgacagggtgggtctgttggtcctgatgcatgtgtccgatgggactgacgggtt

SEQ ID NO: 245498 - DNA, 3236 bp, Cannabis indica
ttcaaagagctaaacagatgttacttttctgacattcaagcagctgatgttaaagccaggcaagatctaatcgattgttaaactagactccaaaaagatccattgagtaaagttttacaggagcaggaggctgattctaggaagatatatgctgatgtacacaaaaattactgctcattcttgcaccagaaatcgagaatggcttggataaaggatggagatgaaaattctgctcttttccacttcagtattcaagaaagaaggaaccagaacaagatcttatcagtggttaatgcagaaggagtttgagtggaagattctaatggtataacaaaaacttttcttgactattatcaaagccaactgggttctagcatggaggggagaacacgggtatctaccaaaataatgcagaacggtgccaccattattgatacacatgcatatatactgttagctaaatacacaaaggaagatgtgaaacgggcaatctttagcatccaggaggcaaagctccaggtccagatggctacagcagctatttttatcaagacaattgggagcttgtgggagatgatgttgctgatgcaatcttagacttccttcattctggccaattactgaaagaaataaactctacagtcctcactcttattcccaagagtaagtgcccaaatttggtaagtgactatcgcccaattccttgttgcaatgtactttataaggttgctactaagctcatttgtagcaggctcaaaagtattatgccggatttagttgcctcaaaccaaggtcgattcatccaaggaaggtttattgcccataatattatgatttgtcaagatctcataaggcactatgggaggaaatcaaccaaggccaattgtatgatcaagttagatcttcaaaaggcctatgataccatgagttgggaatttctggaggaagttctggttgcttttaaatttcccccacagtttatagctattatcatgacttgcatatcaacaccaagattctcactcatgtttaatggctctatgaatggttattttcaaacaagcagaggactaaggcaaggagacccgatgtctccgttgctctttgttctaagaatcgagtatcttagtagaatcatgagcaaagttggcgaaaagcaggatttcttttttcatgaaagatgcaacgagctcaaactcaatcatcacagttttgcggatgatgtaatgttattctgcaagggtgattataaaagcatctaccgaattcttcaaggcctgaagttgttttcaaattcctctggttttgtgccaaatatgtctaaatctgccattaactgtagtggcatggaggaaaatgaaattaagagagtggttgacatgtctggcttcatgagagcataacttccattcaaatatcttggtcttccaatttgtgcaaaaaggatttctaaggaggaatgcaagttgttgctggacaagatgattgcccgaattaaggtttgcagcactaggaatttatcatatgctgggagggatgtcttgattaattcagttcttctcactattcatgcctattggagtcaagtaatgattctcctcaaaagagtagttgatgatattgaagccatatgtagaatttttttgtggaaagggtagagtgttatggctggtgctgggagtattgcatggagaaacatttgcaagccaaagaaagctgacggtataggtttcatgagcatacatgactggaacaaagatgctgtttttaaaaatataagggcaattgcatcaaagaaagataattagtgggtaaagtgggtgcataatgtctatctcaacaaagactcttggtgggatgatgaggcctctactcatagtagttggtactggaagaaacttgttgagctcaaaaatgaatggaaagatcagatcaacctaactcagttagctgctggaaactacagaatatccgatgtatacaatcagatgaaagcaggaaaccaagtgtgtcaatggagtaaacaggtatggtcgagaatgaacataccaaagcataactttgtaatttggctagctgtgcaagacaggttaaaaaccaggcaaaggcttgtcagatttcaaattgcaacaaatgcacaatgcattctctgcaatgaatctgatgaaacaactgagcattcatttttctgttgcaagttctctaaggattgtcttgatcaagttaaggcatggcttggctggggagctaaaaccagatcactgcaagagatcattaggtggataaatagagtcaagaaatctaagttcaggaaggttgtatatgcggctgctactacagctttagtctatcatatttggcgaacaaggaattgcattttatggcagggaagcaacactcaagtgcagcagatgattcaagaagttaaatggcaaataaaaaccaggatcacttgtgtgatgcctaaaacaatagctcaaatagattatgactggtttgactctttgtaattagcatgtagatacaattgtatagacactttacagacttaaagacattttatggtctttaattgtactgaaagtttgttagagcaataaaatttctgattcaccaaaaaaaactacgcaaacaaaaatacttagtgaagacaccaaggtcatgggatggttgctggactaacagttatgagtcaattatggaaatacttgactttcaaattagaacacactatttaagattgtttagacagaactgacagtttcatcaagctcgaagaggctgtcaagaaggtcagaggagttgctcaactagaagcaactaattaccttgctgatcgacttcttttgtccttgatgaacattgattgcgaaggtgaagaagaatcaacattgaatgcctccatcgaaatagattcaacttatgtttcctaagatgagctctagtaggatgacaatgaggatgaaactcccatacttcccaaaatgacttgggacaaagggtcaatgaagaagattctccctctgtttccaacgtataccaagactaatggagcagcaataaagatgtgtcttatgagtcacataatgatattgaccgagaaagagacactgaagaattcaaatcagagagggaggtaccctatttcatcacgaagcgttaaaacccaggatgcaagatggcccgctatgactacaacttgaattcggtgtctgtaccaaggtattggaacgggg

SEQ ID NO: 245499 - DNA, 630 bp, Cannabis indica
agcataagagctctcttgaacaattgatttctcatccttgaatagtgaaatgacccctatttataggaaagaattacactaactagagttcccaaaacaattaagaaataaaataagaaacttgtttgccttcctaaaacaaataaaactaaaagggaaattgggaaggtttcctcttatttcttatcggtgtaaatctatcccacaaaattagggatgtgattgagatttgaatgctttaatatttatgaaaagtatctctgaagatattccagccgcatttaccccgacggtgtatgcgagctgtctgcaaggttgatgatggtcagacggtgtaatatattctgctcgaatattctaacttattcttcaaacaagttatttacaaatgataaatccccttggacgatacatcattgagcgtaccgcccatctagatcataaaatattctccacatgtcatccaggtaagtgccatgtcaccatatgcataaaaattaggataacatttgccctccaagtctgcgtgggaagctcctgctcgcatgtggacttattcggccactacgctggttgaatgggtgacacgtgttcggtcttcataccatgccttgatctgttatgatttga

SEQ ID NO: 245500 - DNA, 1376 bp, Cannabis indica
gattaactaattattaaaaactgtgatcatattaaaaacttgactgaaacaaaacacataaaataggcatcatagcgacatcaaaaacgtgtcctgggatccttattataaaaaattcacaaaagactatatacaaaaataattcgaaacatataatcaaaatgcacagtaaatatagcctaaagcaactcctagcaactcgacacactggccaatggggtcaatatgtatattgctagagactactgtcacctcatggttgatctagtgtttcttttcctttacctgcaccacataggacacgtgagtcacaagaactcagcaaaaaaagtaataaccatcatcatatagtttattatttggatattatcatttatacttagacaatcaaaattaaacaatcgcgcattactcataagatgaaatctaaataacttctggcatctaccacaaataacatccgtatatagatatttggtaatacaaaattattataccaataacaaaaatcatattcatttaataatataaattatatatatgttactcataagtaaccatcttaattatatcacatttcttaattatatatgagtgttgcattgcctaattaggtcctaattaggtaagcccgtgccatagcctggcacccacatatcatgtaattgcatcacctaattaggtgagctcgtgccaaaagcctacactcgtatatcacataattacatcacctaatcaggtgagcacgtgttgcaacttggcaccaatatatcgcatcgcttaatcagatgaagtcgtacttatgctcagtactcaaatatcactgctgcccgtacctaatagggtacgctgccaggaagaaacccaacaacgatttcaatctatgccatagcttgccattctcatatcactgctgctcgtgcctaaaaacgtacgacgcttggtatatcacatctcctaatcaagtgagcctgtatatcacattgatggtatcattacattaacatttcttaatcaatcaattttttttcattttatgacaatattaaccatatctcaatctcaatatgaatcgattcacaataaatttaattgtattacgatataacgtactaggcaatacaatatacttttttttgacctttgatccagattcatgcatgtcggccaaccctagtggagaaaccttcatgatgatcttggccctatatcataacaacggtaaaccaataagtgtttatcccaaaaaactgcttaacactcgcataagataatctaaggttttctatcaaaccccgcggtataaatacaatataataaatcttatatgttggctctaaaacatacaccattgtagagctcgttgcaagctttga

SEQ ID NO: 245501 - DNA, 670 bp, Cannabis indica
atcttgaaaagctttacatagctattcgcttcaatgatagccaacccaaagtcaaaatcttttgtattgatgacatatatgacacatctaataatcatgatgtttgtatggaggatagtggttgttttgctggtgattatcttgtttatgtctccactaaaatggctcctcctagacgtcgtcaaccatggactgctgtttacaaaactaatcttaacactgctcaaactgaacgtctcaccccaccaggttacatttactttctttaataattttattatatgtattaagaatatataaaagttttcgtataaatattcataatttttttatttgataataaaattaggagaattactacatatactatttttttaaatgtgttttctatgtggtttgctatacggattttggttacgatttaagttgctacattaattgttataggagtttctatatatgtgaaaatttctttaaaaaaaatgttttaaaatgtagtaatgaaaagaaaaccccataaaattattatttaaaaagtttatttgcgacacttttcagctaaacaaaaaaaattacaactaacacaaacttaattattaatttgtgtgcattatgtaataaaaaaaaatattaattatgtatgcatacatactagtacaaatactaatta

SEQ ID NO: 245502 - DNA, 1353 bp, Cannabis indica
tgtcagtctaaatctagtgtactgacaaatcatgggacttaaattttgaaacatataatcatgattatatttttaatgtgtttgacaacattataatcatgaataactatatgttctggatttaatagaatttatacattaaacatataatcatgaaataaatcatgtgaatcatgcaacataaaatgatttttgatcttttattaattagtaaatctgattatattgaaatgggttttatatagggctcaaaacccaacaaaaacattgtctgttgtctcttggcttcacttcatccaagtctaaccattcacgttttattcaacatacttctaattctgttacacttatagtagtctatgttgatgatataataatcacaggaagtgatcaaactgctatgttgttattatagctcttaatcgacagtttgctataaaagatctaggccctctcacatactttcttggaattgaagtgacacaaactgatgtaggtattcacctgtcacaagccaaatatgctaaagatctgcttgttaaggatcaaatgagtaatgccaagcctgcacctactccaatgactagtggtattcgtttatcagcttaccagggagaactattggaagatgttcaactgtacaggttagttgttagagccttgcaatatctgaccatcacaaggtgtgaaatttccttcagtgtaaataaggcttgccaatatatgcaaaaaactttgtttgctcattggtcagctgttaaatgaatacttcgctacataagtggtacaacagagtatgggcttaatctgaagaatccaaatactcttgatcttgtagcctactgtgatgcaaatagggcctcagaccccgatgatagaagatcaaatacagggtttgctatcttccttcgctcgaattcgattacttggaaaagtaaaaagcaacagaccatctctccatctagtactgaatctgagtatagaagtgatgctattgctacagctgaattgacttagttgtagtacctgttctttgaactttgaattcaactctctcaacctcttactatatggtctgataatctaagtaccatcatgctcactcagaattttgttcttcaccaaagaacaaaacatattgagctcaacttgtatttcatcaaagaaaaggtgcttaataaaacttcttaaatcaaacacctctctacctatgatcagttcgcagatgggctaactaaagccatatcgagccaaagatattttgagttcaaacacaaagccaaaattaaaaatcatttaattatgagtttgaggagaggtattgaagacggttaatacagttgaaggttgtta

SEQ ID NO: 245503 - DNA, 578 bp, Cannabis indica
aaaaaaaaagaaaaaagaagaagtacttgattggaaaatgaaaattgaaaatattgtgatatattatagccaatattaattctggtgatgggcctagtcatcaacctaaagctaatgggccgaatgctctattgttaattctgatgatgggcctagtgatggacagggacgtggaaaatgtcgcatagactacaggaaaattgaaaattgtcattttactattcgtgtttccttcaaagccaattgtatttgctaacttcacttatcaatttaatgaacattttctaaccaaaattaatattattcttgtctaactcaatattaatttgccaacgatcaccgaatcccacggatgattcttataaaagtcagctttcagctcaaactaacagtatgtcagatactcaattttctctgctttttcacattaatattgttattattctacaaagttcaaaccaaccattaatattcctaaccatatcttaaaacacatcatttaactcaaatatccaaagaggtatatttctcaacaatccaaatctcaaagcattcattaacacgttttccccaactaa

SEQ ID NO: 245504 - DNA, 882 bp, Cannabis indica
attcacacatatatatacatataaatgtgtgtcttataaatataacggtacagttcttttgttattgtcgaattcaaacattatgcattgttgatactaatagtggatgttatcttacatgtgagtatctgtaattttgaccaggccatcagcacagaggaaccagagcttcatggagatgataaagtccgccaagggttgttcccaggatgatgagattgaggaagaagaccagtatattcttaaaaaggaaatctctactggaacagcgcaaagaggtatctatcttctagtcaaatttgtattaagcttcgaatatttttaattttcaattttgctatcattaaagaatgaggtggaactatatgttatttatctttccccttccccttttttttatgaagaataatgtggaatgtcattttaattaacatatatagtggacaattttaaataaaatagtgttacttgtttccttttgttgtaggagaattgagggtaaaagttgatggcaagagttccgatcagaaggctaacacaccacggtcaaagcattctgcgacagagcaacgccgaagaagcaaaattaatgacaggtaattcgctgctgttttcaacgtgtgacagatgtatgctctgagtgaatcgtggtactggtttgtggttattgctgctttctttatttaaagtttaaatttattgtgcaggtttcagaggttaagagaacttatccctaatattgaccaaaagagagataaggcatcattcttgttagaggtacacacatttttctaatataatttctattcttttgcttgtacttatttgtggaataatggggcatctcttaatcattcttcaggttattgagtacattcagta

SEQ ID NO: 245505 - DNA, 889 bp, Cannabis indica
tttaacgagagttattataaacccgagttgtgttcgtaagtatggtaggtgtataaatataaaagaaaagtaatgtgaatagggaaagaaggtacctaacaagattggcttgagtaacaagagactcgctacatcggaactggaagaaagaaaaaatgtcaaagggcttagaatgtaggaagagattggaagaaatagaaagtaaagaaagatagcaagttatgggaaataagaatgagacagggataggtgaaagtggaagcctatttataaggtgaagaagggaatattaactgtttgatcaaaataagatcaatagatgggattagtcacatgcacacataagaagcaacatgtgacccacctatctcattgaatgatctcattaatatttcggtacgtaatgttagatgctctaccatacgaggtgtgttgcaaagggcttaaaggacggctcaactgcagtcaaaaagatcacttaaaagtgctcttttagactgggggcaagtgttaacctcagaagttcaataaatgaatcttcctttggacaacaaataaaggggaagaataatgtgatattctcaaaacaaacaaaagggacaaaggatggcccccgccttttttgtccttgtccccctcgtcacatctccccatcatatcagcccacgtgcccaacctcttttcccccctacaaagccctgtgcgtccagcctcctctcgccgcgcacgcacccagcctcctttcctcgcacacgcacccaacctcccctccccgtacatgcacccagcttcccctccccatgtgcatgcccagcttccctccctgcacaaacccaacttctctcccctcgcgcacccagccgcgaacaaatagaagtggggagaaaag

SEQ ID NO: 245506 - DNA, 712 bp, Cannabis indica
atataatatatatatataacatgcatgatgattaatataattttatcccttcacgtacttttaattaatatatgtggaaaattatatttttttcaataaaaataaatacacacaaataaagcccatgttgacttggttgtgaggtacttattaatgatttaaatcatacacgttttgtccatgagaaaactctttttaaatatatttaaattaatttttgtaataattatttattttaaagttattttagaccaatagaatattgatatgtatcatgtatatgtattaatatattttagactagttacacttaaacccttgtttaattaattaagtgaattataacaaattaattttttggtatatacataaaataattatgccacaaaatatttcacatatatagcaattgttaagtgttaaataaaaatgtcatcccttttatctattattattattattattattattatttaatggacctataagatcagtaaagagagtaaaaaagaagaagggaatttattcattttgtttttaattaattgtaaaataaataaataaataaataaaaggcatctttatttactatgtagtgcatcttaaaaactgtcctttactttggtaaactaacatatcgatcgtctagttgctgttaacattttttccctttacatttaatgcatgaatcatatataggataggtcatttc

SEQ ID NO: 245507 - DNA, 697 bp, Cannabis indica
aaaataaataaataaataacaacttcaaattgtacatgctcttccagctttgctcatgtatgtactctcacctctcatctactaaaagtggctacatatataacttatatattatcactatatatacaatatcaaatatacatctagtaaagttcaacaatggcacaaggtgatgaagggtggaacataccagctagaacaatttattttattgttgttgctggttttattttgattaattttacatgtcctttaatgagataagagttatatttttttggggcatttcttgatatactttaataatatgatggcattttttatgccaataaacttcttgaaagaagtgttgggatttgttcttttattttgttggaccgctactttattataactcttacattagtatgatattgtttgctttaggcctaagccttcacgattttatttttaggcacattcttaaaaagcctcatactaatatagtaaatgaaacacttatatccaaaacaactctgcatattcttctaatgtgggaattgagttgatataccgtaacaatcctcccctaaaaccaaagaccacatgctcgtggcctctcctctagtgaaaccccttatgttgctgctaacatcaacggaactcgctgcctaactatcacctttatcaggaagactttcaatacaggtcctaacac

SEQ ID NO: 245508 - DNA, 1314 bp, Cannabis indica
accacatatgcatttattgttatttttgaatttttgagtaccaattaaaaataattattgatgaacaatgtaaattacttccccaggaccaaactttgtaataataaataaaataattttatagtaaaattaaaattagtaaaataaatttactttttaagttaattacgcacgtgataattattgaatagtttggaaaccatttctaataaactgataaatttaaagacacgataatattaattggggtgacaaaaattctaatataagagcctaaaattaataatgttgtaattgtgaattgagattattattactagctttgttatatattcctatacattatatattttcgtaatatatatactcatatagtgagaaagattgtgaccaaacaaacttggaaaagaatctatcgaaattaaaaccaaaatttatacatatattttttcacatgccaaaaatatatggtgaatattcccaactcaacttatatataactttttcttttttatgtgagtatataatttgagtggtcaaagaaaatggaagaaggaaagtatatatatatgatgtgatgtgaatgttctagaacaagttaagtggagataattaatttatttatttttctttttttttttttcgttttttttttttttttgtgaagtagagagtactatatggtagtagtacttaacactcactctacttctactctattctattattataagactgcaacaataataataataataagtatatatagttagtactttttaactgttgaaacgtcacttgtgacttgttaggcactcataatttactataacattattaattaattatgagaactaaattttaagtttcttattattaattaaaatataaaacactacactaaacctaattaatttcttacttttgtttttttatttctcaattattactatattataacatatatgtgtgtatagattcttttgatttggcacaaccatagtatagcatatatatggtgatatgtgtggttagttgagtagtaataaaagccaatgcatatgagttggatgtgttccccctcttcttcttgtttggtacttataaaaaaataatactaataatttctatacaaatgtatgcatttctcaatttaatttccaactatttttaataaaattagtgttcttaaatgacatcttaatgacactcacataataatacaacatattcatattaaattctatcaataactattgtttgaatctaatgttgaattaaacactacgacaactaatcaaagaattaaaatac

SEQ ID NO: 245509 - DNA, 1884 bp, Cannabis indica
agatcctggtaaaataaattccaacacaaaatattatctaaaatcaaaaaatcattctgaaacttaagtctagcttttcctctagctcgaaacattaccaattttaagtttaaactccccaggatttaaatatttccaagtctcaaatgaacaacaaacatggtttgtagatccagaatcaataatccaaatagatttttcgttctctaaaacacatgattcaaaaacaaaagcattacctttgttcttagggtcgagaagtctatgacattttgatttaaaattcttatttttttccacagtgagaaaattgaataatgtgcttgctcaactgttctttaattgttcttattactggttcaatctattgttcaagagtaactggggaagtagaagaattttcctcaatctttttaattgagcctgaagttgtagtattgttggacgaatctttctaaatattcgcagttcttcctttgccatgacttgcattactggagaagggtctccttattgcattcgacagtgtcttttcataagcacgtagtttagcttctagcttgtctataacagatgagttccaattattgatcatgaaggttacaacaaattggttatactcaggagataaaatgttgaaaacaaattgaactcttcgttttttataagaaaactcctagcatggttgcttttcaaaattttaagtccatcataagtaagtgagaagtgatactctaactaggagtcatctttatacttttgagtttatttgcaaatgtgttaagtaagagaatcctggggtgaggatcgttaaacatcattttgacagctacaaatatatataaacaaaaatcaataacttggttcaataaaaattcatacacatatttagaaaataacaagtattgaagatatatttacaaaattaaaacatatttatattattttctaaggtttccaactagatgatatatagtgtcccagtaggtgagagtcaaagataacatcagttgaatagaggagtcagctcatctaaaatagacaccatcttagcaaccttttatccgaccaaaatgagaatctaatgttgtccctttaggcgagagtcaaaattattcttattttatgagcttatactattgtttcatatttataaattaaattctaagtagtcactgtagggatgagtgtaattgaaaagaaaatttacaaagtacttacctttcaagatcttacagtgttaaagattcaatggataaccatccataaggcgaaaaagtctagcatctcgaggtcttattgaaacaataactatgtaagaccaataatggagatcgaatgtcttatattaaagctcattattcaaaaaaatatatatttttcattaattattcattttaatctatttattttaattaataaaaaaaattacttgatttaagttgatctaaaattaattaaaattaacttttaactttaatttaaatttcaataaaattaatttcaaaaaatatattataaaataaattatatatattcaaaattataattaaaatataataaaataaatatcctaaaaatatctaatttatgtgattctaaaataattaaatttttaacttaaatataattttcttatttaattaaaataaaattaattaattaagtatctttaataaatgaacttaattatttattaaaaaatattctaatttaagttggtttataattaattattttttaacttaaatatatttttctaagaaaatataaataattaagtatattgaaaaaatctatttatttatttaattaaatataaaaaaaatatatagtttatcttgaatttattttactaaattaagtgtatttttcttaaattaa

SEQ ID NO: 245510 - DNA, 1256 bp, Cannabis indica
ctgagtacattgctgcgggtagttgttgtacccaattgttatggatgaaacaaatgatggcagattatgggtttgatttgaaaactttaaccattttttgtgataacactagtgctataaacatttctaagaatcctgttcaacactctcgcacaaagcacatagacattcgtcatcactttattagagagcttgtggaaaataaaattcttgtcttagaatatgttgaaactagcaaacaaattgcagatatttttactaaagctcttgactcggtccgatttatttctctaaggaaatccttaggggtttgtactgtttaatgtttctgtttttcataatccttccactacaagagatttctgaaatggaattcgaccaacatggggaatcctaattcatagttaattttataaaaaatatatgttactatatattttatctcaatatatcttaatattttttattcaatcataatgttaattttttttcttattggtttgttatatgaagaataattgctgccatggcacctggacgtcgcattacttgctctactacacatagtccacaacttgaccagaccaatgatgttatgccacctagacgtcgcaccactcgttctactatacaaagtcaactatctggacccaacaaacaatctattgtggaaaggcagccaaccagtcgcacaacatgttctaatgttcaaagtccaccaccaagaccaactacatgtcctactggacccattcaaccacttgaacgcactacacactctaatatacagagtccatcaccagcagctaccacacattctgatgtacacgttcaagttcaaccacctgcaagcaccacacactctactgaacaaagtcaacaacttagacagagtcaagatagtgttgcttctcaaacacaatcaggtatgtttattatattttacatcaagttattttcaattttaattgtttttaatttaaaaaattccaatgtagcaccaaccacacagtctactgcacatgttcagccacctagatgtacctcacactctactagacaaagttaagaagatagtgttgcttctcaaacacaatcaggtatgtctaatacattttacatttagttgtttcataatattaatttttatacataaaaatatataatgtaggacaatctgtatccaaaaaatcacgtgggctaactcgtggcgtgagaactgcttgcattgctaaggcatcggctaatggaaagtt

SEQ ID NO: 245511 - DNA, 1192 bp, Cannabis indica
gttccttagagcttggcttaacaaaataaatgatagaccgctatttcttatattagttttccaaaatatcatttacatgtagctaattgttttaaggataagatacattgaagggtaaaatggtaatttatccttactcaatgcaaaccatctatagaggatcaataaatgttgtgattaaaataatagataattcatagtatttatatttggtaaatagagtgttctatgtaatcaggagtgcaattctgaatctatagtggagtgaggcataattaataagtttacttcggaaattttaagatctacttaatgggagcttgattacataggtccatgatccccacattgtcagaaataatatcatcttgtagattcaattaatttatttaataagttaattagaatttgaaaatagattgtgtcttatttaagaatttttaccaagtttgggtaactttgagaataaaagagaaatagtcgtttatttgttaattagtactctttgtgagtctaattaataaatatatttaagttgtattttatttgatattattataattattaaaataaaattggtagttaaataattaggtgagataagtggtaaaaaaaaaaaaatacatactatttcatataaatgaaataaagtggtaaaataactctaaggcccattgtataattcgaccctatagttgatttaagcccaaatcttctatttcagcctatcatctaacctaaccctagataaatacttatataaaaaaaatgatgagaagagagatctaatctaacctaattcaatgtcagacaactcttttctcttcattcttcaaaaattcaaaattcattatgctatttctctttcaaatatctgttctaaatgtgttttgaatatcaacccacactattcaagttgatactcaagcctttgtggatgaatacaatgaaaggaggaaaagatccaagttcaaatctttattatactctgctacaaacaggaatcaagagttagagatctgaacgaaaggagtcataatattctgctgcgaccaacgtaaggttttttataatcccttatgtgtttaatttatttttttaggaaattctatgtttatgatgttagattagttataatccaacatacacgagtagtaaattaagatccagataaaagattatctaacataac

SEQ ID NO: 245512 - DNA, 1292 bp, Cannabis indica
gagaagaaaagagagaaactcagagaaaagaaaagtactattttattgaataatactctgttgatttacacagtacaaaacaagggtttatatagcagtatgaaacctagctgcattagtttaggaaataacagaagcctcagtaattagttataacaatttaactaatcaagattaagctctaactaactaacagacaccctaattctgataactcactagagaaataattaaatgtatatgccttgatatatattatatatattcaaattaataccttaagacagagaagaaaaaaagtttgaagttgaaattagataaaagactcaccaaatcaagtaacactcgtgaattgacgatataaatatgtatacacatatacaaagttctataatcttaattaaaaaaatgttggaggagtgttagctgtgtgtatattattatatacatgtttttgtcaaaaagaaaatatgatatatcaaatgatatattttgtgtggctccaatttaaataaaagataaaatatttgaatattagttgataacctaataatattattcaaagtttaattcaaatgtcagtattgaatttaaatttgagatattatcttctgatataaagtaaataattattcctcttaaaactatggaataattacctaaaataatcatttaaatatatataaaaaaactctatttattttcaaataataataaagagatttcaagatacaaattgatcgcaaaaagtggtaaaattctaaatccatacgaaatggtacaaaattctaaatgagctcatcaaaattaatcttgaaatattaaaggggtcattcaccttacaaaatttcaaagaggtcattaacctcacaaaaaatcttaaaaaatggtaatattatctcaaaatttaaaagtgcactaaaattcaaagccataataaatcaaatggcattctaaaaagaggggtcattcacctcataatcaaaaaaaaaaaaaaaataggaactacgtttgacttgattcctgttaaaggatacataggcaacttagttgctaagactaagtgcagtcgtcgataccgcaaaatggtataaaatataaattttaaaatttcataaaaagtcatacacctaggaatttttctaaattttcaaatagcaaaggattccttaaagtgatcatctaccagaatccttatattcaaatactaaaataccgtgttcttaactacaagtggcttgatccttgtaggcagctcggttaattaaattgattgagttcagctgcaattc

SEQ ID NO: 245513 - DNA, 1027 bp, Cannabis indica
tgcaaaatggatttttcatgtaaaaatttctaaatttaaacattaatcatatactaatttattaattatttatttctctcctcctctctctctctctttttttactttaaaaacttttcaagcgacaccaccggttatgggatccaattaaacattgttactattataacttattttttaaagtgatcattatatagatgagaacttagagttctttttattgttaccgaggaaatgacaagaatttaagaaaaaaaatataattttaattttttatgttttgttaacaaaaatcagctaaagtttaataaaccgaccaacttcatttataataagtaatttattattttatatttaaaaattatcatatggtattctaaataagtttattttataaagtaattttttaaccaaataggcttgagcatcatgacatatgttatattacccaaaatatgaaaagttacattagttaataataaggcaatgtaatctaacttgaaataataatttaaaagttaactactcaaaataggtaagaaattgtgtgtgaattatatttattattattattttatttttctttgaaaaaatagctaatttgtattttgttggtatcataaagaaactaaaaagtttcttttttgccttaaaaaaatgaataatttcaggaactaaatttattacatttttctactttcggtagtaattatattgaatattatattttatattgacatggcaccattatttctgttcatgtattttttggaagtatttttttatagtttttttttaatatatatattttgatttaagcgtttatatattacaaccatattttacttgggactcgaactcaggacctccaacacacacacccacccacctatggccacttgagctagcctcaagcctcaagtggtttatatatatgtataatcaaactaaacataatatttatctatttattaaaattttactatgagttatgacataatacttactaagtgtaatataaaacact

SEQ ID NO: 245514 - DNA, 537 bp, Cannabis indica
ccatcatggatagccgaaaactattattcattgtgtggttagttgacattgtagtaaaaaaaaacacatggtttagactatgggtgaacatcataaatattatttgtagtgaatgcttgaattttaatattaattaaacaaatacataaaaactaaactgtaacgtgagttcttaggattttttttaggaatttccttatttagatgtaatacttcatcaaaaattattgaacaataaataaaaataaaatttaaatatttttattattatatatgaataaatataacatatttgtaataagtattacatgtaattaggttaaatcgattttttaataatttttaaagtttcctccaaaaattgatctaatctaaatagaatataactactcacctccaatcaaatttaattattatggatgtccaatttttgataattagattgtgttagagattttataacaatggaagaaaatcaagatttagtacaactctattgtaaaatatacaagaactaaaataagagattgattaaat

SEQ ID NO: 245515 - DNA, 928 bp, Cannabis indica
  modified_base (36)..(36): a, c, t, g, unknown or other
tttgttttttgtttctttttgtttttttttttttangaatggttcgttaatgtaataatactacaaattttaacctacggtgtataaaagtagtgagggtgttactgtaattttagtccaagttatatttgaaagaaaattcgagagctactagactctgtcaaagctagcagtttgttattttgttgctttagagaagagaagaatgaacagaggtggtacgtcgtcgtttttctgcataaataatattatattgtaataatgtccctactactcccactccctgctgtgacgctcacgcggtttgccaagtcccaaacctttccctttctatttggcctcaaacctacgaaaccaaggaataaatactttgttagaaaaaaaagaataaatactactcaacttttttttttgtttgaaagtaaaatttttcaaaattatttattttaaataactcagattggctattccacatttttttttcatacttaagatattttttattcctttagcaaaaaaatatctttttattccatttttttaaagagaaaatactttgtgtgtattatttttttcttctacatactcaattttattggactacatacacaggatcaaatgtatcagatttgtgcggttttgttactctccaagggctataaacgtatcttttttttttttcagaaaaaaaacccaaattactatttataataatgctcattttttttctcttaaaaaaataaagatatattgcctttttttcttataactaagttacattgccttttagtaaatacaaatcaaataaaatgattacatgatttacaattggaatggggcaagtccatataatttatacctataaatttataaaataagcactagatgaaaactactattgaaaacatacatacggcaaatagttttt

SEQ ID NO: 245516 - DNA, 1253 bp, Cannabis indica
tattttactagttgccgaaaaatctcggtcaacacaaacaaatacaggtaaacaactcaaaaagtatgcttaagaagaaggtgaaaattttgaagatgatgaaaataagaagaacaataagtaatgagtttgggaacaagaaaatataaaaaccctaaaaaaacataaataccttcatctatttggctatctccaaatcttcttcttcaagatcaaaatcaaagtatgaatcttcaatgggagggaaaatactttttgaaagaaaaaaaactgataaaaaagataataaccaacaaaaaaccatacttgaaccacaaacaacacaaaaaatgtggatgtattttaaaaacaagagaaaaaaataaaaagaagaagaagaaaaaattgaaagaaaaaggagacaagaatatgaatgaagaagataacgtttttggatgataaatataagctttatattatttttatttttttttttaaaaaaaaaagaaaaagcttgaaagttgtcatagatctgacaaagccaatcaaatcaacatttgttttttaaaaatgaaagaaagatgaaaaagagctcatggcatgacaaatggcaaaagaaagtaaaaaataaagtttttaaaccaaacacatcacacaatataaaaaatggacatcaattggctgtttatatcggatgcctcttaaaggtggtctcaagtagttttgtctaaactttcgagataacttggtcttacatacgttgctttgcttgtagtgactcatattctgactttgtatatctttggctaaacaattggcttgttaactggaaattcttcctcgtcgtcgattatcaagtgtgattcaaatcactctctctcaaaaaaaaaaaaaacggccactatttttgtaaaaatatgtgtgtcacaataaaaataataaaataaaattagaattcataattaagaaaaaaaaatacaacaataaagaaatatagtaaacatatatatatttaatatatttaaataataattaattctcaataatatgtgttcaaattgaatttacattttattttatatttttcgaatatccatcttagttgtttgagcttttgcatattttagagtccaacaattatctaaacaaattgtaagaacaataaattattacaagatgattaacttgatgacttacgtaaaaaaaaaatcccaaacttataaccagaaacctaaatataaaataaatacaaatcatacaaatttatagatgag

SEQ ID NO: 245517 - DNA, 2615 bp, Cannabis indica
caatattgttattgatggtcaaatcatgctcacacctcttgagttgacacaaaataattattactaaattaatagtaagcctttaacagacatactttagtagttattaaacagaaaaacaaaattacaaaaaaagactttcttgtattaatattcttaaaggaggtactaaagaaggactcaatctctagccaaatatgggccatcccctcttagtatagtggatatatatatatatatcaacatatataatatctctttttcaatgctcatgcaacctgcttttgaattgtagatttaatatctttttaatattaattatatatgatctcatgaactgttaatttatacacaaaactttagatgccatatttttaaaaccccacatttataataatttagttaataattttttttaatgaatcaggtaagtttgtattgcctcaaacatatatatacaacctaacaacactttaatagggcctgaaaactgtcatacaataactcctttttacagttgtataatccaattcctaactgaaatattaactttctttggcattctaatatgtaatttacttctaatgtcagatgtaatagatttgaaaattacacttggaacctgatttttttttttgggacaaaaaggcttgatttgggattgtctaaccatgaaaacttacttcctagtcttcaaataccttgcatcttctaatcgctttgaccatggcagctgtttttcattggagccaatcattgacttcctcaaacacgtagattggattggaataataaatgatctatggtcttggcaccataaccacacaccaaacataagccatttttcactatgtttattcgctgtaacttgtcttttgcaccccaacctgtcaagcatgactaaccacaaaatgtatttgtgctttggtgtactaaatccctcccaaacttcttttctccaatctaatttactttgactcaatctcaatttctcatggccccaatttatgtgatacaaattggcagtggcactatggacatctgtacaacttttaaaatgatccttcactaatacgatttgttgccaagtaaacattatggactgatgatttgatgcataagttattctttttaattgtaatagcccaaatatacttgcctaacgcaactatgttccatgtaataatgtctctaaattcaagaccccaactgatttagacaaacaaactttgctccatgccaccttccccagtcctccatacttggttgcccttttctataggattgctctacaaacagagttaatttcctttaaaaactcctttgagagaattataatttgagaccaatatgtatgtgtggtgaattaacacctatttaagaatcaaataaaacaagaattaactaactagaatggcgttatcaatcaatgacataaaccaaaaattaagtgcagaataaactaaatgaaatagagacagaatataactaggttcccattttgtggtgactaatccccggaatgaactgtcctttgaccaagctctattcgatcttcaacaatggaggaatacagaggagaatacagagtttaatctcattaacaatggtgtcttgcacctcactaatgatgtcttgcaccttacaaatcaactcacttgagagagatgtgatcaaacatatacaccctctttgacaaccctcctcactcattacaaatgtaattatcatttaagtttctctctagatcgtcacctaaagaagtagtactctcaaagccttatataaaaactcaaaaatgagtggtacacgagttagtaaactgaaataactaactcagaagctaactggacagacctgcaacatctagcaggtcaccaaatgagactaacagtagaagtataccaaattattaaaatctatcacaaatccacctattttagtcacttggtaaaagatatccttgtattcctttaaagttttgacaatgcctctaaacacagaggacttttagtactcttcaatgtttaacaagtttaggcaatgcttaaaattttctcttgttacactcttggtgaacatattagcaagattcttattggtgtgaatcttctttactgaaatctccttgctaccaatgatatcacttataaaatacagcttgatttgtgctttgaccattcatgaaatatggaattcttcataaggtgaagaacactttgattgtcacaataaccaatcaactcatctatcttgataccaagctcatttgtgaaccctttaagccaaatggcttcctttgttacctttgttgatgttatatattgaaccttagtggatgatagagcatatatcttttggaggttagatttccaactcacataacctccaaacacagtaaacacatatccaattaaggatcttctagtgtctaggttagtagtaaaatttgagtcaacataacaaatcacattttctttgaaattacctagttttcccaatactagaccagtgatgagtgttcctttgatgtacctcaacatccatttaagtgttgtcagtgttcttctccagggtcttgaatgaatcggttcactaaactccttctatgtgtt

SEQ ID NO: 245518 - DNA, 887 bp, Cannabis indica
cttaatctcttttgtgctcttctcactttttttatttttattttctctaaataatttaagagatttttgtgctcttcttattaactattttttactacaattacatttgcatgcatgcatggttaggcttgtataattttaactacaatgtttataatatacggaatgaattaagaagaaatcatatttattatattatttaccttggtcttatcaatcataaaaaagttaatgaaattttttaatgtaatttaagtatatttgttcattgctattctctaacttaattaatcaattaacaacttttgctataacatcattctgttaactatcttaacaattaatgaatcattctatatgtggtataaacttatattagataaacaatgtgctttacattaggtagataacatattttattaggtaaataacatattttaatttagataaacgacatgcaatatcaggtaaataacgtactttaaaataagctaaacaacatgcctaaaataaaataaacaacatgtattaatttaggtgaacgatatgtaatattaggtaaatgtgccttaaaataaggtaaataacgtgtctaaaataaaataaaatatatgtcttaaataaggcaaataaaaattattatcctaaaatagggtaaatggtacgtcttattaagtaaacaacgtacttaaaatacggtaaacgacatatttattaggtaaacaatatgtcttatcaaataaacaatacagtgagagtatatttggcagttcaattatactagtaaataaattataaaaaagattaatgtaaaatataattgatggtatctcttcagttatgctaaaatctcttactaaaatatcttgagatttgttattggttat

SEQ ID NO: 245519 - DNA, 1140 bp, Cannabis indica
atatatatggtccaacactatattgatgatactattacaaaagtggcatatatatttaggaattttgttcatattagggacaaaaaaatttatctagcataaatgtaggaaaaaaaaaagagtataaatgtaaaaaataaaaaaatatataaacttttgggtggggtgcaatattgtcttgcaaccatagaaaatacaataattaatgtaatttaatattgaatttttcatattctattattaattatagtgctttaaacaatttaaagttaattagaaacaaagaatggtattgcataagaagtaggtagtcatttgaaatagtagtgaagtaaaataaacttaattggtatgatgagataatttaattaagttattacgtaaattattagattgaaaattgtaatgaagtttctggattattaaatttggaaacattttataataataataataataataataataataaagattttgttttggtacgctcgactcgattgctttggtttccagattcttccaattcgtgcaagatttggactttggttcagctaaaagcgtgttgaaactttatcaaactcactattatattatatcactataaatatatatatataacattatgtatcgatctacaaagactacaataataataataataacttatgtaataaaccttctaaagggttatttgatttagtaaactcatttccatatctaagaaaattttttagtttatttttttgtatgatcgcattgtatatatttaagattatttataaatttttaaaaaataaggtttaaacagttatacgagaaaaacagttatttgtaataaaatatgtaaattttattttaattatttaaaaaaaatttagaaatttacaactaatattaaataattataacaattataattataaaaaaaataaattaaaaaatttaacttgtatgctaaaataaataatgagtttatcgaaacacttttttttaaaatttccttaataatatatgtgttgttttcagttttgtgtagctgtggctgaattttaaaataatttattttagtgggggtacgtatatatatgtagataataatatatatctaaatttataatatatgtgtgtaagagaagg

SEQ ID NO: 245520 - DNA, 715 bp, Cannabis indica
tagtcacccgtatatatatatatactggttatcttatagtgagtgaggtaactggttaccctaaactgttcttttacattaaatttttctttttaattttgctacaaaataatttgttaaaaaaaaaatccatatttcataagctttgtcgaaaaaacggataatttttttactgatgtcattcgatacaaagctttggaaattggatctgtctccattatcaaatcaatctaatttcccattttggtggtaaaccctactaattctttcaaaaacacatctagaaattcttgtaccacatgtacactttcgggtactactggtacctcccttgtagtatccactacattagctaaataactgatacattcccctcgtaacaaatctctcgccttaagcattgatatcatgggaactcgggatccatgaacttttctcacaagcacaaacgaattctcacctttcggttcaaatgtcgtcatcttccttttgcaatcagtggtagcattataatttgctaaccaattcatgcacatgatcacatcaaaatcttctaagtttaactcaataagacacattgacaattctatatttaccacacacacgggaagagatctaacccaccataggtgacaacgtacaaaatccacttgtcatcgcatggcctactcaaactatcaattactctactagacacatatgaattcatagcacc

SEQ ID NO: 245521 - DNA, 1172 bp, Cannabis indica
gatcgcaggatagacctggagacttgattacccatgttcggcttcgaaataataattatgatgaatgggaaaaatctgtgtgtctcgctcttcgttctcgtcaaaaatttggcttttctaacggcacgattatggaactcatgccacccttcacgcaagaggattggttcactattcactcgatgcttgtctcatggctgatgcatactattgattcagaagttaagtctactatttccttttatgatgatgctaaactcttgtgggttgaattgaaggctcgtttttctattactaatggtccaaaaatacaacaattaaaaactgatattgtgaagtctgaacagtctaaaactatgtatgttgctacatattttggaaagcttaaagttttatgggatgatttagctaatcatgattctattcttgcgtgtacgtgtgggaagtgcactagcaatttgggtaaggctcatgagaagcgtcgtggcaataagcgtcttcatcaatttttaatgggtataaattcaaaatagtatgcccaactacactctactatattatctcaagagcctttacctttacttgatcgtgtttatcaaaaagttacgcaagaagaacaagtccatgggattactcgcaacaaagaatctccaccagaggttgtgggtttttctgtgcgcccggagggacgaggaaaagggaaaccagagaaagttgataagtctgggctcatgtgctctcactgtcatcgttctggccatgatattgcaaattgttttcagcttcttggttatccagagtggtggggggatagacctcgcactcaaggtgcaccatctgctcatggcaaaggtaatggtggtcggagttctgatccaacagctgctgggcgaggcagaggtgccactgttcgcgccgtaacgatagatggcagcaactcaggcatggtcagttctgtggttgagcagcccacttcgtctaccacttcttcaaacactcccgtatctcttcctaatatgagtaaggaacaatggcaaaccattgctaccatgtttggtaatgttcaatattctagcaatcgtttgaacggtgagttctctaaaaattattggattattgacactggggcttctaatcatgtgacgggagatatatcatacttatttgacatt

SEQ ID NO: 245522 - DNA, 1971 bp, Cannabis indica
cgttttatccaaatatttgctttcttttatttttttcttttagttttactttatgactttaacaagttgtttcttgcaggaatggtaacagcaaaagtggggaaacggcacgcaataacagggttcgaagcactgaaagagtttatttgtttcaaggtcaatatatcatctctcgctctctattcaccttttttttatgagccattataggctttggtttgcgaggatgaagaagtgtgaaaatgaaactagttcaattgaataatttgaatcacaaaatgaaaattcacctaccgcttatccaaatcaatacagaaaagaaaacaacctaacaaacctatccgaagatgttagttttttagggatgacgtcatatagacttgatgacttaatgctttttcactgatattattccatgcatgcttcttgtttcagtttattgcctgatcgaaagcttaagaatctgttacagcggccattgaatcatgtacctgagactaaagatggtaactccctcttactattttggtattgggaagaatgtttgaaacaaaggtaattataattgatttacacgtcctaagttgttcagattttgaacaaaaaatggtcttttgatcttgatatttaatgatattatgtaatgtttcaggtatgaacgttttgtttttgccctagaagaagcatcaagagatatgttacctatattaaaagacaaggcattaaaggttagctgtgacatatactctttgcttccttttcttccatcctaatccctaatcaccatgacttcttttcctatatgtttgcataacaaattttaaaattttcacttattcctgccccgggctttgtcttgactatgtgaaacgtttcatctatactcacatattttttttatttgcattcagattatttatacattagctaaagagtaaatcagaacaagagcggagattactctctgcattagttaacaaagtaagttttcaccatgaacttttacacaaccaagttacaaaaactcttgtttctactttattatcatcctggattatatctgattcaatattcacttgtcttttttttacaattaggggtagtccagaaaataagggtgcttccaatgctgattatcacttgtcaaaaatcttgtctgaccacccaaatatgacggtctgatcactatatccttcaagtttttttttttaatatgttatatgtgtgtattcgttcaactgcctcacttcagttatcaatggggagagtaagatctcggggaagttggaatggagcatgattctagcttttttgaatactgtttttgtagatgtacatgtatattatatttgtagttacacttgtattttattatatttaaagccattttgttagctggtttttacagatagatcatgtcattatctagtacttagttctttgatgtgccattgctctatatgataccatgatgatgagggaatgataagaccatgtgaacttagttctttgatgtgccattgctctatatgataccatgatgatgagggaatgataagaccatgtgaagatgttagatactcttgttgaggctttgtatcttatttatttacaactccttttcacaggttgtagtgattgatgaggtggactcttttctttttcggcctcatttggtattacgagccaagtaccacgctgtaagttgtataatttacacacataattgaatcttttctagttaatttggagtaagcttgtcccactttttcttgttttcagcatctatatttctggtattcatatgataatgaaatcataatgtagcattagtgctggtacttgcttacttaagtaaatatactacaaaatgatagattttggaattttacaaaattattaatccttttagtcatgaataaatttcaaaaaactctgtaatacatgttgcctgcagtagtttgtaaatcc

SEQ ID NO: 245523 - DNA, 1225 bp, Cannabis indica
aaagcattatggatgaacaacaaggttgaaaggcaacttgggagttaaagtcgcggttataggagcagtatcctgagttgtttagagaaattttgaggacaaaatttctataaggaggggatagttgtaatatcccgaaaaatataatgatatttaattgggcatattttttttattaaatatgtgattaagtaggcattagagtaggattttaatcctaataaagctaattacgagttaattagtgaaatacgactaaaggtacaaattaagtgttatttattaattacagagattttattggactatgggggtattatggatactattttcgaaataaaatatttttgggtttggcagccgtgggaactcaacggaatggtcagaaatgtcacgacaataagagatgaattaaattgaaattagaagtatactagactagtgtagaattttaaattatcggtttaacgggattagtaagaatgaccaaaatacccctagggtagattttaagctttaaggttttatgaggggcaatttagtcttttcctagagttgggattttgtctctatgtgatttatatgggctgaaaagggataaatataacttacattatatgcctaagtatttatttttggaagaaaaaccttgaaaactaagattaagtgcataacaccatttctcttccacttttcctcttcgaatctaaggccagcagctgcaaggggggaaattcttcacaaattcttcaagccttagcagaatttaacctagtctaaggattctgtaagctttaaggtaagtcctcactccttttcctttgtttttctagggttttgggttaggtttgttgggtttttcttgaattcgggtctgtgatgattagtggagttcatagtttgattataggtgaaatttagagttgttcaggtgtgttttagatgggttaattggctgttcaatttgttttgggggaggattaagtttaagaactcaattttggctctaacatggtgaattaagtattgtgatgaattatggtgtgttaatgatttaataccttgtttttatgttcttgaattgttatggattgtttgagtaggtatgatggagttttggatcgattttggaggagaaaacccaaggttttcttccctgtagaaaccggtcaaccggttgctactggtatggccaactggttgaccggttggtctgtaggggaaa

SEQ ID NO: 245524 - DNA, 862 bp, Cannabis indica
gatgactgaaattaattaaatcgtaaaatatattggtatagacttatctgccctagaatttcaatattattatttttagtaataatgtatttggttatcagtactgtttaattagaggtaaactattcgtaactcacctccctttttaatctcactttcaaaataatttatggacgtcctaaaatatttacttcccacacactctctaacaaaattatcaaattaaatattgatttctaaattgaatttgctataaatatcatcataattacaaaataattgaaacattaatttaaagttatcctgtgtggtcagaatatttaccaaaaattaagcatcatcacaaccacgtacacaaaaattatgaacaaattcattcacacacactatatataataaattgtaggcttataatttccataagaaaaaaaagaaaataataataagtatggcattgaaggtgatgtttttcgttgcaggagtagttttggttttacaggtgattaccacatctggtgcaccgagcatcattccagcagatggctcaaagttggatagttggattgagcacaacgtacaagctcatgagagggacaaggacgatcatgcccttgacaaggtactggcgacagcacaggcctcctctaaggtgatcaaggtcagccaagatggaaagggagatttcaagtcgattacagatgctgttaaaagtattcctgcggggaacactgctagggtcataatctcaattgctggtgggggtttacaagggagcatatattggtggaaaggacgaaaccctttgtcacatttttggggggataaaggtaatatgcctataatcacttttgatggcacagcg

SEQ ID NO: 245525 - DNA, 609 bp, Cannabis indica
agaaaaaggtaatggctattggtttagccagccttgtgtatcatctctggaaaaactaggaatgaattggtatggcaagggaaggaacaaaacatggcacatttagttggcagaatcaaagagtttgtgaaatagagaattgtgttggttttgcatagaaaagtcagtcaaaaggatgatgagtggtttaaattctttataaattttatgtatagaaaagtgctaggtcataactaactggttatggtgcctataggttgcacaaattacaggttaaatgcaataaaattcacctagttcatcaaaaaaataataaacaagtttaagcattgtttggacttgatcattgtcagaagttagtatattgtgatttttagaacaccaaccttgatggctacattctttttgcaccatcatcatatgtgaatttgaagaaactatgtatttgtggtatagcttctccaaaagttgttcttgttatggaaagttagatgtcatccacaagggcgtttccgaaagtctaacttgtcaattcagaaaaattcttatggaatgatagatgtcgtttggaaggacgttcccagaagtctatcttgtccactctagaag

SEQ ID NO: 245526 - DNA, 870 bp, Cannabis indica
tatttttgtgggttgttgggcctgtcccgcaatttgctatgttgttcagagttgtgcatataagttggttagtcagccctattttttagggcctggcaggcctctgacctcctatggctggccatgtatggttcttacagcctcggtatgtgtctgccagcttgtgctcaaacctttactagcctacaagcttcctctagtcggcctatgtactttccatggtctgccatacatggttgtttagggtcttaacgacttgcttaactccattcacttattgcttgatagtttttctttattgctttagaacccttgatagttgacatgccgtgtagtatgactttgtgttgttgttgacgagctatgttccacgtgttttcagtcttgattatgtggacatgccatgtcaggtgaaaataatttaggataacactttactttactggcttttctgggttagtttttttaataaatttcgttcacacatataatattaatataattgtcaaaaccctatcatagagtctttgagtcaaattttaattgattgtctgatttaattagattttatagtttaatttcataagtcatttgttaaaaattatttgatatgtctcatattttttttttttctatgtaactagtttttgtgtatctatttatgttttaatttttttagatgtcttatatttttttcttaattttttagttatttgtattagaaataagtttctatgtttattttaaatgtttattaattattattatcaatgtattactaaaactctaaagtattattttttgtaatgttgaaataaaattaaaataattgtagaatatataatcaattttagttattaattttgtatt

SEQ ID NO: 245527 - DNA, 924 bp, Cannabis indica
aaaacaaagaattgattaaaagtattatagaaggcacccttagcattccttgttattcctagctaactaatttttattgagggcctattattacccaccaccaagattcaaccttgtgctcaaggttgaaatgttatcacatctaattgttcccaagaatcttagaggttggtagattctacaaatgtatgagtccagttccttggtaggtttggtgtgttgattgtcacacttacaacttgttccacttccagtattacttccatgtcatgagacaaagtggctcaaaatgtggagtgcaatctggtttccaatggccttatgtaaccgtgacatggaaaactagacgtatctctgattttagaggaagttgaagtttgtgttctacactcccaattttctaaccaatgagaaatgattatctctctccaactcttatactaagcttggtcctatttgtgccggtctttcttacgtaatttattgctagatcttgtgtttattaggatttcaaatcaggaaaaacaaggcaatgcttaaaaggggtgcacatggaccgggttagccggattagaggtgttttaataggccaacccaataattgcggtttgaagaaactataaaccatttaattttttgttattatacaacccaaccctacttagtacgataaaatagggggtgggttgaaatggattcattgggttgagatgaatgttttaggctttaatatttaatgataaaataattttacctagtgcatacacaaaaaaacaatacatgtaaatatagtgctttaaagaaaactaaggtgatggtggcagtagcaaaattaataatagtgattgattcttacgttaaacttgtttgtggaagtaataggataaatatggactacgtattagtggtgtgttttggtcaatt

SEQ ID NO: 245528 - DNA, 1179 bp, Cannabis indica
ttaaaatttgcccgtataaactcttcgtcccaccttccatccgttaattttaaatcaataacatgtaattactccaggaatgcaggcttatcatggacccaaaatgtcactggtcgtggcaaccatggatcctcaaggatcctaacttcattaccactaccgattctccatcgataacctctcaagataatctttttgccccaaaccaagctccgccacataaaagaagcgttgctgccacatttagcagccaaaacacttttatcgggaaagtgacatgcttttaaaaccttactatatagggcattaggaaagcggatacacttccatatctgttttgcaagaagagcttgattgaacatactcaaatctctaaatcccaaccctcctttctccttcggtttacagacataagaccatttgcaccaatgaattttcttgttctgctccaatgacccccactagaatcttgcagccaagactctttatagtactctttgatagtcgaaaacaactcatggtatatgtaggcatggcctgaagagaacaataaaaagcacaataaaataaaactataaaagcacatttaaagtaactataaaatttcctaataacatataagagaacaatgaaagtgtaaatgagttgcgtaattcactacaatattttagactttattatattacatcaaactgacatatttattgataagtgttgataaataaacttatattgttagttgtgttttttttattgataaatattattttagattttatattttataaaaattattttttttgactttttattttatattaaatgataaatcggacattgtaattttataaaatggtacaaaatatcactttaagctccattttttttatccaaatagaacataatgttataacttaatattaaggtattgtgaccaagtgagttactttttttttggcatctatttatattagaaattagtttcaaatttgttatattaaaaaaattacaaaaattgagttcaagtattattttgtaaatttaaaaaatgcaaaatttaatttatcatctaataaaatagaagatccattcggtaatttttacaaaacataaggttatttatccttttataaatatatataattatggaataattatataagacactattttttataa

SEQ ID NO: 245529 - DNA, 570 bp, Cannabis indica
aaaaaaagaaattcgtttttagaaaatactaacaaaacacgaattgtgttttgaaaactttaaaaatgattttttgttcttatttctaaaaatacttttttgagaacaaaaaataaaaaataataccaaacatgctctaacactctgcagtagacaattgtttagaacaaattagaacaacaaagtatctaaaaggcaatttcttaacaaaactttgtgcatttcaaattcacgcaacccatgatagtatatcattgttttaaacacgtttgcttggagcccaaaagtctcttagaaccttgatgggatgtcacatttactgaataatatataatttgtaaagttaagatgggttaaaatttattttttaatgcataaagcaagataaaaatgataaaatgatccgaaattggtcaccctctcaaattgatgctcatatttctgtaggttcccaaatactcctcccaattcaaaggtctcactttctctctatcacatttccctctctcattctttcatacaattcaaaccaccaccctctcccatgaacgacgaagcgtcaccaccacc

SEQ ID NO: 245530 - DNA, 2134 bp, Cannabis indica
attaatcacgatttccataaacctcgttgattagcaacaagctgcacagtacgttaaaaatcatgtaatacgcctatgctagttaggatgttacacgatagaactcaaagagcatagtaacaggaagttcctttccattccacacaaagtcaggtctactagtgattccagccttaatttctttaaaagatggtttatatttattagtgaaggtgagtttagctaattgaggtggtttcaagacaagactaatggtagacggggcacagtgaaaccaagtaccccgaatgcaagcctgatacatgtatttatttttctcattgataatatactcatccaaattagcataaaactaaaagatcagctagttgagcatttgtggatatatgagaaatagtttaaagtttggactcaactatttttctaataaaatgatatcgtatttcaatatatttggtccaagaatgttgtacatgattttttgacatgttaatagcacttttgctatcatagaaaagaacaagagactcttgaggaaaaccatagtcgatatgcattttgtttagctagataaattgagtgcaacagcttcctgcagctatatattctgcctcagcagtggaaagagatatagagttctatttctttcttatttaggacacaagattgtttctaatgtagaaacaacctccaaaggtactcttcctaacatccaaactgctagcctagacagaggcattgtactccataagagacatgttagtatctcttgaataccacataccaaactcaacagtgcttgacaaatatttgaaggtgcattttacgacagtaacatgagactgtttgggagtggcctgatatctagcacacaagccaacactaaaatatatattaggacaactggttgtgagatacaataaactccctatcatacctctatacaaggttggatctacatgtttcccatactcatccttgctaagcttagttgaaggactcaaggttgtaaggcatgcttagttttatataatccaaacttgtcaagtattttcttaagggtaatttgcagcataacctccttaattggtgagatttttgcaactaacccccaattctaaaattttagtggtaaaacctcctaaattcaagttctgttaccacgaagccttttccatccattttttggtgttaagtgacaagttggaatgtctacgtgtacacagtgtacacgtggcacagtttaattagtccacgtaataaatatttaaaattaaaataaaaaattaattattgtaaaaataaaaaaaaaatttactctttaaaaattaaaaatttatttttatattctttttctttttatatttcttttatttctctttccttcttcttcttcttcttcttttatcctcacgcctcaatgcattcaagaatcaactatggggtttgggtgctccgatttgaatctctggcaagaagccctatctgcttacccttcccacatacaatctctcaacaaacccgatttggtttcgttagatgactattactgcaacaaactcccacctctcctccaccaacaaaaacctaatccttacatcaccacctctgagctctcaaagctcatgcaatggaaacttacctgtggaaaatggaggtactatctttccctctttctctctttctataggtatactatatatataaagttgtgtgtataaatcaaattcataggtcgcgtctgttgaattttgttttgggtttggacgacgacctggtaaaatcatcatcggaaaaggggtttcaatctctccccaatgtatcgaaagctctatctgagcttatgttcctcaaaggcgtgggtccagccacggcttctgcaatccttgcagattacgcccttgatgttgcgccattcatgtcagatggttgtgcgtgcagctgggagtggggagagtcggctagggtttctgaagatggggacgatagagggtgatgatggggttgtgggctcaggtcatgtgaagatggggacgatgatggggctgattttggggagtcggctagggtttcaaagattaagaagttagagagagaagaaggaggaggcgtcaggatagaagaagaagaagaa

SEQ ID NO: 245531 - DNA, 862 bp, Cannabis indica
atgcaaaaaaaaaatatatatattttgaagtgtaaaaaataaaaaataaataaaagcccttttttataacaaatcaaaatattaatggtatttaaattaatttattaattcaaaaattttattcaaattaatataatggaaggaaataatccaattcttttattattttaagatatcaacattactctctttaagggtagttatattacttatagaatagcattataatttaaatcctcaaaacaaacaatgtaatatttcacattaccattcccttgctagtattaacccattccaaatcgccccttatattaatctcaactgttgaagtcacaatttattttttatttatgaaattatatatttactataaaataaaatagtaacccacgtccaactaacaatttgaatttaattttttcgcatcataatttatgcttagtattataactaaaatatacattatcttctttatatagaaaacagttgggtggaagagtgatgtcctatctaaaatatttactatatatttgttaattatatatctttttgggtaattttataatgcgttttttgaaatagatgccctgattgaactcttatctattttgatatttacaaaaaaaaagtttgatctgattttttttttttcataatcatgtacgttataattatttaagagatatcttccaaaattttaaagaattcaaaataacttacaatataaaaaacaatattcaaacagattattttatacgcttacaatagatattttgaaccatattttcggcatgttaagaggcggtttggctttacagtttaaaaactgttttttgtttttaaaaactgaaaacaattttta

SEQ ID NO: 245532 - DNA, 1036 bp, Cannabis indica
tcctcaactaagaatttaacaccattaacaatacatctgtgataacagtaacatgttggattagagggatttgcgatggcgtacaactcatctgatacttctgcatgattatctactcaaaattgattgatctatcattgagtaaaaaaatttaatcaatactagattaataaattgtatttgaataacaaaattagtagaaggcaatacttactcgagacttgaacaacctaggaaactcattctcttgaattgtgtcaagattttgatgacccctaagttgtagctcgttcctatgctcactacgcataaaatgggggaaaaggttagagaatgtcatcactcgtgagaattaaatagactatgaaaaaagtatcttacgtgatatacttctccatttcattacaattgttcaaaatgtaccactttgcctttagtttatcttgcattggtaaagcatcaatggccctttgaccaattggtcatcgaacatgcttaaatatagagatttccctttcaggcttatttgggaggacataactatttctatcttgacggttaaatcaagtttcaacttcccggaagtacattgaacaaaaggttaagacttcattaactccataagcttcacaaatagatccttccggtcgagatcaatttttaacatattatttgtacacaaacatggctcgttcaattggatacatccacctgaagtgcactggtcccccaagtatcgcttcttttggtaaatgcatcaccaagtgaaccattatgtcaaaaaatgcttgtgggaaagtggttccaaatttgcaaagaatttccataatacctttttgcatgatctgcaagtctgtaacattcaatgtttagagcacaatttctagaaaaatacacacaactcaattattgtatacctaacttctttcttcaaaaactttctaatgccccctagcatcaagcgttgtaacaacacatgacatgttggaatttattttaccaggatcttagatctactcacaagtatgttgtttaa

SEQ ID NO: 245533 - DNA, 2618 bp, Cannabis indica
  modified_base (33)..(33): a, c, t, g, unknown or other
cactcgcagccatacacatcagtgaaaattccncgtctaccatgaacgtgcaaagcatgttgaaatagattgccacttcatcagagagaaaattcagcaagccatcctcaagctactcatgtacacgtccaacaaaacttggctgacatattcacaaaagccttactacctcatcatttaacaacattgtatctgaaataagtgtctccaacatatatacgccatcttgagggaggctattacgacattagtgttagttacaatttagtaaaagcctttcttagcttagttagttaggcctgtcttgaactaagctaagttagttataactctaactaacttagcgcctgtatatatctatatgtatttctctacctgtaatattcaaatacacaaaacaataatagaagctaaaagcttttctctctctaccgcactctgttttttctcatactaggttagagagaaggcctagagcgattattttccgtaatagtttattcaccaccgaaaaaatacaactttgattattaattgtagataagccagctatcaccacattatattattaagttttattgatcagagaactataattaaggcaggagtgatgatatatataacttacttaagaaacctaaattaaatagttctttattatagcatgacatttacataataaaatgacttatttgacacttaatgatgggcatacattttggatcagacaaaacatattgcaaggttgatgttataatgagtcatcaacatataattatgtatctcaaaagctattacagtttaataattgacatgatcaaatcccgaatatattgaaaacttacagggaaaatcaatattaatatttaaggtccacatctccatatattgcagaatatatacaaacctaacaaaagggcttttaataatgattttaaatttgtttaatgtctttggggcatcaccattatgaattattctgttcttgatgtctctcttacaataatttatagaccattaattaatttactttacatatacacacattgcgaatatgcaaaacaaatgaaagaaacaaatgtgtttttgcttctagaataataatttgataagcgcaatatggactagttcaacctctctctctctctatatatatatatagaactttcaattgtgacacatagaatttaaataaactatggcatagttttataatccttgaagtcttcatagttatattctacactataatttattagagcatttgatcccttcgggcttctcctgaaatttttttagcttaactccaaagctgcaaagatatgctaatattatgatcatgaaggagtcaacttccctcttaatgtaatcattagatatacagaattgataaaagggatcactagtacactaccaaattactactgatataattaaatattaaatctcatataacttaaaaaaaataacttttaaaaaatataacttaaaaaaaataacttttaaaaaatatcgctaactaatcataagcactacttataaaatatattagacaccactaatatttaatagaaatccactccttttattgggcacttgctattcccaataatgcaagttttcataagatatattattcgttatacatattttaaagcaacaaaataaacaaatgtagaataaaagcaatgaagtgagaggtatgacataaatatatattttggttgcttttaaagtacaaaagggcagtgactagtgttggggttttaggtgttactcagttcccatgcttcctgcctaggattggggagattctttaatagtcatcaccatatagatttattttattttattagcgtccatttaactgtttatttgtttaatcgattatctacttgcaagaactcatcatataatttggattgtttctaagaataattatacaaaacactttttttttaaaaaaaaaaaaactatattttatttttatatatttttacgattttatatagaaacaacaagaaaattatataaaagttacaagaaaataacatctaaacaaacaaaaaataacacaccgataacaaaaattacaataaattaacaagagtacaatataaaaaaaaattagtatttttagtaaataaattttaacctttactttttttttttttgaaaaaaaaaaaaaaaacacaagagataaattagaaatatggtcaaatttgtttcaaaaaacaaaactgaactgatgttccataacaaaaaatatttaccgcaaaatctctttaacattttcaattgttacatatatgattctaataaaaaaaataactaacagcaaaattattttatcttatgattttgttgtaatcatgccctgtttaataatgttttagctgttaagtaccaattaagcttattaaatgtcagctcagaaacacatgacgacatatttcattagtttatttaatacatggtccaataatcactacaaaaaactgctacctttgtgacaactttttagtcacaacataattttcttgtgtactaaatgtgacttttagtcacaaataaaatattacatgtaactaaaacatagtatttagataagttgtcac

SEQ ID NO: 245534 - DNA, 1047 bp, Cannabis indica
tgaacttcaacttcgtacccataactctctgcttacttacctagaattttgatgtaaacattggatccctatttgaaacaaaggattttagagctccatggagatgaactatctccttcacatatagctctgcatattgatccaccgtataagttatttttaccggtagaaaatgtgctgacttcatgaaacggtccactatgacccatactgagtcatacattcctaaaattctaggcaaaccaaccacatagtccattgtaatatcttcccgcttccactaaggaagtgctaatggttgaagtagctctatcgacctctggtgtctactttgatttgttgacatcttaaacatttagacacgtatcccactacatatcttttcattccacgccatcaataatagggtttcaagtcctgatacattttggtggttccttggtgcaacgaataaggtgtattatgagcttaatcatgtatcccctttttgagctcagcgctatttgggacacaaacccgagctttataaagtagcattccattattcgtgattaaaaagtccttaggctgaccgaccaatacctcatcttgaattttaactagctcagtatcttccaattgtgtctttcgaatcctttccaacaaatctatcgaaagtgttaggttatgtaacttcccaaccacaaattcaatttcggccttaaccatttctgaggctaactaaggagctatcattagagtactaaagacctgcttaagaccttttctgctcaaagtatttgccactacattggctttcttgagatgatataaaatctcatagtcataatccttgactaattctagccactgtctctgcctcatattcaaatctttagagtgaagaaatacttgacgctcttgtggtctgtgtagatctcaatttttccccatatagataattctgccatatctatagagcaaacacacatcaacaagctctaaatcatgtgttgggtaacgtcgttcatataaccctgtcggcttgcatcaaagcacatccaacac

SEQ ID NO: 245535 - DNA, 1109 bp, Cannabis indica
ggcaatgttgagcctattttagcaggagtcatgggcgtacgtgagactttgagttggatcaagacaaaggattggcctcaagtacatttagagtctgattttttggtcgtaattcaagctttgagaagtaaggttaatatgatttctacctttaggtatgttatccaagaatgtaaaactatcaacggtgaattacaaaatatttctgtttcttttgataaacggtcaactaatatggttgctcataactttgcaagagcatctatattaattatttcttgattatcttttcagtttgggagatgtcccaactgatttggtacgttccttggtggcggagtttaccaattaataaaattttattttccattaaaaaaattaattttgcatatcttgctaaattatgtgtaattattttcattacttaacaacaagtatttggaaaaacgtataaataagatctaagaatataactccactagattacttcatcaataaatacttggaaagacggataaatatgatctaataatagacctaagaatataactccactaagttactccatcataaagacacataaacaacttcaatatcattctcaacaaagaaaatacaaaaagtaagttgcaagcaccattttaaaccaaaagataggaccaatgcttccacttctttacgagataacatagcacgcacaagtcatacaaaacactccaaaggaaaactactagaatcacgaacaagaacatcaatgccaataatctcattatcattggtaatggtagcatccacatttcactttaatagtagaatgagttatccaatgaacaactcttggtagaagagtgatttttgtagcctaagagtgtgatttttggacttttaaccaactatcgtaataatgactttcccatcttaagaaaagtgatggggacctccacatatctcacaaaccacttgagcttgtttggcttgcactgcgatcagctttgttagggcctcaacctgagctgtcagctttgtaatggcatccacctctagcacaccagctaccttcttagtttgactcctttcagttggccactgctgattgtttagagccatct

SEQ ID NO: 245536 - DNA, 960 bp, Cannabis indica
cttgttgacaaaaaggtatcccaactaatgactacatagcaagatcaatgggatatggatatacttcatgacattttcaatgagagagatattaacttaattctcagcatccccattcaagctacagagttggatatttggtattggaagaatgaaaacttgggacactacactgtgaagagtgcctatggcatcattcaagaagacaagcaccagcctgtaacacctgatacctcaggtttttggcgaaaatgttggcatttaaaagtcccaccaaaggtaaagaatttcttatggcaagcctctaccgattgtcttaccacaaagttccaactccaaacaaaacatgtggctgttaatactttgtgcccattttgtaatctcgaaaatgaaaccataagccacattttagtcacttgttctttctctaaagcttgctggacagagttaaaaccaagggtctcaactgatgtggaaggaacgttttccaactgactgaattcgatctttgaaaaatggagtgacatgagtagacagctggtgactatgttttgttgggcactttggaagagtaggaatgtgctggcgtagaatcaaaagcatgttgaagttaaggatgttgtagttttggcacgtacggttcttaatcaatggctttatgcttaagataaaacttttgatccatttttaggatggtaatgagcattggaccttaccaaatgttgatacgattaagattaataccgatgttgcaacattctcttcaactaattgctatagctacttttgtgtggctagaactcatactggtacactgttggaagccaaaaccaaatgcgaggaactgtatcccccgaggtggctgaagttattggcatacatgaagcattaagttggattaaagacaaaaagtggagccgtgtggaagtagaatcatactgcctagttgctattcaatct

SEQ ID NO: 245537 - DNA, 1088 bp, Cannabis indica
actctcgtttcacatcaaacctaagtttatccaatcagagcattctcaatactcaaaatttgtattgagatttcaatctcaaacatgtattaaacagaaatatgaataaatgcacaatcacaaaagaagaaataaaaattaacattaactcatgaaataaaatcaaccaatattcatcatatccctaaattggaagtttagttcataatctctaaactcaaatccataatcaaattagaaacataaaaaacataagaaaatataaagggagaagaaagaactagattgtgaacttgatccgggtcaccacgctcgctctagaagtcctctttgttctagggttcttttcctgaatatccctctaaaattctcgatccccttcattaaaatagagtttttcagctcaaaattgagaaaagacaaaattgttcatgtcccgtacaaagtcgttgctacgaaggctatagaaaagtgaaaaacggaatttctataatctctcgtcgcggccacgaattttagtcgcgaccataattatttcctacttggacctctcttagtaaaatatacataactttcacatacaaactctaaataggctgattgaagatgtgttggaaagataaaaagtttatgttttaactttttccaaaatttgatcagaacatactctaatttaagcttgaaattttagctttattttcttgtaaaattttctttattttataaatcatcattttctgaaatctgacaaatttatacattccaagtgtcataacctaaaactaaagaaaacaagcataattttatcccaaaaaataacaacgaagaagaaattaactctaaaaatgatccgaactacaggttaaaagtagcctaataaagcttaaagatggcctttacctacttgtgataaacttggtcaacaaaaatcatctcggcaatgtcatttaactaccactatagtttcataatctatatctttttgtactcctttattttcttatgaaaatccaagtgtaaatccaagctgctttctgtgagatatgttcctattattgcaaactgatcatttcaactatctcaagtcc

SEQ ID NO: 245538 - DNA, 624 bp, Cannabis indica
caaaacacaaaacaaaaaaaaataattaattaataatgtctacaaattttgatctgttgatgagaaaatattgctgagtaaaaagtcaattgatggagtatttggagaagaaatcatcctaggagaaatgaagtaattgttattactactaccttgatgatgatgatgatgatgaattacagggctcagatcatggaagaagctatccgacggtggagagaaaaagttgggatgaataggcggaagcgaagccggtcccggcgacaagatccccgaactgaacaaacccttattattgttgttgttgttaatattattattattattgatctccacaatcccatgatgatcatgatccataatctccatcccatagaattgatgtatatgatcattatcattattataattatttccaatgttgaaatgaatccctttgactttccccggtggagatttggccttctcaaccgcagcgtaacgcgctgccggagataatcctccaccgccaccaccgctcatcgtcattaagtggccaccgtagaaattactagggttagtataattattattagtaatagtactagaagtagtagtactagtagtagagcttgtggtggtggt

SEQ ID NO: 245539 - DNA, 1060 bp, Cannabis indica
cttgttcacagaccaaggagcctttgttaaaaatagacttttagctcacaatgtttcttatttttcaagatcttctgtagggttacaacagaaagaacatctcaactagttgtatcatgaagattgacttaaacaaagcttatgatactgttgattggaactttctggagaatttacttaaacagctctacttcccatcaagatttattcaatgggtgatggtctgtttgaggggtactaagtacaatttcttgatgaatggtagaatccaaggctctttcaagggggaaaagggtctttgacaaagaaatttatccccattattatttgttctaatcatggattatcttaccaggcttttggctcagacttcaaacaacaagggctttagtttcaaccctcattgcaagcagctgaggcttattaacttgtgctttgctgatgatctcttgattttttgcgagggcaacttaaactcggaaaagagagttcaggagacttttattaaattctgtgactcatttggcctctccattaacaacaccaaatcgcatatatattttggaggagtgaaggaagagtctaagcttcaaattcttaggttagtccaaatgcaagagggttcttttcttttaaaatatctgggggtttatcttaggcctactagatgtaaagcatccgattgtggggttatcttggatagtctgaatagaaagttgaattgctggactagtagaaatttttcttttgcagggaggcaacttatccattttgttcttcattagaaacttttggatgagcttattcatattacctaagaaaatcacttcggctattgaccaatattgttgtgattttcttttggagtttttaaaggtaataagagttaagcttcatcttctctcttgggaaaaagactttgccttcctaagaaatttaagggtattggcttctatgaaggaaagaaatggagcttggccatgatggccaaatttgttcgggctgtttcagtaaaaaagattgcttttgggttagatgggtgaatactatctacctcaag

SEQ ID NO: 245540 - DNA, 659 bp, Cannabis indica
catatattttaaccctaaatcattcaaaaaaaagtgatacttacctttgacgatattgctgatggagaagtcgtggtcgataaagaagttattggattctgtggtcgcggtggtcgttgagagaagggactgagattgtgagttgtgggttgagtaccattgtggtgagtttagagagcgagagagagaagggaagagagacagtcgggtgtttgaaatgaacatggtagaattaagtttttttaaatgttaacctattctaccaatgtgtgttaacttaggtttagaaaactaattttaacccaataaatacatagaatatcgaatttcctttctatttttgctaagtatgctccatgagtattagtggatgtaatggactatgtccgatttaccaattaataaaaattttatttatcttaaaaaaatattatgtttactctgtaaaattctttttgtatttttttattttttagtattattttaaattactagttgtaatctttcactacaaaacattttacttttagtcacaataaaaattgtgactaaaagtgaaaaagttgtcactaataaattatcattcttacgttgtgactaaaaaacctgtgcctaaaagtatttagtcacaaaaatctcaatttattgtaactatatgt

SEQ ID NO: 245541 - DNA, 588 bp, Cannabis indica
ttttttttttcgtttttctttaacacccataagggctgaaaatatgcaagattttttttggagttttgagagtttcttggctaaaatgggtactggaaatggattgtctatgataaatggtgaaattcccctcaaacggcgtcggaaacggagcaccggaggtagtgttttcagccggtcgggaaaccgggttcgctgtcagatcgcacgacccggatctgacccgcgtgccgaactgaaggtcagggatgacccttcgaacgacgtgtcgtttttggctctcctttagacaaaacgacgtgtcgtttttggttaagggctgcgcatcgttttagcaaacgacatgtcgttttggaaaaaacgacatgtcgtacggtcagcccagtttttcaaaaaaaaaaaatcatggcgcgttggggcgcgtgggggcgcgtggagggttccttttggagcaaattttcaccattttgctctattttaatttttcatttaattgtgtggttatattttttgttttggtcaatttaaatgtttaattgactcataatcacataattaaagtaacgtaaattattttctcatatttat

SEQ ID NO: 245542 - DNA, 1054 bp, Cannabis indica
tgaaaaaataggggtatttttggaaattttaaaaaatctagtggagtaagaggaatatatttggagttaggggtgtttattagaccaaattcaatatttgacattatattttatctgattcaatctaattaattttaatcatctaatcaatctattgaaatttgatcggttttatcatttgatgtatatttgatcggtcagtataaaagttggaagaggaaaatgactaaactagccttactccacattataacgactgtatccagcactgccgttgttgacgttgtcaaacccaaatcatgacgtgtccagttgtagataacggctacactctaaaactcattttattaattataataataagagccatatataatttgatatctcattcaatctaatacttttctctttctcacctgtaattaggttcaaataattatcattctatccaattaaacttaaaaaatcaaaattcaatctaattcaatttaatttaaaaacaatgaaaaaaataagataaaatctaattgatattgaaaacgatttaataaaaaaaaaaagaacattagattcagttgaattaaattgaataggatctggtgctatatataacattagaataaaaatataataagaggatgtaacatgattttatcccatatatacacacatattcaggaaaaaaaaagaaaaagaaaaagttgattatataagttgatgatttggtcggttaactggttatttaatacctataaatagaatcggtcatgcctggccagttggcatatttttttcatcatatgccacttaattttataaaacggtctcttttcttccctttttcagattttgattttagccacctcactatgtatgactgagaataataaaaactcatgatttggagaagtattctctagtgtggttttttttttttaaaaaaaaaaaaaataattctctagtgtgttagatctaataatatatatatatatatatatatacactaggtgaatgtacgtgccgagccacgtattgctagttttatttaagattt

SEQ ID NO: 245543 - DNA, 840 bp, Cannabis indica
aaaataacaaatataccgttagtgcataattttcaaaatttttacaattttttaaattttatttacataaaatacagttcttttggtatatttttatattatacaattgttatttgttgattttttgttatttatatattgttttatgttgttttgttattgttttgacgttgttttcttgttattttcatgtgattttctagttgttttcttatattttataggaaaattgtaaaaaaaaaactttgaacgtaaaaatgtaattttttacgaaaattggtaagtaaaattaagtgtgcatgtaaacattaaatattcacaacttgattggttgggatgtatgcacatattatataatagtctaggttcgagtttcatggcacctttcttttatatatttctaaaaagtgaggattttaaaatttaaatcgccttagactcatatattattagaactggcgttaataacacacaaactcggcacgaattttatggattaatattaaaaaaaattaggcacaaaaataaaaatatgtcaaactcggcacgatccacttaacacgtttgacaaattttttctaaataaaattaaaaaataattataaataatgatataattatgttaaaatatatatttagtaatttaatattgagttaaaataatttaaatttaaatttaaaaaaaaattaaaaattgtaaaaaatctaatttttattatataaaaaaaaaaaaaaactatatatacatacatgtaagttttcttaaaaaaatcttaaattaattattttcactattaataaggtgggtcaacacaaatatgataaaaaaaaagctatagt

SEQ ID NO: 245544 - DNA, 1865 bp, Cannabis indica
gtctaaacgacgcaaatcataaaattttactgtcttttaaaaaccgacattgtaattgattgggacactattcacgtcggtcaactctgtgacagtagtgttgaccgacgcaaaatagtgtttttgtagtagtgtttggggcccaggtcccccatctaggtttggatcctaggtcccagtctaagtccaagtttatgttctggtttggatcctgagtttgggtccgagtctaggtcccagtacaggttcaggtttgagtctggattcgggtcccaagtcttagtccaggtccctctttgggtctgggttggggtcacgattcgggtcccagtcaagatctaggtctcggacgaggttttggtctaggttttcgtccgggttcaggtcctgagtttgggtctaggttcgggtttagatccgggtccaggtctaggtcttgggttccgatctcggtatgggtatgggtctgggcccgtgtcaaggttagggtatagggtttagggtttttggtttattgtttaggcatttagggtttagggtttagggcttagggtttaggggtaagtgtaaagagttcaggatttagggtatcaggtttagagtttagtgtttaagtgtctgcttctagtgccggttccaattttgggtcacaaggtatgatttaagggttgggtgtgggtctgggttcgaatcctggtctaggtctaggtccgtgtttgggttcaggtcagattccgatctttggtcccggtctgtgtccgggtccgagtgtgggaccgagaccaaggcctggtcttaggtcctagtccctttcctcagtcctgattctggttctaatttcgtgtttgtgtccccaatctaggtcagggacctaggtctaggtctgagtctccaatcccggtttgggtcctgcgttcgggtttgggtccaagtccgtgtctggctttaggttcgcgtgtcgagtcccaatctgagttttgattcgggtccgcatcccagtcttggtctgggtttggttccttgtcagattccagttccaggactgagatcgggtcttagtcccctggtcttgttctcgggtcccagtctgcttctggttctacttcaagtttcgggtcacgaagtacaagttcgggtctgggtccggctttgggtcagagtttgggtctcagtttgagtccatgtatgggtcccagatccaaacatcgacaatgggtcaggtccaagccccgagtctagatcaagatcctggtctcgggtcccagtctagttccacttcgggtcccagctcttggtccgtgtccaagttcagggtctgggtctcgggttaggtcctgggtctcagtgtcaatttcgaagcttgggtccttggtccaggtccctcatccaggtctaggtcctaggtccgggtccaagtctaggacctggtcggggttcaagtcctagtccgagttcgggttcgggtttttgatcccagtccttttcaagatctaggttcgagtcctgggtttgagtccagatctaggtccaggtctgagtctcgatatccgatccgggtttgggttctgaggcttgggtctaggtccccccatccaggttcgggtcctaggtcctagtccgagtccatgtttgggttcgagtcctaggtttgagtctagatctaggtccaggtctgagtctcgagttccgatccgggtctggcttccgaggcccgggtccaggtcccccatccagattcgggtcctagatcctagtccgagtccatgtttgggttcgggtcctagtcccagttctgatttcgattccttgtttgggtttgggttcttgtccaggtctgggtcggggtctgagtccgggtccgagtc

SEQ ID NO: 245545 - DNA, 1560 bp, Cannabis indica
agtgatgtcatcacagtggaaagtaattgtgattatacgtttcaaagtttttagtcccatgatttattaatgcactggatttacactgacatgataatcagtgataaagtttacttacccttgtatgaatagaatgtcctttccaggttattagcaaagtatactagtatcaaatatatggagtatacatcgaactggaccgatattgatagtggaaaagatatcataaacttactattatatctttctaagtcaatatcacttagttgaacttaggtcaatagatcttaatcgtgagatggttaggttcttgcttaaatgaattatttgtgttctttgacttgttcgttaaagctgaccaaatggatcagcccagtacttacatcttgggaccatggtagtgcaattgagtaggagcggtaatcataaataaagaatattaatctatagcttttacaactatatagaagtgaaatgatgatttcccttgagcttggcttaacagatatatatggtgttatccttgttatcaaagttttcattgacaagagacgtggcatgatcggagggaagaatacaatcacaacaagaattatttgacataaccaagaaaagaaacatctcctggatctggaaggtaaggagagatgttgaccactgggagtgacttcttttagtaaaggacctgaagtgcgataaaggacttgtagacgttggccacatcagtgtcttatagcaatcactccatagacagttacaccattttcagacacaaaatcaaaatttgtcccctgtgctcgattatggtagtgcgcatacgcatcctcaaatatatttttttgccgtaaggcctggctagagagtattttacaaaggagagacctttgcacgatgcgtgtcctggatcgtacaaaagtcatcacaagcaattgtacaccacacgatgaagaaggttcttgccaaccaattgtcagattttcctctaacagtactgaccttggtggcgtatggagtataaaatccttggcgggtaaagggtatgccctttacccatgtgtgcctataaacagtcctatttttcatcaagaagggagagaagaattttttacttccagtcactctacaaaaattccaagaaagctctctatcaagagaagtagagtagtctttgctataaccatcttgctatctcataaacatttgcccaaagaggccaatacaatagactcctggactaaggatcttttacgcctgaaccacgtaaaaatctatctgtttattatttattatttcttatcttctttaagctctaaatacatttggttttcaaaaaactcggcaaacattttggtgctttcatttagagctaaaggaagcttagtagtgttcaccgtcctttgatcatggtaaaaacatgaaagactactggcaaaggaactctgttagatacggtcatggatcaaggtgttgggttttatgccctaaataaaactcatttcaatataatcagatttacttattaatatcgatcagaaataatatttaatgttgcatggttca

SEQ ID NO: 245546 - DNA, 1345 bp, Cannabis indica
cattgtatatattaatatatatgtattaggtattttttattagcatatatttagaaaaagatttttattttaaccaaatagtttaaaatgtatacaatatcttatggatatatttatatatagatagattgcaatgagaaaatatataaattaccgtaataatatatatatatgtaaaagctaactccttttttttttcattaaacgaaattttatgtaataagaagtaaaaatgccttaagatatttttttttctgaaagtttatactaattggtatattaatttaattttatatttcttttgttaaagtccatgaaatatgtaccaacaagtatatgtattcattttttttatttctgattgtattacgatattgtaattatatacttaatgtaaatatatatactttatggtatatttttttggttattataaatttagataaaatagtactctaaaaaataattaatttgtctatgcagcttaatggatatgactactttaatagtgtactataatggatatggggaggatcgatgcaattatgttaattttgaagtcacaggtattttaattcctaataattgttcatttgaacaattgaaaatgacattgtttgaagctttgaaataccaatcaccgtgcaaaattgttatggaattccaagtaaaatctggtataccgccaatgaagataagagatgataaggaatttcatttctatattgagttgaaacgtaaaaatcaagatgaaacaatttatctcctattagtcaactgcacaaaaatactatcagatgatcaatcgcttagaggcgccattcctaatattaataatcaagatattaatgatgaaggaagtggtgaatctccatcatggtgtgtaatggcgtgccgcatagcagacaacatcatagaagaagaagatgctagaatgagtaaaaaagataaagcagttgcttatagaataattacggatccttgtgcagatactattagtgtcgatcaggtgtttaatagcaaacaagttcttgtcaatgcaatgagtatgtactcaatgaaaaataattaccagcataaagttaagcgctcctcaacacaagattatgtgttaacatgtttggatgacaagtgtcattggtattttcgtgcttcggtatatggaaaaactagtatgtttaaagttagaaagtttgatgaagcacacaatgacaagcaacaagcaatgttgtaagggattacataaaaaacaaactgatgaatccaaaaagggggtataggccaaacgacatagtggatgacatgatagacgatcttagtgtatgtgtttcttatcaaaaagctt

SEQ ID NO: 245547 - DNA, 702 bp, Cannabis indica
gcataaaacccaacagactgttgcaggtgtagatgtagatgtaggaggtttagtaggtgaaattgttgctgtgatttttggggggcaggaagagatgctgcagatatatctggtgtggttgcagacttgttgtctgcaacagtagggtgatctgcagaatttttttcagtttattggtggcagcagaagtgttttttagtgtattggtggcagcagttggggagtgagcaccaatgacaggttgaacaggaaaaaaaaggttaagttgagaagtttgaatggaacctttgagatggaatattgtttcataaaatatgacatctcgagagtggaagatgttgtttgtggcaaggtcaaggagtgtgtaagctttcattcctcgaggatagccaatgaatatacaagcatgtgctcttggagagaatttgtgcctcttgcttggcaaagaagaggcataagcaaggcatccaaatgttctcaaatgatcatagttaggtgatttaagatgcaacatttcgaagggagttttgtgctgaagtgatggagttggtgttcgattaatgagatatactgtagtttaaatcaaatatggccaataaactaaggcagtaaaagattgaaatgccaaagctcttgctacatttaaatgtgttgatgttttctctcaactactgaattttgttgaggtctttcaacacatga

SEQ ID NO: 245548 - DNA, 887 bp, Cannabis indica
aaagaaaaaaaaaatctaattaatacaacaatgcccaactaaaattgaaaaccctaaaagaatttgaagaccataccgtagctttattaaccaaaaaaacagcttcattagagatacgcatatctggatcatcgctcctaacaatcctcctaatacgctccatgggaaacttattcatcttcgcgtcctcgctctcttcgggctcttcctttcgttctcgtttcttctgcttcttctgtttcccattactggatttggtaggagtagaagttgtgagatttttggtgatgagaacgctgccattctcaacctcgggatgagaatcggaggttgaggatggagtagacggaggctggtcgtggtttttcagggtgccattggtcttggccttgtcgttcttcttgggattggcagtagttgtatcattcttcttcttcttcttcttgatttgagtggttggggtttggttttcagatagtggttttttggaggaagccattgttgttgctcctaatagtaccttcaaacaaaaattaaggtcaatttatgcaactttaatcttacatattacaacaaaaatttactttttatctaaccaaaaaaaaaaaacattgttaagaaattttttaaatgttattatttttttaaaagttacatgaatctcaataattttttaaggaaaaaaaagataaatatacaatttttattaatttgtcaaattaactatagtctaattagtaattctttcccccgaactttgacgtgtactaaatcgtgccctttgaatttttttggtcgttagaaattctcgcgaactattgagattgttaaatttaaggatttttgtctaatttcattcaattttactgtttcagtgattgtttatg

SEQ ID NO: 245549 - DNA, 639 bp, Cannabis indica
tatcaatataatgagaaaatggtaatggataagtacacatatgaaaatctatttttgctagcacccagtccacctccattagcatcattccttggcttccattatgcccaatcatttaagaagagtcaagttgaacattagagctcgcaaattccatatctccccaagcttgagggagttgaaaatgaagacccatatgtgagggcatatgctgctctttatgggaggaagctgctctttgatgagcacttctccaaaacttgagctagcaactttaaatcaagcatttcttgagaggcaacccaagtttcttcactttgtctttagtcttataactctagttgatttccttcagaaaaaataattatgtttaatttctgttgtcaatttctagtttatatttattatttttgtgtagattttacacttggtttggcgtttgaggtatttttagagcacaatttggagttttggatgtgatttggggatttgaagtttttctaattttttgattcaatttttctgtagcaaaaattgggtatgaaaaaaggcctttgtcgttaatttggaaaagttcgcctgcagcagctattttttagcaaaatctagcaaagtggtacaagttaaatgagcagtcag

SEQ ID NO: 245550 - DNA, 2021 bp, Cannabis indica
aaaaaaatatttgaacgatctcgatttactttcgatctcattcaaatttgatagtctacgataactttgaataattatgaggtgtttcaaacgcattataaaagatcgaattactactcttgtaaagatataatttattattaatttaacctttaaattaatttaataatttaaaattcttgtttaaacaataatgtatggaacaattatactataaaaaattttaagttttcattatcattgggggaagtcttatattgatttttattattaatatatatattgacggttgtattgcataaattataacagtaaacagtaaaataacatatgcattaataaataacatttaaatgaaaagctatgactctttgtcaaagaaaagcatgtataataaatagataataaaatttgcactaaaaaaaattgaatgatctcgatgactgttgatctcattcaaattggatagtatatgatatctatggataactatgagatattttagacgtactgaatgatcgaattgctactcttatattttaaaatcaacaattgcacaatataattattattccaaattttagcctatatgatgtgcaatcaaaattgtaatgtgcagcaagacatgttatcataagattgtatcacgtcggcacattaagattgtacagtgaggtatttcccttaaggatgagttgtcatctggtcgataaggagacaacaacctaatagagaagtttgttggatgtttatattgaaggatcgatatatgcttgaccagtataaatatattgacaaagtaaactaatggttcagcgggacagttgtttttttggttcccacaacccagacaatgacatgctcaatccagatccactattagttcaagatcccacaagattcagtttttataatgttcttttcaattttgagattgatttaattaattaaactattttaaatttttatgataatatattaattgaacttgttattatgggaaaaatcttatacaattttttttataaaatttgttaatacaaataattttctcaagatactttattctgaacagtgttgtcagcgcctgagtatacattaagtaatacttctcacgtccttccataagtgttgggcaaagaaaaagtaagacaccatcacagtattacaattctgacatgaatcatgttgggaatgcgacctttagtcttttagcgtacccatatgagttaatgagttgtaagctctgtaataatttattatctaccattttcaagtattgtcattctgttgtgtattctgtatttcttgagatgaaccttctaagttgatttgttcatctcaccaatcttatcaatcgacagtacttattatttatagctcgcccttaacttaaaagagtgaatttgaatatttctaccacatgtattttctgagacaagtttattgaatgtaaaaatttctttaaaatacgagctgatttctttacatgtatcaataccatattgttgctcgaaatatgagtataatagagatataaaataacaataatttattctattttattgttagttatgtgaaaaagaataaatttttttaagtaatttagtattaaaagtaattaatccaaaataactaattcaatatgcacttttacggatttgattggatttgagttattatggagattggattgaatccaaaaatataaaaaataaaattaattaatatatatgatagaattttaaaattattgaattaattgaaatcttaaattagatataagtaaagaaaagaaaaaaaaatattacttcaaaagtattgaactcatgacaagagtgattattataaaattattatgagctaaatatgttataatttttttataagtttaattactgttttaaaaataaaattaattaaaatatttttttacgtgaaactaaaattaagaaaaatgaataattagaactaaattttaaatagacataaaataaaaagtaaaaaaaaaaatagatttg

SEQ ID NO: 245551 - DNA, 699 bp, Cannabis indica
aataataataataaataataatgttaaataatatattaatatttatatgtatctaaattaatctaaaataaataatattaatatttatatatatttataaaactaactttaattactaacactattaaatttaagagtaatattcttttatttttaaaatatagtccgttaaaccaacaaaaataattaaataaccactttttatatataaaaatatcacaattcttcccataaacaataactcaaataataatttataaatatatcatccctttctttcttctcatagccatatatatatcataccctaattttaattattttttatatcaccctctcttttcttttcttttcgttagcattgatatttatacatattaatttatgtattgatttttgtatttttataatgtatgtatatatgaggctaactctcaccagatcgagtcctaggttgtggcaattatatatgtaatattgataacttggatggtcaaatgtcacactttgactcttgcaaaaaaataaaaacttacaaatgatcccttaatatatattataaaattaagacctataattaaaataatggagcaactcctaaatagaaaataattataataaaatagaatcattcattagtatgtatatatatatactaggtgattgttacgtgtcaagccacgtagtgttagttttatt

SEQ ID NO: 245552 - DNA, 750 bp, Cannabis indica
agagagagagagagagagttgactaatctatatatatatttaaattattgatttttttttatctttaattttgatacattactatatttaaaaaagttatttgggatttattgaaaggatattttatattaaaattaaaggcatgtatttatttattccttttttttttgacaaaaatgcacttgaaatttttcttcactaaaggtattaaaatagatatttgatgttaaagataaggaaatgtatttatttattctatttttgtttaattagaagatatgtataggttctctttttagatataaaatatagatgtacttaaaattcttgatatcttactatatatacaattttatctgggatttgtcgaaataaatgtttgatattaaggggctgtttggaatgggggtgatgctagtaagggaatggtaatgtgaaacattaccttgtttgttttgagagtttagtcttggaatgttattcccttagtaatacaactacccttgaggagggtaatgttgataccttaaaaaaagtaggattgaatcattaccttccattatattaatttgaatagcattttgaattaataaataaatttaaatacctataataatatcatttatcataaacaaaatattatgatatatttttttacatgattattacgatatatatttagtcaatgagatcagtttttttttttaactaagttatttttatattattagcaataacatatatatatat

SEQ ID NO: 245553 - DNA, 819 bp, Cannabis indica
atataaaatttatcaaaaaatatagtatttttttaaaaaaatttggctaagtaaaaaaaataacaaagatgtaaattatagtatgtgttttaaaaatttctattatgtatgaaattatgttaggcgcaatccacagagctaaacataaataagaaacaaatggagagaaatattccaaatctgctacctgagagccgccactggctgtaggatttaaaatccattggacaacctccctagaaggatcaaactgcaacatgtcactccaaataccccaactacatttgaaccagcattgcctagcaaaggggcaataaaactagagatgctccaaagaatcttgagcaccatgacaaaagacagtccatctcatttccaaaaatagctttaagccttgtaccacaggggagaatgcctttcctaatcttccatgaaaaaggtttcactctctcttttgaggagaggtgccttcaaaaggcacttgaaaatgttatccgtatctctaagttgttgtttggttaggagatctatcatctatgagcagatttaacagagaagttatcatattgatattatattttactatttgcgaaagaaggataactatgtaagagtgagcccaaaattaaagtgcaaaactgattgcattttcaatgttagcattacaaatctatatgataagtttgtggataagaaaagtcttttcacacaaagaacattgttaggagggacactgtatcttcacattggtataatattgtctgctttgggtctaagcgcttacagatttgtttttgggcacctttccaaaaggcatca

SEQ ID NO: 245554 - DNA, 677 bp, Cannabis indica
atgcgtatataagtcatgttatattattgaataacaagccctcaattctttatctctatgaataaagaattcatgtgcttgggagtccctcatgattaatgattaaataaaccaagattttaccatgactgcaactttagagagacgcgaaagcaaaagcctatggagtcgtttttgtgattggataaccagcaccgaaaaccacctgcctgttcaactaattcaatagccttttcattgctttgtgaaatgaaactctaagttttaattgtctggctataaattctgctaaaatattaaggtgtccacaaggatgtgctattcctgtaatagcaatgttaagttttcgattcatcgaatgagttttttttttacattcatttgtaattcttatatttatttatataataaaaaatattaaaaaatacaatattaattatatctttattggattttttgtgttaaatttgtaacacttgattgttttgtgtatttattctcatgatattttgttttattttattgcttagcaatgttattgttataattattttacttttagttgcattataattgtaatgatggtatgtttatagagtattaaatttaaataaagagtgatgtttaatttttaagtatttttctttatatttttaagttaatattaaaattttagt

SEQ ID NO: 245555 - DNA, 557 bp, Cannabis indica
aaaatgtgaaaaaataaataaatgtgaaattgtaaaaagttttccaaaaataatttatgtaaatttattttcataattttaattaaaaaacatttctaattttttgtatgaactataacaaatatagttattatcgtggtatatattttataacttagagaagatttatattgcctcaaaattttggtttacaacctatatacaacacttctctctcaaaaaagtttgaaaaatctattcacaaattttcaatctttgtatctctttactataacttttcttggcaaaaacaaaagaaactttgctcttttctttacatcatctttcattcattttataagtactgcccttgtcaaacacattccattccataacacttcatttctattttaccaaaatcgatatactagtggtgcaagagaaacaaccattaccatttttcgagctttggtaatttttacccgagccagccacccaataagacctggtatttccatggccttgattctccatgacaaccaagcttttagttcattcaagcacctgctactatattg

SEQ ID NO: 245556 - DNA, 2328 bp, Cannabis indica
tgaaaaagagcagaggcttccatagttcatgtgagctgaagttgccacaagtttctttgaaagagcagcaacaacatcaccatttgaatttctaataacagcaccaactccgatcacacctttgctagagtcgacagctgcatctacattcatcttgaagtgattgggatcaggtggtcgccacagttgtgcagcaggaactgcttgcgttgagggtcgtggtgtcgagcttggggtagcagcagctgaagccgtggactggtgtggctgctgtagggagttagtagcagatgatccagaaattgttgtgcatttctgtaattggttaggtatgttacagcataggaagctaactctcttgctggcctggcttgttggccatgaacgacacgatttcgttcattccatatagtccaaagggacaaaatagttgctccatttcagcctttgaatatagtgttgaaaggtgaaaaagataatcacccttgtacattgcagcagcaagttgccaatcaaaagtcagacctgaattacgccacacggctctagcataacggcagtggaaaagagcatgtccaaccgattcccatgcttgcttacagaccgagcatgtcgagtcagtaataactttcctcttaaccagaaaagtggcaacagggagagcagcatggacaaccctccaagcaaagattttaacttttggtgggagttgcaaggaccaaaagaatttccaccatgatgagtcaacactagagcttgaaccttggtcacttgcatcaagttcagcagcaagatgataaccagaattaaccgtatagaaaccagtgctatgatgatgccatataagagaatcatggctgcaaaagaaactcaatggaatagttgaaattctttccacatccaaaggaatgaaatactgatgtaggagggatacattccattgccgttcctcagtaataagatttgcaactacaccattttgtagacctttgtaatgaaaaggcaagaaagtgctatgcccaggtatccaaggatcataacccgactgtatggttctaccatcactaactttccaatgtaaccccttcacaagaagctctctagcccaatgaatcccttgccatgtgagagaccaggagtgacccaaagaagcttccaaaaaactgctatttggaaagtacttgctattaaggacacggctaagaagtgagtcaggtttttcgtagattcgccatgcttgttttgcaaggagtgcctgattgaagtgaatgaaagagcaaaaacccataccaccatctgatttggatttacaaagaagattccacgaacgccaatggatttttgacccattttcaattaatccccaccagaaatttgccatcatggattccacttgcttgcagaaataggttggtaatcggaaacaactcatggcatatgtaggtattgactgaactacagcttttaaaagtacctccttaccccctgctgaaaaaaatttctcattccaggtattcatcagcttccaaatcttctctttaatgtggttgaacatttcatttttatctcgaccagagtaagatggcagacccaggtacttttcatgacattcacagattggcatagaaagctgttgatgaaaaaacacttaggcagcaagagtggtatttggagaaaaggacgtaaccgacttggccaaattaagttcctgtccagaagctttgtgataggtatccaaaaccctcttaatagccagacaagatctctcattagcttgacagaaaaggaggctgtcatcagcaaaaaacaaatgagtgatcggaggagcatggcgcgtcagcttgaagcccaaaagattgccagagtcctgttcatgttgtaatattctagagaagccttcagagcaaatcaaaaacaagtatggcgataatggacatccttgtcgaagacctcgggatggtgttaaagcacccataacttcaccattaatgagaaaagagaagctattagtagtaaggcagcacatgattaacgaaatccaaccgtcagcaaaccccattttcctcataacttcttcaatgaacctccactccaccctatcaaaaaccttactcatatcgagtttgaaagagatttttttgttggctaagttaggaaatggaaaagatttcttttagcttctatatatttttttagcttttagctaagagctttaagaaaaaaagattttttcattccttttctatgagttgtttttaaacctttttaatttttagcttttataatttaaaataaaaatttaggggtgtttggataaaaaataaaaag

SEQ ID NO: 245557 - DNA, 1216 bp, Cannabis indica
  modified_base (30)..(30): a, c, t, g, unknown or other
tttttttttctttttttttgtaagttctgngtttttttctataacatggggatccaatctccgtcgttcccttacgaaccaccgccaagataggacactgatttgtaagggaaccaccaacattgggtcctaaaatcaattttttttcctttttttctaaaaggaaaaacataaccaatctcggctgttccatgtgcaaccatcgagattggaatcaatatcagtagttacacaaagaaccgccgagataggccaatttttttagtaatgaaggcatagttatgtaagttaaataaaagtagtaaaaataaaagggcccaacttaagtcaattagacttaaattggaaaagctcatgaagaacttggctgtctatagggttcaaccatggggtagtgaaaattctttatttttgtaatttatttaatatcacaatgagagagacttaaaaaaatcctaattgaaatgcggtgaagatgatgtttctttctttcttttcttctaaacggtgaagacgttattaaaaccatggtataatgagaggaaaaacaaaaaacctaattagacaaacagattaatatcacgatgagacatttaagtttgtacggtacagactcgattagggtccataattcagactaatccttatatatataatatatatatattaatatatattacccactttgctataataaaaaataacataaactataaaaaaaataaagtaatatgcaaaatgaatacattgaaattaaatgggaaaattcaagattcaaagagagagagctaatgaggagcatctcttcgggcatatcattcatgattaaatacacattatgattaaataccaaacaaaatctaacagtgaaaaagttatttttataagtaaaaacactcacattagatgttttaaaataaaaattctctcaaatttaaagaactaaactaaaacaagatatatcaaatgatctaaacttcatttctattttaaatttactattcatactctacattgatataatactatttattgtttagacatcttttattaattgtttgaggttttatattttttaaatgaaaatatgtgtaaatattaataatatatatttaaaataaataaaaaaatataaaattaaaaaaaatagaattttaaaatattatttaaaaaaaacttatgtatgatgtaatattaaaatttaaagtaaaaaaaa

SEQ ID NO: 245558 - DNA, 940 bp, Cannabis indica
attgtttcaatgatagaaattactttttttatgtaattacaaaaacctttctatgtaattataaaaaaatttgtttaatgaaattataaaatttgcaagttctatatttttttggtctgatgtagttatgtttgtataagtactcataccaaaattaattttataatatttaaacacaaaacaacattttaaatagtaaaatatattattaatatcgttataattattatatcaacaaaattgatatttttttaaaaaaaaattatataaataatagtttaatgacatttttacaaatgtaagtaatataatttagtaacatttttaaaatgtcactaaaatcattttaaatataataaataaatatataaaaatttattagtgacatttgaagtgttattaattattattatagtggctttttcaaatgttactagtgaattatttagtgacatttggctttacctcacattggtatatcctacattttttacaaatgttacaaaagccatagatgttaataaaagtcagaataatacaagaaacaaagcaagagtactatatttagtactttatttattatttattatttttatataaagtaggttcgatgcataacatcgaacaaacatacatggttggtacgtaaccataaccatatatgcatgcatgcacaagtaacgtactagtgatcaagaattgatgagagaggaagatgatcgtcggtttgttgtgaagcttcatcaatttctttattatatatttatttgctagaatacagtacccaaagcccgtagcattgcattgatagggataacaacacgggcttgcgatattgcatttagcaccaccgggcttacactcagaattaggcacacattttcgactcgtactaatatattgcaggaccttgacatactaatcctccacagcaaaactt

SEQ ID NO: 245559 - DNA, 1686 bp, Cannabis indica
ttaagataatttttaatacgaaccgaaaatataactaatttaatcataatttctttggatcgaattattattaattttatttcgataaaaaattaattcaaaatcttaaaaaagagataatgtaattaataatttatgaaactgagggtgtggggcgaataattaatgtaaaaaaagacttgagaggaaatgggtaatcagcaattggtcagaggttgttagttagtggaagaaagcgtgaaatgcatgagaataaactaaccaaaaatcaccaggtcccaccttctaatggcgcgtgtatcaacgccaccagggtattttctttttggaccttaagtgatagctttattatattatattatttccacttccatgaattacaattacaggtgccatttcgttctccatcacctcactctaccacatttatagctcctcatattatatactttcgatatcttatattatagagtatagaaagaaacataaaatataagcaatcgactttgatggcctaactcattcgtgggtgcaaatacaaaatatacaatggtttctatttttattacactcaattactcaaacgaacagtatgtagaatattattataatattagaattattaattattttattttattttattttgttaaagtcaatatttagtatgatattttaattatcatcaatattgttattttttaaaaaataaactattatttagttattaattttattttaatttaattgtctaaattgtatttaattttaatcgttaaaatattttaataattaattgtgatatataagtgatttctccctaagtttgctactctttcattctatcaaatcaccatcaaaagagttaataaaagcttgaaagatatttatctatcttgtaggaggcgctctttttatatgccatgttgagaagcggatatcttacttttctaaaatgtgaaaataaaatgagtaaacaattttttcttaaaaaaatttacacaaaatactatttttagtaatttttttatagtttatttttaaagtgtttttataaaaataacacgaaaaaaaacacataaaattaatataaagaaacaacaaaataacaaaagtacaacataaaaataataatgaaaatatcaaaagactatatattctgtaaataaaattttaaaaaccgtacaaaaatatttaaaattttgtacaactataattttataattttttttggtgtatttatgaaataatcacttttttatttctccttttattttgcaaatctaaaaatcatattagtggagatttgcataaacaataaccggaggtagacaattcattcaacttaagttttataacaatcaatttattccgcattagaattgttcattaggtgattagattataattaattttcctatttcctatgaaattataatataaaaaaaaaaagtagcttttatgcatatcaaatattaaatttaaatgttttttttttcttaagtataaaagttttggttttgaatcattaacaggtagataatattacaattgagttaagccaagtaatagattttcaaaatattgtaatttgtatatttttttttatttatccatacaaagaaccctattcaattgctcaataaagaaaaatgtttcaaagtacttactagatacttaattcac

SEQ ID NO: 245560 - DNA, 990 bp, Cannabis indica
gttcatatttagggtgttaatcaacatacttgtgagtagatctaagatcctggtaaaataatttccaacacataatggaataggttgatactctttagccattcttggtttttgtacttcggtacaacaccccattttagttattaaatggttccactgatgcatcgttatttatgatggcaaggcatacttggttgaccctttcacccacaatatcctaaaatatctagaaaaataaagcatgatatccatctggtcccagagctttagtggtgccaatggccttaacaacttgatggatgtcctccttagtaaacagttccattaaacactcattatcatcaacaaaaatacgtgaattaacaaattatgtaccacattggctttgctcatttattacgttagaaacttgaaaaatgtctgtaaaataccgctctacttcaccaataatctcttcctcaacacacaacctttggccagtttctatcataatattagtaatagcatttttctttttcctcactgatactttgttatgaaaatagtttgtgtttctatcatcagccatcatccactccgatcttgatctctatttctaataaagtttatctatattcaaaggtcatccaatttaaattctagagttttcaccttatttattcgaatattaagagcaataacgttcaaaagtttatttatctccttttgagttttcacaacttgcttaaacaaagaccccaatctacttattccaagtttaatgacaatttgtacaatattcaagatagtcacaaagtcccaaaggctctgtcacatctaacgtacacttttgctaagcctcaaacacaatgaatcaacaaacatgttctttaagccaatgaggttcaaagaagaacttccatttaacttgctcatgactccatataacaacattctcaagtttagttgctataggatgatgatcaaaatgaagaaaatgttggaaattat

SEQ ID NO: 245561 - DNA, 674 bp, Cannabis indica
agaaaaattatgtctataacattagttatagaggtccttttttacaaaaataataataaagaaaaggtatagtggattaaattttatcgttgtatacaattgaagtctaagatattatattggcttctcataatttttttttcttttgataaaatctattgagtcgattcttaaacatcatttttctttttttgaagcaatatacttatactacgtgcactattccattatttttgtagatataattttttttatgtttattaatttattgatataaagaataagtatcgacttatcataccataaatggcccaataattttacttcgatgtatgaagtaaggtttacacatttgatgcacacataataatgcaaaacatcaaatatttaataatggcattctttgctttttatcttcaccaagtaatcatatctgcacatttcacctcttttttcatatttttttatatagttttcaatattgtacatattattaatacaagtttaagtgaatatttgacatactttgatgataataatttcccgattgacatcgtaataagtgtacatttttcttaacaaatagccttacttttggaatttttatttcttaaaaaccgaatacctgacagtagtgaaagcattcggttaattagtttttttaattagtttct

SEQ ID NO: 245562 - DNA, 1041 bp, Cannabis indica
cccaatatataattaccatataatattctaaatatttatttgtgttattgacaacaaagttgatgattgatctttcttaatactatcataataaatactttttaatatagtgttctatgtatcaatttcaattataaatatcttttttaatttgttattacttataaacttagcattaatatatgtagttgattatgtttatgtatgtattttacaatttatagaatataaaattagataaaatatttatttcaaattcaaaaactctttttattttcattttgaattacattacattacattattttattattattgttttttaatattcatggatacccaataagtctccatacccaatggagattctccgactccaaacatattgaggattaagcgggacaaggcggggatgggagcataaatggggagcggggatggggttgggcgtgcattccccgctcaatttctattcctgccaattgcaatacaacacatgtataatgttggacaccctttaggtaactaataataatgccacataggaaaggaatatgtcagcgaaaatagtagaaaactacaaagaggattgttttgtagagctcgccaacaatcttcaaaaaaagtcaaaaagtgaaaatgtcatacaaattgaaaagtcaaatgatgaaaaggtttctgcgggctcccacatctaaaaccctgatcatcttctagcaatggaaatcaaaagggtgaagttgaacagctcaccctttattgattaaattgttgaggaaccaaagccaagagaattcatggctccaactttcaacttttttgaaataaagacaaacttctttgatcacacgtacccttaccttgtaacacaattatcatatacacctctaaatgaaattcaatgatactagaagaaaaccactatgcccaacacagttaagttattgtagtttattttttttatttccatctttcaatatatttaaaaaataatgaaaaagatttttagatcctaaaagtgcacgatataaataatattaa

SEQ ID NO: 245563 - DNA, 665 bp, Cannabis indica
tactctgctatacttccaccacctcaacaaccagccctttataatcataatagaacacaatcgagcacgacaactacgggtgagcaccagtttcaccagtctatgcctaattcatcacaatggtctgctaatgacggatccatgataactgaagtctatcctcgatagagtatagatttcacaaagctcaactgttttctagtttccttaatattggtacatgtatagggtactatttagattaagataggaaattaaatagtagtggagttaaggatttgagtttttaagagaacaccatataaattttcattgaacttaacaatacaaaaatatatgttcttagtaaaatttagaataattagtatttttactaactttgtggatactacttgattttgccacttaaaatatactgtttatttaaaattctccttaaaatatcagtattctccttaaaatatcagttatataaccgttaaaaatttgtatttttaccttctgaactttgattaatacaaaattttgtctcattttattaaaaaaattaattttaaaaattattctattctattaattctaaatttttttaataaaaattattaaataacgtgatggaaatattaaattaattataaaatgttaagtttacttaaaaaatctaa

SEQ ID NO: 245564 - DNA, 634 bp, Cannabis indica
cacaaaattaatggtgtttctttttctattgacgttgcttcattattgtcgagctccttccgtcgcggttggcttcgtttctcagatgcaattctggtgcagcttcaattgtaaaggcagaggttgtttttttttggattgtataaatatttatatggccaacccatagtattttagtaatatttttacccttgggctataatagaaaaaagttctttaatttttatatatatgtgtgggatcataggggacaacttttagagttgtcaactattagagtacttttagcggaaaaaaatatcaaattttatgtggatgagaattaaaaaaaaataaaagaaagtaatattttgagatgatgagtgtacatttaacaactgtagatgatgcctcccattgaagatgctctaagtgcactaatgcacttattcgagttttttgcatggggataattttaattttaattttttttagatgatctagtacaacttagttaattaagatattcggtagatttttttaaaattttaaaaaatttaacgcgtcaaaataaggttcaaactatatattgtacgcgtgtctcttttatttgataccagtgtaaaataaattatttgaattttactctctaaat

SEQ ID NO: 245565 - DNA, 1350 bp, Cannabis indica
aacaaaccaaatttcaagtcaatatatcattttttagttcttagaggaaaaaaaaaaaaaatagcataacaggaacatggcccatcttataatcatttagatttagttatacctcaggcatcgaagtaggctctctgcagcagaagcttcttgcatagcctctactgctgctgtctgtgcagcatccctttgcttcataacttcctgtaagaacacaagtgtagtcatgaaataagagacaagattacataacgatagaataaaaaagcaaacttcaaaactgccagaaaccaatcaaaacgggcatctcaactccacagattccaaacacggtaaatgaaaaatgtaatctccttagctaagcttataaaagagaagaaaaactataagcaattggtaggcagtctgcatatggcgtatttcattgataattcaagttgacaagtaatctcataatctcacaagtcacgacaattagaatttatagataaatctatgtaataaacattagagacacaaaacttctcagaaaaagaacaaattaacaaaactatctgctcaaatcatggcatatgatgcaattctgtgcccgaagaagcaagttgattctctgaaattatgcatttagatccttcataattttttataatctatttcagcaaaaatgcaaatggaatttgaagtactttctttttcaatgaaatgaaggtcacatatgacaacatttccacaagtaaagccaagaaaaacatcaggattcaagaaaatgtagaatatattaccttgccaagctttgcaagtgatgatgggagtgaagcccatgaaacacttccttctgtcagttttctattatttacaggcaccttgaccaagtttccagggataccattattaggtaaatctcctgtggattttcttccagcagaaattctttgcttatcagacctattctgatcatccaaagttccatttgcagtaactttcttggtaggcatctgaaccttgttctcctctttggaggactttacagatgtatgggtcttattatcttccttagacagcaacctctcacttgatgtacccttcctaggagtctggcaattacaaactaatttagatgataataaacgtactaatttgactagcagtgagtaaataaccataaacaaaaccagcattaacgcaaccaaaggcacaagttttgtttttcaaacattctggttcattcaataaaaaaaaaaccagaatccatatcccggaaaagagcaaaatcaacaaaattaaacctcatcaaacttgaagcacaatcaatacaaatgctttcaaattgtgattaaagaattggaacaa

SEQ ID NO: 245566 - DNA, 1358 bp, Cannabis indica
ttataaatttgttttattttgatatttgttcttttcatatttacgtattttcgttttcatcttcagtttgcgagttttcatcttgagttttcttggcaatcgtatgtagggcaatcgaaaataataaaagagggagaagagtcaatcgtataggtcaatggtcaatggtatttttgggatttaacctggttaacgggtagggaaaatcttacctgtagagcaatcgaatcgtatcaattcttgagttttctcggcaattggatgtagggcaatcgcaaataataaaagagggagaagagtcaatcgtataagtcaatggtcaatggtatttttgggatttaacctggttaacctcagccaaaaaaactgttaattttgaataaaattaaaaaaaaaaaaacacccaataatttctcataaaccaagaattctgttatatagccacattttatatagaatagatatttacacaatgcaacatgtataatttacgttaatataggccaaaaaaatatgcaccaaagttatatttagttaacaaaaataataagtaattatatttattaaaattataaaatatgattgatttattttatttacgtacgagtaaattattttaccattgtgtataatatactatgtaaaaaaaacaaaatattaatcttcttttatatttttaacgttcagagttgaaaaacgttgatatagaaaaaaaataaataaagcaataaataaagattttatttgacaaacttttttttctttttttattttcagaatatatatatatggcaagattatggtaggaccgagcaaagttctttaccagtagataatttttttaacattaatttgaaatcatgtagttattataatgtaattggtgtatacttttacgataaaactgcttgtataaagttttcctacaagttagctctttttagcatcccttgggcgattattgttatttcagtgttcataaatgtgaggtgcattattatgaacacacatggactaactcctagaataagatcggtattgcaaagctcattgtcctttgttgttgcacatgatggggatcaagcagcagttgctcaaaatatggctcagagaatggtgtcaagattgtgtttgacctttacacttagctatcatcttgagcgggttggcaccttgggagtgctttttgttttgtctcacgaggttcttgcctttgatgaacatggttgtcgcgaggaacggtgagctgcttatgcgatctctagttgcttgagcatgtggtgtgttactacgagaattagactatctaggtgtttgtagtgtggtactagctgacggattcgagtgccttataggtg

SEQ ID NO: 245567 - DNA, 958 bp, Cannabis indica
acaaggcttaattttacttccccgcctagctactctaggttgggggtagggccaacttaagtgtcaaaacttaaatttagtgttaaatcaataccaaaagagtattgttttagcactaatatttttttccaattctgccaaccacaacactaaaaatttatgttctaattataatgttattttattaatataataaaaatatttacttaataaatgaattgttttattattaaaaagtaaaaaaaaaaatgaatctcgtggtctacagtgcccactattattagtgggacactgtagactcccatcaaagtaagataggttttaggactcgattggagcattttgttgtttttttttttacgtgatatgtgatagatttgaagttattatttaaaaaaataaataaaaaaaattaaaggagaaaataaatagaggtatatatattttatatcaatatatatatatgatagatttcaagttattatttattttttaaaaaaaaaaagagagaattaagaacaaaataaaatagatgtatacattttataataatcaatatctatgaaactaataaaataattaaaaaaaaaaataagaagaataaataaggatatattgaagagattttaaaatatcattgtagattggattgaatcagttactgtacatgtcaagcaacacccaattcatataagtgcgaattttagattttccaattcaaagcaagtttggcacaattgtgcttaggaaaaaagtagttgtagctgtgctatgagaaaaaacagctgtagtagaactgtggaaatgcgagttgttaaaatactattataataataatattattataatctagttcattataatcacaagtatatataaaaatatgttatataaaatttttattttctatatattttttaattatttttctctatgtataaatttatatatatttgat

SEQ ID NO: 245568 - DNA, 656 bp, Cannabis indica
aggatatgcacgactagctcatctcatataatgacttataatttgtaatggttttaatagtaagtaagtccaaaaagctaggaaaaataatacaaatttattttagtaaatgatggcatttagaagaagaaaattcttgtgtggaaaacaaagccttttgcaagacattttgatcctcccaacgctcctgaagacccgcaccacaaatcctatcacaggtgtggctttaggaaaggagttcatacttttgttgatgcaacttgtaaaggtttagttggtgttggggctgccattatggttgatgtatctagttgtgtgatagagacactcatgcatggtggagtacacaacttcatccccgctagttgcagaaactactgctatgcttcatggacttcctaggctgtttttaaggggttggaaaacccctttttttcatttcttattgcccaaatttggtgcatgaggttcttctcaagcaagcctatgattggaaagaaactctgtttttctcgcatctcttttgggtgttggatttaatttctggtttcgagatctgttggttgccttgcagtttgtactggcaatgtgggatgctaacaatagtatttttgattgtttttttcaaaggaagtgaaaccttttgtttccacaat

SEQ ID NO: 245569 - DNA, 1113 bp, Cannabis indica
taaacccaaaaaattaaacaatcttttttaaataatcaaattatcaaatccaataacaaaagaatgttttgtgtggaaatcaagaaattcaattctgatattccaaacaaaaacaataattcgaaaccaaaaatggtcgaagaacaatgtctctttgcttgcaaaaacaatcttgaaactcaagggaaagaagaaatcgaagtagcccatatcgacattgatctcccagaattcaaattgttgtcgccgaaaaagataatcgaccaaaagtggcagcgaatccaattctcgttgcaacgattcagataaaactccttcagtccctcatgtactttgttagagttcattgattccattctgcaatctttcagtacaaacagtcagatttcagccgtaagtatatcgacatttgaatgagatcagggaattaagtcattttcggtcatcactattatcgttacccgatcgagcttcgatgattctaactccatcaaattggccttcgatgatgtctgcgacttcgagtatcaagtcctcaacatcgtcgctaacacccgtcgtgctctctctttcgcttgctttgccaagcagtaagtatatagatacatattttaatcatatacacaataatagattaagttaagagtgagtattctttaactgaaatggtattttgattattatcttttatttcttcataaaagggttttatcgtatttggataaggattcagatacaaggcaatgcatattataattgttacaggggatctattgaagaggatgtccttgtaacaatacacatggagacattttcaaagtactccttattgcttatatgtctcagtaattttgaaatatatatttatatttcggtaacaacaaaatatccatgtgtattaagagatgatgaaatcaaaataagcatacagaggtatgtgaagatatccaagtgggtttattttcatatccttatttgtagattttgccaattcaattaaacacattggctataacttttgccaggaatgtttttgcctctttgacaaagtgatatttaaaaatgtttattttcattaaatacttgtatttgatatattatattttggttgta

SEQ ID NO: 245570 - DNA, 1320 bp, Cannabis indica
tggatatccgattctattggatgaatcgattaggattgaattagtcagttgtaattagattggataactttctacacaccattaagataaacaaaataggattcacaatgaaagtaaatatattcataatcttaattaatgataagagtataatatgtctatagttcactgaagtttcagtagatttttatatatttcaacattataaaaatatttttagtcctattttataatgattatgtaagatgtatttataatcacttgtacattttttttttaaaaaaatctagtttaattgtgtagtgaaaggttaaaatgatgccatattaggatttcttttttaagtatatcaaacacactatataaccaacacaattatattaaacatgtcctattttttccccttttttccattaattttttttatactattgtttaatgaatactatatataaggctattattaataattagataaaatatttaattatttatttattttttttaattgtaaattttatttaactaaactaatttaatctcaataatatcaacaacaccaaaagagatattagattcaaaaaaaaaaaaaaatacaatcattatataaatgggatgctctaaccataaagttagcatcccacatggcaaatcattttacaaaacgtaaagaaacatcacttaaataagataaaagctacttaatatcttcaatgacaccactaaaagtagatgacaaaatattcaaatttttaacagtttgtactaatatcagacaatcaaattcgataatactaacacctgagaaattacgctttaaccacgaaagcactttcgtggcttcagcaatttctagaacaacttgccaaatccacactctcgaaatcccagcacggcccaattgcattcgaaagatacctagtatctgttagttttatggcactaaattaggtacacaggaaaaatattataatttgattatcattgtactatagttccagggatcaccatatgtataaacattaaatctaaaatatgaattacatgaaagaaataaatacatcttgatgactatcaggatattctcgaaacttcttgttatttgaattctcaacatatgagcagaatagtttgagaaaaacgaggcttctatttatagtagttaattctcaattaattaaatcatatttaattatttgaataaatatctatctaaattcagttattgatatttatgatggggaatctctcaaccaattgagagaatatcttaactactttgaggaaatatctcaatcaacttgaaatatctttaaccac

SEQ ID NO: 245571 - DNA, 1408 bp, Cannabis indica
aataaactaattattatccaaaacacaacttgaaattcataaaagagatactaagaaaatacaaacataaattataaataataaaatattactaaaaatataatataaaatactaaacgggtccctgtcggggtaggaagtgtgatcctcgtccctgtcccgtttaacattcagagacagaaagtaatttccgtccccaccctattcctcatttagacgggaaattcatgccccattaagagcgggtccccgcaaggccccattcacataggaaaatgtgcatacctacttggagctcttaagattccaaaatattagaattactgttttgataataattaaattatatatagaaccctaaaatttgattttattttagacctcatatactttttaatcgagaggaagttgaacctcttgtttccactacaaactttggtgcttgagtttcaattttaataaaaaatttcattaagagcactttcattagattatttactctacttttatattttaaacagtaatttgtgacataaatacttaagtttaacttttaattgtaaataaatacttaaatttaattttttgacggtaataatatttaagttataattttagaaattctgtaggtacttaactgttaagtgttaagtaaattaacacggacaatcttttattagttatattttatattatatatttattcattttaaatatatatattaatttatacacatacacataaaataaataaaaataaaaataaaataagtttaaaagaatgaataatggttcatgtggagacactaatcataattaaaaaaaaagtataaaataactcacttgatgcatattattttgtaataattctcttctctaattttatttttcttaaaataaaaaattatattttaaaaaaaactaatgtcaatgctctaagtaatatgaaaaaaagagtcatatttttgtaaatagttaaaaaaatgaaattatgatcaaaatcaaaatgagatatgacaaaagtcaaaagtaataaaataaaatataatatgatggtgtaatgtaatttaatattaatttttttatttaataaataaaaaaaaatcaaaactaattataaaacgtcatatcatacaaaatttgatatcgtcatatcatagaaaacttgctatctaataacaatgcttaaatataaggatggcaattatacccacgggttcgggtacccgcaggtacgggatttgacttttcgggggcggggcgggtatgggtttaaagtattcattcctgagtcagaaaatggagtggggcgggggaatagatacccgcaccgatatgatatatgtatatatttaagttttaaaatcataactactacaattaaaataatttcatgttttaggttttt

SEQ ID NO: 245572 - DNA, 1284 bp, Cannabis indica
aatcaatccacttaacaaactcatgccccatcctaataaatttaatgttcatacccctcctaacaggcaggttaacatccataagaactctcagacgcaaataaggaccagtgccctccttaatggtgtccttatcaacctcaataaggtcaccaatctccatagctataaatctagtaagatcataagacttacacataaaaggaatgtcatacacttgaatccaaaagggtacataatggagattatcaggggtaagagggaaggaactatctggtgcagcaaagatagtaagacactgggcaaaatgccacgattgaccctctaaaattctacccttatccccttcacagtcaaaggagacaagaaacatgccatcagcatgctcagacacagtaatagggaaacgacattgcgatgaccagatacccgagagagttttcatcagagaaggcctattgtaaggacgaatagtatgagtttaagaagaagactaatgggggcaggatcaaaactggaagaacccgtatcataggtgaaaacagtggactcatcagggggaagaacaagggcattagaaacattatttaaaaactcatccatgtcaacaaagagagacaacaaaattgtataagcaggaataaacaaggtgaaaggagggtgatgaagaaaatagtacctgagtttggaaatatatataaagaaccaaagggcacggatgatacaccagagaaccgccctagtcacgtctgaagtcgcatccattgaagccgtaatgatgagaggaacctgaaggactttgggaaaccagtcgtccgcctccaaattgcgatattcaagggggtttttctgggtatggatatgggagatcaggagtaaatggcgagaagacaaaatggaatgatgagaaaatttaattagagagggcagaaggaagggtttagagcaattaatgctctgatcaaatttaatgggatgtgaaataaaaccataataaccactagagcatttattacataggaaagatggggaagtatgcaaaaaaggatagttgcaataagtcaaaccaccactataccagtaagggtggacgagatcctccatgagaggaaccaaacacaaaaggaacgagaagatggaccgcatacctgctagaaggctccagagagaaaaagcttttttttttagaagaaaaattatgttatgataaatttaagaaatgtcattaatttacattagggctattttcaaaaatagaaaaattattaagattatgataaatat

SEQ ID NO: 245573 - DNA, 1035 bp, Cannabis indica
atttacatcgcacagtctatactctattcatttagctcactagatgactaagttgcgatcatagtagtttatgaagttattcatagcaagattttggatgaacaaggtgtcattgtcagtgactctcaaggtatttattttttaatttacatgcatgaagttaaagaagaaaaaagaaaaaaaaaggtgcactagtttaaaatttattgtcaatttagcatcatttcttcaagaggctctatatttgagcacaattacttaatacagaggtttatgcatagatgaaacattatagagtagctagcaaatctcatttctatgttctatttagtttaatataatgattttaatgtaaaatgttatctaatgcaatgaattgtgatattgtggtctgtcatttatgccgagatcaagtattgtaatctgtcagtagaatttggatttgtatttctgtattgtaggactaggctagggggtccattcttctatgatatctaagctgactaccttggcaaatgtaggttgcaatatgttgttatttgccatattatgtgagtgagactactggaaaagaatgctaactctcttttaaactcttagacctatatgttaatttttgctttaggggtggacttggggctagctcaagtggttgggtgtgacatgctagattgctcttattatatgtgcaatggccaatggtgctggattgttgtctgtttgctggcaatgaagttgttctgttgaatacttgaacaatgttgtgttacaatgttaatgatgtttttgtttctcaatttaatattggactggaatactttctacttttataatgaccatattgctgtaatgactgcgttttatattgtacctaatcccacttggaaatttctgttcgatttgatcacttgaaatttcataagagaagagagatcgtagcatagaaaaggaaggagaaatcattttgattcgaccctcctcccatactttaacaagtaagctaataaactaccttttttggctgcctttacgaat

SEQ ID NO: 245574 - DNA, 663 bp, Cannabis indica
taaaataaaaatgattaaaatatgatgtgtttataaatttttggagtgcaactaaaattattcttataaaaaattaggagtaaatataaaaataaaaactacaaaaaagaggcataactgtaattatttttttttacaaagtttttgaaagaaatttaacaaatacactacttcaaacacaatcttaaattgtgaatataccatttgttggaagacatgaataataatgtagttgtttgtaatgagctttttttcaaaaagaaatatcaattgattcggtgactcatttgttacctaaagttgtttaagactccacatcaccttactatgttgattgcctaatcctctatggtttcattaatggaattccctttcaaaacatttaattaaataaaaacaagaaatacaataatagaaaagaagaaacatttcaaacctcgattgagacaatttttatttgttgacttaagttaaaagatggtttacacaaacaaaatgaaaatgaaaaaacaaaacactagatcataattaaatacagggtaaatactattttagattatgtattttataaaagttaatgatcaaattttttatattttttaaaaagctaattaggatttttacccccggaactttgacatgtaccgaatcatacccctaaac

SEQ ID NO: 245575 - DNA, 1713 bp, Cannabis indica
tgtatgtatgatatgcttataatcagtaaagaaagggcaagagtaaacacaatgaagggcctactcaagactgagtttgaaatgaaagacctaggggaagctactaaaagactctaactgttagtgtaagtttaggctcagtataaattagtgttgtaatctcttgctattcaacacatccaagttaatcaataaaagttcagttcatattctcttgtttctcttcttctttggatcacgggttgagtgtccttgcacagaaaattgattgtatttgtattgtactggttcgttacaacttgatcaatacccgtcagtacaagtataataaatgtgagcattactatttaacacttaataggctagtttgttaaactgtattgcattgtgttgtaatatattagtattatttatacaatactatatttagtattgacttgtattaaaatgttatgtaaaattgtaatatattttcaataaactcgactctaacactgacttcaggtcgggtttgggtctggtctggattcagggtccaagtccgggtccgggatccaagttcgggtccggatttaagtctaggttcgggtctaggttcaagtcgggtccaagcctgtgttcgggattcaggtctgagtccgagtcccggggtttggcccaggtctcgggtctgggtctgtatcctaagttcaggtccgcgtcagagattgaggttgaccttggatcaataagcattaattatgttgcgtctcgttcttccactttgttggaccgtcatctcaccttaacactcatattagtatgatattgtctgtttagcttaagccttcaaagttttacacttatctgtgagacttgagttgatacctaataatcctcctctcaaattaaggatattcgtggcatctcctccagcaatactgtacgctttggcctttgggtctaatctcttagttttgttttatatttatgacaatccttgtgtattcttctcctgtctcagacttgggttgatacccaataaattataaccctcaatattttcaaaaaaagaaaagaaaaaaaaaaccataaatattaaaccctaaggatgacttatacaatcaaatcaattttgctttgatatagtcttcgccagcatgtgtttggatcacaactccacgtgatttaaccccaaaataaggttctttgtcactctatcacatgtatgtgagtgatattttagaccttaaaattccaaactagtcattaaaataatctttatccaaatctttcaaatgaattaaaactaacatttttggtttcgagtgtgtgaccacttgatcatgtataatattctgagtattgctagaggcttactataagagaatattggcacaattgtacgtgtccctataattaacaatattttaaagagaatcttctttaataaaagaaaaaacaaatgagacccgttaactatatttatttatttgttttgagtagaattagaatataccgacaaaacaaaagttgacgtttatggtcaatgcatgcatatactcatcaaataatttagttacagaacagatcacgatctctctctctcaaaaaaaaaaaaaaacaaaaattaatagtttaaagggttgtgagtatccatgctaattgaagatataatatatgtatgatcatctgaaactaaaaaccacccttagtactgtgtggagtggagag

SEQ ID NO: 245576 - DNA, 526 bp, Cannabis indica
aaatcatatttataccttaatggacgttgagattcaacgttttcttcattaaaatagagcacctttttttaatatggtcgggtacagtgaaatatgggagaaaaaccaaacttttttagtgtataagtttaggtattaaaaatagaagatttaaaaaaaaaatggtaaaatgatgttaaaatgagagagatacatagatttttataggtggttggcgagggttttcatgggttcatggtttctgctatatcatgttcttttgctgaagaagaaggcaaagtggggaagatgaaggtcagagttttttttatataaccctatgtcgtcggttattagggaataaccgacgacatatggttaataaaaactcctgaaatttttttaacccccaaccgacggcatagggtataattaatatgtatacctacagtttttatcaaaaaactgcctctaaatattaatttcaaatcaaacgggtattatcacaccctttagtttcctttttttataaaataagttaaaaaaa

SEQ ID NO: 245577 - DNA, 909 bp, Cannabis indica
ccctatggccagcataggccagccagcctccaagcactgtgtggcaggccagcctgcacctagtcgttgcatggccagcaagcttttgcctggtaggcctttggtgcacatccttcatccctagacagcaagttaagcaaggaattaggccttgacaacctacgaaaatagggaaaaaatattagcagcttccctatttttaggagataataaagtcatttaaatattattatttaattatgtaaatataactttatttaccgatttttaaggagatattagggatgtaagctctacaatagaaagagcattagttaaaccctaattctctaagtcttaagctctaagtctgaaactcaactatcttctctctctctctctctcacacacacacacacacacgccctaggcatattctctccatcacttgaaattttccaactccattctcatatgtaatgttacgatagccacttcagattccacaacacttgtgatctaagtggaagtaaaggagagtaggtcattacccactgactaagggggtcaaacctctgtaaaagctcatgtcttatttacttatctgttcatattgtgcaacatgtggcaagcatcagtaataaatacgactccactatcagttggccaaatctaaggtcaatagtttggtactttcattgagaacaagttgttaatttctctgatcaaacgtcatggttaatacaaggagaactctggctatgacatctgcttccttgggtcttctttaagatcctatggcagataatcctgatgttcgtgttctagtcacaactagaatctccatgaattcaatggatgtggctgttggaaattattttaccaggatctattaactatcatgtatgtttgattaacaacctaatatga

SEQ ID NO: 245578 - DNA, 825 bp, Cannabis indica
ttttttaattttttttttcatattcaagcttatttacctaaaatatttttaaacaaatttatctatatttttatcttttagttttttcaaattatttattctatttttttgtctaaaatatttttattagtactaattaattagccattgaaatttgtttgatttaaatggttatttttttttttgttcaatataaagtaatgcaaataaacatagtagcgaagtaacgataaaaaaaacatattataatataatatgatagagggatggaaggttgaataattgtttttcgagatacggtaataacattaattttaaataacaaggatatagcaataatgcattaggagaaaaagttggtgttttataaggttattcatctaaaaagaaaatgtatatatgtattttaatttttggaattacatataaaacactatgtgatgtattctaccatatcaattttagtaaaattaaacacataatcttttcatatataattttaaaaatttataaacaacaaacgaagtgcggactgttctagtttctagataaccaaggacaacctaagtaatattcaaatttgtcattctgaataggtactcaatacattttaatttaacaaatactagtttggaaaacgaacataatatggggatgtagctcagatggtagagcgctcgcttagcatgcgagaggtacggggatcgataccccgcatctccagtttgttttatatcattttaaaatgtaacataaatataattgtaattaattaaagtataatatctctagactctaacatcaagtgagcgtgccggagtggtt

SEQ ID NO: 245579 - DNA, 674 bp, Cannabis indica
gaacatacgccaaacaaaacttttacctttggggcatagcaagattccatattcctattccaccaaaaaaattagcgtggatgattttgggactccctcctcaacctagagcaaccatgtcaatgagtagccacttttaacattataaaccccatctcgatcatagtgccaacaccatccatcttctgtctctcaccttgctaatagaatagacagaattatgtgcacatctattggcaaaaaaatatgttgaaccttcacgacatccaaagcactaataggaatgataaattttcttacctgacaatcatcattaatcctcctagagattggttgaaaagatgttggacgtgggagccatgggtccttgaattcccaaacttgcattctatcatcaatggatctctaagattgtatttaagaaaatccattccccaaatcaaactcgaccaaagatgagatgaactatccttttcagtggcctctaagatagagcaaattaaaaaatatttatgtttcaaaatttgagcatgcaaggaatttaagtatagaaataatccccacacttgtttaaaaaatagagcttgattaaaaagtcgaaagtcttgaaatcctagcccacccatcacctaggttggcacaccttttcttatttcacccaaggaatcttcctt

SEQ ID NO: 245580 - DNA, 517 bp, Cannabis indica
aattctcccacctgaaaatttaaagacacgaattaactgatatacaggacagacactgataagctacctgtcacgtacgtgtatgctagaaagaagtgtaggaaagttaatgagggaatgaccacagggaattaatgtaatggtaattctgttttgagggtaatattcgggtgagggtgagtacatagtagtcatttggtggatagtataaataagatttgagttattgtttctggtgtgaattgttttgagatgtaagggagaggccaggctctcgaatacctggggaattaatcaataccagttttctttcttcatcttctctattttcttctactgtgttacttgttgataggtgaattcctatcagacactaacttaacaaaatgcttaaacaatgatcttgcggagcttaatatagagcaaggaaaaagacagcctacctttggcacaagaacatccatagcagcaactgtcttacaatcatcattcagcctcatgtaaaatgcttttattc

SEQ ID NO: 245581 - DNA, 917 bp, Cannabis indica
gggggtattttagaagtatttttatacaagagctttttaaacgaagtgtgttctctatgataggatagcatagaattaataattacgctacatatctgtggattgagttttcggtttggttattttaacagttttgacatttttgatttggtttgataattgtcccaagagatgtcgtgggaatttgaacattctatacagtttcacatttaccattgatttgtgtgatagtaattatggaattcattttctggctatttctattgccctatgttggttgtgttaacagtttccagtctgaagctggcacttttatggaatctttgctaagtttcttgatgggtgtagaatagtatgattgtatgtggaagaagttcttgttgtaaaaggttaaaggctgggttttgattatagaattatttgcttagtttgcttgatgtttgtataatactacgagatgaaaggaagtcctttatagaggctagtttcctttagaagtaatcccttaagtgtgtttgtgaggtgactaggagatgaaattaatgccctttggttttcttatatcccagaaattctactcactcacttcggtttggtttagtgtgtttgtgaggtaactagtgagtttgctttagtttaaatttgtaaaattgccctatcccaaaacatcaaccgcccaaaatatagcttcaatgctctgtacttctcggctagaattacaatgggagaatatctttataggttgcagaatacttgatactggtagagttaatggctgacattaagctggtgtttattgaacttcattttttcatcttgcattgtacagcaatttaatgtagacattggttcttggtggtaagacacattaaaggtagcgcactataaatttagtcttttgatctaactctttccat

SEQ ID NO: 245582 - DNA, 1830 bp, Cannabis indica
atatttttgctgtctttttttcctttttttttcataatttttttaagctttgttattatttttttttatttctaatgaattaatacatttcaattaaaataatagagcaaaacgggtgataggtgccatccgcaccacccttcactagtaaatatatataaagcacaataataaggaacacatgtaacatcctctttttctaataatttatattttaaatatatagattttttttttttaatttttaattttattttttctttttcaataatttttatacttgtaatagtagttgagtttattttaaaaaaatttacatagattaaaaatcatattaagtttataattatatgatttatataatatatatagatttctattaataaaagtaatattgctcaatcagtattaaatttttaagtcaaagtaatacatatttttgcatttctgaacgtttgaataataaaaataatcatttaatatatttttcatataaaaattttttcttagaattttttattttggtaaagtttttattaaaatttttatttaaatgtatataaattattatttatataaaataattaaaattattataatttattaatgtagaatttctattagaataataacactctttaaaaatatattgtttatatacttttagtgatataaaacttaggataatgcttaggtagattcataaaaaatatctgtacatacagatattttttttttcattatgtgtcactcccatattcaatagcaatatttagttaattccttttatattatttattttaataattttgtcatataatataaaaataaattacaatgcctaattacattaataaatatactttaccactcagatatttatcttctcgctgaaacttgtgtctaacaagcagaatttattatataattgtgttccttccaaactctaatctttaatcatacagagaacactttttaaccattaatggaattaccaaacaaacaaagtctatcaccaagtctttttattaattttttttatgaaaatttttacaccgaaatctctcaaaaaagatatttataatacttcttcttatttaagttaactttttttttgacaattattagtaaattgtttttttttttttaaatcctagagtttggaagtagaggaggtgtattataaatgtgaaaatcctatatatgtaattactaatttggtcgttccttgatacatgtaattactaagttttctttttttttttttctaattttttttttgtaaaaaaatgacaagtaactttccttatatttatatcacaaaattattaaaataaataatataaaaggaattaattaaatattactattaattatgagaatgacacacaatgaaaaaaataaaatgtcaatatgtacagacgttttttgtgactctacctaagcattttcctaaaacttattagtattatatattttatatgaggttgattagtattatatatttactatgtgtgagtgataaacttagtcttaaaataaatgcaatacttatttttatatttttcaaactaaaaaaatatttattttaagtattttaataaataaaataatattttttagatttttttattttaaattaataatttaaatttaatatgtattatattattacgtatataaaataataataaaaattataattattcataataatttattaatataacactatgttatctcaatttttgccaatctgacgtggcatacttacatggataaaatcaatgccacgtggcagttaggtcaccaataggaaggccaaatcag

SEQ ID NO: 245583 - DNA, 1287 bp, Cannabis indica
taaaaacgataaaataacatgtaaaaagatcaaagaaatcttaaattagttgtagcaaacttaaatgtctctttccattcattactctatcccttgttcctttctgttgcagagtactaacaagtattgaacgtggatctcattccttaacccaaaaagtgatagttcttcacaatctttcccaaaggtttgagtatcactgtgaatagtgtgagttgatactcaattcacctttgtaacacatttgagagagaaataggctatagtaattttcaaattagagaaagaagaagaagagagattttctaacatagaattaggatttttttagcattaggaagctctctttcatcacctactttatatagccttcacttagggttagctttagatgagatggacttagaatagtagacttggattgaaatacactctagggttgaattcctcattgaccatagatttatatttttgccactttatttcatgcaatggaacaatgtgtgttttttttcctattttaccactaatctcttataattatttaaaaacgaattttagtttaataattataaaataaaatataatttaaatatatttatatttattaattagacccaaaaagtgtcttaatcaaaaaataaaccatatttttcttttcttctcaaatggcccaaacttggtaaaaattctcaaataagacatagtctagtttcaaattcttattgacttattaaacaattaattgagtctataagatgacattattccagacaatgtggggaccataagcccatgtaaccaagcacctaataagtagatctaaaatttactaagtaaatttcttagcttattaattcctctagattctattatagatttgaaattgcactcttgattaaatagaacactctatatatcaaatatagataccctataaattatctattattacaatctaaagaatcaatgatcatctatagacggtttacaacgagtagggataaatttattattttaccttctaatgtattttattcttaaaatacttagctacttgtaaatgatatatcagcaaactaatataattattgaaatgagcgctctatcatttatcgcatttagccaagctcaaaagaaattatcgcttcacttctgaatagttatagaagctatagattctacatctatgattaacgctcccattcaattccactacgaattcccaagatgtaagtatggcctagtcctacgggtaagttggtattgaacaagtcaaagaacccg

SEQ ID NO: 245584 - DNA, 1659 bp, Cannabis indica
caactaaatcaatatccgcaattcgattaagaatctcctatgggaaattaaaaggaattcaatttacaaatccgtgtttgcagcaaaaattaacagaggcaaacaattaaacattatatacaaacacaaacaagataattataaagtcccaaaatcttggaacttacaacttgaatctagaaatgctgatgatctcttggccattgttcgtccaatgcttgtctacattggtctgattgagcagctgcagcgtttctttaaggttaaaaaaccgacaaatgtggtatcagccaaaacagaaggaacttcaacagtaacagagagtgacgatgaatgtgaaagcttggaagcttgggaggtggtgatgaaagatagactattgaatgtaagggagatggtggggttctctaaggagctgctgtcatggttagacaagataaactctgcctgtgatttgctggaggcttttgacatcattggaatgcttgccgatgtattttgtgcaggctgcgattaacaccaagaaaagttaagcctattgctgaattgggagcataagttaagcctgcgtctacagagagtaatgaaaaagaaaaggaaaagggagaacaaagcaaattaagaaactaatataacatgacaaaatatgacatcctatgcacagaactaaaacttcactactctcgttcaaggaaatttggtgcctaacagaaggattacctgcagaaagcagagactattaagcacttacacaaagccaagcagagactattaagaaccttgcctagatggtatcacaccaatgttgtacctgttaaatgcaaatattcttaatgattaactatcaacaaccattaaaaaagtaaaaaaaatatatatatatataaacatacatggttatatgaacactaccaaattctaaatgattgttgaaacacatgcatgtcacatggataaaatctcaatatttacacaatttttctctgcaacaaaagaaaagaaaaacactattttaataccaaaattaatgacccaaattgaaaagaaaaaaatataacattgaagagaatgatagaaaagggactcacatattctccaagagcatatcagtcatttagatacgaaaaggtcttttctatccatcttcatcaatatgttaaccaatttatgcaccactcgatacacacctgaacatctgaacaaaaagcatttattcacttttaaaaatttcaaatgtaaatcaaaatggttatcaattattgaatgtttaaacccaatttttatggacaaattaaattctctcaataataatggaagaaaaacaaacaaaaattcaagttaaataatgaaaaaaaaataaaacaagaataaaaaagtaatgacctgcttgtagggagaagagagaggattgacctgctctaaagttcaaagctttaccaatttcctcaatcgattcagccaatccgaaaaacggcgtcgtatgcccaaagtcctaaagtcaccaaaggatagttaacaatggtgggactttcacgttgaaattggggtctccatctagctataaaattttgaacctctttcattttgggtacaccaattttcaaccctaaaactccttgcatcgaatcaagatccatagaattagccgacccaagaaaa

SEQ ID NO: 245585 - DNA, 520 bp, Cannabis indica
aaaatttaaggacaaaaatcataattagctttttaatatatattaattgtaattaaattagattagataggttagattaacattcaataatgatccaggcatacccaaaatcttataaaaatgaaataaataaaaagatatttttttttaataatttagaagcgataggaccgactcaagggtgaggctcacgcccaatgcccttcatttggcccaaaaaatcctttaagctaacttaagcgtggtgtatagatattatggtttttttttcttaatgaactccttaaatggtttaagttaaagttgagatttaatttacagatgaaaccatcaatacatctgattatcaaagccaaacttcaaatgcttaattaaaacaagttctaaataatagagtaacctatatatataactgccctataatagtggatcttctttgaccatgcattgaggtaggttagtttttcacgtagaatactctcaatgcatacataattaaagtaattagcaaaaaaaaaaa

SEQ ID NO: 245586 - DNA, 1829 bp, Cannabis indica
aaggtcgaaattgaccttgaaaaattgattggtttgttttattggtgtagggcaaaattgtaaaaacacaattgaaatttcctacaagattaattatagcattttaaaaaaaatgttatacattagagtctttctattattaactcatttctctatgacattgtgacatgagacagctaatcaaccgccacacggcactccattgtaattatatatattttgacttgtacaactagtttcaaaggtagaattcaaaatggattagttatgttgtaatataattcatgattttttttatatacatattgtaaatactgtagtgtagaggctttgttcttttatgaaggtcatttataaacttttaagtgagaattaagcttcctacagaggctaaaaactttttcaattttaacaagacaaagacaagagaagtgtaggtaagataaaagagtgttggaaacactccttttcctcatcatgaactttgcttctcggtttaacttgcccaattgttgagggaacctggtttattattatttttcttcaccgaccactgtttccattgtgccaaggaattaaatttttgggatgttgatgttacaatacaaactcttggccacaattctttgatatttttttaatcatctaaggcatttgataattaatattatggtttggaaagtttaagtaggtgagaacattaacatgtgtgtggatggacttattagctcagatagaaactagacaagtgtttagctctgcagtcagttttatgagggttcggtaagtacgtgaaactactcgaatagaccatagtaacagtgtgtgtagtagtaggcccgggataaccgtgggccagctcagattttttcttaacaagatatacacgtttcagaaaaagccaaaaaagaaagaaagattaattaattaattaattaatccactggtattagattatcttttctttttataatcttgtataggaaatctcagataagatttttccttctggagtatactggtttaggtacggttggtattgagggtgtcatattgtaactttgttaaaaagtaccaacgtctttactttttcttgatatatttttctctctctctcttttttttttgaaagaaatatctacatagttatgttatgttatgtattggggaaggatctaatgatgggtcaaatggttgaagtttgaggacttgtttacttcaccttttgttacaagaaagagtcacgagtcgagttagtgggaagaaaaggatggattctgtgctgagaataagcattttgttttttataaaagaaaatagcttaattacgattaggtgggatcaggtaccttaatcaaatatcatatggggaaatcttcttttttcttttttcctcttttcttttttctatctcttgagtagagttgattcttaagtctagttagtgttaacctatttagttgccattcatttcatttataccaaaatatatattacgaagggaaaagaccactaagtccccaactaataaactgtccgtttgtttaatcattctaccatttatatcctcctgtgccattgcctctaattatttacaacacttctcaaaggatacaattacaaacctatgcccttctctttttctctgtgttctctctctctctcattacctgaaaataaagaagaaaacgttgcagctactcctttaaatgtatggtaagcctttctagtcttttatctttttcaggagttcatttattattatttattttgaaaagtaaaatattggtttgtatagataaagtggaccagaagagaattgcgaggta

SEQ ID NO: 245587 - DNA, 2775 bp, Cannabis indica
tttaactgatgtgctacatgtccctaatattgcaaaaaacctgattagcatttcaagttaactgctgacaataagtttatgttgagtttttctctgatgtgtgttttgtgaaggatctagcaacaaagatggtggtgctgcaagggaaacttaaagacggtttgtatcagttggaaggtcacactacacaaagccaaacttcctcaatcggttcaccattgtcgagtcatgaaccctctggtttttcttcaagtttgtttagtggtttagttgagtctagttcacagcctccctttaaaattaatcaaagttgtatttcctccaaagacctatggcataggagattaggtcacccttcttcaagggttttgaatcaagtgctgaatagtgcatgtgtaaagacttctgttaatgaaaatttaatgttttgtgaggcttgtcaatatgggaaatcccattctttacctttcaaattatctgaaaatagagccactaaagctttagagttaatcccacacggagttattagtgggggcctcgccccccgtaatgtccaaccaccaatttgaggtactacattcactttgtggatgattttagtagatatacttggctttatcctctcaaagccaagtctgatgctcttggagcattcgttcagttcaaaactatggctgaaaaccaatttgattgtaaaatcaagaagcttcagaccgattgggggggagagtaccaagcctttagcaatcttgttattgagaatggaattctctttcagcactcttgtcctcacatccgaacaaaatggtcgtgctgaacgaaagcacagcacatgtcgaaatgggcttaaccttcttgctcaagcccatatgccgctaaggtattgggttgatgcctttcaaacatcagtctatttaattaataggcttcctacacctgtgcttaaggggaagtctcccattgaggttttacttaggaggaaaccagactataagttcttaaaaactttcggttcagcttgttacccatgtcttcgttcctatcaaactcacaagtttcagtttcatcaactaagtgtgtcaacttaggatatagtgagtttcataaaggatataaatgtctaagttccaatgggagactctatatttcgaggcatgtcgtatttaatgaagaggaatttcctttcgaaaatggtttcctaaacaacttcaaaaaggagtctgaagttaatctttcacttcccagtacctggtttcaacttccctttcaacaaacaacttctcatgagtcaaacaatgctccagccgtgtcctcaaactctgaaatccatactgatacaaacaggtctgagcaaaacaacagcacatcaccatccttgaggctggaccaatcacccacggatcaggtagatcactctaataattcttttgttgagctagacattgatcccacagaaacaatagatgatgatatgacagtaacacaacaagatcatgtcactgctgcctctactcagccatgccatccaatgatcaccagatccaaggttggcacctttaaaccgaagacttacacagcccaaagcagatggcagggtgatataaccgaacctcttactgtccaagaagctttggctcacgaggggtggaatagagcaatgacagaggagaatactgccttaatcaaaaataagacctggaagctggtgccaagattgaaagacatgtatattgttggtaacaagtgggtgtacaagataaagtacaatgctgatggttcagttcaaaggctcaaagctcgtttagttgcaaagggcttccaccaaagaccaggaatcgatttcggagaaacgtttagtccggttgtcaaagcatcaacaattagagtggttcttaccatagcagttgcaaatgcgtgggatgttagacaacttgacataaacaacgccttcttgaatggtgaactagaagagtcggtgtatatggaacaaccccaaggcttcgaagacaaacaaaaaccagattatgtgtgtaagttggaaaaatcgctctatggtttgaagcaggccccacgagcatggtatgaccagctgaaaaatactcttctcaaatggaattttgaaaactctagggctgatacttctctctttctgctgaaaacatccaggtatgtcattatggtgctcatttatgtggatgacattgtcatcacgggaaatgacacaaatgaactgaatcggttcatacagaatcttcacaagacctttgctctaaaagacttgggagctcttaatttctttcttggaatcgaggttttcagagatgaaacagggatgtacctatctcaagggaaatatgttgctgaattgcttaaacgagtggaaatgaccaatattaaatcctgtcctactcccatgacaggtggaaaacctctgtccttgcaagatggagaggagttaactgatcacactcaatataggagtgtaataggggcattgcaatacttgacacacacacggccagatatcgcttttgcggtaaataaattaagtcagttcttgaagtgtcccactactgctcactggacagccgcaaagagagtgcttcgctatttgaaaggtactatacatcacggcatacacattaaatacagtgacaaacttcccattgttggctactgtgatgcagattgggaatgctgcccagacgatggaaaatcaatatctggttactgtgtgtattttggtgaaacgctgataacttggtcatccaaaaa

SEQ ID NO: 245588 - DNA, 1429 bp, Cannabis indica
ttgccctgatgaggaatgccaatcagttggctttgttagatattttcactttttcttgttattatgctctgatgaggattgccaatcagttggcttgtttgatactttctctttttcttgttatcattttcaattctatgatgcattacttcattttatcatcagtaatctgttctacaatggttacctcacttgtattgaatttatgcattatgtttactctgtacatggatctcttgttttgtctacaaactatagaaggatatgtcattgtttaaagctttgcacatatcgtggttttgacaacttgatgagtgatactttattgtcattttactcatatttatgttttacaaattaaaattgaaaaatatgtagtatatctgccagaacatgtcacaagtggctttgaacaaacaaggctcctcccactgtttagttcatgaatttgaaaagcatgcagaatattgtttggaatcagttctttctgaagggataaaatcttttctgcttctcatagccaaaagtagggaacctgagaagaagaatcattgtaattttgatacagatatctttctcactgtcagtaacaaatcttcattgtttgtgggaattgttgtttgtgttgggattctaaccattttgtgtgtgttagtggctttttactttgttcaacccaaaagcaggctcaaatgaaataaggtaacattccaactttgaacttgaaatgctctgctgactgtgatgtttttcttacgaaaagctacgtaatattgatatagtgatctgtagagtatagactgctgatctgctaatttcgtaacactttgcaggctataaaattatcaatttgtcgttacaaaagctctgctgaaagtgattttaatgtttttagccagtatgttgctcaaattgccactacatctattgtgcaacatcttaaccttgtcaaattatatggatgctgtattgtttacaagtgtaccttgaaaacaagagtcttgatcaagcattatttggtttgtgaacaacaataatttgatcaactgattgtggtaaaagcgatgattatctgcaccttgctgccgatcccaagtcggtgaagttttggatcgaatctgactgtcttcaagcggttcaactccttggaaagaaacatcgaggctgcagtgatgttgccagattgtgttagtgactttctacattgtttaacaaaaaaagcaggctcaaaagaatgtaggtaagcactcaaacctcaccaatgtccatctatgtcaaaagtgtggggatgatcttaaagagatagtgatgtgagcactgaaatttcaaggccggtttctgggtgacttgaaattgaatgatgtcaagtccctaaatgagccagattacgagaaggggactgattctatcttctgtgactcatctgcaa

SEQ ID NO: 245589 - DNA, 614 bp, Cannabis indica
tcattccaccaaaaaagaaatatatgtatattttgtcaattaataaaaaaaaattgacacatcatatatatttttttatcattaaaaaaaggacacatcatatatttccacgagagtttcattaatatttatcatctgaaaaagcgaaaaaaaaagtaataaatatgtgcatgaatgaaaaatgaaaaaaaaaataataaatatttgccaaaaggaatggtagtgcatatcttggtgtagtggatggaagatcaataatttagaggaaataatgtttaggacacccatttctggcaggaaaaaaagtagaaaagaacaaaatagaggccctcgtgcaactggagggcttcaatgtacatcacaactttattattattattattatttttcattaaaattattaatattatttcaatattattatttttttcctattattgtattataaatattagtgaagtaaattaataaagctatagcagagggcatgagctgcatgtgtgcgtgtgggtagacattccttctctctttttggttcccactttaaggcaaaatggccccacctctctctctccgcgcacttattatttattatgatgtaaataagacgttta

SEQ ID NO: 245590 - DNA, 893 bp, Cannabis indica
aaattctataattaaaaaaaaagtaaactaaaatcttataattatgaattaaaccaattataatagtgtaactagtaagttttcttaatatttgattgttgttagtgttttttttaatatataaattttcaaaataagtgtattattttgtattttctatttattttatatataagtggccaactaaataaataatttttaaactttacaagaaaaataagttatggtaaaattaactaaaatttgtattcatttatattttttaaaaaatattatccacttatacaaaaagactaaacatcagaaaatataaaagttgaacgaaaaatattaacaagtcgtaacttttaaggtgcatgatcatgaagtatcataagtttagagctaaaaatgcaaattatttatttgtttgtataggtaagtgctcacctaaagtaaaagacaaagaaattggtggcatgatttggtgtgcttaagttcttattaatataacaaagaagatgtcgctccattactatcgccacatgtagggtaggccttgaaattttgtgagccataggaaaaataatactttgggcctttattttaaaaaaagaatgtgttaatttttaaaatcaataaaaaaaaatgtgtaattttaaaagaaaaataaatttttatgaccctgggctaggtaacccataggcacaagcctaagccgcctataaatgttagtgcattttgacttctggtttattttttataagtattatcttagttcaatctaatttattttataattttcttagtctggttgtaaggatggcaatcatacttgcgggtacccgcccttaatggggtgagggcgggtgtcgactttcggaggcaggggaatatatatctgctccaaaccc

SEQ ID NO: 245591 - DNA, 1089 bp, Cannabis indica
aaaaagatatgcatttgtcaattaaaaatgagataaaactgtaataatgggtcaaaaataaacaaagtatatattataataattactttgtgggacccacttagaataatatctttttcaaaaaaaaaatctttttccaatctgcccaacatcccacatctctctctttctctcttcttcttcttcttcttcttcttcttcttctttcctactcacttaaacccaccatcaccaccattgaccaagcttcgatcgttgccctccagtcaccgtttgaccactatttgaaatcagcgtcacgagaagaacatcccctactaagtcattttgctcaactaattactttttcctggtgagatttgagtatctccgaccctttggaagcattttctgataattttggtgcttgtttgggctaatgaattgtacatttgtgatctactcatcaagagagttattttgatatatactacccctatttttggtaacatttttcgttacaccgagttctaccgccaccgatagttaatatgcaccgtttataaaatgagattttagaactttaaattttaaacatggtcatgctgtatattgttggactcggattgaagtgtgcatattacaatgattatttatttagttggagttcgcatgccaaagtaacttttagagtgactaagctatctgaacttaacaattagaggcttaagagcgtctcttttggagaaagctttacgatcgttaggaggtggggagtcaacttgattattggacttgattttatatgtgttaaatgacattagatatatccaaatatttatgatttataaaatattttaaaaaattgaaaacttgatctgcatatttttttgaactagacattgagtggcaaatatatttttgtataattatttatgtagattatgatttttaaatttattcaaattacaattgttatgctgtcagattttttgaataaaaagaagatatgttcttttgtcattcttgtttgcttgcttcagttatattgatttctgatgagagtcatgttgatcatgattttgtgtatattattgtttcacacctagt

SEQ ID NO: 245592 - DNA, 748 bp, Cannabis indica
tgaactgaggaattacataagactctctttattgtggatttcaactgtggaattgtgaatctagtgtgtagttgcagtacgatgtaatgttttacaaataattaataatattttgtaatagttaatatattatgaataaaaaatattattatattaatttatgtaagatttacttattatatatatatatatatatcttctgaataaataaaaattgttatattaaatttaataattaattgtacataccaatttaggtagtgttagcatttttcatatgtttttgtcctcctctttaagaagtacagatagagagatagagagatagagagtgatcagcatcaagatttttgttatccaaatattaataagaataagaaaaaaaaatactttatttttagcttttttttattattattttataactttgttttcagcattaaatggttgccatatactcaaaaaaaaaaggccctattatccactgacatccaatactctcatcattattacccttactcccaagtcccaatatatcattttacatatttatttttcaacaaaaaggaaaggaaagattacatccatagaaaacattaatggaaatagcagccaagcttccaaaggcttcttcttctcctcttaataaattattccaccccagagcctctgttttagtttctaattttgttccaatttcttctaataccactattttaaagcagattcatgggtttaaaatcaaaca

SEQ ID NO: 245593 - DNA, 1548 bp, Cannabis indica
tggaaacattggcagctggtaaagcagtggaaggctcagaggtactggtgtgagctggggcactttgctcaattaaagaagcaggagatgtaacctcattaggagtggtgttctgaactgatgaaggatctgtagtagtgacagcatgaggaacagtatccatagaagcattgccctgtgatatatcttggtctggtattggtatagtgtcaggaattatggcaccagaagcagatggcaaagatggtctatcctgcacagagaaaggtatgctagacacaacattattgttacatgtaaatgaatcatgagactgatgtgtactagtggaaacaattggaatggttggaataatggatgatggataaaaggatgctataacctcaggtgtaatagtggtatgctgttgagatgcatatggaaaaagtgtttcatcgaaaaggacatccctggaaatatagacacggccagattgatcaagacacttaaaacccttgtggttaatgctataaccaataaaggtacaaggagtggacctatattgcattttgtaacgattatagggtcttatattaggataacaagaacaaccaaaggttctaagagtgttgtaatctggtattatatggaataaggtttcaattggagatttgttgtgtaaaataggtgtagggagtctattatgaatatagacagctgtcctaaaagcttcatcccaaaagcttcatcccaaaactttaagggcatagatgcttgagcaagtaaagtgagcccattctcaacaatatgcctatgtttgcgttcaactaaaccattttgttcatgagtggtaggacatgggtgtctatgaatgataccagcttctttaagtgtgtttgtgaatgatctatactcaccccccaatcagtttgcaaaactttaattttgaagccaagttgtaattcagcttcggctttaaagtggtgaaatgtttttaaggcttcatctttggttttaagcatatatatccatgtaaatcgagaaaaagcatccacaaaatgaatataatacttgtaaccattaatggaaggggtgtgagatggaccccaaagatccgagacaaccatttggagaggggcagtgtaaacagtactagatttcttaggaaaaggaaacttgtgtattttgcctaagcaacaagcttgacatatagaatgaattgttttatttgcacaagaaatattacaagaattaagaacagtcttgaccactttttcagatgggtggccaagacgattgtgccaaatgtcaaattgagaaatacaagatttatttcctaaagaattggtactgttacattgactagaaggagaaacagtggctgtaagtgtttggggagactgaagatgtgtgtcttgacatgtgctagagtgacaggtgtggctgtgggagacaattgcagctgggagggactaaatgaatacaggccattctggtatctcctagtcatcaagatttggtgatgcacctggtccttaacaaaacagaaatcgggatgaaactcaaaga

SEQ ID NO: 245594 - DNA, 957 bp, Cannabis indica
gtttgagaagacaattttaccctttgaactgacaaaagaggaccatcaactgttgtacttctgtccttgctcctgtcaactttaccaaagaattgtaccttaaataaataaattattattacaaaaatataataaaataaatcaaaaaaaaatttatttattagccggtcttataaactttgaacaaccggttacaaaaactattaaaaatataataaagtacgtaggatccactatacagtacaacgaaatacaatctgtgattttacaagacgggcataaaaacggctgcctatatatataatccttcactcactctatatctctttcaaactctctttctttctgaaatcttttatcctttttttttttctttttgacactctatcattctctcacatttgtttttttaaatagaagcactcattttatctttttgtccctcttacattatcttactactcacattcaaacttctacatactattttttttaattaataatatttcctaaaaaaattttaattaatttctttatccaaaaaaattaccttgatgatgtggtacagagcaaggtgacacatggaagattataaaaaatctagacggtgtgcaagcgagccataggatcgtccggaggatattgggtgaaatacctgatatgtagagtcattcaacatcaagtgtaggaaggatggatggattagacagacctatcactatgagaagttagaagatgcttcctggacggatggccgaccaacaacctcgcggaggtaatgtccagattcatctcaactgcccagttcttgaacaataggccaactttgatgcctaaaagaataggattgtgagaatcggggagattgaaaaaatcgttggattgactcatcaaatccctaattatttattttgtaactaatgtaaatgtttcacatcttcatctctataaataatg

SEQ ID NO: 245595 - DNA, 858 bp, Cannabis indica
tttttttttttttttctaatagtgatgtacaaagttatttatgattaccttaaattttttaaattttattacacatgtatctgttatttttttatatacgtattacatatgattatatagtctcttggatatatagcaaatataatccttttactggaatactgtaaattttgttaaatttttgggaaagtttatacatcgaaaaaatttaaaacatatatactgaaaagttgttcaagctactaaatatatatagaacaattggtgttagaagagtttaacttgaaaagttatccccaaaaagttagtatttaggagttgtttgatatgtcgtattgtattgtattgtattatattgtattggattgtattgtattgcattagtattattatttcatacaatactatgtttggtattaacttgtattaaaaagttgtgcaaagttataatttattttaaataaactcgaccccaacatacactgacttcaagtcggggcttggtccgggtccgagttcagtttgggtctgggtcatgggtacaggtcccgatcctagttttgggttaggtcttgagttcaggttcgggtcctaggtctggtacggtctaggaccggggttggtgcctaggtacaggtacgggtctgaatcgaagcccagatctaggtttgaggtctgggtccgaattcgaggttcggggtccaaggtttaggtccagtctaggtctggggtctgggtccgaatttgggtcctaggtacgggtctgggtcgtgatcggggtcggggtctgaggtctggagttcgggtcaggactaggtcaagggtccgggttggggtccgagtccaaggtccgagtcg

SEQ ID NO: 245596 - DNA, 1149 bp, Cannabis indica
cagaacaaaagaacaaaataagaaatgcaagaattaatattgatcgccatgaaaagatgatggaaaatgctggaattcatgtagataatcgacaagcaagagacctaataacgattttcattaatagtcatgaattttgatacctaaccctttagttttcaaatatcattgcctaataaggcaatctttttatcattgtctaataaggaaacattttcatcatcgtataataagacaatattttcatcattgtatatataatgagacaatcttctcatcattgtctaataagataatctttttaattatcacataacggtagtaaccgtattttgatctcgatatcaattgattcacaatgataataattgtatcctaatacaacatgctatgtagtacaaatatacttttcttatctttaatttggattcatgcatgtccaccaactcaagtagagaaacattcccaatgatctcggccctcaagcttttcacccttcaagaattaccacctagctgctactagggcttagaacactggtttttggctgagaatttgaagaaagaggatggtggtggtgagagtttttgtcgcacggaagagaggaagggagagggtttcgttatgttttattttaaaaaaatttaacacatatatgttaacaataattaagaataaacaacaacaacaacaacaacaacaacaacaacaacaacaacaacaacaacaacaacaacaacaacaacaataataataataataatattaaaactttattaataaaagttattttggcatttcttagccactaaattttttttatccctaaggtattttgtcaactctgaatacgctaaaatatctcgataattttataatcaacttatcacaataatcacattaacattactaactaaaactgctttgacatttttggcctctggtcaggtctctagggtcactgaacttaaaaatattttattttacaaatagcttacattatattcatatattctaaataaatctccgtaattaataaattacgcttatttatccacgtctgacaaaattcaatatttacactgaattaaattagtaggatcataatcttgctcattattactctctaattaatccataatatataat

SEQ ID NO: 245597 - DNA, 1027 bp, Cannabis indica
ataagccaataaagtactaatctgagaaaatggtactacaaaacattaatagtaatactatatatgcacaatcacacaccacactcaaactttattggtctttgattacactacacccttttacacacagcttaagtgaagttacaggaaataaaagaattagttgcattcttgtactccaattagtcagcaggaaaaatagaaataccactatctctatctgattgactctttacatctcaagttagaattgacacaaatgattcgtttttctaagaataagccccaattgtataagcaaataatgaaattctaaaactacccaatttgcagaaaagaaacttaatttgaaaattatattataacgaagatggaagagaagaaaaatacctagcaatttgctgacgaatgaagctttggttcgtcgggttgttggtttcgacgatgtacgattacgattggaagtgggaatggaagggaagagtccattggctgaatagaagttccaagtcctatgaaacgattgagattgggagtgataatggaagggaaaaaaattataattttttaagccttctcctgatcaatcggagccattgattggggatattttatttttaaatgctaataacggcaaatgttaacgctaggttaatttttattttaaaaaaataaaatgttaaaaatagaatagatatatatttgaaatattttaaaaatattaaaaaaaaagttactcccataaatttctcataaaccaagaattcagttatataggcatactttatatagaatatatatatatatatatattatttttttaatcatacctaaattttttcgccctaaattttcttatttttctcacactacatttgggtcttccgctctctccgtcgtcgggcattcatgcgcaagttagctgcccaactcgtcactgtaagcttcatctacaatttcctttattcatattctttctttctctctacttttagtagatctcaagtattcaaaaaaaaaaaaaaaa

SEQ ID NO: 245598 - DNA, 1432 bp, Cannabis indica
ctttacttcaacccattttgtgaagaaatcgacagcgaatatagcgtattttactcctcctttaccctttggcaattccccaatcagatctatgctccaaattgcaaagggccagggacttgtgatagaatttaattggcttggtggtctgttcacatatgtagctattctttgacagttgttgcatcttttaacaaagccagatgcatctgcttgcaatgttggccaatagtacccttgcctcattatttttaaagcaagggaattacccccagcatggttgccgcagatgccgccatgtacttcacggagtatgtaatcgcactcggtcccatcgatacacttgagtaatggctaactaaaacttctgcgatagagcttgtcgtcataaataacatatcgagcggctcaatatcgcagtttttagcttctactttattttcaggaagcactcttgttttcaagtaatctactaatggggtgatccaggtgacctttttgtctgtatcaacttccaccatttcatctcgattgattgttggatgagttaatacatctataggaattacatcgagtaactctgcttctcttgtcgaggtcaattaggccagagcatctgcatgagaattgtaagcacgaggtattctagaaacaactatctttttaaacttttgtaataactcacaagtaatatgaagatatttggctaaacgacctcctatggcaaggtactctccattgatttgacaaaccacaatctgtgaatcgctgaaggcttgtaaatactcgattttcatctcaacagcgagtttttaatcctacgattagagcctcatattcggcctcattgttagatgcaagaaattcaaatctaagggcatcctttgccgtttggtacgtcagatcaatttgctcgtccgcgataatggctacttcatcacttggaaatttgagtatgaagttagcgggcttgtcccttgattgttgatttgggtttgtacctgatgtcgaattggctcaactctactaaccactttagtaatcttcctgaggcttccggtttttccaaaacttgtcgcaagggatagtttgttaaaacctcaatgttgtgtgcttggaagtaaggtcgtaactttcttaacgtaattactaatgcgaacgcaatttctccatctgtggataacgggtctcagcatccaggagatgtttgctgacattgtacaccggatactgcctaccttggtcttcgcggattagtaccgaactaattgcatattcggacattgcaaggtagaaagataaaaattctctaggcattggcttggaaagtattgagggttgccccaagtgtgttttgagggctcgaaaagcttcttcgcactttttgatccattaaaactttttatttccctttcaaatctgaaaaaactct

SEQ ID NO: 245599 - DNA, 937 bp, Cannabis indica
tttttttttttttttgcaaacttacgaacatgagtttataattactcttaaaagacttttggagtttatttctttgaaggttgttaattaatactaaaggtgactcgttactgcttattgcttggcttcttaacagtggaggaaatatcaccaagagcaaagttgagaagtatcaattgatattgtcgggtattttgaatggaatagggcaactattaatagttttctacattttatatggctaattggtgatatgtgggactattttttattgagaatggctgtagaaatcaaacaaattaaacaattaagttcaatctcaggtgccatgattacacaacatgagtttaaaggacttgatggtttgtgtgaccacaagatttgccctctagagtaaggcttacatgcctatatgaacatttctttgggggctctctattggagtttcaaaaaatattacatgttctgggagagggcttggctgggcaactttgcttatgtactaccaacaaatcaagagcaaatttctcaatctcaccttgatatcaaggtgattttttggacagcaggtattgatagtcataactatcaagggccacaagagctaaggaattgcaacttgcttcaacttccatttcagcatgaggaattattatttcatgtttaatgacaagaatctctcgttcctcaatttcgcatcaagaggcgggtgggtttttaacagaggcaaatgagcacgttttcaatttaagcctcaaatcttgagtatgaattaaaagttttcactagcactccttatgggcatgtcatgatagcgactcaacgaatgcacttgctgactttgttctttgatagaggacgagcacaagttatagcttcaaattcggtataagaccagacgagaagtaccgcagctactcgctggatttttgacaga

SEQ ID NO: 245600 - DNA, 1114 bp, Cannabis indica
aaatatgaaaaaaaaattaagtgtcaacaatacaataattagtggactttgaattgaacattcacatattggacctaaataaatataaaaattggtatttttataacgtgcggtgcggtgcggtttgaaccgcatattaacaattcaaaaccgcaacccgcaccgcaccccgcggtttaggaaaaattcaaaccgcgaccgtaccgcaaagaattttaaaccgtattttttttgtggtgtggtgcagtgcggacggtttgagcggtttgggcggtttgatgaacacccctaaaagaaatgaattacccttaaaaccaactatcatgactagtgaacttacttttggcgtggcgactggcgagtcgggcaaacattagggggtacgtggttttttctctcattgtgtaaatgtaattatttaatgctattcgtctaagtctttggtggactaccacacaccgagccacctcatatgatacattacgtaaatagttaggcttccaaaagattcacaactatgcttgctagggaggatcaatggtgcctaatactcttttatatgtaaatatcgctattagttcaattaagtattagttcaattaagtattagattttatatagtttaatataataatttttaaggagtatgactcaatcataacacgatatatgaaaaaaagtactaagtactactgatacctaataacaatactcttcttatatgcagggtaagcccttaaagtaggcgagctaagatacttaggatccttaaattataaaaaaaattattaataaatagataaaatatcaagtttaatctccattttcttatttttttttaacaaaatatttaacgtatataactatatatgattaaaactctttaagaattttaaaatttattaccattatgcactaaaattattattagtaattaaactatatataagaactccaaaatttaattttatcttaatcccatatactttaagattgaccctacttatatgttaacgcttattcgcaataaattttagaaaatatcgctaattaatcgtagagtgacaccaataaattatgttaggcactattaatacctaataacaatactctt

SEQ ID NO: 245601 - DNA, 594 bp, Cannabis indica
catcagtctcaatgtgtgaaaccggtagatcgtgttgtaatgtccaataattaaggctatagaaaagtgtttttgcctccatttcacgggaagaaaaattcccaattgctggcattgaaagagcagccttaacacatccatttgagtcacgaattaaagcactgtactccaagcacattgttgttgacatccacagcggcgtcgacatttaatttaaaaccatcaccaagcggcggcttccatggagctggggcagggacaacttggggagggggctgcgtttgggcttgagaagcttcaggatggtattttgtggtagcaacaagaaaattttggcagtaggtgtaggcatatgaggctaaatctcttgctggttttggtctttgtccatgcacaactttgttcctaatttcactccaaatcgaccaaagcatacaaaatatttgttccatttcagatttggaatgaattgaatgaagatgcagcaagtaatcacctcttttaattgaagaacaagcatgccagtcaaaagtaagctttgagtatgtccaaaccttcttggcatatttacaagtgaagagtgttgggttttgt

SEQ ID NO: 245602 - DNA, 1092 bp, Cannabis indica
tactggaacagccaaaaacatcgtctaaaggatgaatcaaaaatttggacgaaactatggaagactgatatccaccctcgattgaagcttttctgttggagattattctcggatattcttcccacaacaaccagaactagttttatccaggtatctagtcctatgtgctgcttctgtaattcagagaatgagtcatctttgcatcttttctgtcaatgccctttcaccaggggtctttggttttgaaaaggtgtcagacttgactcatttcaatggaacaatatcctagagtttggctccttgtggtgcaatcttcaggacaccaaatttcaattgtttgtggcatgtgcttgtgagatgatctggaaatggcgaaatgatatcattttcaacgggagtcaatgtaatgtggagatggttttcaaagacagcctccgaagaacaactgattttacgcaaaagaagctttggcaagaccaggtggagattctggctacggccccaaccatgcagcaacccctcgacatcaatgagttctgccgtgtacaagtggatgcttcagtggttggtaaagaggctggttttgcggctgtgcaccagcaagtgctgccttcggactctttagtctcagttgactttgcatcggttgagggagtctttgaagcagagttattaggtatcgcctgtgccctgcaaatggctatctcgaggaactttcctaaggtgtggattgagactgactctaaatcggcagctttagcttttgaggctagagagcttcctttcgattggaatacctttcctttgtttaaatactatcttgatctgtgtaagtccttagtggatgttagagtgtcttatattcctagacaggaaaatgtttgtgctgatgccttagctcgctgggcaaggatatctaaagttaagtcctctggttttctaagggaagtggcccccttttgtggtcactagtttgctttgcttaaataaaagacttaattatcaaaaaaaaaaaaatgttgtattcactatagaatggaaagtcacataataatatgtctatgaattcggttaatgatgctttgttggttg

SEQ ID NO: 245603 - DNA, 553 bp, Cannabis indica
ttattccattccattcctattcttattcccattctcattcctattcctatattttcattcctcccaaccaaacgcctttaaagtctcattccccttcatgaatgtgcactaagaaacatccatattgaattccaaaaattttatttctaaaactatctgaaatcaaatatttatttatttatttaataattaattaaatatctgtcaaaactaataaattatagtttaaatctttatttaatgtatttttttaattaatatcaataacaatttattaatattaacaaaattgacctaattttgatattactactctttcttttagacttcgtaataattaagtcctcaaataaaaaaaattcttattcttttcttaatgaaatatccaaagaataatttatttctataatattttcataactaataattaaattaattattcaagagatcactagattcattttgataaaagatgatacaaggactatgaatccataaactcaagctccaattatcatgatttaattttcaaacaaataattttattagccta

SEQ ID NO: 245604 - DNA, 1062 bp, Cannabis indica
aataaataaataaataaaaaaaataaaaggtggatattaattggggtttacacaatctattagaagacaaaacgtttctctttcttctccctctcgaccgcctctcttcttctccagcgaatggcgagcaggtcacctccaggtaatggcgtcctccagcgattggcgtccatggctccactaatttgagattttcctctcccaaaattccagtcggacaatcagcgtctctgcctcttctctccagtacagggattaatgagaagacaaaaacctaatgtcggtgactctacgaaaaaaaacttgtcactccgaagctttggcactgtcctctctacaggagaaaacagaataaggaccacaggtaggggtcattcttcttcttcttttcttgttaacatatacaaagtgttgctgttgatataccaaagacggaggcagcttcttcttggtagagtcttggatctcgactagagagaaaccaagagaataatgataatcctagcaagtggaaagcatacaaggttcctcaaaaaccaggaactgtagtaggtagtaattacattgaggtttttgtagatgaagaatgtgaaaaagagatgcccaaagaagatgttgagagcaacagcatcaggggtttgaattttcaacttagacaaggaaatgaccaacaccttaagacggaaatccagtgacaagttttggtcttctcgattcaaaattagcgagctggaaagcgaaagttctctctgaagcggggagagccaccttgttcaagcgaggagtgaatctggatattttttagtctttttttttcttatgttttgttcataatctagtattgtttgtgtaatttttgtttattaaaatttatgcctaaactcagatttaatattctgtttaaaattttgtattgttgttattgaatcattgatctgatttgggctattaatgtttgtatttgaaatttatttgtaaagcttttgtaaagttctagtgtgtgtttaagtttaattttttgatatattattttaatttttttttgttactaatatatttttt

SEQ ID NO: 245605 - DNA, 1496 bp, Cannabis indica
aatattttcaatatacccttcaaaaccagtgagagtattttcccattgatggtgttgaacaaatttaacaataccatataccctatgagcatgcaaatcataattcctctcactttcaaatttttaagtagcacgaagattccaatcacgctcattatctcgataataaaatctggaattaacagcttgagatggagagatattaccaggagatgaactcttcataggctgcttgcctttagcagcagcagaagctttggctgctgaggatgcacgagaaggtgcaggagcagatttggtcaaagatggcttgggttcgagttcagtttcctcactgtcagaggagtctccaaagttgtcaggaatctcttttgcagagtggagagactcacatttagtctcagaatcatcagaggccatctccattggttcttcttcttcagaactcgaagaaactgaagggggattcatcttcagcttcttggcagcagggatgggtctgtcatggcttcgtttagtgcaaagttccttctcgagagaagcttgctgggcacgggtgcgtgaggatggacctgttggtgtagatgaagcaacacccttccttgatgcaacaaggggcgattcagtagcacgaggaggagaacctttcgatgatgaagatgatgaagtacaaaatttgtgaggacgcacagatttcctagcaacttgcttgggcttcacgggctgagattcacgctgagaaagcgatgaatctcctggatttgatgcagttgcagcagcaggcagaaagattggagcatcaggatgagcattcgagggggcttggtcggattccaccattttccttggatgccctaggttcttagtcttagccatgaatttctgaaagaagaatgagaaacaaagaacaagaacacaaggaaataggaatcgggtaggtggtgagaataaatgaaagtaaaaattgggtttaataaacatgggagagtggagcaaaaaaagaaaccaaattcaaaattgaaaaaccaccagcccacgaacaagcaataaccaccccattctttttccttaaaattattatttaaaaaaaataaaagaaaactagaattaccaagatattttccaaaaatagccaatttaagaaaatccttcaagatcaaagacaaaatacaatgaatatgatatcaaaatttaaaaggaaacagatcataataaatcaatttagattaaatgtagaaacttaccaaacaaaacacaaaattttcttagcccacaagccaagtcaccaacgcttccctctcttttatttattatttttgaaaatctgaaaaaaatagaaaacaaaataaaatatgtacaataaatataaggtattctaaagcaagcaatttaatcaaaattcatcacaaatgacaaatatacatgtcatgctttcaaaagagaataactaattagtatctcaagaaaaaaccatacttagtagatgttgagaaaaa

SEQ ID NO: 245606 - DNA, 1188 bp, Cannabis indica
gtgggtgggtgtgtgtgttggaggtcctgggttcgagtcctaggtaaaacatggttgtaatatataaacgcttaataaaaaaaaaagatttattgaaattgaagcttgagatcacgtcaaataggtcaaatttagttgacgtgacaggttagtaatattaatagtatcattattgtgaattaaatacaaaatatatctattaataaaaattccactttatattttatttttttatgactgctagaggtgttaaacctcttggccatgaacaacaaacaagaacagagaagaagaaagcagagaacgacaaagaaaggcaaagaaagagagagatgaacaaagagaactctttattgattaagtgtgagattacatgagtttataaaggaggggaaacaaagctatcagccataacaaactaatgacaggtggcataacaaccaaaccaaaataactaacataacagtgagctataaccaactatccctaacacaccccctcaaacttagcattggggtcaccaatggtgagtttgtttctaaaaacatagaatagttggcttgagattggtttggtaagcccatcagcaatttgatcaaaggctggaacgtgttttacttggaccatttgctgaataatcttctctctcacaaagcatagatccaactctatatgctttctacgagcatgtaagaccaggttggcagtgagaaggatcgtgttaaggttgtcacaccagacagttggagcttttggcagtagaatgtgcaattcagtgaacaaagaatgtgcaaaactcggcttctgtgctgcttcgggagaccgtgtgttgtttcttacactgccaggaaacaagatttgagccaaaataaatggcaaaaccagatatggacctcctgtcatcaggatccgtggcctaatctgcatcacaaaatgcagtaagctcataatgtggcgatcgtgttaaatgaagaccatagtcccttgtgccacttagatatctaagaatgtgtttgacagcattccaatgagattgcagggggtttgccatgaattggcacactttgttgacgctgtaagaaatctctggccgagttatgacaaggtattgtaaggccccaacaatagatcgatattgttgaggattgtcaactggtggactgttaggttttatgccctaaataaaat

SEQ ID NO: 245607 - DNA, 1955 bp, Cannabis indica
tttttatttatatttaataaaataataaaataatatttacatataataaaataataaaatgaaaataaaacaaatcccattaatatttgattatcaaacacagtggtgtagataagagcaatagctgcgatagattcaatttttctctattctacgccaccacacgaatatatatatatatatataaatatatattagttcagtttagtgttaatcaagctttcaccaattaataaattctcaatttcttctttttcttttggaataattacttcttatcattgttacatatgaaaaacatcgtatgaggggaggtatataccagttggttttccagatttaagttaggaagaacaaaaaaaactaccaaatacttgttttttgcacatttaagttaggaagaacaaaagaaactaccaaatgcttgttttgttttgtttttgatcttggtgtagattatgatgccttaattattgctgcctttttgcagtttgggactatgagtttgctcgaatagcatgaatatttaaggaacaagttagggtcattagataatgatttctctcctttggttgcagctaacacttactcataagcgaatttgattttttataattaatatgattttgtcactattaaactttgaatataatgtgttagctggaattcttgggaggaaagggccaagattatttctaatttgggtgacgatgagaacaacaaaaccatgttatatggattctgcagtggtggaaaactcaattgtctcaaaatagaaaggccatcaaaatatatattgtttcatcaagctattgcagtagacaatccttgctttcactaatatttgaagtgaaggttcatagtcaaaattttaaagtgatatttatgtgttatatttattttaattaactatgtgaattacacttacttgttcatgtatgatatgatttgtggatgggcagtatgtatattagtacatttgattccaattatgttggaatcacatattaattaattgtttaattaacagttcctctaattataattatcttaacatttttgttcttcataaccttatagttcattggaggaattcaagtatactttctttctaataattttatgttttgagggacttgtatgagttagccaattttctttctactgccattgtgtcatcttgtcctgtttagaacaaatatgtttactttgtttatgccttcaattaaagggctgaatgttgttgttgttatttaaattttaaataataattaatattttgttttaaaaaaaaaaattaggcagtgtttctttcttttttcttttatattattactattttgtttttcataaaattgtaaacaataacttttttaatttactattatggcttttttcttcacatacattatatatttaactataatgtatttaaatgtaatatgttttctttacatataaatattatttattatgactattaaaaataataatatattatatttgaaaataaattaactcattactacaaaaaccacctttagagacagtttttaagacttttcagcgtcgctaccgacacacatgatctactctcatgaagttaacaataaagaaaaaatacatatcaattaagaatttattacctttgggcaaataaatttcttaaataatatatattaattcaagcaaaaaataataataaatatatatatatttaaattattacctttgggcaaataattaaaatatacacatttaatattaactcacttcatggaatgtgaactaatatatataactactacctttgggcaagtaattacacatatagccaaccaaaataaatattttctataacatatgaaatttggtgataaaataattatcaaaaatttaataattttaaaccaaatttctaaaaggggatatattaattacttgtaatatattga

SEQ ID NO: 245608 - DNA, 842 bp, Cannabis indica
ttaagtgttttataaatcctaacaagtggtaccagagccacctttgttgaattgattgaagatctgatgatttgtttatgaaatttgggaattttgaaattagggttttttatttattttgccgctgctcttgattttatcgcatatatatttttttatttaatatggacacgattggggattaagtatattatgcatatttacattgaatttgttgcggtagaatgcggttttctggcttcagcgtttgaaaagtccagccgaatttttgttttattcgaatgacatatatgtacattatgtttttccgttgttgcttcagttctggtggtatatagtgtactggttagtacattgattaaatatatattgtgaccatattttgtttcagagatgaggattctttttctttaaaacaaaaaaaaaaaaagttttggaattgatcagttattttttttttttaattttcttcgaagttgtcatatcagttatacagatatatatatatatttatatatatatatatatacagataacctattatgcctcttgcggttgaatgcaaccataggttcttatatatatgtttacaaaattttgtcttctatgctgtatatatatatttcgattgaatgtttttgtaagtatttctcgtttgtttttaattttttttattttggacttcagttattatatatataatatgtttcagtgtgtaatatatattacagtatagtttggtaaatatgtattttggtgcaaacaatttaattcaaattttggtgttggttatgactaatattttgagtaaattaattgaaacaatatgtcgccaaagtgac

SEQ ID NO: 245609 - DNA, 1084 bp, Cannabis indica
agagagagagagagtcctaaggcgtgtagaagagagggagagagagaattagggtttcagacttagagaattacggttaggctaatgctctttttatagtagagcttacatccctaatattctttaaaaatatgtaaatagagctatatttacacaattaattaataaactttaaatgactaaattatcccttgaaaatagggaagtttttgatatattctccctattttcgtggcctatcaaggcccaattcactacttaacttagagtcctatcaagtaaaagctggtcagccatgcaggctggccaatcacattcctgctagggtctggccgaccatgttcctgctaaggtctagtaggtcatgttcttgtcagctttggcaagtgttgaccagccttcgtaggtggtgaccaacctatgtacaacttttccttgtagaggtcaagtttccttaatcaaacggggccctccttggtctaaaagtcacctttggcggccaacttgtgctcaaaccctagccgaccatataagttcatccaagtcggcctatatactccctttggtttttctttggcttactaacaacgacaatatactagactatcacaatttgaagtattatttgtttactttattaattaactacttatgaaattattgctaatttaaaatttttaatttaaaataataaaatacctttagatagagttcctactattggttacctccaaacatatacaaataagtgtctactattacacttaagtacttagagcacatagacgaatcaaaagtatagggttagaccctcccacgcggtcaaaatatccatatgtacaccaccagggttaggactgtgctccaactcacccaaccatctacttatttatagctttacctgcaacaaaagacaagttgtgagctacaactcagtaagtaaagttctgcatgtatgtgacattatgaaaatacgattcaaagtatgattgtgaatttagaatatttattttcttttatctctttgacctctaaactggtacacattgttcggttaagcatgagcctgcagggcttgctgagc

SEQ ID NO: 245610 - DNA, 495 bp, Cannabis indica
gttccacatttgtatattgactcaaactggtaatctccttactttatgtatatttaaaagaaaacaattaaatagaagtattgtttcattaacaattttttgtttctatggtaaaattaggcatatcctttaatgcttcatgccctacttttgatatgatttttaatatatatatacggtagattttcatattaattgggaaggataactaaaaatacatagatatatatggaaaaaaatttaatggttacatttttattgtaacaattatggttattttttttaagtcattggattattattaaatggttgtttggaaattaaatagttatatttttattatgactaggatagttacattttaattgacatgtaatattaaattaccagtaaaaatcctttattttagaattaaattagaggaaattacattgtatatccactttattttacttgttttaatttttatctcaattttaatatttttgtagatat

SEQ ID NO: 245611 - DNA, 1290 bp, Cannabis indica
gggtcccagttatggcccttcaaaagttctatttggtcctttgaatcttaatcttttgtgaaaacggagaagatgctcgaaagagttctcgaaaaacaccatcaaaattggtccaagttgacattgggcgctatactagccccaagtgtcaacttggacgttaggccttgcttgtgacactcaggaagtgttgtttcttccttgaaattgtacatatttctacgtcttttatgaagcgaagaagatgcaaaatttggatcatcgatttgatatttgaaaggcgtccagattgacaaagtctcaacctggatactaggtgcccgagcatggggtgctttggttgctcaaaaataaacttgcttcgaaataaaataaatgcatgccagttaaatttgaaataaaattgagatacacccttaaaaatagatacattgcaccccctcgtgtttatgatatttaatagttacacttttaaatgttttattataatagtatttattatagtttcttaagatatttgtaaattttggaaaattttaaaataatttaatataaccacaaaaaaagtcatatttatgaaaagtttatgaaaaaataataaaactaatttgcggcataaatatctcagtttaatttctaattgcaaataaatatctaagtttaatttttagcggcaataatatttaagttatatttttgaaactctgtaggtacctaaccattaaatattaagtcattatctacatgtcattttcttatcagtatatttaaattattttaaaaaaaaaaattaatgacttggaccaatcaagaattgccacgtgacaatttacttaacactcaagtacctacaaaagtttcagaattaaaacttgggaattattatcaccaaaaattaaacttaggtatttatttgcaactgggagttaaacttaagtatttatgccgcaaattactcaaataataaagtgactttgatccaaacccattattgtttgattatagttgggaaacttacaaaaatactgctcttttaccaaatgttttcaaaaatactgagacacggcaaactttacatttttactgtccaagtccattttattttttttaatactgtccaggcccaatatatttacttttatactgtaaacagtaacaaaacacaaatgacacctctccttcgtggttggggacggtcaaatcaacaccagaatcatagaaacacaaggaaaaaaccataaaatctgtcaaagagaaaaaattactaaatcaacaacaaattactgtttt

SEQ ID NO: 245612 - DNA, 1071 bp, Cannabis indica
tgactccgcgcgtgtggtggggggtgatgcaatcctgatatttccgattttcaaaaattcataacaaattcaaataaaatcgaaattgagttctagtaaaaaagtaaattgcttaatttttccaaactatccaataaaaataatttcagaaacgaaaattcaattatttttcacaaaattttacaaacatcaatcaatcatcatataacacacagatcaacatgaaaccatccaaatcaatacatatcatcaaaattagaaattttcttgaaatttcaaccagtttttagtaggattgatcaaggttagaagtctcctaagttgtgaggtaagttctctatctttctctagttgatttttgaagtatggattgagttttggttagggttttaggatttcaggtctgaggtgctaaactgagtttagattatgtttttaggtttgatttagggttttcttgagttcaaattaagtgtatttaatggctgtttggtttggaattagaaattttagtttaagaacctaatttttggttctagcatggtgttttgaatattttgatgaattgttgagaattgtttgtttgaatgcattatttttatggtacaaaactattctggagagtttgaataagtttggaggcaatttggttgggttttggtgcaaaaaccagagtttcccttttctgcatcagggaaaccgattaaccaatttcacaggtatagtgaaactgatcaactagttttgccagcaagggaaacactagtttttggctttgaaatcggttttcatcggggtgtttttcagagcttagattagggtattttagtgatgtttaagttattttgaaccagtggggagttagaatttgtccagttatggaattaaggtttgttttggagtttgattaagttattttattggattttgtaggactcgggatcatcgagctttattccactgagttcggcgtgcacacttgattactgaactgaggtaagaaagctaattgcacagctaacatgttaagtgaggaaagattattattatttgtgactcgattatgatcga

SEQ ID NO: 245613 - DNA, 1465 bp, Cannabis indica
actattgatgaagaagatgggaaacttgaatcgtcaaaaatgatgcaaaaatctcgagagatggaggacaatggggtgttagcctctagagagaacaaggagctttcaaaagtttctttctgtagagagagatggaaatgtgggaaatgagaagtaagttcccccccatgagcttatatagcttttgtgggatcccttctcacttgccatgcagcacgtaacaaaaaaaaacatacagaagagtaatgctgttaacttactgctaaggaatctaattagacagtcaagagaaaacatttaaaaggctaaatatactacaagatctataaagttaaggatacatcagtctcgactatgctagaaagtccctatccacacagatgtccgtatagggacttgaggggaaagtgttatccaaaattttgcccaccttatgtggcatgtgcacgtgtcaaaaatcaatgccacgtgggagtacaattcactaacaagaagaccaggctatctacttagcacttcaacacccaaagggtcctagtttttagaagggatgacgaaatgagaaactggccacctcaaaggggctagccagcaatccctggctggccctatggccaacataggctgaccagcttctagatactatgtggctggccaacatgcaccctggcagatgcatggccatcaagctttttgcctggcaggtttttggtgcgtagcttttatctgtggatagcaagtcaagcaacaaattggatgttaacatcccacaaaaatatggggaaaatatcagcaactttcctatttttgaggggcaatttagtcagttgaactttattaatttattatgtaaataagagctttatttatttatttttaagggatattagggatgtaagctctactatataaagagtattagtcaaaccctaaaatcttaagtctcaaactctatgtcttaagctctaagtctgataactcatctcatctctctctcacacacacatagcctatctctatcacttgagatttgccaattctagttctcacattataatcttaagagagccactctagatccgaatactatagtgatctaaggggtattatctctagtatcaatagaactaaatgggggatatatcattacccgctaactaagggggccaaacctctataaaatctcgtctctatttatttttttattcttattgtgtaacacgtggcaagcatcagcattaaatacaattttgctattggttggccaaatttgagatcaacaatttctatttaattttagaactttaaataaaattactttcaattgaaataagatttgattatttgattaaattatatatgacatttttattataacaaataaataactaataattcgtgcatttgcatgaaacaccaatctagtatataaatatacatatgtaaatttgaacacattttttac

SEQ ID NO: 245614 - DNA, 1554 bp, Cannabis indica
atatatatatatatatatggggtctcctacgtatttcattatcatcatcaattgtattcatcttaaagtaaagtacaacaacaacaccataaataaataaataataataataataataataagggtaaatactatattttacaccttgtattttagaaaagttagtaatttgactctctgttttgttaaatgacaaaatagaccctgtatttttcaaaattatacaaataggaacttgaactgattttttgtcaaaataaaatttaataataatctaatctagagatgttatgacaaaattagttatatttcttgtatctgttcgtgttaaaaattattttaaagttggttatgttaaaaaataaaattgttaaaaattaagctcaaggttctatttgtacaattttgaaaaatacaggattcattttatcatttaacaaaacaaatggtctaattaataactcttacaaaatataaggtacaaaataatatttaacctaataattataatatattgtaattaatcgatacaattgaaaactagaccttgtatattataattttataattattattcaaagttattaagcaggttgttaagtactaactttgttagtaatattaggtaccactggtacttaacagtaatggtcatgacacctttattaatttaaaaaaagaatgtattaagtatggagtgttgtaattctcttaaggaaaccctaaatcctccttcctcccaaaaagtcctaaattggtaattaaaatttgctttgtaaacaatttaacttgccatatacattactagataaattttattaaatattataaatggacacggagcgtaattttacttctgctctattgacatccagcgataacttagatgtcaatagagccccattcaagaggtaactaggaaggcccctcaaatctcctcaaagaagttatgttatttgaggttcctttagcttaatcctcaaagaaaaaaggttacactataaactcagagttagaagttatatgtgttgtgttatccttctttcgagatcagcctccaaaaatgtcaagatagttatgtatcctcttcaagatatcaactttggatgatagctagtatattgtttcacttagagtatattggagtggaattactaaattattatttttttaaaaaatatatgtatatagaaaaaatatatatatatatatattttttttttgtatacgatgaaataaatgtaatgtttgaaacactaaattattattttttaataaatatgtatatagaagaaaatatttttcttaatattggattgaataattttttttaatgtttttcaagataatgaaaattatattatatttaatttaatttttttcatgaattgtttttcttcgaatttataatacatgaggaataagaagaagaagaaaaaaatatttagaattcattttgttgtgtcttaaattctaaagaattattacttaatattaaaataggcaggccttgatggaagcacaattttcattaaaataataataagaattttt

SEQ ID NO: 245615 - DNA, 1510 bp, Cannabis indica
tttttttttataaatttatcaatccttataacaattcgagggatcaagtctaacattatgttatacaggtcgtgtctgactttcattataataacgaaatttgataaatacgagtttgatttgtctgttggtacacccttaattttaaaaataaattaaaaattagattaaatttaatacaatttattacttagttgtcattaaataaaattataatttatttatatatataatttaaaatttttaccgcaagcgcatttaatatacaccaaataatgtatctatataaattcaagtttcctatataatatcatgaacacgttttttagaacataaactattcaaaaatcttgaaatctattggtgtaaactcttgtagctttgttacggtttacgttaggctagcaaagctaacaccttatcatcctcacctgacatggctgctcctgctactgttacttttgctggcgcgaattcggttgttgtcgggataagtttactgagctcacctcgcattttggcagcaaaggggtctcacttcctatctccatcctcattctctaaattcaatttggattttgctcctctgcaccagcggacctctttgccttcaacaaagcttgtggttcgagccgctaggaccgagtccaaaggcctctccttgggcttcagacctccagattttcaggttctttatgatttttactggaatattttatctgggttttgtttaattcagtctgaatatctaaaatgttgaacaatttatgtggattgtccttgtgtttagcttccagagcctcttactgggaaagtttggaccttggaggattttgaatcatatcctgctttactggtctgtacacgcactctctctctctccctctagcatattttctacaatgcaatcatgttctttgtcattgttgactgagtttatgctttttgatttcttaatgattgttttctttattggtatgaacaattaatagtaaagttatgttgatggagattcttgtcaaagacatttatgggaccaaatgtttgaatgttgggcagtctctagcctcttaattgaaaaataaaattaaattcaagtaagttttcaaacagttcatctagcaaaaaaatttggggagccatatggactaatgttaaaaaaaaaaaatacttaaagaaaaagaggatgggaggcctcttgggctgaggcgccttgggcaacagccccagtcgccccaccctaaaggcgaccctatttgaatgttaaatcttctcacttggatcaatgaccctcgatatgcttttgtttaggatgcacctaaatatgcccaaagaaaaacgttgtagaagattttatcttgactgaataaaaattgaaatcacgaaactatcgatgatcagaagcagaacttctttatccatcttcttaacttttcgtgtttaggttttcgttgaagagattcttctacctaatgtttccaagttattaaagttcacattgtaatgtata

SEQ ID NO: 245616 - DNA, 1312 bp, Cannabis indica
gttgtgagttctagagtctcgtaaacaatgcttgcgtgcttctccacttcaatgtcacttttgttttgagggaaactgaaggaaacagaagagcttttctcgagtaggaataagaagaagataacaatggttaacttgagaagaccagtaaaattatatgaccttataatgtactccattgttattaattcttgttgatgatcaatacagtttatagagttggaatagtaatttaatgaagagggtatttgtatatacacgggatctctttgtcttagtcttagtttttctttgtttgataaattcttcgtcaacggctgaattggtccatttcaaacattaattggattatgaatagacgaagaagtcgagtactatatgatcatttgagaacaaaatagtggtataaagagactgctattatatgtgtttagaaaattctcctaatttttgtaaccaatttctagagacttagcattgttattagtcatagtccaacactatacacgtatgtcgctgtgtgagtatgtggttttgtgagtgattggtgatttctcctattatttgtcaaatcgtacaccaataattatttaatatctcttgtaatatttgggtacgggtgccacttgattaattaatttctcatatttatataatgtcataggattgagaccacttaataatatctacatgtaatttggacaacattatagataataatagatccagctttaatgttaaccagccatgatgaattttaattgaaaatgaaaatataaaggaggtttggtagaaaaaatattattaatgtcactttacaaaattaaagcatttggtaattatattaattatttgagttgtcatgatacaattagttatgtatatatagacgaggtcatgataagacattttttattaatacatatatgtgctccgcacgtggataacacataggatgtaaaatattaatattataataatttacttcataataatttaaagtgacaaaatttctaatgttgaaactagtagcttttaaagttacgacttacatatccattttaaattgtaatggaacttaaaaagtgttctcaagtaatggcctatttatttatgtattcattccatctaatagtgatggagctttcaaaagtggaagcctatgatatagtattccaacaagtggcctatttatatatgtattccatcatgaactttgaaataacttcaaagaacaagccaattagagagaagcacaccaagcttctactacatctaatctttcattagaagccttgtggtctttttcatc

SEQ ID NO: 245617 - DNA, 1163 bp, Cannabis indica
ttatgtcgcaaattactcttttagttaatactctttttcagaaaactgatctttagtcagagtaagtaaatagttaagtgtcaaagggtctttcttagaaaatgaataatggccaatcaagcacctcttcaactgcaatttctagacaaatacatgtccaccttaagaccatatctttttctgaatgtgcaatacaagtaaaactgtatgctctttttgtttttttaaaaagctttattgcatttctcatgtagggaacattatgaaaacctgattaagcagtgccaaatgatgcattcaagcattggaactggttcccttgcttatgctgtgggatctaaagttatggatatgagggccccatcaaaagatgatggaataagagattcaaatgtggaaacaagacaagcttccattgataatgctaacaaagtagagggtaactgttataggaataatgatactaaattgtcttcttcataccacagtgaaacttctagtgattcaggtgaccttgtcagtgtgaggagaagctctgaaaatgctgcaaatgactcttctcttttcatggctacttctggttcccaaaactacaaggtcgggactgaagcaaatggatcaccgcgtgtaaatgaaaattgctttgattttcctcctttgcctgttactgatttgtttggcaagagtgacaaagaaaaggaagaagttgacatgcaagacagcaaattttctcaacaaaaattgagattgaaggataacaaaatgcacagtttccaaataaacaataacatagatttagttatagagtcaaacaccccatcatctaacaatgtatcacatcccataaacgctgaaattgaaatggctcgtgctgatgtctgtgaaccagaaccagtactgcagtccaatattagtgataagaagaaagacatagtaaagagaatgaggatatcagatgtaccagatactgaatttgtagatggaactttgcctcaagtagaggctgtgaataaagatagagtatctgaatggctttggactcttcaccgcataggtaactttatttcattttttcgttgcactttttttgttcctaatttaaatgtactctggtgatcgcattgtcgaagttattctttaagctgataaattaattatggtct

SEQ ID NO: 245618 - DNA, 738 bp, Cannabis indica
cattacactaatcctatgaattctcattacactcttacatctcatgaatgaaaattacaatgacaactaaataataaaaaagactagttttactttttctttttctcactttgaaaatataaataaataaataaaataaggatattttagtcaatttgattccaattacaatgttcattacaaaataaaccaaacatagtaatagtattcccattattattaccattacattctatttctattcttattaccattacaattacattccggtaaactaaacaccaccttatatggtatttttgaaaatcaccaaatcacatgtatacttttaaaaaaaaatttttttttttgagattggtgatctctaggtgcaggcttagcccacttaagtccaaacccaactctatcaccaaactatgggcgatatgaatgtatgacatttttcaaatttggttataagttaccaaaacacttcaaatattttcccataatccaaacatttattggtgatccaaataacatctccaataggtagtgtctttgttgagcattgaagtatttgtagtggtatcaacttgtgcctgacctagataatggtcgtaatgcgcaacctctctcttctatttcaccataacataatgggagtccttaaaataaaagttaatgcaaccattaaattaagaggatttaataataagaatgggattcggtattatgatcaagaacaataatggaaat

SEQ ID NO: 245619 - DNA, 850 bp, Cannabis indica
ggagccatgacccaaaatcaccactgttaaaaatgaaccagcgcaaggtgcggggtcagtcttcaagtcccacacccaccaccataagggtccggcaaggttcaggtctctcgacttcggcgagcgcaatggttacctgaaaggtgtggtcactgacatcatccacaacccaggaagaggtgccccactggccgagtcaccttccatcaccctttccggtacaagcaccagaaggagtttttcatcgtcgccgagggcctatactctagtcagttcatctactgtggaaagaatgccaatctcgtcgtgggtaatgttcttcctctcagatctctccctaaaggtatcgtcatttgcaacgtcgagcaccacgttggtgaccatggtttccttgttagggcttctagggactacgccctcgttatcaatcattacccgaacaatggaacctcaaggtatctcaatacttattttttattttttaaattttaattaatactagtttcagttgtttatgtacaaatttatttaatgtaattagttgctatttgtctaaacataatcttgtatagaaattgaaagtcctaaaaagatttatggtttggtccatttccataatcaataggtgcaccctgatgaggcggtcttgatgcgtatgcctctaaggctattcgggttgaggcatatgaggtgcacgcctcaccaattcagtttcatttgtaattgactttatgggtgttagttgaccttcgatagggcatcgcatttaacggggatttagagctgggctcgtgttcgatctaaaaaatgaacaatttttttttccagaaatgtattttgtaactgggtt

SEQ ID NO: 245620 - DNA, 1053 bp, Cannabis indica
atctttcatgaaaacgtatttccttttcttggtcaaggttccaacaattccattgatatgttttttcaatctcattgtatacctgccaacaattcaataactctcactaatccccctgcaataaaaatgcatatacaacatacaactcctactgcttcgggttcacaatctaatgcatacactgatgcagacactgttactggtgttgttcccacaccagcaacaaacaaccaacataatcctgatgcagacactattactggtgttgttcccacaccaagaaccaacaacaaacataatcctcctggtgtcgacaacacccccacaccatcagcacctactggtgttgctcccacaccagtaactcctgctaacactcacccaataacacctcccattggtgtaaataacccttcagctcatgttgaaccaactggtgtcattcccacaccagacgcttcaacaaataataatattaccattacacaaaaatcaattcaatcagctccagcaattaaatccaaagctggccgtcagattaacaaaccacctcatctcaatgattatgtatgccacactcattccacggcttaccccattgaggagttcatctcctatgccaaacttagccctcacttccgagcggctgttttagctacatattcccacattgagcctacatcgtatagtgaagcctcccaattcaaacattggctcctcgctatggacaatgaaactcatgccctcgaaaaaaaccatacttggactatcaccaaattacctcccggccacaaagccattggatgcaaatgggtatacaaagtcaagtataatgaacaaggtgaggttgtacgatttaaagctcgtctcgtcgccaaaggattcaatcaaacactaggaattgattaccttcaaacctatgctcctgtagcaaaattcaacacactcaaaattttattagctcttgcagcaatgaataactggaatgttcaccaacttgacattaacaatgcctttttgcatggtgatctccatgaagaagtgtacatgaaa

SEQ ID NO: 245621 - DNA, 2601 bp, Cannabis indica
gattaagatacaagtatttatggggcccaaaaactaaagccaacacccaggttgacattttgtcaacgagcttccaatcattttcccgaaaaaatattcgggcatttttttcatcatcaaagataacgaagatacaagtaatctcagggagcaaacaagatttctaaagagcctaaacaaggtcagcgcccaggttgacatagcactagaccctatgcctaggttaacatgcaacctagttcgcatgtttccgcttctcaaacacaaattttgctccaagcattctgaaacttcactaagcttcactttgaaccttattaattaagaaatcataccattaaaattactcaaatgttgaagcatatccatatattgtcttgcttttgcatctggtgcaactccttccacaagtagaacttgttagaaatattcttggacatgtataaattctctaaagtctctcaaattttcttataattcttccactctttcaattctatattttgcaagacgttatatgacagatttagacaaattgtgttggttgtgatctcgtctatctcctcccaatgtttgtccttcatcgtactagactttttctctatgcctaataacgccttttgggtcttctgttgaataaggagatccttcatcctcttttggaagagggaaaaattattgttgtcgctaaacttctcaattttcagtttttggcacgtctttctttagtctcactgacctctgaactggctaggtgattttcaggaaagaccgtgtttatatatcgcagtccaaccaacaaatgataggttcagacagtctcctaaacaaatttacctttataagtgagtttctaagaaaagagtggagagccataggtggactaattaaattctagtctcctagacataattacttacaccatacgtaaccaatattgctgcaagaatagacctctcgaccttaatgctctgatgctggttgttgaggataatggataatattccaattcccctcgaggattaatatttgcgagaaagtacaatggagactctaaaattcttttcttatttaaaagatcaatcacagctacaatcactgaacatattacgaatttttgaatatcttctaatgtaaatatttttttatgaataataatcaaagcaatgcacgcaaaagaattatctcgtagcaaataaaaaattacggtaaaccttccacactataacaataataatgggtacacaatattacattcttaagttttgacaaatacttggactcactaatgtggtaatcgcaccatttctatacaaaatgtttctcacaatttaggaactctatttttttctttctctctctaagagatttctcttactaagagatattttctctatttttttctcaagagtctcactcttcactcttggaataacttgtgatagttgtgatgagatgagcaaacgaaagggataaaactttatttatatgcctctttaaatgtatgaacaagacacaaaaaatcaagcttccattaaatatataattgaatatgtgcatatgttaatttttacatggttgaaaaacaatcattacccatcaccatgtgggtctccaactcagaattttggttcaattgagagattaattggtactgtctcgaagaatgcatttagagatttgtcctgtttcgaagaggactcgttacctattattggtgcttttattgataggtaatttcgagatagcataaatctccaaaatgtatttttgagacaatgctaatttttcaattgatcccaaagttttaatttctcatttcatatctactaataattacaccattatatatttataagaatacacccttaagtactgcaacatagtaattggttaatgtttaggtttgttaactggccaataatctgttacttaggcaaggcattcttttatacttttcatccataaactaagtaattaaggtgttcctatatgtcttgattgaacaatatattatctcatcatttacataacggactaaataaatttaaagtaaaatactttcactttcaacttattatatatgcagttcgacttaattaaattacaagtaaaaaaacatgtaaaattttcaacatcacttgtttgaccgacacgaaaatctctcttaattattctatgtcgattgctacgtttgactggaaagtgatattgttaatatttttttatatatataaccttttggaggttggtcgactctttatgtgtatacatgtatagtattttttattttaaatggttagtaaacaaattcagctgaccgactctttttatgtgtatataaccattaatgcaaagaatgacgatccatccagctatatatatatatcaagctactatagcatatcatcaattatggtcttttaaaagaccataacctaaaatatataaatttatatattttaggttatggtgatcaatatattctgttcagctcatttgatgataagacttttttcaagttcaaaaaatacaatgaataatattttagttctaagaaatttatgataatctttataccattaacctcatcaaatggtc

SEQ ID NO: 245622 - DNA, 661 bp, Cannabis indica
actattttattaaactatatgggtcccgatacttagttgaacaacacataggagggtgctagacactactggtgccctttagcatttctctattggtatctaatatcctctacgtgttaatattattattagtttaattaaatatcaagtctcatataatttaatataataaattttttaaagtatcgataatcaatcgcaaaacaacacgcctacgcctagaaattactaaactatttaagttaaaactcaaaatttatttattttgtaggagtggtattatggtactaatttagagaagacttggttgagaagtgattgtatctgattggaaaggtttctccttactagagaagtagttacttttttagtatggtaaatgacgaaaatgcccatcattttactatatatattcttccctttatgaatcacactttcccactcgtttctttgccagtacctcatgcatgagtgaccacgtgttcttttctcaaataatggtgcggttttaatcccttttccaaactgcactaacaccgtaaaactaaaaaatagcaaaacttgtaatgtaaaaaatattgtagtgcggtaagaattttgtaattttcacagtttagactatcattaaataattaaactatcacaaatacaataaaatttg

SEQ ID NO: 245623 - DNA, 1022 bp, Cannabis indica
ctatttcttagatagataaagtgttaaatagactttaatcatatcatctactatatatgttaagtttgtcgtatgttatgaggcatcttttcttagaaggttaattgtaagtgaattgagagttcagagagtttagccgcaaattactcttttttaaatcttatcgtccataaaatgtctaggactgccctgtcttagaaatcagggtcgggttcattaagcagcttctgtcataagaccgaggaagaagatgagttctcgagttgtagattctaggttttatggctctggtcgtgcgatgaaggttaattagttcttcacgaacccaagtaagaaactttcgcgaactcagtatgtatttggaagttttaaaattttatacccataagatactaaatatctaatttttgtaaataagaggtactaattaattattattaaaataaagagtaccatgcaagtatgtatttgacaaaatctagagtataaaatgaatatttaccttatgttataatatattatcgatttcactacaaatctaactattcattccatgtacattttgttgttggaaattgtgttaccatactttaaaagtagtgtaattatgtaatatagacttaaatattttggacttaattacaaatatagtcccacatgaaaatcataccgaaacacaacatatttatttttttataagaaacaataaactaattattaaaaccaaaaactacaaatatcttataatataattgaagaaaaatctgctaactaataataaattgctataaaaaaatctcaaatttgctaccaagtataaaattatatatatttaaatttaaattgtatgattcctattttacttaagatagtattttcattatatatatagacttagcgttgttgaaaaaaaataaaaataacgtgagtgttgtagatacatacttgcttaagctttgtaaaaaaagtgtgaatttgtagaaaataattaagaagaagagtggaagagaaaaagaagaaaa

SEQ ID NO: 245624 - DNA, 687 bp, Cannabis indica
aaaaaaacaaaattaaaaaaaatctcaatttgaaataataatacaacaaaccccctattttgtctaacatcgtactaatataaatactaatataagttgctcataatatttattaaattaaattatctaacaattgatattaaaatacaccacctattatagtgtagtattgtaatcaattacgattccatattatttatttattagaataaaaactatttgccaggccactaaaaaataatccccctactatttatatgagcgttaaatgtatactataaaaaatttaaaaaagttgtgactactataaattatcattcttatgttgtgactaaaaagttcgtggctaaaattattaatcacaaaaatcacaatttgttgtgactaaatgtgtttttagtcacaatacttgttgtgactaaaattaaattagtgacaatttgtgtctaaatactatatttagtcacaagtaacttttttgttgtgactaaaagtcatatttttagtcacaaaatttttttgttgtgactaaaaagttgccactaaaggtagtattttttgtagtagtacccctaaactttagacatatattatattgtaataattttctcaattatcttgtcaatgtggcataatattatcaaatttagtttcttaagcagactaaaataaaataaaatttacaaa

SEQ ID NO: 245625 - DNA, 999 bp, Cannabis indica
cttgtgattgctctagtagtttctatgtgggttattatgtggattttggttgtgatttaggttgctttgttggttgctattagggttgcttgtaaaaatgaaaaaaaaaaaatattttaaagtataaaaataaaaataaaaaataaaaactacatatattatatgtatagagaaataataataaatattttagtaaaaaactaatatacctaaatcttaaaatttattatgtataactgaatgtagtttttttttttatctaagaacttaatctagctattagatgaaggaaaatttggtttagtgtatttaaatgtaaagtatggtctttttaatatactactcaaccagaaatagaatacttacatgtacttttaatattttttcctcccaaaaatattcttacatttcaaataagactctctcactctaatccccaaagccccaaaattcataagctcaaccaccctgaaactcttgaaatccctacacattactggagttctcaatttgctcattttctagttttttaaggcgccgcgaaacatcgctaaatgtctctaaatcacattgctaaacacatcgcaagatgtcatgaaatcgcactcaagttttcaagatgattagcgatgtttagcaatatgttgtgcattttttagtctcaaatcagaaatacatcgttaatatcatcgccaaatatctctaatcaatgttaaatttcatccttaacttcaaatttggtctatcattgcaaatacattgctaaatattacaaaaaattagaaaaccagaagaaaaatacaaaaaacgagagaggtcgtgagagaagatgacggcaggggcttgcgatcagggttctgggcctgtgtgtttgatgacaggagttctgggtcggggttcaacgtcggagaatgagcgagttagagagaaaagaaaattgaaatgtaaaaaaaaaaaattgaaagaaaaaaaatataaaaagtataaatatactatttc

SEQ ID NO: 245626 - DNA, 1943 bp, Cannabis indica
tgctgcaatgttgtttacaaaatagccaccaaaatgatttgttctagaatgaaaaacatcttaccaagccttattgctcaaaaccaaagtggctttgttaaaggaagacttattgctcacaatgtaatgatatgtcaggacctcatcagacattatggaagaaagaatgcaagggaaaattgcatgataaagctagatcttaagaaggcatacgatacagtggagtgggactttatagaagaaatgatggaagccttacagttccctagtctgtttgtaaagctggtaatgaattgtgtacgaactccaaaattctcattgatatttaatggtactctacatcgattctttgagtcaaaaagaggattacgccagggggatcccatgtctcctctcctctttgtactgggaatggaatacctgtctagaattatgcaaagaattggttctaaagaagagtttcggtttcatgaaagatgtgaggggatcaaactaaatcacttaagcttcgcagatgacgtgctcttgttcagtaagggtgacttcaaaagtgtgtatctcatgctacaaggattgaaactattctcattatcctcaggtttgcatcctaatcctaccaaacccgctgtctactttagtggaatgcatgacaaggaaatacaacgaatattagatatgtctggtttcggtagacacaatgccccattcaaatatctgggagtgtcgatatgtgccaaaagaatttcaagcaaagattgtaaagagcttgctgagaaaatgacatcccgaatcaaaacttggagtaccaggaatctctcttttgcaggaagggcagttctagtgaattcaattctcatgaccattcactcgtattggagccagataatgattttacctgagaagatagtgaatgacatagaagctatttgtagagcgtttctatggaagggggaacattcaatgattggttcggatttaatagcttgggagtttgtttgccaagctaagtccgaaggaggaatcgggttcaaaaaggtagcaaaatggaacagagtagcaatgtttaaatatgtgtgggcgattgctaacaaggaggataacatgtgggtttgatggatacatagtgtatacattcggggagacgattggtagggctacaatgcccccattcaagggagttggtactggaaaaaagtggtagaggccaagaatcagattaaaacattggtgaatgttcaatagttcacacaatccaagtatcatctttctcttggatataaacttttagtccctccacaaccaaaaatgcattggagtaaggaagtttgggggaagtttaacatccaaaatgcagcttatttgtggattgctgtacagggcatattaagaacaagagaacgattgcatagatttgggatcatcaatgatccaggatgtgtattatgtactgctcaggatgaaacctgtgatcatctattcttttcttgtactttctctcagctttgcctttagaagattaaagagtggttggggtggaaagcttctagtcaaaccttatcaaggcttttgaggtaaattgaaagaagcaaatgcagcaaattcaaaaaatacactctctcggctgcaatggcaagcttagtctaccacatatggaaggctaggaatgacaaaatatggaatggaaaagatgaggatatagatagagtaagttgtacagtcaaagaaatggtgagacacagagtctacagtgtttggccgagacaggttggggcaaaggacttggcttggtttagaaacttatagttgtaacaataatttttgacaatagatgtaaaaatgtacaaagcagatgtttaatatgtgaggtccctttgattgggatgctctttgattgtaaaatggattattggagtaatgaaactaaagctgattcaatcaaaaaa

SEQ ID NO: 245627 - DNA, 793 bp, Cannabis indica
caaaacaaaaatacacagctctaatggaatgggagattcctcataacataaaagtactaatatattttgcaatactttcaatttcaaacctcagtagcaaatcaaaaccacacacacgtcaataagattctctattcttctactaaaaaatagtaaatatattttgcgtagaggaagctaatagttcacaatggttcatactaaatcagaacttgcaaagacacgcatactgcacatgaagagagtataagagaaatccaacctcattgatgtcatatttggactcacgaagcctctcgctccaaaaggtcatgtcccaatggctcaaatcatcagcttctaatgccccttgcttcttggaaaaattcttaaggtcttcaagatctacaaggaaggaaaaaaaataaacctcaacagctattctccggaaagttaaaaggtatcaatatatgtatatagttataacaggagactttaaaatccaactaaaagaagtccaacttctacttaaaagtttaaaacacttgttctgtatattgtctgatatgaagtttgctttgttttagcatagatcttgcacattaatgtgtcaaatttaaaataaacacaaatggacaattatggaaaggaaacttgtaaacaaacatctgaatgccttaccttgaactgcaggaccccatgaagcactgcgaagcttttccaaaagttcttctgctttttcaacagttgccattttggttgccatgctaacctgtaagattgtgtttcatcataccttcggtagttgagttgc

SEQ ID NO: 245628 - DNA, 722 bp, Cannabis indica
cattcttcacatccatctgccatagtctccagtctttactggccacaagtgctagtaggacccgtacagttgtaatcttagcaaccgggctaaatgtctcatcataatccaacccataatattgagagagtccttgagctaatgatcgagccttttatctctcaattgaaccgtcgataggagtttttttaccttgtatacccatttgcatgagatggtttcctttggctttggcactagttcccaagtctaattcttctccaaagcagttatctcttctttcatagcttcaagccacttggagttttggtatgcctcctcatatgactctggttcattgaacttctcttctttagctagtagcattggcgtatttttgatttggctttcatgctcttgttgatctccaaagttctaattgtctaccatcatgccatgctctttaatgcacccctgtttgccagggactatgtgttgtttctttgttatcttcattttgttcctcttcatccaattctggaattaaaggtaactcaacaatttgctccctcattttttgctgcaaactgtctttcatttctttataatctggtaatgcttccttttgcgatgaccaccatgatgatgcctcatcgaagaccatattccttgatgtataacacattctagttttagggtcacaacatctccaccccttcggttggctatcatatcccacaaag

SEQ ID NO: 245629 - DNA, 511 bp, Cannabis indica
ctccacatcctcaaccaacacctaccataaacactcagactactcccattattcccagctcaactatgcctctgtcatctactacacctggtattcacactaacaaacatagcatgcaaactcgggcaaaatctggcatttacaaacctaaagcattcttagcttctcaagaaccaagtaatgtaaaggcagctttgaaagaggaaaaatggtgtaatgccatgtctgaagaaatggtagccttaaagaaaaatggtacatggacatatgttcctcttcctagtggcagaactcccattggatgtaagtgggtgtacaaagaaaaacttaattctgatggctctgtcaatagacacaaggctcgccttgttgcaaagggctttcatcaacaagccggtttcgattttacagagacttttagccctgttgtaaaaccggttacaatttgtatagtactctctcttgcagtaacacataagtggcctatccaacaattagatgttaataatgc

SEQ ID NO: 245630 - DNA, 1533 bp, Cannabis indica
aactgaaaaagtgtgcacaaatttagactggatctcaattatactttcactagtgaattaacaatactaaagaataaaaaagtaatcagaagggtaaaaagataatttgacccaaactaattacgaatcggcacaaggagggataatcactgtaattgatttatatcaatagacactacagtagaactcagtaaatataattctataattactaaaagtttaattctatatttatagtagtgtaatcatggaattaataaacatgattatatggttgatgaggttcaataaataatttagttcattggagcttagaattataggtccatggtccccggatcacaaccttgaaataatgtcaagggtcggggataaaagttgtaaattgatgttcagaaaaatttattttaattttttcaaaatagtaaatatatattttgtaataaataatttatttttaaatttattaattaataaattagagaaaagacaaaatttatttggacaatagacaccaccattgtctggttatgacaaaggtggcgccacctacattgtgttaagacacaacaataggcgtccttaatagtaggaatgtctccattggatttatttttaagataattaattaattgaaatgatagatatttatttgaatttgaaagttagttatagatatttaagttggttgagatattacttcaaagtagttaagagattctcccaagtggttgagagattgtctcaatcaatcagttattagatatttaattcaaaataaatatctataactgatttggttataaatacttattcaaataattaaatatgatttttaattaatttgaattcaattttttatttaaataaaatctttttggttttaatttatatatagggatgtttgcgatgcaggtagtgcatgttgtatgctttttttcaaatcaaactccatatgcagtttttctaatttctcaaaccgcaaccgcaccgtgagatcttagaactgcaaaatctacatcgcaaaaatgcaatgcggtgcggtgcggtgcggtttgagcagtttacactatcatcattattgaacattataataaaaatttaaaaatcaatctataaagttttaacagtaataataaaaaaaatctcattaaagttttaacatcataacatatatactaatcatcaagtcattatattgaattgtcttttaaaaaaaataatgtaaattatacatatatttattcttatacaaaggatttcaaactgcatttttatgcggtgtggtgtggtgcggacaatttatgcagtgttgtaccttgaatgctcaggtctgagtttcgaaggacaactaattgcaaagctagggagagaaaatgacgctaccatcaagcagctcttgcacgttgtgagaatgagctgatctagtggatttgggcgtataaccttcccttggtccttcggctgcctcccagcaatctttaaagacctctattttggacgatcctcgaagcaaggcacacgattattgaa

SEQ ID NO: 245631 - DNA, 1163 bp, Cannabis indica
agcaagaaggagtttcagcatcaaagattcagagaaaaagatctaggttcagatattcctggtaaaataattccaactctaacatctacactgcctattacgtaggtaatgcatgccctatcttgtaccttttgggaacttgtgcttgtctatagttggctctcaaagacaagttactcctttttcttattcccaccaatttttataaatacccatgtgaaaattaagaggagaatcggaaaaaaaagagagagaaaaaacaccaaaaacattctccgtaagaaatactctcattaataacagagactcgtggactacggctcattaattaatgcccaaaccacgtaaaagtcatctgcattaattattccaaagctctcattattatcttatttaattggttatcggaaacctcagtcaacagctagtaatgtgtgctactccttgtgggaagctaggaaccgtgctttcacgatggaagcttgctagttcccttgattattcacataaggatcattgcaaatgtcgaagagttcttgaacttgtttcctcttgagaaactcttgtccttttgtgccgcctgatcggtccaagtttgttgtggctgattatccttgggggctcttataatgtgttcgtggatggagcatttagaggggttgggagtgtggggctatggttttgttggatcgtgatggtaaagttcttgaggctctcacttctaaatttagtgcatcaaactcgtttgaagctaaatctaaggcgatactttttgctatctccttttgtgcctctaagaatctttgtgatgtactgatcttctcttattgttagctcccttttcatgtaattcaaaggagtaagtctcatgtttggagagtgtatgaaatgaatatagtatcgaaagccatctttggagggttcataagaaggaccccagaggtcagtatgtatgggggcaagtggttgtgtggctcgttttgaggaagtggtgaagggaagtctatgacttttcccttgctggcatgcattgcagaattgaaattgttttaaggtgcccgtgtgtggtatggttggtagtagcttctgcaatgtggacatagcaggatgtcccaatttgcagtgccaaaggcttatatccgagggtgttgagacatgaaaaa

SEQ ID NO: 245632 - DNA, 826 bp, Cannabis indica
cctttgacatggttgtgcagttaatgtcacctagccattggtgacaaatctggctgaaataaaaataccagtcttgctctactttggcacagacttctaatcaaaatagtacatgatcgcataaggggtacgccgaggccagcctagctccctatacaagacaaacattgctaagaaatactttatgctctttcgcatgagatgtgttgggcacatctcaaagtaaccagcgacatctagaaaatactagtgaaggagcaacaatgccccatgttcaatgtggcgcccagaccatgccaaccagttcgaagagggcctgtgcgctctagactttctaaggggagtttcacaatggacattccctattaaacagctagtaaggatcttaccaaagacctcattggtgagaacagacgcaagaaaaatccaaccaactttaggtggtttggcattggtatctccagctcaagagactacttttggacatgggccagtcctagttctgaaggctcatcgagttcattcaatggattacctcaggcatcataattgcccaagggacagttagggaggattgaacatgtcttatacctactcctcctcattggaacaacctcctccagcttagattttacatcagaattctcagtcccttgaatccatctctggctgagcctcgataagaggttgggcagtctccccctccattctaacttgaccccttgtgggcaccatggccacatgaagatcatacagggggcaccttcaagccataagtacgaggtaaacaaaagacctacgcagttgtcacctcccctattcaatg

SEQ ID NO: 245633 - DNA, 1042 bp, Cannabis indica
cacccaccaaactctcgcctcatcaagagcgagccattttaaactttatccattcaatgaggaatttttcagaaaaattattattattattactattactattattatacatatattgtgatcagatttagttgactatatatatagtggtggtatagagggccctcttccaagttgtatccactgcagccttaggttaagtctaatatagtataatagtatttattccttcctcctctctaaagactgatcattatatattctcccaaaccactcattcaattctattatatctatgtatatatgtataccactcattcaccatgaataaaccacttattattatagtttaattaaagggtttgtaattactaatattggattatatattaacttttgattaattaattcctcttcgatctgtggaaagatacgccattgatattttatccaagtgcgatagtgatgttgcttggatttttgtttatatacacataaacatatctagcctacacatgaatttaaaacatttactttttctttattatattctctctctccttttcttttaacatgattataagtgtgacacagaatttattgtcgcttactttttattttttatttatatacttatgctcacatagtgacaacttaaatctaaatcaaaagcaacaaaaaaaaaaaaaaaaaaaatccaaagaaaagttagaaaaatttaagctatactgaataggtgaagaagaataaactagaagttaaaatataaaaactcattattagttgatgatatagaagggacaatatatataatattagttgaagttaataattacctatgataaaaaaggaggctttccatgaaccggtggaagctcgaagaggaacttgtcctttatgatccaaagaagaatcattaacccatttctcattctcatcttcatattcaaattgatccaaacctcttttttgctcatccatggtgataattaaagattatgagatgactatatagtccgatatatatatgtattatatatat

SEQ ID NO: 245634 - DNA, 647 bp, Cannabis indica
tttttttttaatttttagtttatcttggattgatgtataactgatatgagtttctatctgtttgatagaatctgatttgggggtttctatttattttatactattgtatgttattatgtgattattttgtaatttttagtaaatttatgaagaaaatttaaaattgattacaaaatatttattttgaggtaattatgtaaaataagttttataaaaatgaaaagcataattaaaatataaaagtagaaaaaaaatggtaatctcctataattggtaaattccctaatatatatgaaacaaatccatcatatttttaaatagaggcatccacactagtacagaaatatcacacactcacactctaacttcaatacaagtctggagtgtcttacgttcttaaccagaatgtagtaccaatgtccagtgcacccttacgtacaataccccacttaccacatcacaataaatgtgtgatttctaaccacgtcgaagtacttagaacatgatcaaacagccatatacaatctatcgataaaatactatttcaccgaaactatcacattttacaatttcaatacaatttattcaacaagtctcactaggtactcaaacaatataaaaagcacaagtataaagtataattattt

SEQ ID NO: 245635 - DNA, 1252 bp, Cannabis indica
ctttttattttctgtttttaaacttaaaaaacaaaactagttacagaacgcattttgttttttaaaaattaaattttttaaaaacaaaaattttactttcattttatgattaaaaaataaaaaacaaaagtagttatcaaacgatacctaagcttcttaatttgtaggtgtgattaatatttatttatttaagttttagccctcaaaattttatttaataaaacttatgatcatttttttccaacgataactgtatgtgatcactttgatacgtacctaactaattatattatattatgtatatatatttattaaaacaataataattatgatacagttaaattatatacagtgtaattaatttcaaccacacaattaaaaatgatgtttcatatataattatttacgataaaaattaaatttttatatataaatttagttatttaacaattttttattagtttaatagaatattttaaaaatatattttgttaaatttaatgttgttatagtagaattaattttataaatatataaaaaatattgatattatttattgctcattaatttaaatatatataaatattaattaatattatattgtatattaatttaaatatatataaatatgaatattattttttttaaaataattaaacttatgcttatttaaattaatttaaatatatataaatataaatatattattttattgttgttttaatattggggtatgttgatcaattttgatattctgaaactttatattcattttttcttttaaaaaaactttatatattgtttttttaaaaaaataaaaaattaataagtagtttcttataatttataaaattttaaattaaattacataaaaattaaaaatataataataataataataataataataataataatcttgtatatataagtgtgtatataaacaaaatgtctaatcttttgggtgttacccttaataaaatttatatcagaaaataatttggacccaaaaatatgaagaataagagtaattgtgttgattaattttttgcagaattgttaattaattaattagtaagataataatatatatttattataaaggagtgtacgtagctagttaagtatatatactattcgatcgttaattaatttgtttctaatcctagaattgataaacctaacctactatatagtgatgaaacatcaaatcagatataaatatgtatatatatatatatagctaggttat

SEQ ID NO: 245636 - DNA, 819 bp, Cannabis indica
atcatgagggatcgatcaaagtgccatggctggccttccatgacccttcgacgatcaccctcacagccaaactgaaccaggaaaaggcctgaatggtattcagagaaagagaaggggcatcgggcaacccaggcttcattcatagctttctgaatccaatcaaccttcaaagttttgggagaaagatcttaacaaccaaacaatgggattgggactgaggttctggatgtatggaaacatgatcaaaatcgtggacaagagcttctttaggggttaggtgggtagattgggaagtagggaagttagccatgggtaggtacagaaaagaaaaggagaaaagaacaaaagtagaaaaagatactggtaacggataatctgaaaacaaactgcagggctttaaatagaaaaagaaaagagagatatacctgaagcaagtgaaacctggaagacgaggagatacgaacgccatcttagctgatggaggtctagatcctcttctgcccagccatagggcaatgattcgcctccatctgaagaaaaagacagacattgaatgcatgaagggaaacgaagaagaaggagggccaaatgttgtctgaacaagtattaatggtagtctcggtaaagggaaaatgggggctgcactaaaaattaacaaatgattatattcaggatataattaaggtgcattaattaaagaaagagaagatgagggaaggaaaaacgacggttggaactggaaaaaccagaagaagagaccctagaacgttccagagcagggatttaatactaaaaatattttgaatattaaaagtacat

SEQ ID NO: 245637 - DNA, 838 bp, Cannabis indica
tgtaattatttgtcagctaatcttctaaaagaaatgaagcttatatttgtgttctataaatgcatgcttttgatggtcatgagtcttaattagcatctttcgtttcccgccaacagagtcatttgaaccttgtgaatcagatcgcttcctttgattctctcgaatacctatcaactttgttctctttatcatttttattaatatataagttactatttccgtatatttgatacttttgtcactattgtcctatatttgctattgttcatactaaattgttaggaaattcttatcaatttccttcctttgctaatcaaaataacaaagtgattcttgcttttataaacttagacatccaaaataatttgtgctcattaaaattaatctacggttatatataatggattttgtccctttatatatatacatatatatataaaacataatacattgttatgtattataagttttgttttatttactttaattaaggtggaatgttttatttactttaattaaggtggaatgtactttggactcagtttaatgtactttcctttctaattcttagatcagctcaatcttgatccaatgagaaccaccaaatgctcactccctatattattttgtagtacaatgataaactacaactcttttttttacatatgtttttttttttctttttattataatggagtgtttgaaatctatatagtcttcaaatctatttaagacattttaatggtatttaatttcactttaaatcttcaaattgatgcataactttatatgctttaattaactagcaaacaaattgtgagtcacaattataaattga

SEQ ID NO: 245638 - DNA, 1448 bp, Cannabis indica
atgtggtaatacagctcaccaacaagaagctcaagttagcacctcggccaacggggaccccaactctcaatcaggacagcaagtgacagaccagctgccttaaaggagttggccggttaaccctggccgcccctatggtcggccagcctctggacaacacaaggttggtcagcttacttcctgtaggtgcctggctggctatgaatggacgtggtaggatcctctgcacagttttacatgtggattgtgagttggactgtgaattgggccctaacaatccaataaagtagctggaaaatatctatgtttaagggcattttagtcttttataatttatcaatataatttacaaatatcttaggatttcagttgtaaattagggtttaagctctcctatataaaaggccttaactgtaacctagaaaatctaagtctaattctagcctcgaagtcattaagtgccaagcctcattctaagcctaagtctctaagtctgataactctctccctcactctctctcatctacatgcccatatagcattctcaacatttgatatttgccatctttgattcctactttgtatccttaagagagctatatcagatcccacctatagtgatctgaatagtattatccattggtatgaatacaactaaaaggagaatatgtcattacccactaactaagggggtcgaacctctataaatttttttgtgttctttacttttgaattctaattgtgtaacacgtggcaaacatcagattcatacgaccccgctgtcagttggccacttttcaaggtcaatagtttagtgctttcattgagagcgaggggatattacatggttaagatgagaagaactctggttgcaccatctgaatctttgggtctccctcaagactcacagactgcagatcctaatgttcatgttcctaccacaactagaattcctatgaacaatgcagatttggtcaatcctgtcaccacaataggcaccacaattctggccactacagctggccaaagtgacacgaacatcccggtggatctaaatagcaggctctttcctcaaagggaggaccctccactactggtgcctcccactaaagaaaggactattgggcgataacccccatgatccaacaactggatcttgtatccggtactatgctggagaaacatgttcaagagttggtgagcatacaattggcgagccctatgtggactagggagaagatcttgagttagccagacttagagaagccgtcggccaagccggcctaactgaagaaccacacactgctgagtgcaatgtattcgctcagtagaaacgtgaattcttaagatagatggatgaccaagagtacatcctttgatctcaccaagcggagctagatttccgcaatagagaggccagcgacctgattggcggttcaaccagaaaa

SEQ ID NO: 245639 - DNA, 516 bp, Cannabis indica
aatccaggctgaagttgcctcaaaaaccaaagggcatggagattggacttcaagaaaggaaatttatgttcctttctctatttatttaggctgaaatgtttagtttatttttatgacaatacaatacatatgatatatctaagccaggccaacataatagaaatccatataaagattatacagtcgtatgaatgaagattataatgtatagagaaattcaacaagtagtatttgtgggtaggtactatagaaatgtaaggattgatcataaatctaatttcctctttattaatttatcttgattacattgaagatcttatgtatatttgaattcaatatagactgataattatggggttgtgaaggttgtaatgagatgaacttatatgttgaaacttgaaagcatatactattcatttatgagaaaatactcaaattcatgaggtgcaagttattatcaacaatttaatgtctattcattcctaagtaaaaattataggaggagaatagttatag

SEQ ID NO: 245640 - DNA, 732 bp, Cannabis indica
ttgaagacataatatgacttgatggtgctaatgctatatcaatttctagtgactcatctacaatatttagggtattgtgtaaagctttaataaatgcattttttatctgatataggaaacatgaatgtatttttgtaatacaaactcaattgttttgtatggtttcagctttttaattatttgtgtgtatatgggtttgtcctttcaggagatagcgggattgttggccggtagagcacaagaggtagcgcagtcatcaacaccaaggactccatttgctgatgcagccaaggctgcagggtatgtgggatttactggtggaaagcttgatgatgtgattgtcattgtatcattagtacagaacaaatcctcctcttagagtaagtattatctcttgatttgtatcacttgttttatacccaaggagaaagaaagaaaaaataaataattatgtctatatatcttattgttttctagttgccatattcatatttatgaagcacacttcttgtatattctttcaaaacaaattaaaataaaataaattatactgaagtagtgttttttaagcattgttttcatttgagattttagagggatgggggatcctcacttcatagtgcctgtcctcctatatgctaatgacatgtgtcaccttgtttgtttggtattaatttgctttttcgggaaaaagctctctgaggaatgttaattttgctgctcatgttttgg

SEQ ID NO: 245641 - DNA, 780 bp, Cannabis indica
agggcggtgtgtcagttggaatcgaacctacaaaatttgtggccctttcttctacagagactgcgtataaggacacaattgaagccatcaaggaggcattatgggaaaaggttttgaccagtgagttgcagtttaattcagaagacataacagttcattgtgataatcgaagtgctctcaaaacaggtttaagtgaggaagatatgcagccatgacaatcctgtagacatgctcacaaagtgtagtgtttgtagatacaagtttaatcattacctgaacctactgagcattcaagactgttgagtcttgaatcatacattcatcactagcttgttgaactaagacaggtggatatgttgagaattagctcacaaaaccaatcaataataaattgctacaacatctttttttggcattctgtctattcttgtaattaaatgacagttaagttagttggcatctatttttcaaaccaactatcacacttgtctaagactataaataggtgtaacaactctacaccatagactcttagtacttagattagtctctctctctcactctctcagtccagaattctctcaccctttctctcttcttccaactgtaatttctatcctagaactagtgttagtgaaggaggattgtacaggtcccttgtttatctaatcaagggttccccaagtgaagctattgtaactggtgtgatataccattgttgagtataatagagttccaagaactctagggcaatgtaatatgatcaataaagattcaaat

SEQ ID NO: 245642 - DNA, 895 bp, Cannabis indica
taattctcagtcaccaacggcagctgaacatactactcctaaaattggaatcccgtcaacttcaaatactcaaaggccgatcggggatgatactgaaatacaaaatttgaaagatgcattggggctaatgcaaggccaccataacaatcttcaccacgaccagcaagatatctaagcacctataaaccttgctcttgatgagcaaagatgtcagtttgaagaatggagagatcgagagatggagatcgtgagagcctagtaggtagctattgacaaccattctaggcaggtcattgtactgatctgaagagcttatcaaatcaccggcaagcagccagtgactgatgctagtattcccatagggtcacagaatgagtcagaagagtaattagctgattacacccccacaaactcatgtcagtggaccgtccaatccaaggccacgggttcaaactatgggccaagtggtagacggaaagattttactagaccgtccattgggagggaatggtcagcttaatactcatactcaaacggagatattaggccaacctcttgttcaaactggtcagacacaaaggcctcttgtcacatcagtatttgactgactgggtaccgtgcacgacctcaaaaatgttttaaatcgcagaagaggactggacggacaaaatgttcctcctaccgtccagcccaataatgcaaataactatgtccctaattcagttcaaagagatcctaatgtgacacatgtcagtcaacgggcaggtcaagttgatccatgttgagattttatgccctaaataaaactcatctcatggcaatcttattgactattaaagaatgatataaaagtcatactttatattacttgcttcatataattatttcgtgatta

SEQ ID NO: 245643 - DNA, 691 bp, Cannabis indica
ttacagctcattattataatcatattttactagttgccgaaaacctcggtcaacaccttctaatgtagcttgtgtgccttcataacgtgtaaatacttcgtttgaattataacaattaatgcaagtttggtttctttttctttataataacaagcaatcttcatttccttcttcttctttggcagtttatttcatgatcttatcttatgaaacaagtttatccatactctactctattaaataatgattagtattagtaatcttacaagtttttttgattgtgtttagcgaactctggatggttatcttaatccaaacggggtcgcagaatgtagcatttctggattccaaaaacaaaaccattcgtcaaaatattaaaagatgtgttcaaacatattgctctaatttacattaatgtatgtattgactttatattatttatgtgtagtgctcttgagaggaactatcttgagaaaagaaaccgacggtcagtagcaataagcttcactgagtacacatgtccagagcaaccagatggcatccagtgtgggttttataacatgagatttattaaatcattcatgactgaaaataaccctacaagaaaattggaaacagaggtaaagacactaattattttcacaattataaagttttaagtactttattatgacctattaaattaatgatt

SEQ ID NO: 245644 - DNA, 395 bp, Cannabis indica
gttataatttataattttgtcaaaccgcacggtgtggtgcggtttgtgattttaaatttaataattacaatttaaactgcaccgcactatttattacaaagttatcaatttttacaattttttcattttgtttttttttatatgaacaaatatatgtaatatatgtgtatattacataattttttagagtactttttatataatgacttgataataaatatatataatatgacattaaattttaataattttatttttgtattgttaaaaatttattatactgatttttaaattttattataatatttgataatgatgatagtataaattgcttaaaaccacactacacaacattacatttttatagtgtaatttttgtagtttgaagattttgc

SEQ ID NO: 245645 - DNA, 1277 bp, Cannabis indica
taaaataaattaaaaaaattagcaaaaaaatttatttggaataagaaaatttctcatgtgaatgatgtggtattttagcaaaaatgtatcttgaactatagaagaatgtccaattaaaggatgactatccaccactgtttaatgatgtggtacaagatggtaccaaaattttggtaaagcttcaagagaatcaaatcaagataaatattgatgttgcattgtttattgcgactcatcagtttggaatcagcttggtagctcatgatcatctgggcgatcttgttgaagctcgtacatttttgtggtgggaatgtagaacctaagttggctgaaagtatgggtatcaaggaggctttcagttggataaagaatggtcggcagtggtacttgagacaaaatatttagtggcagttgaggtcattcgcaatcagtcattgatgaactctcattttggataagttgttaatgaatgtagacatttgattaattgtttgagcagagtcttttttttttatttatttattgtcctactaataaagtgactcatagtttcgctagagcttcttgtttttttctaaattgaagctttagtgtgagtgttgttcctgctcaatttatgacgattttattacacgatttatcttcattatgaagttctatttccgttaaaaaaatactaattaaattgaattcaaaacttaattgcaaaacaaagcatttaatcaaccaaaaactatttcattatctcaccaaatttttaattgcaatcttttcaattgttaatttaaaaatttggactagacttctatgtcacacccgcttgctagattagtgagaatgaataagtagttgagtttttataagagagacataataaatttatagtagttcactccttatatcgcgatagtaatagagttacgtctatttcgcgtttttatttctcacgagatggtaattacaacaatagactaaatgtcaaaagctccaaattctaaagagagaagctctgatcttatgggtaattttttgaatgtgaaaaatgagcttatggagctctctttttataggagaaggaggcccacaaaaatagggagaaaatacaaataagatgtttttgactgttgatgatgatctaatagtaaaaattagctctagatagtcatggtcattttttagagcccagcaggtcctgctgcgagtaatccagagattatttttgtagctcccttgggttgaattttgaagacgatagcttctgaattacgtctggagtg

SEQ ID NO: 245646 - DNA, 967 bp, Cannabis indica
aataatattctaattgagaggttataactaaatagagttacacttgaaaaaaaaaaaaaaaaaacacaaaaaatatcaatgtaacaaaaatactaataaacaattcttaatactatattatattaaaattattttcgagtacatgtaatatttatacatgtattataatttgaaataaaattacataaataaatttataaaacatattgtatatattttttaagatgtaattattcttatatagagatatattttattaatagtagacttaaaaaatatataactaattacaatatagaaattattcttatttataacaggtccaaattgaaatttcatttttttttataataaattagaagttctacggtatatagatatatagatgtgtgagataaaagaaaaaattcatgaagtattttgcagaatagattgctcttagtaactgtcaacgtgacacctagtatgaggttagaattttaattttacttttctggtcttaaatcaatctaaaataagggtatatctgtaaacaatagtgttagtgttgtacaacccttatgagaaggactctccggaactaatgctacactttttagttacagaccaattagaagggcgccacccagcccgtgttgctcattcgtaaattacacatcatctttggcccaagtttaacataggaatctagaggagcccagctaaaatgaactcctaaaaactaatatgatacaacagtaaattatgaacattcagtagtaatttgcagcattgtgacaatgtgactgacttgaaaaaactatcagaagctgttagttagcaggcaatacaaagagaaatacgttggtcactggctagaacccccagtgcataagcttaccaagtccattagtgttgagtacagcacatccagtgataaatgccctaagaatttcctatattctgatacaccatcagaaaggtccat

SEQ ID NO: 245647 - DNA, 656 bp, Cannabis indica
ccccttgttacccaccctccctaccccgaatgttgtcaatgacccggcctgatatatggactccggagcttctcttcattttacacctgatctcaatcttcttgaagcagcagaaccgtaccatggtaatgatcacattacaatgggcaatggtaagtttgttcctatttctcatgtgggttctgcatctctaccatcatcatcatttcctttacttaaactctgtaaagtttatcattcaccaagtctgtctaataatttactcagtgtttctcaactttgtcttgacaataatgcttatgttgaatttcaccctacctttttctttgtcaaaaatcaggacaaccatcaaatccttctcaaaggtcttcttgatcaaggcatttataaagtcactcccacttccacttcaactcttgatgcctctcctcaccttctctactcttccaagacttcacttgatctgtgggattcacggttgggtcacctcgctttagatgttatttctcgcatttcttcagcttgtaatttttcatttccacaaagagattgtctgtcattttgtacttcatgtcaattaggcaaatctcataggcttagctttccaaactttgtatctcgggcctttcaaccctttgaattaatgcattcggata

SEQ ID NO: 245648 - DNA, 986 bp, Cannabis indica
ctttcaaacatggaatttactccatgagcttcatgatctttcctccttaccttggtgcattataggggatctcaataatgttagcaggaaaggtgataaaaaaggcggtaatgaatatccaagaagtttaattaaaggctttcaacaggctctcttagactgcgatttggttgatttagatttggtgagatactcgtatatggaaagttcctgtcaaaagtagggaaagagcttcttattaaaatagtggcgcaagattttccaagttatgccatgagtgtctttcttcttcctcttgatgttagtcgtgatatggagcaagagcaacacatggaaagttttggtggaaaactactaatactaaagagaagggcattcattggatgtcttgggatacgttgtgtatgcataacaacgttgggggtatgagtttttatagcctcaaagatcataatatagcgcttcttgttaggcctttctatcttatttcaaaaaatttcaaagctcgatactacacccatagctcctatctttcagctgaattgaggaacaatccaagttttgtttggcagagtatttgggaggctcaaagcattatcaatcagggtgttcgttggcaagtgagagatggtaaaaacttagctgcaaggggaactgtggctgcctttggaggataactcgtacattacatctactcaccctgctctcgattctgctatggtccataatttgatggtgctgagtaaaggtctgctccaaatgagaacaatatcaagattaatgttgatgttgctctattcgaaaggggaaataactacgatatttggttagtagcaagagaccaccatggttttctagtggaatgcaaaactgattacttcttgggggctacaactcttgaaatggctgaagcaattggtgtccgctaaggcttgagctgtcttaaagaatataattggcagcgagtggtcatcgaaactgattgt

SEQ ID NO: 245649 - DNA, 1185 bp, Cannabis indica
taaacttgttaagtgtcaattttaaaatgtgtggtgatatattttttttaatttatttaatgtgtagtgtaacaatatgttaccatatgttgttgagttgatacttaatggctaacaaatagtacaactataataaaaattgtaaaataatgtatttttacggttatttttttttattaagatcatgtatgtatgtaataattataaatattatgaaatttgctgcaaatatctcaatatttgattgtgttttttataaaatatacatataaaagccagttagagcctaaaaggtgaaatataatgaatatgcttacccaatacatggatttttttttttaataatttatctatttaattagacataatcagacacacaaaaaggacccctttgaaatggtggtgctcctgtgtatatattattaatattattttacactagaaattaacattaccaaacttttctcactccaaagttattaaattttcaatttttatttattttttatattttattttaatcttctttgttctattttcaagaaatctatcaagttgttcaggagaccacaaaacaaaaccacaataaattaatgtggtactgacagttcaacttcttttcatttgtttaatgagaaaatcattttcattgtaaaaaatataaagtatttctttatttatttacattgttaaataataatagtgattaaagattaagatatggtaatttttatgtcattttaacaacaatatatatagaagtattctattatacatatagggaatgttttttctccctctctttgtgaaaaatggaatgtatttcattttcattatgtactatataattaaaaatgtattctatgcttgatttaatgtattttggtttttaatattttttttgagataaaatggaaatatttattaataggttaatcagacaaaatctattacataaaaatatagctcaaaaaaaaaaaaaaaaacaagaagcccttaccaaaacgcattggatccatcaatgatacaccaaaaaaatcaatacaacacaaatcttaagtgtctcactagtacaataacaaccgctattaatttaatagggaggtagataacttctattattaggctaaataaaaaaaattaaacataagaacaaagatttaaaaactaccacacatgatcgac

SEQ ID NO: 245650 - DNA, 1422 bp, Cannabis indica
gattatatattgaaatgagttttatttagggcataaaacccaacactatcagcaacacctcatgtggcttggcaaaacaagtaactgtcatctgcgaagaacatatgtgttattgaaggtgcatgttgagcgacatggcatccttgaatatgtctattggcttcaaatttctagatgagagctgagaggccttcgacacatataatgaagaggtaagtagaaagtggatcacgttgacgtattcctctggacggggagatagaatcaagcacatgaccattatgaacaactttgtagcgaaccgtagagacacaacccataatgagatcaattgatttgctagcaaagcccatacgattcataaccgctctaagaaagctccattcaacccaatcataggctttgctcatgtcgagtttaagagccatgaagccttttttacctcttcttatccgtttcaaatagtgcatgactttaaagacaaccataacattgtctgagataagacggccaggaataaaagtactttgggtttcagagataatacagtcaatcaaatctctcatgcggttcgtctaaactttcgagatgatcttatagagaacattacacagtgatattggcatgagatcacccataacaacaaagtttttcttttttgggatcaaaacgagattggtgtcatgaagtccatcaagcataacttgagtgtcaaaaactccttcactaagttgataacatcatcactaacaatatcccaatggtattggaagaaactaggtcccatactgttagagattagttgatagtgagatcaaactattgagagttttactacaatttgcttttcttttgacctttaaaacctaaaaaaaattaagaaaataaaaacactaaatttttaagtcttatattaagaagaagaataataaattgtttagataagtgctgttcataattttaatagttcagtttttttttaaaaaaaaaaagtatttagtttagtaatttcttaaaggatatataaaatttagtatttagtattgcattttcactagtattgtttttgtcattaatttatgagtaatactacaaaatccaataatagtttcttctaaactaatactaaaaaaaataaataatttgtgagtttatatttgacttagcatatgcaagagtgtgaagatgagataatcctttattttatttaagtcatggtccgggtcagatggagatatgaatcacatttcactttgtttcacatggccagctggctaaaaatgaatggttctctttttcctttttatttttaaattagaaccctctcattcacacacaccaaaatattaggcatgtgggttcggttatagcatatttttactaattcaatataaatatgaaattataaatatttaattgtaa

SEQ ID NO: 245651 - DNA, 1553 bp, Cannabis indica
ttgggcttaaaagaaaaaataataaaaaaaaaagatgaaataggctgtaatgagtatttaccttatatgtttgtgcttatttttagttttatttttaattttaccaccaagaggagaaggttgaaaaatattagaatatgaaaatattattggtgcttattagtaatttacaaagaatgtgaaagtctataaatatatagttgtgtagctattattagatatgaaatgagataatagaacttttttcaattagaagattaatgtacattttactattaataacatacattattataacacaactatgttttacttactaaatatactgacacatattttatttttataaaacaaatcgttcaaataattatactattttaattattaattaaaataaaaaactaaaatattaaataaaactaacactacgtggcttggcacgtaacaatcacctagtaaaataaaaagtattataattggatgtttttagaaattttttaagtgcaaataaaatttccctaacattaaattataaactatatttattgtttttattagtaaaataataataataaaattattattaatttctatttttagtaaaaatattaattaattaaatattaaattttacaaaatacaacataaatacaaattaaaagaccgtaatttttgtaaataaaatcataaaattatacaaatatttaaaattttgttatgatcataattttgtaatttttttttttttgtttatttttgttatatttataaaataatttcatcttaaaaattgacataaatataggacaaaattaatttgtgattgatatatcattgaacatggtccaactagtttgagtataagattgaggttggatggaaaaagcttcacaggtatatgttcagtcaaaaccctaagtccaaatcattaaatataacatattaaatatgtcttgtgtcccatgcacatttagaatgagcaacaacttaacattattcataaaatatgttagactagtcttctatatgaccaagaattcatgcattacttgtcccattaaataaagtcaaaaatacagaaatattgaaaacatatatggttccttttatttgaacgtaagcctcaaattgtgaccatatatacattaatttaatttactctttcttttaatttataatgttttattgtgatttcaaaaaaaaattataatattctatataattgaatattatttattatgagaagaggtttttagtctttagtagggttggcgatatggtgttaaaaatttatatgaaaatataataaattatatggacaattataaatgcggaattaaattaaacctatatgcttgataattaaaggattaaaatatttctagccaaattaatgttagtatggtatttagatttccaaactctttctaattctcttaattgaatttattattttcagagaatgagtagtgagcttagaaattagtatttaaatgtgagatacttcattagtatttctatcattgtcacaatattttgataattaattcaga

SEQ ID NO: 245652 - DNA, 1384 bp, Cannabis indica
ccaaaacttaaattaatattcctcccatcagtcaaaatacccctttttaaaacctctcaataatttaattcgctaattagaaatcgattaaactaaaattaattttaaattttcacgtgttatagaatgaaatcttaatcctccatagtccatacacaaaaaaagtactaaaagaaatccagctttaaaaaaaaaacagatttttctatagcataggagagagaacccaattgaaaccaaaactcattggtacatataacattattatttaggtcagtaaaaaaaagttccagctatttatatacaatattcctctatatatatacaaatgtatattcacaagacttaattattataattaacttacaattgaaagaggatttgttaagttataaatctcacctaaagacttaaatcttttgtgctttctgggaggcccaatctcaaatatggtggttggatcatgatcatcatcattggaagcagtgctaatcagatcatacggtgtcgtatcgctcatcgccggttgatattcgacttggagaagtgctactacgatgtcgtttcggttgctgagttccgagtcgccactactgagttggatgagttgctcggccgcgttgatttctaagtcggagaaaacaggcctagaagacagccaggatgatgaggacgaggaaatggtcttcttcctcttcttggttttggttttgcatgatgttgttgtttccttagccatgttgtttaactttttgaatgtagagagagaaagaaagataataaatataagtcattttgaaccatcaatattttataagctattgggcaagtgtttaaattttcaaaaatttattggcggactttaattacctcacgtatgattatttctaaaatagacaaaaatgctttttttttttaattaaaaaattatttttgatatgaaaattttgttaaattaagtatttttttataccaaatatgagaatacattgtttttttctttctaatttctatttatatacatacttttttcattctcaccaaaattcaacttctagagcatcatcatcaggagtagtggctccataccctgattgttgtgggattgttgagaggttcaataatctctttgacttttaatgaattcaagataagttgagtttagacatattcaatatctcttattacttaagtcgtttcgttgcattagagtccttgtatcaaatcatgtaattataagagcgtgtgatcaaaatattctaagaatgaatagggatcgaattcttattttttttgataatattttaatcgaattattatttttttattattttataaaattaatttatatttgacaaatacaaattataagatattattaaaa

SEQ ID NO: 245653 - DNA, 1174 bp, Cannabis indica
gacccttatttatatatctctatttatagacataggattttaaaatattaagtataatgagttgcccgggactcgaacccggaactagtcggatggagtagattatttttagaaaataaaaaatatataataaaaaacttgttgaaataattctccatataagttgacctgtcacaagttataattaaaagacagttagttaccacaaagcctaactaattaccggttagacatcaagatcaagaatcggttagttaatcctaactaacctactcagctacaacaactataaatagaaggactgaatgtagagaacacttactacttcaaattactcctctgaaatccagagaataagagatgaaaagtccagatctagacagagggagtttctctcgtgtttaaacagaaagaaaaagagaatagttagagaggaagagagaaaagaagaagaggatctgttagatcctgagagaaaggaaaaataagagagattgagagattgagagaagttgtacatacctgagtgaagaaatgagctaccagacgattcatgtgtcttagagcttaacaacttgatgtaacaattgatcttgatagtggattgtggctgatcttctctgaggtagctcaccaaggacgtaaccccaatttcaggggtgaaccttgtaaaaaattctctctgtgtttgctctctttcaccctactctctgtacttgcttgattgcttcattttgctgcatatttttctcagaatccagctcaagatctaagctggttctctcttctctaatcactctcttgaattttgctttgccctaattttgtgtgtgtccttagaagtctgttcagacataagcataattttagtaaagtaaaattaataataaaagcattatataaaatcaaatacatgtcaaattggtgctcatttatttcagtaaaggaaaggtcaaaattgaccttgtgagataacatgtgtgtgtgagttgtgtagggataattgtgtaaaatcctacaaaactatataatagatattatattaacgatctctccccaagtcgtgcttgtattttttcattgcacacggctttccttatgtatacatctaaaattcagattcttccctagacaaaactttgaatactcaattgatcaacccttactgcataaa

SEQ ID NO: 245654 - DNA, 633 bp, Cannabis indica
aatataatatatatacatatatgtaatagtttggtataagataatatatataaattaatgtaatatacctaaattatgtactacaaaaattacacatatcatatatatgacatttttttttttcaaattaatctcatttatccaaaagataggattgtttatgttttgtaattataatttgttttattaacatatttagtataactgaagtttttgtttagtttcattaatacaaactttttaatatcttattcaaaatacatataagattttagattttaaattattagattgggtctgaacaaaaatatatagcataagttttctttttacgataggaacgaactacgttcatagtactaacagaagttgattaacattaacgtactacttatactactaaaaaaattattatatttatactacttacaagttcaaaattttaagtaattatacaactatatttacttattttctaatatgtatgatcttttccaatcaattaagaacatgatgagtgtatatataacatataaaaatagctgaaaccaataatttatgtatatatataaaattaccttgaatatattgacatcatgtttcataattcttttgtgcaagagattgcttaat

SEQ ID NO: 245655 - DNA, 1885 bp, Cannabis indica
gtttcttgatgaatctactaggggcaaaaataggaaagagaaaggaagaaaattatttttcttattttgtcactttcttctcttaattttctacataaaaccaaaacaaaactaatttacttaacccaacattggctagctgtcatcacaagaaaaggccacttaatcccaatgtcaaaatgataaaaatgcccctctcaaaaaccttaactagcaaagtggcctaggggtaaaatggtccattaccaatacccagcctaatttcgatatttccagtgtctatctatatcgccctgctattactaagatactaaatcatattaaaatgtgactctatcggccaaacatcgcgttctactattaccggcataaaatataaaaaacatgaaatttcatatatagcataataaatacacctagaattcaaatatatctccataaattcataaatcatatctagaaatctaatttcataattaagccctaattatctactaatttatctattgagccctcatgttagactccaactcccaggtggcttcctccaccttaatgtttctccagagcaccttgaccaaagctatggtcctgtttcgaaggactttatctttcctatctaaaatctgaactgattgttcctcgtatgataaattcggctgaagttctaggttctcatagctcagcacatgagtgggatctaaaatgtatattcgtaaaatagatacatgtaacacgttgtgaactgctaaaagttttagagacaaggctagacgatacgctactagtccaacctttttgagaatctcaaaaggccctgtaaacctaaggcataacttgccctttttttgaaacgtttgaaccccttcatcggagacactcgtaggaataaatgaactcctacctaaaattctacgtttttgtgctttgggtctgcatagctcttttgcctactttgataggcaagcattctggccttgatcttttatatagcctcgttggcctgctgtactgattccagacctaggtatttcctttctctagtttcatctcaatgaattggagatctgctcttcctgccatacaacaatttcatagggagtcacccctatagtactctgataatagtaggaatgacaatttggtctatttttgcaggtcgggttgggcccccagactaacagggcaaatttgacctgaatgatttacgtttttattgagatttaggcccagtccggtacatattatttcgagtcgggcctgacgtggcccagtttcagatattaaaaaaaaaaaactaaatccctaaacaaaccgttcccacctccaacccgccactacatccaaacccacaaccagcctcacgccactctaggttacctacctctatatatatatatgttagtgttacatattttatgtatatgattaatggtttttttcttttctttttcttttgtggcttggttggttcctgagaaagtggctggtaaaagaggatgtttttgccatttattatttgtcgactagattattgaaatatatctttatagcttatatctaaaactcattagtcgaatattgatagtaggtttagaaaagccattataacaattttctagtcacaagagtacgctaatatctgaatagggctccacagtaaccattctaataacttaactccaatataagacctgttgctgactaataactaatagtttaaactattacaccacatactatactaaattattaccagcttctataaactggtcaacctttctgctaattcatttatctttaataaataaataaatatacagattaaaaatccttttgtagatgaacactggtgatttctggggaggcaaacaccacatcgact

SEQ ID NO: 245656 - DNA, 1296 bp, Cannabis indica
gaattttattttttgatgcccaagtgatatgttgacatcacctagtcaaattctttattctggtgaagttgttcagtagttctcaaagatttccctttttggtaaaatcggttagacccaaaacttcctttttttactgatattctaccttgttgaaagggtgaaatatcaaagtgtgaatttgacctgtacgtacgtacggaagggtcgtaaggtacctacctaccaagggtttaacgttaacggaaaaaaaaatcgtcaaatagtcgagatagaatcaaattccaaatacaaaacccagggccctaggtcacacgtcaacttgggcgatgggtgcttctaggggattgttttgatacttcaaaggaattcaaaattgtgaacgaggtctcttaccccattttcgatcaaaataaaaagaattcttggagtaaattttgcgtttgaggagcggaaacatgtgaacccgactacatgtcaacctaggcgcaagtcccactgcccatgtcaacttgggtgttggatccttgtgaccccttgaaaatatgatttactccccaagatcacttgtatcttccttgttgacacaaaattttgggtcggcctccccgagatcacttgtatcctgcaactattgttgctaactagccacagtttggctaagctgttcaacccggggatcagcctcctcaaggttttctaactctaccgtggctctccatatggaattcggtcactcgttttagtgccagaattcagtgtccttgggcgacgagctaaggagctggttttaaggcctccacctggcatctgggatgcaggtgtcatctcgtcactagttttagtaacacatacatgcccccagaggttggccagttatggggcttctttcaacacttgtcgatattcttgcaaccatcttggtaagtgtcttgagttgtggctctaaatgaaagcatcaaaatgttgatgcaaaaatctagacacagaaatctgatcacacccgctcgctagattggctagaatataatgagagttaagcataaataagagagacacgacaaatttatagtagttcatttccaatggtaatgaagttacgcctactttgtaatttttatttctcacgagaattacaagaaattggcttagtatggggcttaaatttctagagagagaaagtagagagatgctctaaccttatgcgtacttggaagaatctcaaaatgagctagatgagctctcatatagagaaagaagtcttattaaaatcataataataataaattataataa

SEQ ID NO: 245657 - DNA, 795 bp, Cannabis indica
cttacatatcgatccagtcatgcattaatctaattatacacagttacccttactcagggtcgacccttatggtgtgcaagtttgggctattgcacaggatccaaaaaaaataaagggtccaatatatttttttaatgcctttcaatctttttttttaatgaaaccaacttttttaaagagctaacaatttgttattggtcaattccatggggataatttgagaaatacctcttttgtgtatccattcatcaaaaataccctcatattatatttcattaaaatctacccacttttatgagtgagttgctcaatatttctcataacataggtgcacatgtcgttgtgtttcgggcacaaaactccgaatgacacgattcttgatgtattggaaagatcttttatggtatttcgattgatgtttcacgacgaaagtcaaattcgaacttcgtctagtcaaaaattaagttgcaaaggaaagtacgaatttgggtatcaaggctttaaatttcaattgactgacctcattcgatctcaaaatcaatgatcaccgctccaaaaaagatatgggcaaatctcaaccattcatcaagaaacaagaccggcttagttctagagttaagttcaagactaaaagattacatttagtttcaagggtccagatttgccaagaaagggtccagcaggtatgtggctttgcaatctatttcaaacatctaatatggaaactaaatgccaaattgctatgttatgctgggcaatttggatagcacggaacaacttagtttggaataaaaa

SEQ ID NO: 245658 - DNA, 531 bp, Cannabis indica
agtaaaaccaggctggctcgtgactagatgattcggagaaattaacaatatgatcaaaggaatttcaaagtcaaatgccagactcgtccacctttagtttgtagtcttttctcaagatcgggaccaggaatttcagacattaacagacaagagaggaccgtgtcgaagctcttcagtcaagattatgcaaagctcaatgtagttatgttcctgctgttgtgaaagtaaataaccgagagcaggagaaaccgcagagcaataagtcgtagagaaacaaaggtgcgatttttactcggatatagtaaatctagataaagatgtacatttgaaattcatttggtttttcatgtgcatataatcagaactaatttactagacattgcaaactaagttatagaaaatatctctagacagcattctgtacagttcggcggcttatctattattcagttatgatgtgaggtttttaatctgtaaacattacacaagttattgacaaattttgtttaatataaagtgttgaaatttaat

SEQ ID NO: 245659 - DNA, 1917 bp, Cannabis indica
ttatttgtaactggtctaaattggaacttaattttttatgacaaattaaaagttattcttaaataaaatatttttaaatagaaattctactgtatttaacttcaggcataaaattatttgaatttaagttatacgcagcacatagccatatactctctctaaaattccaattaatataaaattatcttattaaaattaatctttttgaaatatattcaacttccatatttgtaaaaatgaaagtatttgaaatttggtaatctaaatgtacaataatatattgggagattatattaggaagtagaattttatacttaaaaagtggacgattcgaatttatctataaaaaaaaaaatgattctattaactaattatgtaataaagagaaagaacgaaaaaaaaaaaaagataaggttgccaatagatttggtttttttttaaaaaaaaaaaacttacagaatagatgggtttttttttagtatgtttattagaaaagagaaaataaaattaaaaaaaaaaaactttattattaatttgaattgttatttacgattgaggtaaaagagccttatataggaaaagtgaaccaaagaaacaagaaaagagaattaatcatgagctagctaaccgaattactaacaaattcgaattaactaacaaaactaacaaattaactaagtagtttaacacgccccctcatgatagagtgtagaagcttttaacactcatcttagatataaatataatgtcattgaagtgagtgtggaagagagattttgttagaatgtctattaagttagttttttattaagttagtttttgatggaacatgattatgccattgggttggaggctttaggtgaaaaaattacatcatatttgggttcttaaagtgccattggagatgaccttagttataagaaagaaagttagcaagtggtcgagctgtgctattagttgaaatgactaaatcacatttgtagtctttcagatgagcaggtttgtgtattgatctgccatattttgatgccatgggacttttcgtagcagtgggaaaagcatctggaatgttagttttaggtgaagtattatttataagaagaaacatggtcagtagtagaataaaattgaaaaaagttatcaatgctactggtcgtattggagtgtttgaggggaaatattaattcataaaaaacaacatctcttgaatgaaagatataattagtttgcaagtctaccaatgtgtatgctttttcatattttctgaatatcctataaatatgcatggtcttgctcgaggagcaaatttatgggcagaagttacatgagatgcataagccatgcattcaaaatttcttaagtgagtatggtttggttgtttaatatgcagaaattcatatgaagttttgtcattgagtatgccagatggtgttttattaagtaggtaaatagttgttgttaccatgtaactctaattagggtcgaccttgaaatttagtgggccatagggaaaaaaaatatttttgggctctcatttagaaaaaaatgtggtatttatcaaaattgataaaaaaaaatgtgtaattttataaggggacaaattttctttgggcccctgagctaggtgggccctaggcacaggcctagccctcctatgctcaggaccggccctgactccaataggaaagaggaatgttggattgaaatgccaaggcccagctacattgaggatgtattggtgtttgcgttctacaactgcattttgttacagtcttcctacacaagaattgtaatgtgtagtgccttttctggtgtagaagttagtaagtgtcaattcttttgcattgtcattctaactactttaatgtttgttttaaattgaatattaacaaacgtaaagaaattttgtatgatagt

SEQ ID NO: 245660 - DNA, 1322 bp, Cannabis indica
agatgaggttccttctactccaatgaatgccattattattgccttcggtgatacacagtctcaggatgtgcaacacttggatgaccctaattattacttacttgaaaactggtaaagttcctgacaataatctcgaagccagaagattccgatactaaatcgctcgatatgtgatctatgacgacaagctatattgcagaagtttcaatcagccacttttgaggtgtatcgatggtgaagaatgcgattacatcctccaagatgtacacggaggcatatgtggtaaccatattggtggaaactccctagccctgaaaatcatgcgacaaggctattattagccaaatttatgggcagatgcgattaactttgcaaaaaggtgcaacaaatgttagcggattgtcacatatgtgaacaaactaccaagctatttaaattctatcaccagctcatgacattttacagtctaggacatagatttgattggtgaattaccaaaaggtaagagaggagtaaaatatgcagtagtggatgtagactatttcactaagtgggttgaggtcgaagccttagcgataataacaactatgaaattgcgtgagtttgtgtgtcgtacaattatctgtagatttggcattctgtacaaattattttctaataatatgaaacaatttgattgcaaagaaatgcaaaaattatccgaagatttgggaatacaaaaagcctttttcagcggttgcatatccccagagcaacggacagactgaagcagtcaataaaataattaaacacaccataaaaggtgagctcgaagagaaaagaggtgtttctctagaagaattaccgcaagtcttatggccttttaatacaacccctcagtcaatgattggtgaaacccctttctcactctcttacaggtgcaaagccatggttccagtcgaggtaggagttgggtccttacgacaagatgttttaaacatcgaagacaatgagaagaaccaaatacttcagttagatctactagaagaatggcacgatcatgctcaaataaaaacatgcagcctatcaacagcacataacacactattttaagtccaaagtaagagaatgaagtctgcgagtaagagacttggtattgagaaaagttatttcatgaatttttgtttaatgtaaaattttattaaatccagaacatatagttattcatgattattagactgacatgataatctgcaataaagtatacttacaccgtggataagtgttatgtcctttctagggtcattaacaaaaaatatgctagtatcggatgtatggaatat

SEQ ID NO: 245661 - DNA, 1004 bp, Cannabis indica
ttttgatttttttttctaagtgtaactctatttagttataacctctcaattagaatattattttcttagtcccaagtgtattattagatagagattctactgtatattaaaaataaaataattttagaaaatataacccaaccaaaagactttctcatcgtttgatcttaataattacaactaagagaaaagaaattaaaaaactatagagtatataagcctatataggtaactaagtaactaaccaaagggtatacctaaaagattaaacttagaaaattacatgactaaaacttatgttttttagaaaacatcaaacaactaaaattttaaatataatggtaagaatgaaaatgaaaaagaatgtaaatatatatggaaaaaataattaatttaatatgattagtggagaaaaattataaaactaataaaattaattaaaatatatagattaaaaaaattagtacaatttaattcttcagaataaatgaaaaacgttaatgttaagatacaaattatagccacctccaaatatagcgcaaaccagccactcaatatagcacaaactagctactaaatatgatacaactattaattgaaaaaataatataaatataattaatttgataaccactattaatttttttgcaagaaaaaaattaattgacattttaaatatgatacttataaattaactctggtgcaaaataaatactatatttataaatcacattataacttaattttaaggtaggaaaaaaacattgaggatgctttaataatggtaccatctacaatgatgacatgttttccagggaaaacgatattttaaccatgattttgcgatagtttgcgataaaacattacgaaacctttggtgagccataatttttaactttgttggtttgagatttattattattaattactttatttaaacttataggttttagaatgtgtagaacctagaatttggggtgtagaacaacaaattatgagatcgg

SEQ ID NO: 245662 - DNA, 1244 bp, Cannabis indica
gttttttagtcaatttttttacgatcgtgtgtatgttatagttataggatcatttgtaaatttttaaaacatttcaattagttcataatagtaaaaaataatatttacatattttgttccacacgactattttttcttatacgtgtggtaagtaactgttacaatgtacgtgatcataaaaaatattaaactaatatttttttttaaatatcgaaacagataaaaaatcttccaaaacgaccttttaagggattatctactacaaaaattttcaataaaattttactaagtaatgtattggaaatattttaacaatgtttaccctgtcttttttttcattcttttttcttttaaccaatttttaccctattctttttttttttttttttctttctcatatttgtttgtatattgttaacacattcctactttccttaatccataaaactcggcttgactttaattctatttcaaaaagttaccaatttgattgaaaatcacaattggtcgaatactactgttaaaatatcttctaggtaaacaatgcattttccccctaatgatggtgtaaatttagtacaaaatatttgttaccatattttaaattttaaacatagatttgacctattcatttggtaaaaaagagttttcaccacttaatataggagacattataactaattcgaacccttatccgttataaacctcactcgaatacttttgctcatctcaaattatcgaacatacaaatacccattaaactgtgttcaaaacacaactaatatttcaattccaaaactcaaacattaagcaaaatccaaaaatgtgttaatgcatcacacaaaatcactacaatcacaaaaacttcaaacgaacataaaatgttctgcatctccttacgaaagacgcccaatttctacattttttttcttttgtttttaatgtattttaggcgtttttcatagagagaggcagtacatactgggagagacgcctaaactccaataagatgatagaggaaattacactctatatcttgtttatattgtcttcttttattatgtacattcgaagatgaattgttctatttctatatagaatgtttgagtaagagtataaatgggagcccacccaaacattaggcagcttagattattgaacaaaattctcactttctaaggcttaattttttttattttttaaaagaaaatacctattttttttttctattatacatacataaa

SEQ ID NO: 245663 - DNA, 962 bp, Cannabis indica
gcgtgctatattatttttttgatctctcattattctttattaatttttttttcagttttattttccaacactttatctttcttttaattgagtaaaatatattatattttttaatttctatgtgaactatagtccaacaattgatatacaccatggtacaaaaaaataaatataccttaatgttaaatttatatagcatctcttactaagctctagcttaataggtatacaacaattataaagttatattacataattattttttcacggtgattagtttattcttttttattgaaaaatatgcaaccttgtatagataaaattagagacaaaatataattctgggtaaataataaaattatttatggtatataagttttataaaaaggtatatttacttttttgtactatgatatattagtttgattaaatagtatatttgtttaacaaatgatgtatctactttttgtactatgatatattatttgactacacaatatataaggttaacaaaaatgccacatttactttttgtacaatgatatattagagttaattattgtatattagtttgtttttggtatattaatttttaactaggatatatttattttgtggatattataatatttggaagaaagaaaaaaaaaacttagattgtgtatattaattttgctatatgatattagtttaatattgtagtatatcagttctatttactaaaatatatcatgaaggaaaaagaaaacttaaattattggatggtatatattaatttaagtcaatggtatattaattttttacaaaggaatatatattttgtttaccttgataaatcattataataatttaatttttgtttatggtatattaattttttaccagggaatatatattttgtttaccttgatataccattcaaataatttaatttttatttatggtatattaatttaagatta

SEQ ID NO: 245664 - DNA, 1272 bp, Cannabis indica
acatttgcctcgatacgtgtatgtacatgaattagtcatcatcacgatattccaagcatcacgcgctttctcaatacgagtgggattcacggactaagaaggtaaggttgtgtgtacgatgctatgtaatccaaaggtccccaaccttctgcattcgaaaacataaaaggcaaaaaggtctcttcattttcaaaattatccacatgttcatggtatactagaaagaagactgcaaacttctgccatcttcaaattccagaagcttgggggtaaatattattcatgtttccgtaaggatgacacgtggcgtttacaaagtaagattaactcggaatgacttggagtaaagccctttccaaagataagactagcccagacgaaagatgggcccgagcccctctaaagctcagaaatctcgcttctagaaggaggctcatccaaatcttaaagggtctccagtcttcttgagaaagaatatacgaagccctccggatgaacattgtgacgcatctggagagggtattccaagaggcacctcagaagcctaataggatgcgtggctaccctttgacacctggtcccaccgtatcagatcttgtcccctaatcagagcatgattatgcatgcaccaccaaaaagaaaacctcccttttgtcccacatcacacctttgacaatatagtacatatattcggcgcatgtaggacatctatcctagaccacgtggtccccagacgtacggaagcctttgcctcatgagccagaatcttgctagtgagctcaaagtcatgtatttcatgtatttaccccaatagtaagcctagttttacataaaaatcctagcgggtcacaagtatactgaatctagatgctagcctataaatacctatttaaaccttcatgcaagggggatgattaattcacttcacatcttcttaggtttctttttctctaagctagaataacctaagtgaggacaaatagcaagaaggtagagttcttaagcttgtaagatcccattataatacattcaagccatttggcttaataaattgacttgtggaataagattaattaacactcgaactacataaaatttctatctccatttttatatttatttaattaatttattaagctcctctttaaatcggttttgaaaaatatcaataaataataagaatttgaagacttataaatactcaaaattttatatcacactctataaataaaaatatatggagatttcagttttttttccctctctaaagtt

SEQ ID NO: 245665 - DNA, 833 bp, Cannabis indica
ttcaacatgatggttttattagtaagtacctgggtgttcctcaatgtcttggtagagttaacaagtttgtcatccattacttgcttcaaaatgtttcttctaaaatgaatattagaatggcaaaggttggtaaataaactcttgttaaagaggtggtccaggttgttccttcttatgccatgtcttgtttcaaattacatgcgtccgattgtaagagtcttgagggtctcatgactaacttttggtaggaactactaacagtaagaattaaatccattaaaagggttggtccaagctttgcaattctaaatttttttggaggtctttggtttagatatgtttaccatcataatcaaattatgcttgctaagcaagcttggagagtcatgtccaatccctcatcgcttctctctaagttgcttaaagccaaatattttaagcataatgatttccttaatgctttaaaaggacatctgttagttggaggagtcttctttggggaaggacactacgtcttaaaggcctaatttggaaagtagaaaatggtaagtctatttctactatcaactcaaatgggatccctattgtgaaatacctcagttttcttaataatatttcctcctttactcatactgttttttttattgatgataatggttgttgggatgttagtaagcttaatcttttctttactcctgatgtagtggatgtcattgatcaagttccaattgatctttcttctgatgatagtctcatttggggacatcatccctcatgtattttcattgtaaattccacctatcacctggctaagtcttattctttctcacctt

SEQ ID NO: 245666 - DNA, 712 bp, Cannabis indica
aaaatatatatcatttttattctcgtacaattaatatatattttgttttaaatatcttgtggatggatgcaaaacacaaatttattaagattctcttatatcatgacaaccaacccaaaagatgaactccaaccctaattgattggaagatgaactcaacccataataggtaggtatcattatctattaaccaaaaaaatttaataatatgtaggtcccatgctatatattttagtgttgaaaattgagattaattagcaattgtatgaggtgagtggaatgaggatatgtcacttccattacattttaaattataaattgacatttattaaataaaaaaattataaattgatataaagaaaaataaaatattctgatataaattaatcaaattaataaaaggtatttatattaaactttaatgaaagatattaaaaatcttttatcattaaattctgttgtttgtatctcatttgtattctgtaaaattaataaagtaacttacatgttaattatttacactttggttcacaaagttagtgctctttgaattaagattgatccctcttatgctcttcaagctatattgcgcttgatgtgcctaagcttttataattaatgtttaatgaaaaataataaaatgaaaaatatttcccaaaggtaccaatccagtaactttgaaataatttattttgttttttacattatagtg

SEQ ID NO: 245667 - DNA, 905 bp, Cannabis indica
gctcttccatgtgaatcaaataagccaaaaaaccaccagacagagaggacaaaacgcaaccaaaacaccagaaataaagaatttttaatctcagacaaacaaaatcagaaacaaacggatcaatcaaaacaggccaaccatgtcatttgacaagactcagtttgagtaggattaggtttaggaatatttaatttgttattatcagtttcttatcgaccgaagagttttttttttacaacaataaatatttaaacaacgatcttttgtataaccattccacttctactcaatagtagaagtaaagatattccaatactctctttgttatagggtttttacattttaagaaaaaattattacagtaaaaataagattattttctattagaatatcttaaatccgttctacataattttccaaaaatataatacatcaaattcctaatccactcaaacaatgtaattcacttaatagcaatctaactagatattaccatacataaccagtcacaatataaataattatattctccgctttataccaaacacttcctaaaaataaaatcttattcattttccattgtccccaagtaagcataccaaaatattaatggtgttatcccttctctactatttaatgactgaatttcttcactcaaaacgaataaactgacattcataatatgataggggcagacccacataaaggcgagggagcgcactcggccccctaaaaaaatacagaaaaaaaaaataacatatacattttagctaattactacatatatttataaataaaagttaaacataaaacaagttttagtataataacaaaattattttatgtatatactggaggtcataaattttttattccaacatgtttactttagtatttgtatttta

SEQ ID NO: 245668 - DNA, 1726 bp, Cannabis indica
gatgctgtacactactacactttgtttgttttgcagctccctcgtcggttgtcttgccattagcaggtaaatgtttgtaaatgattcttattgcgagtgccatggttacatacacgtgtattgtattgtgatggttatgattattgatatcgtttagtgtggtggtgcttgttctatccgttttttgatgttatgtgacttggaagtattttatatgctttgttagtgatcactcatagtagttgttaattttgcacctttggccaaattgttttatgtttgattatgagggatatttttgttaagacgttttaggtttgattatgagggataggttttgtaggatataactaggctgtgttttcctggatatttggactgctgactatatcaaacgagtgttgtcattttggaagctatatgctgctattccaatgcagaccctgattcaataaatggtggtaggtactgtggaaggcctttccagtttgcaagcttttagtgacgttctttagttagttggtactaatgccatgaactaccacacttttttaaaatagaaggaattttgcagctattgaataatcctgtcaaagctccttgtgttttctcaagtctttggtatatcgtgagatgtttttaacctttgtgttcttacaatggtattctttcacttgaatttgcatgcgttaatgaatgctttaaccaattgtgccaatgcaatctttgtttgttctgcttttgccaatagacccaatactttgtggaaggacttgcatttaaagctggaacttcatttctgtttaatctcagtgtgatgatagcatctttcagttatgattttctaattatgttgtgcttcattgttggtcattgattcttttttagaaaacattgatgtgttttctctttcagcttttctttccggcagcagtttggataacgctccaatcaaattagatcctttgataataagcgggcataattccagctcaatgacaaaattcctaaagcagttggtttgaaaaaagtcctacgtgtttggatgttatagaggttcgaaacggaaggtaaatggtttttaagatttatggacttgaatggaacagtttaagaagaaacaaatcataaatagcgatacatcaatgaacacgaacttacttttgggtgctataagaggtgattattgtatcagtgactgtcaataggccttagaaatctgcttttaaattttgaaaaatgttgaaagagatcatcatactaataaagtgggtgtaatagaacttaacccacatgtacttctatcagttcctgtattagttgtggtgctcattaccactagtcttgtttaatataaatgatgtgtttttagttttttccattttgtaatcaatattatttgattttgggatgttgtggacttgtggtgagttttccaattttaacagtgaaatgactacaacggtgaagctcagtctatgtgccgacatttaaatactaatttgagcattagttatggctcaactaaggcatgttgcagatgaataaaagttaagcatggagttcttttgttttgttttctttttttggtcttaaaatcaatttctaacaggatgtggacttttgatatacaattatttaaagcctagtatagttacaatatgataagttaacaatatcaaggaggaaaaggaatgcaaacatacaacaagtaatagtatgaaat

SEQ ID NO: 245669 - DNA, 1769 bp, Cannabis indica
aaaaacaaaaaataaaaaataaaaaccaagcctacatagtaggagacttggacagttcttcttcttctgctgcctcgacatcctcttcttccttcttagtcttcttgcagtaggcaaggacttcctcctcagactcacccaagaaacttgtatccatccctggatttgccatctaggcttggtagatgaaacgtaggccaacaacgttgcatcgttcagtggtttcagtttctttcccatcgagcgttactttggctgcattaagttcctcctggagtttttggcatgcatcatccttatcttttacgtccttcttcggagctttaagctcggccttgtgagtcttcttcacctcctcggcttctttgattaggcgagtgttttctaacttggcataattccattgcttggttacaacctcgcgctagcctatcaagttctgaatctcgctctccatatacttccttttttccatgccttgacattgggcgacaaaggagatgaaagatgtctggaaaccaacaaacaaaaatgcatgagtattttgaaggatgttgaaaaaaggaagtgagcagataagggtaaaggaatttaccgacaggctatgagatacactcctttcgagcatctcctccagatccccattaatgattaagtcccattcatgggggaggagagccttgaaatgccgctaacaagctgcacaaaactctgcagtgtactccgggacagttttcccagccttgacaggcagagtttcgagggcttggctcgaggaggcggaagcttgagtcgttttgggaataggctcatcgatatgcacgggggccaaaggatggatcggagcctgactctcagttttagggatcttgaggttaacagtctgagaggctcgcttcttattagcagtagtcttcttgggtctttttaggggctccacgtcgacatctaatggagcctccaagatggtcaaacctcttctttccctttttgtgaaagagaccctcgagattcatttttgcgagataagataaagtgttagcgtttatttaaaaataagtaaaaggagaaattggggcataatttcctgcctaaggaatttgccataatcataagaagacgaagaggacggactataatatcaactaaaatccctacatcctatgatcctgaatatatcatagattagttctaaatcccaactcgcatctaaaagacttgccctatctagcatgatcctgtactgctcggctatcccgtagtatgagtcagtacaactgatttggacatggaactttgggtaccaattatcaaacctatgtgcaatatgatctatgagaagggaattccaagtgtaaaaattgtaatgactatctcaaaatgacactaaggtgttacgctcgaccctaagcattgtgagtgaccaaccacattgattacctcgggatgctccttcttcggcttcccgaggggcgacgttctgaagataatgcgctcaagccacacggtcctgagcttcctcatcagctgggacaggaacctactgtcaagaagaatacttaggatatttataatcacaagtaaactccttgtcagtaaggagacccacaaacctcagattgacctcgttcaagaggaactcagatgaccgaagaccaaagggaagacccatcaggagcctgcgacactcaaccatctcaagagtcaaaactggtcttttcgaaacagctgtcgaatacaaaagaaaattaaagtcagcaaaccaagag

SEQ ID NO: 245670 - DNA, 1581 bp, Cannabis indica
tgaaataaagatgtaagaattacgaaaatgaatgacatagcaatcttaccaataaaaggaaaattatttgtcacctaacttgaccaaaaaaagactttacaaattcaaatttaaatatacttaaactattttacatataaatatgtcattgagttcagtctcactttagcaaaacaccacacacacttctaataaaattttgaaaaattatctcatattattagtttttttttttttaaattttacagtttgggttgttctgatggtttctccagtaatttttatgtgggttgctatgtatattttgattgcaatttaagttgctctattagttgttacgtgggtttctatgtaaaattctatagaaatataaaaaatatatatatatatatatattttgaagtgtaaaaatgaaaaaaaaaaactccaaaattttttatatatgctctatgtgaaactcattgtaccaaagaaatttttatgagataaaaaaacagaaaaacaaaatgaaggatttaataaccttttttataattaataaaattttaaaacaatatgatactaaccaaaagaaaaagtaacattatactgccacaaaataaatatatatataatatgggcacaaaatacaaatatataatgggtaccaacaaagatgcacataaagaaaagaaaatgaatattacatttacattcagtaagaaatgagaatgatgaagtacccttgtctatgtttgtctatgtttgccttaagagtctcacattgtcaatggatttattgaagtataataataaagatgggtaaccagctgagggacccttgtcccttgtaatatagtgaattagtgatcacttattacacagagctaaaatgccaactaagttcagaaaagcagctaaggcagttgaggatgttaaggatgtagaatcaacttcaaactcattggaaaaattttcaaagtcgacaccatctacaagaggcgaagcacgtcctttaaatttctcttttaatgggattagatcaactttccacttcctaaagctactcccaaatatcactacgttttctaacgtggcttcttggttttcttttgctagattcacatacaatggacaatcacaccgaggcatgaagaacactgttggtttattcacctttcgccctcctttctcattctcccgcaacactttaaaacccatatcactcaaaacttcattctcttcagcactcagaattggatcaaatatttctatgttaccattaaatatccaatccaattcttccttcaacagaagtgccaggcttagctgcaaccttgattcttcttctttttttatgctcccaatacaatatatcaccatgtctatcttactaccattggtagaattcacaagattttcaaaacgtagtttaatctctggagtttgaattatttgatctaaaaacttgacaaaaaatggcaagatctccggtttattcttattttgttgcacaagtgactttattgttggtggtgtctcctgagatgagttagatgacagaaataattgagagagaagaatgccaatgatttactatta

SEQ ID NO: 245671 - DNA, 1577 bp, Cannabis indica
ctcgaaactagtgtttttctcttggccctgcacttctcaaagacctcccctgaaggagggtacgaggcaatgggaaaagggaaggagatgaaagtcagactcaaagtaaatgaccgagaatctgagccccagaattcccagctcatttggggtgtatgatatatctgattgccgatagctacaacatcctacttccattcactaaaatcattcaacccaacatgcaacaaaaatgcgggacgtactcaaccaaagtttcctcagagagaaatgcgttggtaaggaccaaagtaaggaaaatgcttaaggcaatcgcagacaatgctcccaaggcttgagtttgtgaaaaaatagacccaaaaggggacagtataagacctcgtttcatggagaggggccatctcttggccagctccgaacaaacaaccttctatcacggcccgaggaaaggaagggccaaataaaaaacagttcctgaagcaaccaagagatgaacaaggctaagggaaaaaggttgaaacactggccgttggaaccagatggtttgaaaaatgcaaccagcccctaaacagcctatcacaacaagtttctaagaaaggaacaacaaaaaacatcctattcatctattaaaagccccccggcggccagggcaaagttaagtgtctccgcagctaaaaaagtgtagttaaggagagaaatatacaaaaaaaagagaaagtaaaaagaaaaaaaataaatagatttaataatgggccgactggaggttcatggtttcacaccacctaatggagaggaaggacccacgccagacatccactccactgtcttcgtgtaaaagtcgtgaacgaccttcatgttattgatgagcaagcttggcgggcactttcctcctccaactactgattggcctgcagcaggccctcaatttggaacttggcgtctgtgagctcagcccgaagggtctcgttgttgatgcccaggtcacgatttgacgccctgacccgctctagttctgtcactagcgcgccaacctccacggtggccctttctgccagcaaggccgcttgttaagaaataaagccaagttagaaggttgaaacgctaaaatagaaaatagggaaaaaataaaaaagctagcgtcttgaagacttaccccaatggcttgccgctttgcgcagtgaggcagcgtgaaaacatccgctctactgcaggatgcccaagtctccgtgggcaattttgaggcactcctggccacctggtccaagagctctgtagcaaaaggagtagcctcacgccccagcatgtaggccagtcgattctccagggcctcgacctctagaatctgccatgctggaggtgctgcgtgcatgtcctctgcaagctctgccttgcggactaccgatatcacggctgcccactagcggatttgtagcttttccatctccagacgccctttcagggccttgttcacctccttctccctctgcatttcaagagggttaaaagggactgccctcctggggaagtcgaacaccgcagtaggcattctggatagagcctgggggagagccctgggc

SEQ ID NO: 245672 - DNA, 720 bp, Cannabis indica
ggataatactctccaatttttttaatcagatttgcccagataatgttttggggtatatttagacttttatttttattttagctacgctactcttttgagcctttgaaatgtatgatttccatttgacattaaatccccaaacaaatggacaagtcttgtctaatttttccaacttatttttttccacactacaagaaaatattaaatggttaaggatggaccataaccaattactttcaagtttcaccgaccctaatcaataactcttaaattgttattactaccacttgcttctgacatcaattgaaagatttaaatttcagtaaatgattggtttagttaggatcattctgtccaccccaaatcagaattaggaacattaaaagcagagcgaccaatgtcaataccagttaggtaacacgtccactgtttcattacctgcttaatatattatctacagtctactaacaacagctgagattagtgaagtggttaagctgccataatggtatcaaagctcaaaagtcaagacagaaggggcaaacaaaactaatacatgcacgatatatttagctagcttctactctattacatgtaaaattttaactagtgaagattctagtagattcatatattgcaaaagaagtacactaagtcaagcttgaataagtaaaacccataacagtggttgagaccattattttcaaccagtaagcatcc

SEQ ID NO: 245673 - DNA, 902 bp, Cannabis indica
ccataatttgatgggtaacacaagctctaatgatttggttttctacttgattatggagcatatgtatgcaaattaaactcccaattatttatgacagtattcaactataatatagccaagaggtgcatagtaggatgctgaatcttattcatagaataacaattaaccttccacagcatgatggtataagaagaactcgattttccccaacactatcaacatccgttgtagcactgaataatggagataatggcaaagaatcccatgactgactatcttgactacaaaagcgtgcctcatgaactatgcaacagtgatcaacaaagcatcttgtccaactagaaggtacaccagttgtaccatccagcacaaacggcgattgttttgtccaagtgccacagccaacatgagaaaccattataatccctaatttgttagattgctcattctgccagttagggcatcccataacacctaaggcaatctcaccatcaactacaagagccaatccaacctgcaaaattagggcattttctcaaaaatgagaaaaataacatgaaatcaataattaattgtgtaaaactaattaaaagaaatctattaactatgatcaggtagaattgacaagactgcacagccaatttcgcacaaattacaaaaaattaaagcatctaaatcagaaacacataccacatacaaggcttcacttccttttagaaaccctcgtgtcccatcaataggatccaatacctgcattgacatcctaggctaagatatcaaaagcatacatctcattcgtaaagcttaaaatccaaagaaagcactagaaattaaaaattatggctttgatttatatcgtacctatgaatatgaaagcataaaaaatttggtattaaaaaaca

SEQ ID NO: 245674 - DNA, 1335 bp, Cannabis indica
catttaatagtaatccaatggcttaaaaaatgtaactatgatggttacaataaaaatgtaaccattgaaacctcttccatagatttatatatattaaacttggctgttattaattaatctcttttatatacattaattaattgtttgtatgtatatatatatgtagtgctatgtttgcaaaagagttggtggggaacctgaatctatgtagttggggtttgatgattaaggcactctcttttgcattggttattctttgtatgacaatatgtattatgtataaatggcatcaatcaaatttatgatctcgacatcgacaggtaatatataccataatataatttattattttataattaatttgtttgtatttttaaattgaaataaaagacaatatcaaacatgttctaaaacactacaatataaaacacaatttaaaagaaattagatctcatcgctgcttgagttcccgtgaacccttagatctcgtcactaccttcaaaaccctaatcggtgacgaaaaaaagaagaagaggcataagaataagtgatttcctttcctttaagaataaattcatttgttcaatgccatagccatcaacaattttcggttgcttcaactaaagaacaacctataatttatttgttcaattatctttttaatggagtgttaaaaaagtaatttattgctatattttagtagtgtactaaaaagtgtactaaattagtgaggtacatgcgagtatatattaataatgtgtacacaaagtcatagacatcaaaagctaagaaaatatctccatattgtatgaataaaatagggattttttttttttaaaaaaatccacataaaactcatatagcaacttaaattgcaatcaaaattcacacagtaacctacatgaaattactagagcaaccaacgaaataacccaaccgtaaatttaaaaaaataatatataagataattttcttaaattcatttaatattatatattgaatatatatatattatttgagacacagatgagtataccattaacattaactaaaaattcatttagttataaatttattttattttttataacaatatacttggactttttagttggaatactatatgaataaaataattatataattttaatcatttagtaaatttaagatttcttatagtgcaaatagagataatatgtcatatgaatatagttgtcaataatatgaaaattttataaattgttgatattaatattattatatatttttttcaggttaaacaaaccttatttaccaatagctgcaggagaattgtcaattgaaatggcatggttt

SEQ ID NO: 245675 - DNA, 923 bp, Cannabis indica
acaggtccaaaatggtgcttaaactttcaagcataagatactctaaagaaaatttatctagtgtcttctctagtgtcacaagagagaactcaaactttgatataatagcaacatggttttatagtaggtgaagacacagaaaacagggttttttttttctaaatgtatgtaatttcttatgttgctattatctgttaataataacataacaatcttaggttaattccataacaattttattcattttgctaagactgtttcctgtctttttcttcattatttctcagtatagaatttccaatataaggtacaatgttacaagtggtgatgcttaccctgcaccagatgaatcagctccagtttacataacagtcggagatggaggaaacaaaggtggtcttgctgaaaggtaaaaccttctctttcttttttttggacatgtatattacataaataggaaaattctatgatagagaaccactcttgttcctattttttgcaaatatgtacattgtagttataacaagcattccacccatttttggaaaatctaaaagtgttcagttgtatgtgtgtttgttttgtttataattgactgttgtgaactttgttttcgatattgtatattattcgtaatttttttcaaaatgcataagatatctactataactataatgtgaaaaaattagattattataatttcttcaaaggttaaaaacataaatgctcaggacaaaagtgacaaccctgccataatgggtttctatatatatatttatatatactatgttattctttcatggaaattcatggtgttgaaagtatctctacatgctgtagaaaagagttggcataggaattctttttttagagagaaaatttggagaaagttctttttaacaaatttggtaagaaattttttt

SEQ ID NO: 245676 - DNA, 829 bp, Cannabis indica
tcaaatcttctttctgcatccacatacatcacattttattaatttaattaatgaaaagtgatcagttagagggtaacatatatatatatatatatattatatacatgcctgattcaagagacctagactcaatacttttacaccctttatctcagcgtcaagtatggctttctcaatcaaattgttaacggatgattttggccatggtagaaaatactgaaatataaaaatataggcattattatactaatttaatagtatagatcatgattaaattatatattaaagtaaagtttgcgtacttgtatcttgtacttgggtatagcccaagtttgcagtgtgagtttatgaaaacggtggctctcaaccacaaaagtacgaccatagatcccaatcattagagttgacaatgtagtgagaggccacatcagccaaagataccattttgaatttgaggaagagtgatgaggaatagaggccaaccctgcaaaccctatttgcatataatatatggagtcgggtgtagtcatatgtgttagatacaccacacttggtaattcttcttttcttttcagtgatacttgatacaaatcctccaacgatttgtcaactgttccatagatgtagtcatacattggcatgaacaagctataattggttcgaaactgagtgtggtgcaacgaatgaaacctgcacacacgatatgtacaatacataatatcattcaaatataggaactttttatttaaaaaaaaaaaaaaaaaataggaactttgtttggtagggggcatcactttttcagctcttactgtagaagtatttctcaaat

SEQ ID NO: 245677 - DNA, 1861 bp, Cannabis indica
atatatatatatatacatagattcacatctccaccttccatgtgtgctcaaattggttttagttagtgtttcttgtaaatagtcatttttttattttttttcttttaggtttatcttaatgcatataaagtttgtcatcgtttgtgataaaaattagatgcataaatatttatacaatattatattttaaattatattactaattcataataaaaattttaacaacttaaaaaaattaaaattatttaaagactttacaaagtacgaattagttttctaattaaaacaaaaaaaaaatactaaagtacgttggctaaaaataggaagactctaaatacagttaagaatatttttttaaaacctcttatttgagaaattgaaaagtgtaccaatttgtgtagtacatccccttaaatgatcattttggtagattctcttatcttgttcggtatttataaaagttttttagtccatttgattttcataattaagttcattttaacttgccaaaaataaaattttaaaaattacttgccacgtgtagaagaaaaaaacaatcgtgcgtgaaacaaaatatttaaacattacttttagcatttataaactactcataattttttgaataactataatgtacacgatcattaaaaaaaatccactttaaattattatcccatgtttagccatcctaaacaaattctaaagagaattaatacaacgctagaataaataaataaattgttatagtctaaatttttagcctagaaaatcgagaccaagcttccataagaatgacacgtggactcacatcccttgaggattgctgaaaatgtcaaaaaaggactccttgagaataaacctcgcttgaatcaaactcgcgagatgatgtgaccatgacagaatctagttgcattattacgcctcgcataatataaaataagcaggaccaagaagggattatacaggtcgcatataccgagatatatgcgatggctaagtagcttctcctgcgacttagtaaagatcatttcttcatataacgaattggttcgaatgacccaacgtactcggtgactcgataaggactcgcatgtccaatgttatcaaagctgataaggtgtccatatacgcgactcgactagaacgcatataccttaatacgaggtccgttaacctccctttgaatgataaatcgcaccccaagcctgcgagcttgtgcaagaatatgaacatgcaacttgcgctatgaaagtcgcatacgttgctgtatttagtgaaacggatttaaattgttcttcatttattcttttacgtttcttataatttaatgttaatatttaatgtaaaatggttttataacgattaagttccgtgtaactaaaaaggcacttgctttgtatataaaggagtgatccgacatgaataggacaaaatagaaatcttttacaacagtggactaagtagaccgtgatctgactgaaccactatacatctttgtgttcattgtttttcctgctcttttattgtctgggcagtcttgtttgaatactcgttgttttaggctgagtactcattactttttcattaaatactaattatttatttttatttagtgttgtttaaattcttcccacaatataaatatgggttaattgcggtaaaatcctcaatagtttcactctgcttgcccctaaaactcaaatttgggcggcaaaaccaccaatactcgtgttctgttagcaatttaacatttttgtgcattttaggtattaagtgacatgttggattgtccacgtgtgcatttacgtgaacacagtgtacacatgacacaattttattggtctacgtaaaaaaattattt

SEQ ID NO: 245678 - DNA, 1161 bp, Cannabis indica
ggagaagaacaaatgatttatcaattcatggtgtccctcttagagtcgtatccagtttctcttttattttaatattttaagggaaatgatggttatgtgaaccgactcaatcttttgcttttaatattttaagggagatgatggttttgtgaaccgactcgaccttttgcttttgatattttaagggagatgatggttacgtgaacccacttgaccttttgcttttgatattgtaagagagatgatggctttgtgaatcgactcgactttttatacgtatcttttatttgtttctctatgcatgctttatgacttatttgtattttgaggagcatcccccttcttattacgagtgttctttcttatggaactatctttaggcttttactattttcttggaccgttgggggtagccaatccatgtagtcctaagagtttttttttactacttcattcagtttgaaaatttcaattattgacaagtatagtgagcaagtcaaatagacatgtgctgagtgattaatgtcatatgtagagtaaaaacttaacacttcattgataaggcaaatatgtgatcgcatgaatacatatgctatgtttggaggtcaacctaagtgctctctttaatttagttcaatgtactaaaggtaaacttgctattgctaggaacactttcccatatggtggaactttactttgaggaacatctttgatgtttgatttttacaggttgtagattggaggcttcacttgaatgtattggcttacaagtgttagagtttctctttctaaattgtgtcaaacacttgctaacaagataatttcttaaagttaatctttattttttagttcaacatgcgtacaaaaaggtccttccaagaaaatacacaggcaaaggtgtacattacttggtgaattgaaagtgactaagagaccataagtctgctcgatcactttgggggggcacctacatcgtacagcatcgaacaagcacagctaaaattgagcaaaatttaaagctttgttaaacaaaaattgaaacttaagtaagtgtgaatggcatacttcagattagacataaaagtgtaagtccagacacctacatgtctaaaaaaagaagttaaagcaatgattaaataccgtctggtcggtcgtctgttc

SEQ ID NO: 245679 - DNA, 2248 bp, Cannabis indica
gatattttttaacaattatacaccttaaatatttgtacacattaaatagtataaacaaattttaaaaaacaaatacacttaaaaactacgaattttgtttacagaaaacaacaaggacatctactacttataaatttcaaaagcaatggttgactaaagaaacgaaaaaaaaaaaaaagaaattactaaacaaaatagcaattttatgacaaaattaaaacttagcaaaacataattcttacaaaaaaaaaagaccaaaaaaaaacaactttgaattggaatatagatatagattctttttgtggcacacaaaatactatgtttagttctagaaacatcatttatatttataataatatattatatgaaaaaattgaaaagagtaacacctgttgatagaaaaagaaataatgtggcacttgagtgacctcctataacatattcccaactaagtttttttttttctttcataaatactttggtctttcttttggttgggaactcttcattattcaactagtctttttttttattctctttttgagaaagcaattaatcatgttttgtaaggcctaaagtccaaatattagtttatttggtaataaaaaaaaagtggggattaaaagtaaaaactgaatcatagcaattacgaaaccatggaggcatatgtactatttatgtagggtttgaactttgaagtgtatctaactgacacaaaactatttacagcaacataagagatgcaacgtgaatggtagggtcacttacattatcatataatgtattatatttgaagtccggggtccctttcggataacagtatcaattatcaaatgtcgaaaaaaacaatcacaaatgcatatttctcaacaaaatgacaatttatcaaaatgtgacaatcttatatccaaaaaaagattaaatccagattaactaattttagcacttccacatcatgaaaatacacattgaggtaatatagattaaatttaccgctttttgtcaattttagataaataaaattcatttccaccttttcaatatctcgaaagaagcttacaaaatacatttttaagagaaaaaaaaaagaaagaagcttaaaaatataatgataaaatgtgaccggccagtcaaatgattttaaatgagctttttgtccaaacattaaaacaagcatagcctaatttattgttgcttttactatattaaaatgaaacatagaggaccataataagtacacattcactaatgttaagtttatttataaatcaaaacgtcccactataaaaataattaccactcactctatgagtgacacaaaatacatgctacatttagtgggacaaaacggcaacaaataatatgttacgacaaacaagtatacagatgcattaccacacacgacttaggaaaaatgaggagagagagagagagagagagagagacatgacaaagtgcaaggcacttaactaaaaagtttagggttttttctgacttattataaatagtccctagtaaaagtataccctatcagtcttactaagtaagacacctagagtgcactatttttcactcattcttagccattttattagatgaatcagtattgattttattaagttttgttcaaatttgaagtgttttatgtagttgtgtagttttgagcttttaaaagatgataatactatgaatttagtgcacaaaaataataataatcaaaatatatgttaaagtcaggaagcaaaacgtgcacgaaagaagtcaagaattggcaatactttttaggatatgtcgcctaggtgttgggcgacatgtcgtctgacttacaaaacgtgaatatttaggcacatgttgattttttgaaaaaaaaagatgaacgttgagaaaataaggttcaggcgacatgtcgcactttcacgaaatagactaatctttgcatgtgttggataaaaaagatagaggatcccaaagatatggtccaagcgacatatcacctagccatatatatcgtcttatacagttttcaaatttaaatcctaattcgaaatggcatcattcctatctttttaagcctatataaataatgatgtaattcgattttggacgataggagagaaataaaaaaaaactttgaaattagaaacacattgaagagcaagagaaaagagattccaagcaatcatcatcaactatcatcattagagtcttcttcttcttcttgttcttctccttctcattttccttctcc

SEQ ID NO: 245680 - DNA, 1378 bp, Cannabis indica
aaactttgttgtatgttgatgagatgtaaaacacaattgagtagtcctttaagaacaatatcgattaagtcttcattgttgtttttttgtatatctatataataagatattagtctccaaatataaaaacattttttttctttttttaaataacaagatcatgttgatccaactttcattaacatgtatccaacatttttagcacgctttgcaaataattagtaatttttttataataataattaaattaaatttcgggaaagtttttataaaagaaaagaaaaaaaaataaaaaaaatgtggaagttggtattcaattatatgacaaattaatgatagatattattgctaccctttaatattgctatcttcttataaatcatggtatataattcaatttaatactatacgtctactaatttaaaaaaaaaaaacccattttttttcctataaggaattatgcaattttattaataacaatctgctaaaataataaatacaatataatcgggacatattttacgttggaaacatgaccagaattaaaattagaaaaacgagtcagttcatcaactacttgattcccgaattatttgacaaaaaaaactataataaaattaaaagaaaaagattatagcatcacatttaaccttcaatatacttatattcagttttatccactgctcagaaggcacgacaatagaatatagaaattttgcactaggtttattcaacctcgtagattgagcactcaaattttataaaggtacgaaattgcactactaacaacactttcaatcacaaagaacttcttattcttaactattaacatcgatttgatgacgagtcaacgaagaacaataaaaatgagccaacaacaaaataaaacaaaacaaactcatgtcacaaagataagacttaagacactcaaaaaatgtcacagagacaagactaatcacagtagcaaaaccacaaactatgaccaagccatacctaagccaaagagacgatccagcctatctggagcaaaagacaatctctgatggctaaaaatttaagaacgaaaaatcctaataaacgatttgataataaaagaaataaattctaaaaaattaacattaactttttaaactttattttctagttttttatataaaaaaagattaatatgaaaggacattagagatagtatcatgcaatttaatatcaaatcaaatatattttaatttaataataattatagaaattaactaactattaactcaaaataggtgataaaaatagttgtgaacttgactcgccgtcgccgccctcccaaccgactcagtcgactcgttctgtttaatatttggctaacgcaacgctctctctctctctc

SEQ ID NO: 245681 - DNA, 714 bp, Cannabis indica
tagggcataaaacccaacagtatggcctctcaggccgaagcatcacgctcatcgggtatataacattgcccctctccattggacaatatccaaccaccagaactctgatggcccagtttgtcgtaatcgatgttccctcagctttcaatgccatgatagactgactagacctatacaacctgaaagcgataacatccatctaccacctttgccgaaaattcttaacgaggcatgaggtaggatgttgggaggagattagcaatctttctgtcactattacaacttggccttatccaaagcaaagaaaaagaagatgcacccacgagattaggagcatacaagcttcgtgacagacttaggcctgtgctgctacaaagtcacacccttcaaggctgaagaatgcaagggccacgcatcagaagcatatgaacaaaatgttcaatgatcctttcagccgcaacatgaaggtgtgtgtggatgacatgcttgtcatctccaaaagggttgggaggcatatggaggacctagatagaaaaatttcaaaaatctaaaaccaagacaagatccaagcccttttcaacatgaagtcgccacaaatatcaaggaagtacaaaatcccaacgggatgcactactgcactaagcagacttgtgtccaaagtatacaaaacaaatgtgtacccttcttcaacatgaagcagaagcaaacagcaaa

SEQ ID NO: 245682 - DNA, 1797 bp, Cannabis indica
  modified_base (50)..(50): a, c, t, g, unknown or other
aagtgaaagccatggaaaacctgcaacgccaaggcctgcagttgtccgtnttccgtcgtgatattcaatttgagcttgcttgaaggacaagcgaggcctcaaaccctcagggggtagaccagattttgtgtgtcgtttgaactatgatgatgataaaccaatcattcaaatgagaagaagcaaacaaattgtaggaaaccgcggaggaaagtggatattgagaaatggggaaatgggatgtgagattaggataatactaatacaagtttaatttggtttgattaatgaaattgaaggaagtaaggaaagtgtcctatacctcgtgttctgttctgttctttttttttttttttttttcgtttcttcaaaggttgtgaacgcgtgatttacacgggctaatgatctccctactttgctatctgttctcatcggttggttggttggtaagcatgaatttcgatgggccaaatcaaagttgcaaaaatacctttaatttgaaaatatttatttcatatttccacttacaaaattaacgatttacttcaaataaaaaagaaaaacagtatggaaaaaattatttgcatacaaatttgtacctacaatatacatttttgtaacaaaaatttacatagataatatttttacaaaactaattggtgaactcatttatataattttaaagtcagttgttgaccatgaaaatggtcaatgacaaattatgaacatacgacgattaaaagcgtagaaaacaacaaattaatgaagaacgaaacaaaacaaataagaaagcacaaacttcatagtatttcatctttgaaattttgttataacttacatccagttcacatttttattgaataccaagtcttaaactcaagaggagatgaattgaagtcaactgaatttttcaagtgcaagcttcatttacaatttggcaaaatttaaggggtttttagaccagatattgagatttttaatttttttataatggggcggaattttctttaaaaaatactatatttttttatactgtgtactgtgttaaattttcacggttgttttttagttgttcaactgttgatttaattgttctattttgttgttttactgttattttctaaaaagagtatttttataaaatattttgcgtaacagtaaaagtgtaaacttttatttaaaatgtagtaattttgtaaaaaccctaaattttaatgtacagtgtgcacgaagataaatggcgaagtgtgtcctttttaagaaagtcaaagatgggcctctaacagtgtgttcggcctttttactgcataaattacattaaaaactagggatttatttcagaaatactcaaaaataataaaaagaaattaagtttttacagaattttgaggtttttcttatatttttacggatattttttttcttatagaatattgtttacacgttgttcttaaaaatacgttatttacatgttgcagaaatatagtataatgctctaatagcatgaaaacaatactgaaacaacataaagctgtaaaaaatgtaaaataaaaataaagttggcaaaaatgtagaaagattttatttttaggtgtattgtgtaaatttctctaaaacaaagaaattttttaaagagaaatgatcggttaatattatttattacttaaattaccttttattacataaaaatcgtcacatttttcatgtttaatctatatttcgttttattatagggatgataattatataagacactattttttgtaaaaaaaaattatatttttatgtttaatgaatttt

SEQ ID NO: 245683 - DNA, 917 bp, Cannabis indica
ttccattgtgaaggtactgatgagtctactacttgtttgatactccactaaagaacttatctttcatgaagtttagtatatgcaataggcagtggttaattcaagttgatttgatgaatcttgtctattgtttttacaaaagcaggcctctcctagttgttgaatgctctctctctctctctctctctctctctctctcagtttatattttcattgtctttgtataatttgtaatgtggtataattttttatatctatcatggatgagtaagtttgttgggtttaattgatgtaggagcgagaagtaaaagctaagcaccaacaactgataagcggggtacgtgtattttcttggaaaacgaattttattttgtcttgtctattagtaatttagcaattatgttttcattcttcttgaggttcacactggtagttttccttgatcaggtttctatactttcatattgggcttccacttacatatgggacttcatcagcttcttatttcctttctcatttgcaattggtctttttagtatatttggtatgtcttatctttaaataatattttatagagaaaagttgttgattttgaactactaaatcattgttaaaaaattggatcactttgcaactcaaaatgcaaaaaaacgaatatcaatttaatttttttattttaatgtattttgataagcatacaaactatttattgagaaatctgttacttaaaagtgttatgtagtgtttttttttaaatttttttcgtaaatgctcttttttgtggtgtctacatctgctgtgtttaaaataaatatataaatgtatgtattttttgagcaatgcattattgtccagaatagaataagcctgtttaatttcacttttacttacactaaaattgaattgtctgtaggtct

SEQ ID NO: 245684 - DNA, 545 bp, Cannabis indica
aaaaatatattctgaatattttgttaaaaataattacacagagcatgctattaacaataaattttatgctcatattaatgaagattaaatatttaattttagattaaaactttacaattagtaaacatacctcatttaaattttgaggttgattcttcaagatctatgaaccattgctgatttaataaaccttttgatctgtacacatggaggagagtgtaatgagcactgctcttgataccactctcaacaccatagccacacccactttaatcacaaaataaacatcacaactcttttttaaggaatgataggccaaattgggcctacatgctcaatatcagagagttattttggcccaataagctgactaaaatattgaaatttacaaaaatactgaattttaagtatatatttacaatttactgccacacggcaacaattacttttatactgtcttagacttttttttttaaatatacatatatactgtagacaccgaatatcaataacaacacctcaatcttccacacccatgcacagaa

SEQ ID NO: 245685 - DNA, 759 bp, Cannabis indica
accgaacgaccaccaaatttatcaatttgaccagagatgatgtttaggtctcccaccaagacccacagatgatttaaggccaagatttccaagattctagcctcccagaacacagccctgtctgaccgaactggaggaccataaatgaaaagaccagtccaatcggggccattaagcacgtttgaaaaaactccagagatcaccccagcttcagctgagcttataaggacatcaacaccagccttccaacaaagacacaagccccccgcactacccgacgcctccacacaagaagccccaccaaatcccaaactacgccagatagaattcatacgtctactgttcaattttgtttccattagaaatagcacatccgggtcttctctcaaaaccaaggctctgagagctttcttagccgcccggcctccaagcccgcggcaattccacgaaagcaccttcatgggtcctggggggcatgattcggcccgcctcctcggcctgtagaaaatcccgattcacataatctcaatcaacaatcttaacagaggactctccccccactctggcatcagacgcaattgacgcgctctgatcattaacttgtatcgtcccactcttgcaccttggagaaggattaaccatcgtagcatcagcacttgggggcttaccattaacctcacctccttgctccttagtaaacccaaacgaaccttcattggagcgcaaactattaatgagcaatcgagatttcttgttagg

SEQ ID NO: 245686 - DNA, 994 bp, Cannabis indica
agataaggattaaattaattaattataatgaaattataaataaactctatctatatctatgtatatatgtagctatacttgtatagaaataggagtagttttaattaattaattagtttatgatatcattaattaatttatgatatgttgaagtataagccgacatgaggtgataatttagtgggtttgtaagtgcattacagccttaatttgcaattagtggcaaagatgagttagacgaccataagtttggcttacactttttctcttcttcaaaagtttttgatatcgaattcgacagtgatagttatataataatacattggactagatctcatatatgaaaatattaataatggatatggatgatatagttgtttggctttcaatggagaacaaaattataaataataataaaagaagaagaatgctaacaattctatcatttgagtttgataaagaagagaatgaaaagtagtaattaactagtaagtatatcattttgagtagtgactagtaattagtaagtatcattttgaatagtaactatcatgcacggtttcatgatctcaaaaattagtggggaattttcatttttatggggtttaaggtataaatttgtacacatataggtaccgtttggtaacatttttattttttaattttttaatcagaaaatgaaagtaaactttttgtttttaaaaattttgtttttgaaaaataaaaatgcattctgtaattacttttgtttttcaattttaaaaacaaaaaataaaagtgtgtcctgtaaagtttatttttatttttattgtttggttttatttatcttgggtctacgtccggggtcgaattcagaatcaggtcagaggccgggttaagcgccgagccatgggagagaatttgggtccggatcttgtcgtagtccaaaatattgattaagaaaaaaattgtttaaaaaaatattaaaagtcatttttttattttaaatattttg

SEQ ID NO: 245687 - DNA, 798 bp, Cannabis indica
ataaagacaaacataaaaacatgcaaaaccagaaaaaaaaaactaccaagtgtacgtggagagcacaggatgtcatgaacaataacaatcaacccatagtagtgtaaaaatatgtagactcatacttaacggcaatggcaaaggagacaaaccagataggagtaccttttcccaaaatggttgtaagaagttaaaataaactattaggcagaacagttagataacacataagcacagaaagctaaggttaggtgatatcaagcaactttcagtctacatatttcctaacattgatatcatccttgggcatattaggctcgtacagtatgtttaaattttataactatattaggtagttctcacacagaatgagatattatattaacagatgtatgcactgaggtatgatctaaaaaaaagtgatattaagatttgtccacccacagaaaagtgatatagcatcatctatctgaataacagaaaactgaacatttctttctttttaatttttcatataaggtcgatccactaaaactacaacctttggaaaactctaataaattgccaattaaacttcatgaaaaatcaaacccaaaatctgatgagtaaacaaaccatgagctcaccaccaaacttacaagttatatgacagaaattataatagattataagatgtacagctgtacacaaaagcatattgtggtagtatgtcatgtccttgggctaatctacttcaagtcatgtttcataattagtaagagagatgactagccatcactctcaactctctactctctt

SEQ ID NO: 245688 - DNA, 1689 bp, Cannabis indica
gctttcggatgtttggcttcatgttcatctcctggggagaacgatgttgcctaaggctgagaatcgctcttcaggatctgcgatgttaagcaaatatttcagagcttatttcttttggagcaatactctgagactgctctttgtggctttgtacagacgatacattatgtctttgacctggattgaaacatgtaatcttagaggaagcaagagagaaaaaaagagacactcccatatgctgtcttaaaataatgcagcaaagtcaaatgcttttaatgtacatgctataatgatacagtgtctaaaactaattcagcaaagcataccagtcttgtggagttgagagatagatacagtttcaatccagtcctactttctaaacacaatcttactgtaaatgttatgataggtacagaaaaaattaatctataagaggcaatatttaatgcttgagagatttttctatgtgattctgcactataacctaatcaattagagtttaactttttagaatttaacctacattattgctagatctaataccctttacacatacgagagatgactgtgaaatgtacacaaatgcaactattttaagactattatgaactgtacttccaatgttgagatgctgatgataaacactggtaagaccaacacaggtccagtgtaataatcaatgatttaaaatgaatgttctcaacataaggtgcaaaccatacttcattcttcatggtaggggactccttagccgatgcccaagcagcatttatcagtaagatcagtgaagaatcaagttgctttgccttagcaaggctgtttatcttttcacatgcctcgtccactgacggcgagtttaagatatcatcgaatttggcctgggcagaatctagtgaatccacaatgtccaatgtgttatcataagcactgacagcggataagcatctagcccccagccgagacatctctgtcaaaatataaattgtgtaaaagacaggaagcctttaggaaagctacatgtagatagatcttatttcgtgaaatggggtataagagttgtacaaagtcatctaaatgaataaactttaactagaatggtccttgtactcaatctcaccagttgtcattcaaatgaattatgccaaacaatcattaataataaaactaagttgaaaaagaagaaattgaacatgattcaaacacttaccatcacgatcctccaaaccgtcaaaggtctcggaaagtagggtcaggtagcgaaaaaactcttcactgaaatctttacgccgccttgtaacgattgcgttaatgtctgttggactatcctgtatctccttaagaagttcaccgttcctctccatttcttcatcaatctgcaaagctcactcctgatcaaacacaaccagaaaagactctaaactcaaagtacctctgtatatgcagttctttgccctctctatgcattatcttacagaagtagacctaaaaaaagaatcaaaacacctatacactcccaattcccagaaaaaatataaagagcactggtatctaaagtaacatgttccatattcctccgcaaaatcaaacagtgttcagaatgtaaatattaaatttctcttcactcagtcatttcagcaaacagatataatgcaggtacgaaaatcaaatgattagaacatgaatacatat

SEQ ID NO: 245689 - DNA, 1716 bp, Cannabis indica
tactcgcaaggtttccaagctccagctagtgagagtcaaagaggttagaaccaaggtggaggttctagtacaagtacaagtcatcctagtcaaggaaagggaaaagaaaaaacaataatcatcttttcaagcctatgcttttgaggttgatgttatacagggcggtgcagaccaatgagttattgatggtatggttcttatcttacactactcttgggctcatgtgttgttctatactggtgaattttattatatcactcatgattgttggtatgttgggtttaagttggaaaacttttagtcttgcgttgcagttaggtaactaggacatgatgaggtatctaccatatgtaggtgggtctatattatgtatgagggcataagttttcagggaacttattagtgttgccaatggggcagtttgatatgattcttggaatggattagttgtttaataaacaaggtattgtagattattcgcacaaaagagtgactctattgacccctagtgttgatttcattatttatcgagccaacatgagtgtagtgaggcaaagtcttaattttagggcatccaataaggtggaaagagaaacttagagtgctataggaatttgtcttcaatcaaggatacttcgagaaatttagaccatttcccttgtatatcatttattagtggttttctagaggatttaccaggactaccacctgatagggagatcgagttttgtattgatttgattcctaaagctcaaccagtttctattgcgtcttatcgcatgacacttgcagagttggctgaattgagaaagcaactaggggagttatagtggataagggttacattacacatagtacttctccatgaggaactccagtcttatttgctaagaaagctgatggaactttacgaatttatgtcaattatagaaagttgaattagatggcaattaaaaataagcattctttcccgaggattgataaattatttgataaacttggtagttcaaagttctttttaaagattgactgcaggtcacgctatcatcaattgtggatttgggaagaagatatccctaagacttctttcaggacacattatggacactttgagtttttggtgatgtcgtttggactgataaatgtaccaactgcatttatggatcttatgaatagagtttttagaccttacttggacaagttcatggtggtattcattgatgatatcttagtgtattataagacacatgaggatcatgctgaacacttgaaaatagtattacagacattgagagatcatcaattatatgctacaaaagagaagtgttacttctggatgaatgaggtcaaattcttagggcgtgtaatttctcaagatggtatcgatgtggatccttcaaagatagactctatcatacagtgggaaagaccaaagtatgttagcgaagttcaaagtttccttgagttagtaggctactatcgtcgatttgtggagaacttctctcatattgctatgcctttgataaagttaatgaaaaagaaattaagtttgtgtgggatgataattgtgaagaagccttccatgaattgaagcaaagattgactacgacatcttttctcattgttcctaatagtgaggaaccttatgtagtattcactaatgcttcaggtactgggttagaaggtattctcatacaaatggcaagatggctgctt

SEQ ID NO: 245690 - DNA, 1347 bp, Cannabis indica
agagtgtttcttttataaaggatatttgttctatgttgtttagaaatctttgattaatttctctttcgaccatgtgaacggtaagtaggcaagtttcaatactgtttttttccatctcttctactcgcgcttgctgttatacatggtgaagccatacctgccttctttttactgacttcctcgcatttgtataattggatctatcatctttttattcagaactccgtgatctccaatggaatgccagaatttgaagtgcaaagtgtggaatgtattatcgccttgatttgttattgttggagccttagttgcaattttttaagttgcctctttgtggttgcgaccacttcccgagcttcttctctatgccagatttttgattgtctgattgtgccttattgtcgctattcttctctattgagtatattgtatatttttttgatctttattttaaataggatttttttgaggcgaggggctgatgaaattcttcaaatagttttacatacaatctcgatcaaagatttgtaattgcgttggttgatctttgagtgcaatatgagcggcaaaattggtcacaaattcttctctttttttgtgtttgattaaacatatgtgattttttgtagatacttggttcaccaccatgattctcctccaaaaaatcatggggataatgttggaatatcgtccttctagcatcaaatgatatcagaagaatttagaaagtaccaaatatctacgagtattcaaaggtcatctgaatatccaataataaacatggagtacttacttagaatagcaagtactcaaagaatatagtgtaaaatatatacaagtacgtagtaatataataaaaaaaacataagaattatagtggtttagcataacctcatattcgacctgcctagtccactgttgaatgaatactcttgctctataattttattttgattagcatagtcctgtttgaatacttataggtagtaggcaaaggttacaaatcatagtcattataagactgttacaaataataataataatagacacttaattgtactaattacaacatttataacaatttcttgaactgttatttttattgattggtgtgtattcacatttttactaatgataccaagattttactaaaaattgcgaggtcctttcgatacagtgagtttcctttagtgttatccttcttgtgggggaggagaaatttatcccaatatataacaacaattaatattttttaattatttgataatgatgattataaagcatatatattctatattatataaaataaggttagtagactatctatatcaaaagcttctcgtcagt

SEQ ID NO: 245691 - DNA, 1091 bp, Cannabis indica
actgagccagagctcatttcatcgatatacagaatcgttcatcatttcttaattgctctctctcgagtatccttcatcaaaaaattttgcttccacatcttcatcttcttgattcttcatcattgtttttcttgattctctgttctatatttatgcttacctaattttttcgttgaactgtttatgaaaaaaaaaaacaacaatggggaccattgtgtaagatttgtttttcattgttactttacacaagatacatttcgttaatttagtcgcttacctttatggcaggtgtgcactcaacgctcatggaaacgaccttacggtgttggattgctagttggtggattggatgaatctggagctcacctctattacaactgcccaagtggtaactactttgagtatcaggcttttgccatagggtctcgctcacaagctgcaaaaacgtacttggaacgcaggtttgagagcttcaaggactcatcacgggaggagttgattaaagatgcactcattgcaactagggagaccttgcagggtgaaaagctgaggagttccatctgtacaattgctgtggtaggagctggagaggcattccacatattagatcaggagaccgtgcaaaagttgattgatgcatttgagattgtgacagaggaagaagaggttccagcagctgaacctggtcccgatgctgatcaggatgctgcaccagcagagggcgctgcaccagcagaggatgctgcagctgaagaaggtgcggctccaatggatatttgaggatgctataaaccaatttgtttttccttgcccagaaatgaggttttctagcatgtgtttgttaaagtaacactgttggtacacaattgaaaatgacatttttatcctcccttgttttcaaattatgcaatatgctggccctttttttttagcttaagctgagtgccgaggaatttcatttgttttctaattgagtgaaaagatgcttcattactactaagggcagaagccagaatcaatacgaatgaggtcaacttactttggcttgttccatagacaaagcgagctttgcatcgaagttactgctgagc

SEQ ID NO: 245692 - DNA, 1561 bp, Cannabis indica
gattaacaattcaaaaaaaaaaattggagatagtacagtgatgaacagagtatctaaaactagatacaattacaacaataaaacaataaaattaacaccaagatatatactgattcaagtcctataaatagatgtgatcgatgactctactctagttctaaaacaccactgaaattttagcaaaaccttgcgcttttgctgtagcaaagttcctgtaaaattttaacaaaaccttgcactttctctattaagcctttttctttaccaaaatttaaataaaacttattaattttcactaataactctaaattacccaaaagaacataaaaatacaaaataatatatattctcacaaaataggagaaaaagaactaaatataagtaaaatacacacacaaattaagctttaaaaaaaagacaaataactatttattcaagagttatcagtgaccaaagcttggacgatggggtcagggatgacaacatcaaacgggcgacgatgtcatacaatcaactgtccagcaggaaaaaagaatgatgagattttgtgggatgaaagagaatgggagagaataagacgcggtcggggtcaccaatagtacgggggaaagcagcgctaaaaatttcaaaaggagagagcaatatttttcttttttctaaaaatttttagggtaaaatgaaggagaatgggtcgagcttagaatttcatggcgataagtataagaggcgacatttctgcccctaaatgccgcctctaatgctttgacttgtgatattttcagtcgcccctaatattacgggtggaaaaaatcccacccaaaatcaacgatataattttctatttttggagcgacaaaagccgcccctaatacctaatttattgcccctaaaagttttaggggcgaaatttgtcaccactaaagatgtacgaaataaaaaaaatatatatcagattttcaaagggaaagcacatcaaagttgcccctaatacctatattatttagaggcgacaatgtgccgcccctaaattagtcacctctaatatccaaaattattttagtgataccacaccatgcttagatctgaactcgggacctcactgacattgttcttaggtgagaaaatcggccctcaccagcaacacccccatttattgaaacctctccaattctctatctctctcgattctttttcaacagcgttaatggatatcattgaagcccataatttatctctttctcctgcgatcaaagctcttgaacagagacctggtcgaccaagaagaagacgaatattttagtttgcgtttggtttgattctgattccaataagtgggttaagatctagatttgaattttattttttccagtggtcttcgaagccaacggtaaacagcagccgtggtcggaaaaggaggggggggagggtcatggctggggatggggtggagtgagggttggggtgggtttggatttttctaactgttaatattgtttgctttatgaaagaagacgaagaagaataaaaagaaaagaaaaaataataattttatgattttaaa

SEQ ID NO: 245693 - DNA, 945 bp, Cannabis indica
taaatcctattcaaacaagagatttttttatgaatcagagattttcattgcactaacaactgatttgtacaacttaaagccccccataaagatgcatgtttgattatctatacatgagaaaatacaataactcaaactaatctatgtctctaatctacttgtttaggcataacacaagttatcctagtctagatgtgccatttagcgtcctggattagcaaattaggactaacaatacttaattgcgaaaatttattattcctagcttgacatatttgatacaccaaggctgctacagatgcatctaagaccatcttcttgaatttactcctcttggatccatcaatccacctgagaagatcctgtaagacaacagtttgtgcattccatcagaacccaaattttagttgatggaagcattctcgagaaaataaacactcaaagaagagatgagtgatttttcaatagcattgttgcagagaatacaagttgcatcatctgcaatattaaatctatgaagtctttctcttattttcaacctattttgcactgcaatccagagcacaaaactgtgattggggcggttaagtcttgaccaaacttgcttgctccaaggaaccttatcttgaacctaatttagcattttatatccaacagtaatttgatacaaccctaatgtaaattgttcaggttccattaggtgactcacctcatttttgatttccactaattttctccaataccagctactttgagattaagcattgtgacttcaccaatcctcatgctttagataaacattgtgtacccacttcacccatatattgtctttttttgttgcaattgacaatactttaatcaaagtatctcggttcaaagtagctatgctcaagaaaccaattccaccagcaaacttgggctaacacatcttatcccatactacac

SEQ ID NO: 245694 - DNA, 1150 bp, Cannabis indica
aatacattatttaaataatgtaggcaaaaaaaattaatgtatagtgtaaagtaaatttttttatgaaaaattataattttagtgatttttttttttttttaaaaaaaaatagagtatcagagataatacaaattaatgacgaaatggttattaaactcatatttatggattatcaaccgtgactttaatacgaagatagatcttctaattattatggatgcgtttatgaatatgatcatcgaaataaattgattttataccactcttcaatttaaatgagcaagaataatatatttttgcataatatgaactccaaacataaataaatcaaattatttatctctccttgtatttgtaaactaggtgaaataaatataatttagataaaaaaaagagctaattgtaccaaaacttctaatagtttcactttatttgcaattaattcctaaaattaaaattttagcgacaaaactcccaaaactacaatattgttagcaaattacaacttccatctaatttaactgttaactgtcaggtcggatggtccacgtggacacaatatacacgtggcacaattttattagcacatgtaaataattatattaaaaaaattaaaataaataaaaaaagatatatattttttttcaaccataacatattatttaaagaaaaaaaatctctaatatttttcttttattcttctttttcttccgtctatatactgccaccaccaccaccatttatagtcaccgtaaacaccaccaccactattgaaaccaccaacatccttaaccaccgtaaacaccaccacccaccactaccgaaaccaccaccatccataaccaccgtaaacaccaccacccaccactaccgaaactaccacaataacttatttttcaaatccattatcacacaaaaaaactaaacaaaattcaaaccaaatttaaacaaatccaaatcccacaaacaaatatattcacgaaatttcagtcccaaaacttaaatttgaaaaccctaaattatttcccccacaaccattattatttctcatatctgaaaacaaagaacacagtaatactcaaataggaatatctatacacatatatatcaagaagattgcaaaaaaaattatggaaaaccctaaatctaa

SEQ ID NO: 245695 - DNA, 1963 bp, Cannabis indica
acttggtgaagtagtctattatggctatagcaaattgtacccctccttttctctttgggagttgatcgattaggtctatcccccacactacgaagggccaaggagactacatcatcgtcagctcattaggtggagctcttggattttttgagaatctctgacacttgtcacatcttttgacgtagtacatcgagtcctcgatcattggtggccaaaagtacccctattagagtatctttttggataggcttttccccccagcatggttgtcccagaagccttcaggcacttctatcattcgtcgctcagccttagccttggtgacacatcttaagagcagcattgagaaacttcatctgtacattgctccgtctaggattagatacctagcagcctttcttcttatcatttttgcttcattcttgcctactgacaaggcttcggtttggaggtaagctgcaaaaggtgtcctccatgttggactgtcgtcaaacatgtcgacttctttagggatggtaatactaggtttctttaggaactatattgttaccaggttttccttgtctgtaattgtgctacttgccaaacgggaaagtgcatctgctgtagcattctactctctagggatctgcctgattgtgtagcctttgagctaacttaacaagtcattgatcttgctctagtaagccaccattttttcacctcgagctatgtattgacctaggacttgattcacgactaattgagagtcactaaatatttccaggtgtcagctcgtgctttatgtgccatcttgaggccggctattaagactttatattcagtcttgttgctcgaggctttgaaactgaatttgattgctccatgtaagtgctgccccaggtgttataagggcaatgcctgcactaaacaattggtcagtgaatcttccgtcaacatatggagtttccatgttggttctttaggtttttgctgttgttcttgctcttgcttcttctttggctcttatttttctcgtaaatcttgacaaatttcaagagatgaatttgtgcactcagcgacgaagtttgtaagggattgaccttttatgaccattggttgatatatgatgtcaaattggccaagctcaatggcccacttaagtagtcagcctgatgcttcaggtttctgtaaaaacctactgcattggttggttggtgtacacctttatagggtgtgcatggaagtatggcattagctttctagaagccaagagcaagttgtaagtcagcttctctatgagtgtgtatcgactttcagtgtcaattaatctcttgtgatgtagtatacagggtgttgtataccgtcttcttctcttgtgaggacaacactcacaacatgttatatgactgctaggtacacgcctaactcatcattgacgttattcaactcttaacttctttattgacgacatttcaaatttagtctataaatgcaatgtaaaaagataaagatctattcaactatttatatcaaaatatagtaattgttaattaaattctaatacaactattacaaattttctttatatgcataaattcattactcttttatttttttaaaaaatgacgtactgtactttggtaaatgttaattcattagaacatatacaaatgagaaattgtaatgaccactataaatgagaattctacacaatagtaattttttttagtgtgttatattaagagtaaaaagaaaaaaagtttaagtagactaattgctcatattataaaaaatatttaaaaaggatatggtggctaaaccatctcaactttacagtttgtaacaattaaccacaaaaaccgaaattttggcaacaaaactacctaaacactagttccgttttgctctgcacccctccgtccaaaaaatcacaattaagtgccacggtggactgtccacgtgtacacacttgtacacgtgg

SEQ ID NO: 245696 - DNA, 676 bp, Cannabis indica
aaagttactttcaatttttttaatcaatattttggactttgaccccgacctagaccatgggacctagaccctaacctagaccgcgacatggaccctggaccccgacttagacctggaccccgaacccgaacatcaaacccgacccagacctaaaccttggaccccgaactcggaccatggaccctggacccaacccagacctcagacccgacgcagatcccaaaccccgacctagacccgaagctagaccccgagcccaacccggaccccgaacccaacccgaacctctgacccagaccttgaaccccacccaaaccccagatcccagacaccgacctagatcccggacccagacctcgaaccctgccccaaacccaaacttggactcgcctccgaccccagacttggacccggccctaacccttaagctggacttggcctcagactcggacctggacctagtcttgaacctgactttaaaaaaatcaacaaataaaaatgaaaataaaatttatagagcacacttttattttttatttttaaaattgaaaaacaagagtagttataaatttatatataatttataaataagtgtttattattattataacagaattatcccatatactatttttttattttttattttttcaaatttatggtttggatttctaaa

SEQ ID NO: 245697 - DNA, 2379 bp, Cannabis indica
tgactaatcgattgttttgtggtactctccattatctaacaccttaaactaagagatttcaactactcttaaataatcatttgatgtaaacattcctttacatataattaatatttggtacaacaagtctaatttgataatgatgtattttttcattttcttcttcttcaacaagttaaatgcagagtttggggatcatttcacacataaaataaaattactattgactaatttctatttattttaaatctaactcttataaaaaatgtgtagttgactcaaatatatacttattgtcaaaaatgtataacgttgtgttggtataacaaggactttaaaggtacggtaggaaaataaatttgagagtatgactgatgaagattgagaggagttgcaggcgaaagcggtaagcactattcgtttaagtttggctcctgaattaaagtataatgtattgaatgaaacatgttcggctgagttatggaaaaaattagaaaaactttatatgtcaaaatccttaacaaatagattatatttcaagaaacaattatatgagttgaagatgattgaaggaggtgatgttaaggatcatataaatagatttaataaacatataatttaattgttaagtgtagaggtcaaaattgatgaagaggatcaagctattattctcttggcttctttaccaaaatcatatgagacactagtgactacacttttggttggaaagactatttcaacaactcttttagagacagatagtattaagcaaccaagttatatgtctcatactgatcaagctcttgtgataaggtcagaatcaagtcgtggtaggagtacatcgagaggaatatatgatgatagaagagacatgttaggcagaattgtgaagagttgaccaaacatcttgaatcaatgagaaaacaagaatacaaagacacatcagattccacaaatgttgctggtgaaggctttgaaagtgattctgatgttctctcggtcatagctgatgaaaaaattttgactcttgaattttggatactggttgttcgttctacctgtgcccatataaggaatactttgacacttataagacatatgatgactgcactattttgatggacaatgattctagctttaaagttgttagaataagaactgttatggtgaaaatatttgatggtgttgtgagaacactaactgatgtgagacatgttccaacattaaggaggagcttaattctctttgggagttttggatactcgtggttatggctattctacaaaagatggtgaaataactatcaagaaaggtgatttggtagttgtgaagggtaagaaagagcaaaatgtgtataaattagtcaagaagactattttaggtggagctgtgaaggtggattcaattagagtgaaagaatgggacaagatggagaaaactccaattttatatagaagttgtttaaaaaaaaagcatctgtgaacgattaaagaatgtgaagtcaagtgctcaagtgaagtgcaatgggagtgtgaactcgatgcatatatatactcttattgatggtttgagttgtgaatttagagaatttgagtcaaggtgaagattgttggagtttgactcaaattatttatttatttcgttattgatctatatttgtaaagttgtaatttttatttttttggataattattaattgtgtgaaaagaaaagtcttggtgtccaagttttgaagagtcttcttaaggaagctttgaaatatcttggtccacaagttgtcttgatgctcaagttttgtaactttataaatatgtgttttgtgtgtgtgagagagaggcatgtgtgtggagaaaaatagtgagttatgaaaagagaagtgtgtgtgagtttgttgtgtggtgtgagtgaggaagaagcaaagagtgtattggggtttgggtggagagattgagaaagagagcatatgtcgattttaaagtaatcagtaaaatatatctctctttgtgggtttggtagttttgccaaacagtaaattgttctgctttatttctttattattttgctatacttgaagtttatcgttttttccaacaaaaacctaatttagcggccatttaaacaagatcaaaacattaattataaaattaaacatggaagaatataaacaattaaatatgaaggagtaaaaatataatattaatcatcacattcaatatatcatatcttggattttgaaataacccttaacctaaatgaggattattccataatctcaaacataatcataagcataattataaacgaaaactaaaagaaattgtaaagtccttttttggcaagttaggtgacaaaataatttttcctttctatggtaagatt

SEQ ID NO: 245698 - DNA, 672 bp, Cannabis indica
caagatttagtcaagtatttgttaattagttttgggaaatagtatatttggaattattagtatatttggaattatgagtaccattatgcactattttcctttcaaattattgttatgaaagaaaaaagggcagtgtgtttaattatttaggccaacttgttgctgcctgtgatgatccgtacggacaggcgcacaacccacgtcccaagaaaaatagtgctatatagtaatagtagtgtatctgtaatgtagctatcttggttttcaaacctacacaactcaaataataaaccatcatccatatataattccatatggtactggtggtagaagagtccataatggtaataacctacaatggctctccacggaccaatatatttatgggaagggcatggaatttcacccggccaggttgaaattattaccttattatttatgtagctagatagccatttaaaagtgccacacattttcctttttattccgctcactacaaatttactgtaattttagaaatattatggcttaaataaaccattacatcatgtgatgcatctattatataagggcaatcgatattgatgatttgaaaataaattatttgtattagtttagatttgaatagatggaaacatggaataagtgtttaatgatttagtaaagtattgg

SEQ ID NO: 245699 - DNA, 893 bp, Cannabis indica
cagagatcgaggaatgagtttaagcttttgtttgtgtatttacactcgcctgatcatcaagatactcctttgttctgtgaaagaacactctgttcggaggtgttggtggcttttgttaatgaaaatttcgtgtcttggggtgggagtattcgagctagtgaagggtttaagatgagtaatagcttgaaagcttctagatttcctttctgtgctgttgtaatggctgccactaatcagaggattgctttacttcagcaggtatgcacttatctcttcttcaagttttcttgttggttaagtagttttctttcctaatgcaaatatgacatatatatatatatataaatatatatatatatatatgtatagggagtttgttaggtgacggcatcactttccaatatagttatatagttgtaataggcacttgagaattctattatcggtattgtaaactattcataagatgtctattataattataatgtataaaaaatctcctactgtaggacatgatatacataagggaacttgtaagggaactggcataactagtgcgcatcactatcggtctatttcccatatagttgtaatagcctaataggtatcctagccatttttcgtatccactgactttgatatttggcttagttcaatgctttaatgaagtttagccaacatgtagatgtagcgttgtagtcattagttttatgagaaatcatttttggcttacagaaaggatggacaaaagtctaaatttcagctagattccaatttcataatgaatcagagaaagaaaaatcaatatagaatatgctattgctgtagatttataaaattatccaattttcgacaactttgatttgaagcttgaaagataccactgtttcttt

SEQ ID NO: 245700 - DNA, 1556 bp, Cannabis indica
attattaaaataaagtgcacttataaatttctagaatacaaataaaattccttatatatgtagtgagctagttataagttactaatataaatatttatatcgttaattataatcttaatcttcatattaattgaatttaaatctattttaatcaaagtcttattataattaattagtagttagttcgttattattattatttttttcttttgttataaattattattattaataattagtttgaaaatctaatcatattcatatatatgtattatgttcatttaaatcataggaactaaaaacgtgaaatgtagggactttgtgaaaatgagttgtgatagaaatagaaatatagagatgagatgttatggtttttggtatttattatcttaattattttagtttagaatattaaatgtttcacgataataacatataacataagtacctcatatgattatatgacccatattatatattatatatatttacctaagctatatactagtgtggaccttaaatattattctctgttgtggtagtgacatatcagctatatatatatgtatgtatgtataatattctcaatgagtttatgagattttttcaaaatttatggataaagttgtattatctaattaaatatattcttatattaaatttgatcaatacaattgaagcaccagtttttaaagttatgtaatgcataataaaatattcctattcattatactaaaaataatttaaaaatggatatttctttgcatcattcaagttctaactactaaatttaaccattcgagtatatcaaattcagcttaataaacttctaatgtccaaacaataacaattaattaataaacatgatgcttaattgaatgaataatgatattttcactaaaataatgcataaaaagttaaaatactatgacatataggattcattagccattcaagtctaagagaatttagctcatagctaatttaacgtgtgtcatacaaaatagattattaattaatattcatgggtataaaattaactatgcaaaagtagaaaatacaaaatgaaagaagaaagaaagaagacaaatcttatagagatgatgtatgtgtgagtggagtcatccttgttcttcttttccttgggcccccaaggtgtattgggtgaccacccctcaccctcgagggtgggtcatccactctagggtggtagcttagttcaagtgattaactttttacccaatccactcatgtggtattggtatcataccctacctttatttgaacatgaatagtgcaagtattgcaggtcatctcatgtgccttatattcgtccatgatcattattcaaaccctgtaaatctaaaagtatcaagactatatacaagctctaagaacaatataataaggaaaaaggggatatgtcgaggatacgaccatggagtaattgctacccaccatagggtcagtcaattagactgtaccctaagggtattggcacataacccaatgcatctgacacactctcctaatattagtatctgatcttacaagaa

SEQ ID NO: 245701 - DNA, 653 bp, Cannabis indica
cttacttttttttttcttattttaattaataaaatgtatttaaagtaaaatactataatgctgtaaggaaaattatagaaaaattgatatgtggtgtaatataaaaatatgagctaaaataaataaagttgaattttggtgatgtgagtttaataataattgcaattcaaaatgtaccgcattatatattattactaattttcacaatataatttttatttttttcatataaaaataaatatatgtaatttttagagacaattcaatataatgacttgataattagtgagtatgtaataagttataatgttaaaactccaagaagatactttttgtataattaagattttgtagattgattttgtagatttttgtattataatgttcgataataataatagtgtaaatcactcaaatcgcaccgcactacactacattttggctaaataatttttgcgattgcaatttaaaattacaaaaactgcatatgcaatttagtttaaaaaaaaaaaaaattacaacctgcatcacttgtcccgcaaatacccctacttagctcaacaattgtacaaaccaaaaaatttatattacaatataaatatgaccaagaaatatcttcttagccaccttaattaataaacttttgtttcttc

SEQ ID NO: 245702 - DNA, 1396 bp, Cannabis indica
gtgaccatggggtctcccttgtggacgtcattgcaagttttctctttcattgataggtgttgcatcattttggagtcgctatggctacagctatggctcactccaacccttcattctttcggtttggactctacgagccttcgatagagttgtcgattttctaattcaagaatgggaacatatcttgcgacatcatatgcattttgactcctttctctcaagaatttcttccttaggctcacatccctcggagttcctcacagtcggatcccttcctgtgttggtttaagtctgtgccccctggggctcttttcctagtcgtcgtgttgtttcttcttccataacaggctcatcatgctaagtgttttccatgatgtgatgaaacaacggggagatgttttgagtcttactttcacaaatgctctcaatgaaagcatcaaaatattaactcaaatttttgttaacaataaatgaagccttgtaaataaagaattaatacttataacttataaatatatataaaaaaaaaaaaaaaacaacagttttttatgtacgtagttttctagttaaatctatatactccacgagacaatattatttctagatatcttttgagaaagtactttgagtacggaggtctaaatacgaatattcactcaatctcacagggtttctccttccaaaaatgatcgatctctttccccttaggttctgtcccaataatttataggggttctaggaataacagttattcttctttgatcttatctaggtaaccgttcatgaaatgtggacaatcctcacgtttcatatttaaaacatgtgaataaaataaaatgactgctggtaactgctttttgttcttatttggaagcagttttcttttaccaaaatgatgcattctagttatagcttcaattactcagtgatgcttacagatagttggttgtatcctacaagatgttagtttaagtgtttgtcctcgctatagtcttccaaggcagttgtttagactttgtctctttaaataagttgtattttgcttatttctcttagtctttcaacatactcacgagtatgtgggtcaataagttgcaaactttgaaagaacttgttatctaccctttccacttaactcattcttttctgctatttacttgcctcgtttattttagtcatgtcacgaggacttgacttttgatcttctcatcctcgtaaatcattacattgatagtattttgtgagactatcccctcttttacttcgtagcttatttttgaggtagaatattcatttattcatcacattcactatctttttatttctttttgagttatgtgacacatgttatgttgatatttagtgcttaaaatataggcataacatctttgaaaaa

SEQ ID NO: 245703 - DNA, 1437 bp, Cannabis indica
ggctttgatttctagtgctaatcatagtcctactagaagtgcctcatgctatgcttcattgttttttgcggtgaactcaagttgtaatgaaatgtgttcgaaatcccactagagtaactaagatgaatctagcaccagaaccgtgctcgttggaggatccatctacatataacttccatgaaggttgagtgtcctcttgagctgtagcctcaggcgtgtggacctactcctcatagatcatgggattgtcttcttcgaggctactgcattcagtaattaagtctgttaatggctgccctttgattgctttttgaggctgggaggtgatctcaacatgacctagttcaactccccagttaagtgggtgccctgatacttctagcttcatcagaacatgcctaagtggttggtctgttaacaccttgactgagtaagcttggaagtaaggccttagttttttgtaggccaataccaaccagtaggctatgttctcaatggggggatacctagactaggccccaatgagacacttactaatgtagtagacatggtattgtatcctttcttcctcatgcactagagcaacactggctggttgattggtgatggccaagtagatgtatagttcttcaacatctattggtttggataggattcgaggcctgactaggtgatgtttgaaagcttggaaggctttctcacattcatcactccattcaaacccgtggttgcttcttttaagtaaattaaagaagggaacatacttgtcggttgacttggagacaaacctgctaagcgtagtaattcgttcgatttggctttgcatgtcttttatttgcaactgtaacttcatgtcttgcaaggccttggtcttttatggattcgcttcaatccctctttagttgacaatgaatcccaaaaatttccctgattggacattgaagacacattttagagggttgagctttattcgatatttctgtaggatgttgaagcactcctctagatctttgatgtggtcttcagatttctttgacttaaccagtatatcatctacttagacttccatattgtttttgatttggttgatacgttgactagcctttaataagtagcacttgcattcttgagtccaaagggaattcctttgtaacagtaaagctcgatgtcagttcggaaactagtatgctcttcatctagtgcgtgcatgctaatttggttgtagctggaataagcatccatgaatgtgaggagttcatggccggctatcgcttccaccaattgatcaatttatggtagagggaaacaatctttagggcatgctttgtttaagtcagtgaagtcaacgcaagttctccacttaccatttggcttagggacaagaacaagtttggataccaaaactgggtagaaagcttccctaatgaagttgttctt

SEQ ID NO: 245704 - DNA, 1013 bp, Cannabis indica
cattaattgctactctccttttccatgctttctttcaattgttattttatgactattacacttcttttttctttctttataatttatatatattttatgttgttatatatctattctattatactattactagtattaggtatcatctcatttaaataaaatatgaacaacaatataatttgataaatatacaaaagttattaataaacttacaaataattttgaagtttgctacttttgatctctataagacacttttaatttcaagttattgaattatttaacaatgtatacatatttttaagtattatgctcaagtcttaatattgcatcttaaattatttagtattgttattaggtactagcgatatttaaaattattaagtggctcgaatgataaataattttttaaaataattattaaattaaaatatataaaacaaaataaatacttaattacacaaataaagatataatacttcataatgatgctattaaagtacaccttttaacacacatctaagagcatctctaatgataaaactttagagattgcttagtgaggtgaacatatcatgtgacaaaatattaagatactataccattggagaaaaatagatgtcatttaataaatttgtatggatgcttatattgtagcattgatgttattcattgtttttaaattaaaattagatgttataaatttgctaaggctgctatgttatttcctgatcgtcgtttcagtttggaggatgttccaactgatttgctaccttgtttggtagctgaagttattggttaataaagcaattttattattcaaaaaaaaaagttaatagtagctaaaaattagaatatatatgaaataataatgtgcaagatcatagttatagcacttttaaagagtgtaatacattggagtgtttttagaagtaagagtgtcaaaatgatattgaagaaagataaaataaaatattacatttttagatgtataaatttttagcatacttaag

SEQ ID NO: 245705 - DNA, 738 bp, Cannabis indica
aaagaaatcatgaaataaaaatagcctattgccagtttttcacctaaatttgtactgaaaatatatatatggtagaacaaatcttacgaataatgcaggttgaaaaatgtggttgaaaatttgaatagaaaatgatagccttaacttaagattctgtttttgattatatatatagtttggaaaaagtcaaaggaatataaaagaggtgggaaaagcagtgaaaataacaaaagagaaaacaaaagccaaatccaactcattgacattacttttactactactacaacaacagggttgacaaccattgtgatgatgtgcacgtgtgccaattcttatcatcatctcatctcatgtgcccatctatacaaatttctattctaattaatttattaatacaaaatccatacatgatcatagccaattcactccatgcccaacaatgattcatcatgaatcatcataatctatgatcgaggacctaacctaagccaaaccatttatgaaaaatatatacatacatatttttttttttaaaaaataaaataaaatgatatatatatagggatatgattttgtctcgttattgtactttcacggattgtaatccgtgatgaggatcggccctgaaaatatatgggcccaagatgaattaaaatttgggaaacttacaaaaatactggaatttgggttaaacttttacaaaaatactgtcacacggaaatcttttcaaaaatactg

SEQ ID NO: 245706 - DNA, 1051 bp, Cannabis indica
gcataatttagtacatgtcaaagttcatgagaaaaatcctaattaactttatttttttattttttctagaacaagagttcatatttttatttatttgaaaagaatatattctttaatttgaaggatcacaaatatttggattcttttaccttgtttttcaatcacaatttcataaataataataataataataataatttataatagtgtgcaactaagatttagtgggccctataaaatatttcctaaatggttttcttcaatcaaatgtggcccaatccgacggacgaaattgactaattatcaaaatatcacattactaattccatttatcctcctcacaatcttacattgactattccttttttttaaaaaaattaatcttttaaatcgtccatgatcatatagctcaaacaaattcatgtagtttagaaaaatatatgaataaaaatattaataacactttcaactaaaagattaataagttgccagcattgaaagatcaaagaagcaaaatatgttaaatctcaaattcaaataaacatgtgacaaatcacacttatcagtgattatgaactaaatatctcctaataaaaatttagattaatagtcataaccaaccatagcaaaaacaatcataaccaagcatcttgaattataaagccaataaaaatatgagaatccgcagagctgaccacaggcaatagtcatgctactaacataaacgtattttgagccaattgacattcccccaacgttccaaaaagaaacaagactaaaatctcttaccattaatgaataaagttctaccaccattacaatagcaaagttggtgtatcaacacatgacaaacgacaatccaaagtttgccgcacaatcttttcctcttatattcaattccccaaccgtctaccaccacaaaccactgttttgccttagacctagaccaccgtagcgactgaactagacccaaaacaacctgaacccccacaaaacgacctaaccctttaaaaaatccattttagaagtcgatagcagaattagtaattaa

SEQ ID NO: 245707 - DNA, 466 bp, Cannabis indica
ttctctttaaatccctgctaaaacagttaaattgctatcacaaacaaatagccagcataacccaaaaatcacatcaataaaatcggaacaaacccatctaaaaagtggacgctaagcaggttttgatgaataaactaccatacccattatatttggaacaaattaaaaatacccatacgataaaatccatcaaaacattcagaaagaacgctgaattctagcacttgttcttttttttcttcttctagtaattctgtttggttcctaaactagcacatgtccctgaattcctaacagatttgatttacaaatttccttcccattttctcaccagccaaacagaaacatttagaataaaaacagaattgcataataaagaagatatagaagaataatatacctcaacgtcaggaccaagcgctaaatcgatgagagagaaacagtgaaagagggatatctgtgaggt

SEQ ID NO: 245708 - DNA, 800 bp, Cannabis indica
atcattataatattgttccttttattcatttaatcttgctttggtgtctttttttttttttgtgatttttaaaataattaatactatgatagtttataaatggataaatttaaatataaaagctcaatgcttcccatgtatttgttgcattgttttatagggccaagacaatgcttttatttactttaaagcttttaggatagtttgatgacactacagatataagataaaaattaaataaattgagatattttactaagcatgaattaaagaatctattagtatattatttggtctttttcttgtgtgagttgagataggaattctttagtagaagttaactgatttaaaatgttgttgatttaagttcttttattatgttcaatgcatttcttaatgttgtttccttgataagattagaaaaattgcagctcatgagcctctagcagtcactaggtgatatgccttggccatgcattgctttattacattgactcaagttcatctatatacacaaagcattcatggaactatatattcttccttaaagcaaattctttctatttttgttttatggaaataatatgaatttctgatagattgatatccttgaaggtgacatgatgatgcttcaactaacaaaaaagtggatgctcataaactctactgcttgtaccacaattaatttttaaactccacactaagactatgcacgtgagtgtaattgttttaataactaagtttcgtaggtgttttgtgtactttttatgcgtactgtttttttttctatggttgagata

SEQ ID NO: 245709 - DNA, 534 bp, Cannabis indica
ccccagttttatcaaaaaatacttaggtttggaacctcgacggactccgcatgcccaagcttagtacccacatgcccaatagcaacaactgggtaaagtgtcctatcagcaaggttaacaaggggcccaacagggttagagacaagccagaagacaagaccgaccgatccgttactgcttccgatgagcaagttgatgggaggtctagtacaggtacagaagggggtcttttgtaagccctatactatataaagggcattggatcactctctcaagggctaagtcattcaacaagcattaaaaggtctttacaagtcctctctcatgctccatgaagcttctcacactcgtgaagtctctctctctcaaacctcatactctatttatgcctcttagacactaagtcatgtatcttcttaagttcttcatagaaactcatgttggcctttgtgtcctaaataaaactctatttcaatgtaatctttaccattcaattatcaataaaaaaaaacataagtattttcatcacttatt

SEQ ID NO: 245710 - DNA, 903 bp, Cannabis indica
aaactaagcggtgtttacataatctaacatggtttattctttaattttttcttgctaatcaattggctacattctaaatgggtcttctcaacaactttttggatgtcattagctctagatctaatgaagtttgcgagttagctaaggaagtgtagggaaaagggaagaagggataggtccctaggagtggatctcaaaaaccagcacctccgacctcaagcgaggaggctactctgaaggctccatccccaaaagacttatccgcttttgtcattgacctaacaaaacctatcctagatgtcctgcctttacgacaagtgcctatggggcatgttgaaggagacaactcggattgtgatgggccaattattgttcttaggaagcaacttagaagttcagatgatggcgcaaacataaaggtaaaggtagaggccaaagaaaattacaacatttggctactgtaaggagacgggttactaaatttcagtcttagaagggatctaacatctctgaaggtgaaaggtcagttaagaggagaactcgaacaaccaaggagaatcaagatccacctccaccaccctaacacccaaaagctttcctaccactaccaccaagttgtgtagagagaagacgactttgcgtccattaccttcttcatatttcaatcttccagtcaagcctacattaatgttgaaggaagttagagcacacatggaggctattgaacaattttacttgaagaggtgtggaggcgagtatgaaaaaatgaagaagttggccaataagatttctattaggcacaacgctgagtttgctaattatgataagtggaatgagccttttcccgacattataaacagagcataaatgacaaagatatgcaaaggatatgcctatttcatt

SEQ ID NO: 245711 - DNA, 1859 bp, Cannabis indica
gacataatgtactaacacgctcgagccataatggggttcgtttcgacctaggacgattgatgagaatggctctcgtcgggcacggtgtggttgttcgagaaagaagagagaaaaatgagagagagagagaggggtaaactagaggggtcagggaaaggagggaggaccgagttttgggttacatgacctggggattccgaatatatgctctgcttggaccactatcgccagagattctggtccccaactatgctggtgtcacacgggagtagacaaagagagagtgtgggctgataaaattagggtttttcccatttttagttttttatggttttttttgaagaattttaattaaaattacagtttggatcaataaaaattgacatgtgacatttattagtatttaattgaatgtatttagaaactattactgccaatttttgagatggtagatttatctgtgttaaatttaattttttaagtacttataccgcaattttaaaaaattgaacgaaattatttgtacctcccatattgttttgtttaggtttgcatttttacagcgtgatttgaattgcatttaagaatttgaatgtgaaaatagttatagaaagtatttttttttctttttaaaaggaaacaagtacttgaatattatttatcaggaaacaattttagtaattgcttgtttgaatggcaactacgtacgcattataggtggatctggggatgaattatatgatatattaattatattatatattgtaaattgaagttaataataataataattagtacgtaattatatatagtagaacgtgaatgtctacttcatgaaaagagtacaatacgtaccgtagcaattgttgccgtgtccattgtcaagactcatcaggaagaggattaatgtgaaagtttcaattcaaccatatatatatatataatctcacaatttattgctatattgattcaaatcaaagacttctctttcaatagtctatcataatataatattaaaatggcagtggtcccttaattaattagctaccctcatcatcgaaaattcaatatatcaaccttcgttaattattaattaatttgttcatttttattgtctggtttcctttaaaaaagggaattatatactttttataaaacatacgaattagtcaaaatctaaaaaagaattatttttaaccttttatatataattattactaatgataatttcatttttactgcatatattcctttaaaaagaaataccatatataatatatatatgttgtctcgatcattttactttagtaagataataaacaaaagcacatgcgtatgcatgtgacatctttcttccttggggactaaactggtgaataattgtatagagagaagaagaagaggaaaagaaaaggaaaatcatttgtaaaagagagtaaacaataaagaatttcaattataggtactatttaagatatacaaaccatatcgttttacatttctaatattgaatatgatcgtgaattgtattattggatagatgacctgaaaaaggttataaagaaaaagaaagagcaagatgcaattttcatggattaatgaatagagcaatttcattatggttagtagtcctaatttgcctagtgtttattacattaattttgggtccattcttacaaattggactctttcttcgtttaaatttctatcttttcatataattgataaagcatttcatatttctaaattacatggtcattcttttagttgttaagttccataacttttttagtatagatgtcttgataaattaggaaaaataataacttagtgtgaaagagttatcaaatcaaacttaa

SEQ ID NO: 245712 - DNA, 1026 bp, Cannabis indica
tgcatccatatgttatccaaagcatcaatatttatttcagaacaatcagtaagaaacatgcaatgaaacatgttattttcagtcccaccacaatgaaaaaataaataaacccatattaaattcatcctcgcgaataaaagttttaaattttcagagtttcttaactatagttatttggttgataactgctatctcgtgctttattgtatgacgaaaggttatacgatatggttgtataatataacgactgatttatcaactacgaaaaatgatggatatgatggatattaatcccattaaaatagcaaactttcaaatgaaaaatggtttactcatttagcaactgaggacttaaaaccccatattctaaaaaatactaattataattcaaaattgttgaagaacctgggtaatacaagaccctacagcagctactgtgtactgcagtcacactgcaatattttttcctgaattctgttatggcacagaatctttttctctgcttttccaatattgttgggtgtatcaattctgttaggatcttattgttttctgtgtaaatacgtgtcaattgtttattgattgtaaaggtatatcctctgtactacacttgtctataaatgaaatatccctcactcaggaaatgctgagcggagttttgcccaattcatttttcctttgaaatctatcgtggtatcagagccgtgtggccaacgccaatgtcgaccggtcaatctcagactccaccgccacctacttcgaccaataaccaacctcctcgcacaaataaccctgctacacaacctgccagtaacttctcctcttcctatggtagtaattcctctctgaactacacacaacccttcaatactctaaatcagccgttctccctcaagctagaccgaaacaactatacactatggaaaactatggtgtcaacaattattcgaggtcacagactcgatgggtttatcaatggaagtcgtccctgccccccagaatctgttccagctgctgcaacaccag

SEQ ID NO: 245713 - DNA, 784 bp, Cannabis indica
atatatatataattaaatcatgaagaaattagagacaaactatagttggtggcttccatggcacttgcacaaaaattagggagtgacggcgggtggagcgacagtgtgggcttaacttggtggaatggctcgttgagagagagagagagaggagtttttgaggattttggagtgggtggagggagatcaggaagtgcaaaaggaggtgaacggggtatggatttttgagagtgaaaagaaagaaaatgaaggagcattgatgaatctcattgtattttttttatacataccatattattagtggcggattattctgctggtaataacaacgtttcgccgataataaattaataaaaagatttttgaagataaatgagcgagaaacttcctacatttttgctatcctaattagaagcagacccccggctgctaatagtacatgagtttgctactaatacaattttatatatataaaataaattacatttaatagtagttgtctgtgagtattaattcagcggtgaatttgttccactggtaataactaaaattcttgttgtgaattgtgaacaaacttaaactattatggaaacatgattaaatttgagagagaaattttgaaataatgaatttctttctagaaaaatattatttttcagataaaatcaaaatatttatgaataggcaatttatttattatataaaaatataatttataaagtgttaaagtacgaattttttgcatagaaattcaagaccaggtttttataaaagtgacacgtgg

SEQ ID NO: 245714 - DNA, 808 bp, Cannabis indica
tgctcatctccatagattacaggaaaataatattcaagcaacataaacttgtacctcaggtttaaaacaactgccacacacataagcatgtgaatctttccccaatatttctggaacttagatattatttgaattgtcatgtcccacatctgatgacatccatgattcaatgtatgtcttaatttcacatatttttgggaaaaaatattggcggtagggtactttgttccaaaaaataattgtgtcacttcatgaaacaactatcagttatcacataattgttgagcattttgccaatcaatttctgaaaggacacacctcaaacgcaactcatgtagccttgtatgttcaactactgtcttgtacgataaagttgtaaaaaccctgtaaaaaaaacatatttttatataggctttgtattacctaattctagaagtttttacaccatatactaaaatttctaatttttttagttttttactgtgaggcagaatttttttcaaaaatactctgtaagtttatactgttgtgtactgtgttaagttttcactattgttccacatttattttttagttatttctgtaattattctattttattattttacagttattttataaaaaaaacaatatttttgtaaaaaattctgttaaaaaaataatattttgtaaaaaattatgtgtagcagtaaaattgtaaatttttacagaaaaaagtgtaacactccctccaacaccctaacctaatattccatagtctccctcatctcctactaccttcagaccccatggaccagcaccagaccag

SEQ ID NO: 245715 - DNA, 870 bp, Cannabis indica
ttttattaaatcaccatctctgtcactaaactaggcaacaaatcaattggaacagactttaaattgaaactgtaaaatatgataactaaatatctaaaatataataatatatattgtaaaagtcaaaatattagaaatggagagaaatatggaagaaaaatgtgatatgtataatagtaatagataggtgaagctctttaagagaagcatggtactatatagttagaaatattggttgaataactttgaaatgtcaaacattataatatgtgtcttaaaaggtactaattaacaaggtaacccaattggcaattttccccatcagatcacgatcataatgcctttcttttgttatttatttattttggtcaactccacattgaatacgctgctctaaatgtcaactccctactgatcccaacaatttattatgaaaagaggacacaaaaaaggaaatgtatgattctgctatattcccatcaagatagcccattaccttcaagtggggtggtggggcttttaggtcaaactcaagattatggatagaaattaatatatgtttgtatatatttatatagggacacgattttgtcccgttaatgtacttcaaggagatgtatttggtgatgtacgacagtcgttagataggatagttatttgatttgagagttaaggttgatttaggggtaattaggattaaaaaaaatagtaacgtacctgagacttattattatgtaccctgggacctataaataaattcacaaacattattacgtacgctgggatccacctgccgtacaacggaatacattccgtgttttgcatttttgggcacaaaatcagctgcctttatttatatataaatatata

SEQ ID NO: 245716 - DNA, 1171 bp, Cannabis indica
cctccatgatatggatgggaagctctcaaaaggttaaaatcgggagtgtagtggtgggaggcacccaaatccatcaccacttagggtcatgaattgaagaggaagtataagggcttagggatgtggcagatggtgagggttgcggttggtatgaagagaaaataggagagaaggcaggtaaagacgtttgatgtgtgagataggcatcaaactgtttgtaaggtggttgtggaggaatgaacagaagatttttgtgatgatagaaatagggtgttgtgtggcttagtttgaagaaaatttggaattcaggtctataagggggccaacggtgaggtggtgctagagaaggttggtgactccagttcagagtagtaggtcaagattgaggtggagcacgagggtaagaaggtcagttttgcaaggggttaaaaaatgtattaggaggtttgggtgcgtttataggaatggattttgggtgttaaggaatttaaaataacttgtagggagcaaagagtagtggttgtattttgcttgtctaaacatgcatcatagctaagcaataatgattaatctcttctattaggggttttttagattcggtgaagattggagaaacaaaggcattatattttggacttaacccattgaagagataggttaaatggtgaagtaagaaacaaagcatcattccattctttagatttgagagcctcctcattgcaactaggtacaccaaggctcgggttccatttggttttaccaaggtagactttaggtttaaagatcccagccttggcacgggtcacaatggggtgagatgaaactggttgttgcactactagttcaacaggttcttgttcctgcatttcttgttcaacagctggtgcagataaactttcagaataattagtgtgtgctacaaatatcaatgtgttcattaccttcagttgtattgttggttgatgctgcttccagggaactttgagagtgagaggttgcaccatcaggactaaaatcagtagggaatgaagtgttttcagcaccaaaagggtgcaaattaggtagctcagaccattgaggatagtgaacaacagtttactgttcagcagcataagtgtttaggaaaccactcctagaaaggaattctgttttcattgaaaattacatttct

SEQ ID NO: 245717 - DNA, 1117 bp, Cannabis indica
ctttcagtgatccaagatcaaagagacactaccttttcaaaagttttgggcaaaattatgggaaaccatctaaagacagtaagctatcacttagctatttctttttattaaaaaaatcctttaatgcagtttgcaataactgctacaacttttcgttaaaacaatgtcattagtcttgaaactttgcacagtttgacatataaatttcaacaatatacttcattgcattatgactttattctattcaagatataaaaaattataaaaatgagttatgtgtgtatgcatataggcaggatttaatagttagttgttcaaggttatttgtgttttctctctgattttaatggtgaaatcttgctttgttttgtctgggggactgtttactgctgtagcaatacacactaacataaagaatctttttgtgtagtacgatttatggtactatttctgcattggctggttggaagggtgtaaaatatgggtgacgatgttgttattattattttcattagtgaccataaagtggtgaaaatagtcatagttctagctaaatactcaatcttgatgtcataagtggtataagacagtgttaatttgctattatgagcaaactattgatacaatattgtatatgaatagaaagaggtgtttttctctagctttttttaattaattcgagtcactgatccattagcacaatacttctttagacattcatatcttaagggcttaaagtatgaattgcgttacataataaagtaaaattcggatatcaagatcacaaaagaataggtagtttttgctttgctgtgactattggcgattagacaatgatttttatgtataagtactaaaagttttatgtgtttaatgctatactttctatgtcataatatgtttgtcattgtaatatttagatgagtaattggttatttcatatattttttttctttatttgaatgctattatccaataggataatatttttcgtgaaatacagactatgatactggtgcaccatcctaatgtaaagtctcactgctcttttgtgaatggtcaatttctttgggtagtcatgccttttatggccagaggatcttgtcttcacatattg

SEQ ID NO: 245718 - DNA, 1056 bp, Cannabis indica
tttgggggggaaacggggaccttttgggaaccaaaaaaaaaaatttttaaaccgtcaaaaacggttagtttagtaaaacgggacgaccaaattcaaaaaggactgggattatacgggataagacccttacctcacgtcatgactcttcatgcttattctgacgctgaatgggccagctgcgtcgatgaccggcggtcactggtggatatttagtgttcccttaggagacaacctgatcagctggctgccaagaaacacaagtagttgcccgttctacgcactgaaaacgagttcagagcacttacaacactgctgctgaactcaaatggattcggtctcttttacaagaacttcaagtctcaattgctcaagttcctgtcatatcgggtggacaatcagagtgcctcggcacttgcaacaaatcctgtatttcacgcacgttcaaaacatatcgagattgaccttcatttggtacgtgatcaaattctaaacaaacaattctcggttcgctatgtaccttcagtcgatcaagctgcagatgttttaactaaggcactgccaactgacaggtttctatacttaaaatccaaactaaaaatggtttcaacatcttttagtttgaggggggatgttaatatagttgaataaattctgttttagttgttattacacctacttttttgtaactgtttccaactgtattctgacacttctatcttgtaactaattctgttaatgttgtaaaaggctgtgtataaataagcttcactactcaataaagaatcagttctggttttactttctttgcctcttctctgtttttcagcttcattgttcttttactctgttttctctaatctcatattctgagattctacaagcccatattgaggattttaatccaacatttgtctctctaaaatttgaagcttctgacacttagtctgtttctataatttacatctcgtgagaaataaaaatccgatgtagatgtaagctccattacttatgcgatatagggagttaactactattaattgtgtctctcttataatt

SEQ ID NO: 245719 - DNA, 1223 bp, Cannabis indica
ggtgatttcaatgattatctctcggttagtgacaggaacacgcatcactcccctccctctcatgctatgcattcttttcattcttttctgaatagatacaatcatattcctcttcatcatgttgggccaaaattcacctggcggcatggtttgatccttgaacgtcttgattggtgcacctcaaatcagctttgggcaaatttgtttcttcaagctactcttttccacttaggtttctatggatctaatcaccgtgcccttaagatcttgcttcaggacccacatttcagtaatttccactccactcgttttcactttgaaaatcattggctgaaggacccttcttttgcttccatggttaattcctcctgggccaactctcagaacctctctttaccccccttgtaatctttcctggacaagcaatctaactgtatgtcggatattaggacttggagtaaatctcaacattcttttaagtttcaaatatcccgtattcaggcggatcttcacaatctgttgaatgattctcaaccaaccccccaatctacttctcaagctgctactctccaatctcggttggatggccttctccttaaggaggaagtttattggaagcagcgttctcgagtagactgactgcgtgttggggataaaaatacaaaattttttcatcaccgtgcttctactcgaaaaaagaacaatctcatttgccaaattactctccctgatggatccacctcccacgattctactactgtaatctcccaatttcttgacttctatacttctctttttacttctcaaggtgtgtgtgatatggctgtaaactctcttcttcaagggatctctagcaggcttacccctcagcaggttgcttttcttgatgaacctttcactgagattgaggttaaacaagccttgtttagcctttcgggtgataaggctcctggccctgatggtctcaactcttttttctacaaaagtaatttgtccactctggggaaagatttcaccagagccatgctccaaattcttaaccatcagggggatatctcccacatcaatgaaactataattgtcctcatcccaaaaaaaaaaaaaaatcccaaacttgtccgtgattttaggccgattagtctttgcaataccctctacaaatgcctatccaaagttattgcaaattggttaaagcttgttcttcattccattatcagtatcaa

SEQ ID NO: 245720 - DNA, 812 bp, Cannabis indica
gtggcatgcttacatggacaaaaattagcgttatacagcaatacaactcactaataagaaggtcaaatcagggcctcagccaacgggggccccaatactcaaacagaacgacaagtgacagactagccacctcaagagggttggccgaccactcctggccgaccctatatcagccaacctctacataacacaaggctgaccagcttgctccatggaggtgcctggccggccaggactggacctggcaggatcctatggatagttttacacgtggaatgagagttgaactgcgaattaagccttaatagcccaataaaatagctaatatatgtaagtttaaggacaatttaatcttttatatttaaccaatataaatacctattattatttattaccttccccactcaatcctcttgtaaaaatgataacaaaacattccattacaaataatttaataattaagtttaatttcgattgcaaataaacattttagtttaatttttgacaataataatactcaagttatatttttaaaacttccataaatatttggtcattaaatatcatgtcaatgaccacatgactgttcatgattggtcaagatcattaaatttttattttatttaaaaattaatttaaatataccaattagaaaataatacgtgaataatgacttgacaattaacggataagtacttaaggaagttctaaaaatataacttatgtattattctcgtaagaaattaaacttagtatttatccgcaaacgagagttaaacttaggtatttagtatttacgccgtaaattactc

SEQ ID NO: 245721 - DNA, 1308 bp, Cannabis indica
cttcttattcatctcatcacacttatgtttcaatctcagctggttttccaaaaccatcaaaacccaactcacttcttctcctcaattgctcaaacagtaaaagtactaacaacagtgtctgtctgtcattattacaaacatgtggtgtgcatgaaaatgttgttgacaaaaaaagatgttttgatagcttattcattaatgattttgaaaaacttgacatgggttttcatcctagagacttgaattgctcacattacactagattgtactatgatgatgatgaatttgacaatcccaaattggggattagggtttcttttgatgtgcctgatcatgtgcctaatatttgtaatgaatgtgaaaaaacaaatggaaattgtggtgttggattgaggtgtatgtgccacccaaaagaatgtagtgagttctctattattctaaacaattattaatttttaagttttgtgtattggtatttttgacccttttaatttttttagtactaataatgttttcaatgttttttttattgcagaggacaaagtaatttctaaaggtgaatccatatatggtgttggtaaaaatatgttagtcattttggtttcttttctagtaattatgttttcagtttaatttgattatgtaatcaagtaattattattattatgttatattatatattcaattaaaaataagttttctaatattaatatttttattattgttattattttgaaagtagtggtcatgttttgacagaatctttcatatgcatttttgccaaccagacaatatgaataaaagtactgaatcatcacagaacatataccatattgtaaagagattttggaccacatttgggtgaatttttatttataaagagaatcaaacaaaaatcaagttttctatgaagagaaattagtattattgcacacaatgatccttcaaagaatattactcttaagttcattagttagaatgagattagaatattatttatattatctatataataaatttataagaagattttaaaagaggagaaaagcaaagggagtgtggagatatatctagcttcaatcaagtccaacaccctaacattaaaggctcataaattttgaaaaactaattagaatttttgccctttttaacatttacaaaattatgtccctaaatttttttatcagttaaaaattctctctaaactattaagactattggatttaagaacatttatccaattcaattcaattttactaattctttatttgtccatatactaaattatactccttagactttgatatc

SEQ ID NO: 245722 - DNA, 657 bp, Cannabis indica
ggataggcgtaggtatcacaatgttgaagggacatgtcacacttggtatatgtgtgaccaagtttaccacagtggtaaccataattttggatgccctcatattgaaacttaagccattttgtaagggcaagctttcaaaaactaacattcatacctctatgaagggatgatgtagtatcaaggagcccacgaatttgcaggaaaaggacgatggaatcatatagagaggagagttgaacctccaccaatggcatcaactatggactgggccagaccataagaacagtttctaaagggaatgaagtggacttgcatccagagaggaatatacctcagttgtgtgggaagaatgatatcaaagccatcaggtatggcaaacaacataagagatcgatcaaaatgctagggttgaccttcaacaacccttctcctatctcttttgcaaccaaaacggaccatgaaagaacagattggtacatagagataagaagggagacgtgtgatccagacatccttcatagcattacaaaatgttgaaaattattttatcaggatcttagatctacttcacaaagtgtgttgattaaacacccctaaaataatgaacttctaaacgaatgaaataaacacatataaagtttaagtaaaccttacatt

SEQ ID NO: 245723 - DNA, 1376 bp, Cannabis indica
attaaaaaaaaaattaattgaaaaacaccaataatttatattttaaaaaacaaattggctcccctttctagatttttttatttattttaatattaatcaaccttattatgctatatgggtctaactgatcaattttcaaaatttgtggtcttgtacttgcaaacaggctctactattcggcccttggcccaaaagagttacattagatggcccagtcctttgacagtcatatatagaagtagaatttttaaaggatttttcatttttatttgtatggtacaagtttgtaagaatatgacggtttgtttcataaaaaagttattatatgggaaattcatcaccccaaagaggtaactggttactctcctgactagctaccctaaagtaactggttaccctttttttttttttccattttttgtcttcttttttttttaactatttattgagattttttccaaaaaccatatattttttttttttcttaaaaaaaggtccatgttttctacaatttttatggcttttgtatttacaattgtgaaattgaaatttgctgctaaaacattttaattttgtatttatttatggatatatataattgtgatgaaagtaccaaaatattaaaattattattttatcatcgttttcgaatcctataaataaaataactaatatgtaatttatattttaatgagcttgtgaaaatattctcaaaattagggctgcttatcgaaaccagaaaatcgcagtttgaattcagactgcgataatctataccattgtagactgtaactagggaaactctttttggtggtctggttaatacggaccgtttaccgcataatggttcggttgcggttcgtaataatttttttttgagtgtagcgtaatggtatttttacaatcatatattagcttaatagtttaagggtcctaggttcgaacacatgacatctcccttttttccatccctccctcaccactaagctaggcttagtggcttttgcggttcgtaataaatagttaacgattaaatcggatcggaccatttataataaataattgatttatatatatattttatatatgaatatatgtataattttgattttttttttgtatgtcaaggtttttattgcatgaattttagagttttatgtttgacttttgagaatatttttatattgttatttatatgttatagatctgttacttatcatgttaaatatatattttgaaaaataaattaaaaacttagtaaaattggtagaattacttaaaaaaatatgaataattataaattccactgaaacagtggcttcgaatcaaaccaaatcgcttaatagtttggtttagtttagtttgagaaatttatt

SEQ ID NO: 245724 - DNA, 552 bp, Cannabis indica
tcataatgaaaagagagaattgcttgtacaaaaccatgctagtccctttccaacttgagtctgagatgatgcaaaaaattcttttctacagtatccttttcaacatctaggaagccaccacacaaatctccaatctttctcattatattcaaattctagagatgtagaggcagtcctttgatgcctatccatgaacttctgcattcaattttcacgtctttgttttgttctttttctgaccatcaaatgagagagacaatggtgccccttgtttctagaattactttcttgtttaacttcagtaacatttccatctcctcctcattcttacaccagattacagtacggtcatcatacatttggttgaccaccaattttctgtctatttctcttgagagattgtagaagatgacactttaggccatctcgctattgtctctagacatcatcacagccctactccagtacttatcacacttttctgcttgtagatactcatgaaatttttttcgctctgttctctttttcagaaacatgttccctggcttgaag

SEQ ID NO: 245725 - DNA, 1380 bp, Cannabis indica
tgttgaataaaatggattacattgaaatggagttttatatagggcataaaatccaacactctaaaacccaagtttaaacctaaaaagggccaaagcaaaaagccattcccaaaatcgaaagagagagagagctaagagaagcccatcaccatcgccaccctgcaacccacatggacgaagccatctgcaacccccaaccagagacatgagacctctcaaaagagaagcccaaccactcaggtcgggccgcttgcctaaaaacttaggtgccatggatctagcaccaaagatcgagtctgatgcccaacaaaaccttgcaacgccgagacccgtcagagaaacctccaccttcgcttggaaaaggcaagaagcgaagctcccaatcgccaccaacctagatctggccagtgacgcccatgagagaagaagaaccttagaggagacaaaacaaaagggaagaaaccctatttagagagagagagagagagtgatccagtttagatttgtttttactattaagacttttcattattattattattattattattattattattattattattataaagattttttgcccaccgtttggaataattattttcaaaatttatttgaatattttttaattaatttatattgtacttttttattttaatattagctatattattttctcccttttacttttatttcactttctctcaactcctcatttaaaaaaaaacaaataaaatagttaccaaatatattttagtttttatttttcaaaatcaaaaataaaaaatagttatgaaatatatttttattttttaaacacaaaaattaaaatttgattttatggtttaaaaaattcaaaaacaaaaactttacaaaacaaacccattttttttttcacaaaaagcactcataatatgccatattgtttctagtataatctttttttctttttttttattttgaaatggtttctagtataatctaatatttaaatttctacaaattttaatttaataaataatataaaaattaataatcactaataaaatatcacataaatattgtaatgcatgttgggcacctctttattatcttataattaacaatgctcatatataatgtatatgttgcaccgaattacataaaacttgtactatttttgaaaaggaaaatgctatacacttacatcatgaaaaatatatatattttatcataaatattaatttttatttcatttttttgaattatttgttaataaatatatagctacatcactcaaaataataactaatgataatttctgaaaatatatataaattttattgttagtgaatagttagttacttagttttctgttggttaccaactgttcactgc

SEQ ID NO: 245726 - DNA, 787 bp, Cannabis indica
taatatatatatatatatagagagagagagagagagagaaacacaaacatatttaatttttcaaacaagataggttagtgcattaatgtactatgtttcatgtttcttccacttcacacatgcctttgtttttagctttcaaattagaaaatgattctatgcaagaagaaataaaataaaaaaaggaggagatttaggagaatgacagtaaatatactctagtttagccaaaaaaaagaaagacagtaaatatatttgtttgttttaaaataaatatcatatatgtgctcattaaaaatcaagtacaaaaaacagaaaaacttattaccaaaaaataaattgcttcaatttttcttgcttaggttccagcccaataactcttggtttggataaatttaagggcccatcagatccaaagaaatgtgtttttctttttataaaaacccataaaatttagaggtttttacaaaaatatatacctatctttttttgttatttttacatttttactttcatactttttttttacacttttattgtcttaaatttccaaaaatactgtctaagtttcaaaattataaaaatattatgtttcagtaaaacagaaaaaacaactaaagcaactaaaaaataattataaaacaccaaaacaacaacatgaaaacaattatgaaacaacaaaaagacagctacaaaacagcataaaaaaaataagacaccaatctcgttgcaataagtaaaataatatcaactcctcggcttgtttttgtattacgaagtttttttt

SEQ ID NO: 245727 - DNA, 1359 bp, Cannabis indica
ggcaacagtgaaaaggcaaatgatagtgagaagtattcttagtagcaaacttcacaccgataaaagggtagaagaaagacagaaagagaggagtaacaaccttaacatacggaatagtagtgagctcgacaatctctgctctcactccaaatgaaacacgattttgaaacttgccaaccagaccttcaagatcctgccatccaagcctctcacaaaatacagtgaccatagatgcaaacctaccagcattctcttgtaatgcttgcaccatgcctctggccactttaaaagcttcacaaacctcgggaacaggtgcttccttcaccccgtagtaacaaagaaaaaccaaagatttttcagaataaacataagctacgaacatggattcacttcaaataggcaaaagaagaagaagcacaaaaaaagataactgcattgtttcttcaatgttcaactaaggaacaaataatgggtaattaaaaaaaatggtaaattgcatatttttacctatttaaacaacagtatttacaatttttttaattattagacttattattgaaattagaaagtcaaagggttaagttgctaaaccatacctgaactagccttgacaagatcagagctacgtagaagcgtttacacactcgaagagcttgatcatctgaaagtaaagtattgtttgtgattcccagttggttttgacctttactacgcaatcctgacgtattttcttttggctttgaagtgcgtattggtgcaccatgtgccatgcgcatcagaaagggttctgccactccaactcgatgtccaacagactgcacttcataaatgtaaaatgagaacaatttcagatccataacaccacattattatttcaaaatgccttgtcacctcacagtactattgtttcaaagtatctttgaaatagtaattgataacagaagtatttacacataaaattttccctctcatttggaaagttaaattattcatttaagaaaacacccagtaattaaacaaagcaagaacatatcattgagatcaattacaaaaaacgatatcttcttggggttagcagtgggtcaccatggaaaaatcaattaaaatcgagcatcgagaaaagaaggtgacaaatattgtcctcggtgaggcaagaaaaagagcaccaaaatgcacccaagagacttcaaattgaaaaaaagccccaatgagatttcatctaaagaaaagttatcatttttcttcgaacacaaaaatggttacagcagccaaatgaagttttcattgtattaaaatgaaatatacctggtcaagaggagacaattgcatgaaccgctcgtagtacaattcccaatttgg

SEQ ID NO: 245728 - DNA, 957 bp, Cannabis indica
actgtttgtaacagtattttacattgttatacaaagaaaatttcttctacagataggagaaggatgggaaacttttgtatagttagtaattaattaattaatcgagttagtcattggtgttagtaattgtgtctgtaatggaatataaaaaaaatataaaaaaaattataattaatctcatattacgactcataacaaaaaacaattacaaaaaataactcaacacataactcatcacacataattgattatatggacaaagctaatgatcgatcgaagccgttcgtactgattaattatatatatatatatatatatatatttatatgagaaataatggtttctagaaagagagatatcatgatcgatatctccccaaaaaaaggattggtagattagatttgatatataggaaaggacatgtcgtcaaatttagggtttccctggacatcagcttgattaaaatagcacacgctcacacacatatattattttccaataataatatatatatatgttatttgtgggctggttgagatcaataatcaagcacatgagggtggaattttagggactccttgtcgttgaagttcccccatcacactatccattgagggaggttttaggcccaaaggaagtggcagccatggtttcgctaaaacatctccaatagcttcatctacactctcttttgactgaaacaaaatatatattatcagtatatattttcaatttatacgtacactgtatatgttataattattttaattcatgtccaatgcacgaactataaaaagtgtcaaaatttaatttttgcatttgagtcaataccttcaataatttgacactaagatgacttataataacaatgctgtaattaaccttagaaaaaaaaaacaatgctgtcattcaatatataattaaaaatatatatattatattgagactgaccggatg

SEQ ID NO: 245729 - DNA, 660 bp, Cannabis indica
aaaaaaaagggaaggaaaagaccaaaatgttcaaaatgattttttatttaaaaaaatgttaagcctaaattcacgcaacgtttaaagttgagagcaaattaagaaaaatggagtgtgaaatttaaaagagcaacataatgtgtaatagtggaaacaaatgaggacatttaatcaagcttacgtggcttacctatacattacagctagagtgacaaatgtgtcgttgacactctagcccctcccgcgttgttgcttgcgtggcattcttttttttcttttttttttttttttttgtaaggaggaaaaaacaaggtttaaatcttaattaaagaatgagtggacatttaatgagcgtacttaatggctcaatagaatttgagtaagaatgcttagtcatagatatagtgaccgactctcatgaatagacagacactctcaacaaaataatatcttcaacttcattgcgagaaattgacgataaattggacttcgcctacagattagattcagaatcatatttgtcttattatgcacccaaacaatcaattttctcaattaaatatttttatataaatttatcgattaaggacgtaaaaacggagccaagctttaaagctttaagacaaatccttatcactataatcaaatagataaactcgc

SEQ ID NO: 245730 - DNA, 690 bp, Cannabis indica
gaaaatgagtaaaactattaccatcaaaagaaggcttgctgcaataactgcacgccacatatatatgaataataataaattatgatataaaaataattctatgataataataaatataagagaacttccatagtatatctaaaaatataattctttattttctacaaactgtttttatttacatttttatagattttttttcacatgttgtcccttgtttttttagtctttttgagaaatgttattttaatgttacttttctttaatagcaatatcaaaataatattgttctaaaataacaaaaaaaatacattattttcccgtaacaacaatattaaaacgatattttttcgaaaacaagggaaaaacaacaatctatatttttataaaaaaatccataaaaatatatataaaaaaaaaagtagctctataaaaatgtaaaaaaatttatcatttttttttttgcatataaacatatatgaaataatccgaaaataaattctataatggattctattttgtttgtaaggaaattttttttagttcatatatactcattttgatataataattgtatatgatatatttacacaattaatgaatattgttacaattatagttacctgtagctaatgtggtaaaccgaaatccttgacattatcatttttcccatctccatgcatcccaagt

SEQ ID NO: 245731 - DNA, 746 bp, Cannabis indica
tcgacttttttaaaatttttttttaaaaaaaaaaagaaaaatataaattagacccaaaatgaaatgtggaatccctggcaacaccatatgttgacatcataaaatgttgcctaaagccagcttcaacctgccatagtggaccttctttttttatttttaattagaatatttacaaactaactaataataaaaatgggttaggagcagctatgctacttatatttaaggttgaaaagttaatttttttttttacatttggttccattttattgttgcatatatacaagatgtgtttgtcataagtgggttcatatgagatgaggtggaagagagagaagagcaatattgtaaaatttggtacatgtgccaacacaataaatatatattttttaaaaatctttttttattattataaattgttattattattattttttttttttttgaaaaaaaacgtacttataatagatgggtaaaattagactttcaagtcattataaaataagtttgcaagaacagatgatagtggaataaaaccaaatctctgatgagcaaaaacccaatttactatattatggactacaaaattacaagatctactaatattaataaaattacatccaataaataagggagaagaaatattttttagaaatattttttattattattaattgttattgatgttggactttgacactcttttttggatgtgaaatgctctaacaatattttgagaagggtta

SEQ ID NO: 245732 - DNA, 959 bp, Cannabis indica
acctagtatatataaatatatgtccagtcctcaccaaattaaataaatatatgtagggaatgtttttcaatgtaataaccaaaaaaaatattattgtgaatattaaaattaataatgatttaattgcatgatgattttgaagaatttcatcataagaaaatataatccagcagtacaacaaaatattaggatatcatgattatatgagcattattaatttattaccttaatattatagatactagtttctgctctagctagctaaagtctctttttaaagtacttctcaactctcactaaatttactacaatatttgaccccacccattcagaatgccaaataacataaatatataaaaatacttgactcaataatataatagtggaagtttatatcaatcataatcagtaattcaattataagtgatttatgcattaataattttaagtggatgtttaaatcaattatatataaataatcagtaggcagacatttttcaggggaccgaaggattaatactttaaatgtttcattttccttttctagaaaatagtttctttttccttttatcaaataatattattgcaaattatataatcttattaaaagaataattaagctaattaggatttttaccaactttgacatgtattaaattattatgcgccctgaacttttaagatcattaaaaatgtcccctgaactattgagattattagatttaaagacttttttctaattttggtaaaaaagtctagtatggatgaaagttcagtgaccataatttaatacatgtcaaagttcgagggacatgatttggtagatattaaagtctcgggagcatgatttagtttatagacaatcactgaaatagtaaaattgaatgaagttagacaaaaatctttaaatccaacaatcttaataattcaggggcatttttaacgaccttaaaagctca

SEQ ID NO: 245733 - DNA, 1503 bp, Cannabis indica
gcgattgctaaagctaaacttgatgaatgtcaatctttacttcagcagcagcctaggaacgaacaattacaccagcaagaaatgatctcaggactcattatacccttgtattcaaaagttacttgtcttttttgcagcaaaaagcaaagctaaattgggcaaaggcaggtgatgaaaactcagccttgtttcactctagtattcgagagagaagaagacacaatcaagttattacaattgtgaatgttgagggagaaatgattgaagagccgagggctatcattgatgccttcattcattattacaacgaactacttggcagcagtatgcaaggaaggaaatcggttcagcagagtattcttagagaaggggaatttctttcccagcagcaagctgattttctcttgagagactacaatcaagaggaagttaaagaggtaatttttgctattcctggtaacaaggctccaggacctgatggttttgggagttctttttttcaaaaaaaattggagcatcataggcactgaagtagctgaagcaatcattagcttacttaaaacagggaagctgctcagggaaataaacaacactgttttaacacttgtgcctaaattaaaatgtcctaacactgtgagagattacaggcctatcgcttgttgcaatgtgatatataaggcagccaccaaactaatatgctcgagactcaacagcatactaccacacttgatagcaggtaatcagggaggatttgttcaagggagattcatagcacacaatgtaatgatatgccaagatctagttcgtcattatggaaggaagttgacaaagcctagttgtgttattaagcttgacttgcaaaaagcctatgacacgattgaatggaactttattgaagaaatgttgtttggattgcacttccctgctcaattcatccaacttgtaatgctatgcatccgaactcccaggttttcattgatgattaatggatccctacatggctactttgaggcaaaaaggggactaagacaaggtgatcctatgtcccctttgctttttgtgctgggtatggaatatttaacaaggatcatgaggaaacttgggcagaaaaccgatttcacttttcaccatagatgcaaggatctggctttgaatcatctcatgtttgcggatgatgtcctattattttgcaacggtgacttcaagagtatcatttacttgttgtagggtcttcaactgttctctcggacttcgggtttgcaacctaatccctccaaatcagctatatattgtcatggtatgactcactcagagatacaacgaattcttgatgcttctggctttcaaagaggtgaagttcctttcacctatctagggattccgatcagtccaaaaagattgtcaccaaaagattgttctagtttggttgaaaagatgactcagagaatcagagtttggagtactcggcacatttcttttgcgggcagagctgtccttgtaaac

SEQ ID NO: 245734 - DNA, 597 bp, Cannabis indica
aaaaaaataaaagaaaaagacaaataataaaataaatctaaaaaccaaaaaagaaaaaaagaaaagtgtggccggtttaaaatctaaagaaaggcccaaaaaagaaaagaaaagctcagaatgagctgtatactacaaatttctgaaatttcatataatgttaaaaacttaaccttaaaatatgagtcaaattattttattttgtttcaaggctatttttggctttttgaactatgatctatgcatattgaggatcttaaatttgtttttttgatttaagcgtttgtatattacaacatgttttacttgggactcgaacccaggacctctaacactcacacacccacctatggccacttgagctagcctcaagtggttagatcttaaatttgtttagctcgttaaaaatagtctttaaactatttatttcttctatccatttttatcatgacaaacaaaatgatgacataactttttagtccgttactacattagttccatgtcaacactatatatataattaattttaaaaaataatttaaatttttaatttaattttacgtaattttttaattattaattaaattttaatttaat

SEQ ID NO: 245735 - DNA, 1462 bp, Cannabis indica
ataaatggttcttatctagttttttgcaccttgacatggcaataggatcaaatgacacgtgtcccatatttttgatacctgtgtggaggaaaatatccctaatagcttgcacacgactaataagtatctgtaatagtcagttatccgagcaggggtatgtagaagatatctgactaggtagaagcatgttggtgttgagcgacgaacatggcttcagagattaatcttgattgtccaaacgcgaagacaatccttataatcttgggattgagtcagagagaaatggcaacctattctatttcttattttgtatatattgtcattatagaatcattgttatttcctattttgtgcactgtaagcaaaagggaaaccatccctcatgcgttaagtcccaataaatagtgacctagcctcattatgaaggggattgagagaattgctgctaaaatacattctagagagaaaatagtgatctaagagagaaattactcagagatcaattataagagctttcaaggggaaaaacactctgttccttctcttaagtaggctattaccatcttacagggccgaacctctttaaaacctggtgttcactttactttactgttttggctttcttttaattacatcacttaatcactttatcatttgactcactgtcgttggctagaagcgaggtcaacatttcggtgctttcattgagagcaaaaacacaactattttgtcttaagttttgacaagtaaaaaggatggttgtaccaacctacagaggtagccttgctaattagggtgacccaacggtgatagatcccaacgtacaaactcttggaaacacgagaggaccaccagggacaaaccccgagcaagtcactacacaacctcctgctgtaggccacggagtgacttcccctctggctaggatcacaccaggcttacaagaaactagaaacaccagttcgacagccgaccattccactccctataccaaggttccatccacaactaatactcaaagactagttgaagacgaaactgaactccaaaatctgagagaggcactcgggctcatgcaaggtcataataacactttgcatcatgatcaagaagacctccgagaggctataaatctcgcattcgacgaatagaggcgtcaattcatagaatggaggaaccgggagatggagattatgaagtctcaccaggcagccattgatgatcgtactaggcaggccaccgtactaataagaagggcctacaaagtcactaatcaagaatcggctactgcatctagtattcccttagtcagatcagaagggtatgtagctgggcataccacacaaaatcacagtagttagctgtccaatccaaggccacaggtccaaagtgtgggccaaatgatagacaactagatcctgccagaccatcctttaagaggagttactgttggaaattattt

SEQ ID NO: 245736 - DNA, 1886 bp, Cannabis indica
ctgattaaaaaaatgttactaaatgccaacttagagtattgaaaattaaaattcaaatagttgtttatatgtaaaaaaaaataaaaaataaataaataattatgcacataaaatatttaaactttattttaaatgattaaattatttaaaatttttagaaaatttggaggtagtgcttttattttattttatttttgaggtagttctaatttacattgtatccaataataaacaaatttaaataaaaaaaattctaaatgcgaaaataagtaagaatatataccgaaatggctatacatttttccaataataaacttttaggcaatacttttttaattttcaagagcttatgtagttgtaattaaaaaaataaaattaaaataaattaaagggaaaacgacaccgtattgttgattggaaaagaacaaaaccccaataaaccccaaagagaagttgaagaagatggcgatggcgatggcgatggcgtggaggcaaatactgttcatcaacaaaaatacaatctctacaccttactccacccctcctttcgctagatttttctccaagtcgattccttatgagggtaactctcacatttttgatatatttattgtaatgagaaatttaccaagcttaggttatggattttttattttattttttttaattgaaaggcaatgctatataattgggtttgtccatttcatgagaaaattggttattatgaagaagaaaatattgatgtagtagtagttgtttgattgcagtgaaagttggaataccagaatttttgaatggaataggcaaaggagttgaaacccatgtggccaagcttgaatctgagattggtgacttccataaactccttgttactcgcactcttaagctcaagaagcttggagtcccttgcaaacacgtaatgttacctccattgctctcttctcttaattaacatgcattattcttaagtaaagtgttattcaaacaaggtttactatgaatctagaaatgtatactacgaactagaaaccagttatgtctgggtgttgtaatgttaaagaacttgtcaaacaactaaattttgtttcattcttgcagagctataatattcttatctagaggcctgttcttagtgacttaattttccttaatcaaagtgcttttttgtcggatcgtattaataaattcagtcaaaaagccttatactgtatggattaggggttttcctcagtcaaaaggccttaactggtgaaccctttttttgttatgaagttgtgtaggctagtcttacatttgctgaccctttaagcttgccaatagactctgctagttgttgtatgtttgaggttgtagagttatgcttaattacatgattgattgtgtttgcattgtttgtttctaatttagaaacatgtctgaattattgtgttccagaggaagctgatactgaaatatactcacgagtatcaactgggactatggaggcctcgagcacagcctgcgaagccataaattggtttgtattaacttgtccatactcttaatgatgtagaaactgtagatgatgaatcccagtttagcaatttcatgtggaagtattttagtccagagtcttagctgttgaacattcttaaatttttcccattattatactttagtctttagattttacgaggttttgtagttaatctatacttaaaaccttgccttaaaggcgatgaagataatttgcatgtgaaatctgaaaattgcttcaggcatttaagtgaaaggagtatagaacagtaactcgtgatttaggtccaacttgattactctccaaaaccaaattcgacccttttatataactttttttattattattatttatagtagcagagggtact

SEQ ID NO: 245737 - DNA, 711 bp, Cannabis indica
aagttagtagtgtatttttttttaagtgttagtagtatatgttatagtattataaaaatgagataatttgaaaaatgtatttcaaataagagaaatgttattgtgcaccagtagtgcctagcaccctcctatgtgtcaatatcgttacgggtccgattaagtattgagtcccatataatttaatataataatttttaaggagtattgctagtcaatcgcaacgcgacatatcgagaaagtactaggtaccactagtgtcttatagcaatgctcttcaaatagtagaataatatacatatatagttccaacttccaagattcgatcaaaataactaattacgaaacttataatacttaattaattgttatggtagtctgttctgttgtcttgaaactatgttagttacattatttatacaccacattggaccgggggtgatgaattgagtatcatctcatgtgatgtgattttcttctgggagcttcgatctcctaatccataaccacatcaccaccgtctgataagaatcgtcagatatcaagggacccacctgaccacaaagtagacagacagagggattattggagggccatcaggctatggtgcgcgcgctggcccgtgccaacccgcgtggtttcggcgtaccacgtattctatatttgtatcccgcgcacgtggtagaggcgcatcatcatcatgccttcctttcc

SEQ ID NO: 245738 - DNA, 827 bp, Cannabis indica
cagggaaggctaaggtgttgggaacattagttggaatagggggagcaatgcttctaactttgtacaaaggagtggaaatcaatatttggtcaacgcacgttaactttcttaaccacggtcaacataatctgaaccacgtggtatcaacgaatgagtatggtaatcgtgttttagggtgctttttttctgtggccagtagtacgtgctactctatatggctcataattcaggtgattaattaattatatatttcttttaataaataaatgaatataacaaatacaatatgattattcatgacaaaagaattttttcttataaaagagaaggtatacatgtatatgatcatgatcatgaagctataattaattataaaatagataatactcatttttcttaattcgtaaatatatagtattaatggcggtatgtttttgtttaattgacagactaaaatgagcaaggactatccttgtttttattcaagtacagctctcatgtcattaatggcattattacaaacagtaatttatgcattgtgtacagagagggatttgaaccattggaaactaggttggaatattaggctactcactgccacttactcggtatattttagttctttttttagtatcattatcatcaatatacatgcaaatattacatttctatagttgtataatattaaagctaaatgatcatccatgcaacaatcaattgaattgatactctagtctctaacatgttatttaattatattctgtaagtgatatatgttatttattttatattttgagagtaaacataatagaaataaaaaaaaaaaa

SEQ ID NO: 245739 - DNA, 591 bp, Cannabis indica
caaaaatcacctaagcatcaaagaagtcagataaatgatttttggtatttggagttttggaaggggaaattttcaaataggaaaaattggggcaaatgttttagtataaacaaagatttcatttttcatattttttgctgaggaaattttgagaaggggagaaaactattgagaccatgccttctctaccatgccacctcgatctagatcttcggtccaccacgcatgatcgtcgccagtcggccttcctctggtgttattagcgggagtgattaccgaattgacctcacccacattcatcattgtctttcttactctcaccagcgtcgtcgtgttttaggctcaaaattgttatggaagggaggttagttaatgttcaactcggtttgttgtgttgactaccacaactaattttggtctcttttaatgagtgatgatcgatgaggttcgataccccaaggtgtataggtagaaatatgaggaaattacactacatacatcttttagctttacttttaatttttatcctttttttcaaaatctattatgtttattttttttttaattcattctaccaattttacccctatc

SEQ ID NO: 245740 - DNA, 718 bp, Cannabis indica
tctattttctatgttgttaaatagtacttgtttctattttgatgttaaattgtttctgtttttcaatatgtcttgaatttgtttttagtgtgagttgtttccattttttatgattttttgttaccattttacatacatatatatgaagttaaagtctagttgaatttttctttttgacttgtttccattttttattttctatgttgttaaatactaaatgtttccattttgatgttaaattgtttctatttttcaatatgtcttattttgttttcatacaacaatttatcttgtttctatttttagtgtatgatgttcttaattggaaaaatttccccgctttaaacaatcagatagaagggtcaatttgtccaagtttttatttaacttcactcgttcatccattgccaaactctgattccactttggtacaaccacattggttctactaatttttcatttcagaaactctacacctccaaagaataaacatgagtttatttaataaaaatatctacatcattccatttaacaactaacccaaatacacaaagctaaaccaactaaataaatgaaataaataaacaagtaaaatgttgtgatataccacctgtgacagtcagtagtcccgtgatccgtaaggggaaatactaggtaaactgtacaatcatacactgcctggagaaggtcaagtgggatgattctgagactgtgtagg

SEQ ID NO: 245741 - DNA, 734 bp, Cannabis indica
ccgggcccggcccgactgacattcctagtactgttatcatctgacatcaaaacatctttcctaggtggcaatattttatgagtgttaacaggcccactaccttcttcctttgacactagaagcccattactagcctcctcttcagtacgtctccttttagaatcaataacattaagatgaaattgattttgttacccaatcactgccaccatcagctctttatcagctacaatgttcacacccttattaatattctgttgacctgtagccatatcctgatagataaaattagtaacaacattactcccatatcaaatcacacactgattatccccctaatttcctgcatttgacataattgccttgctggacgattgaggctgctgcatcaccgtcgcatcagaaaaaacatcatccttcagactacgatcacggagacattgagaactgatctgatagctctttcttcttggttgggcacgcaagaaagaaccataaggcttaattatctgatcaattagtgtagtgaaaagcttcggacagaacctttcggtgtgaccaatgatccagcagataaaacaaaatgtagtcacatattcatacttgaaatttgaccagaaccaatcactccctgttcttcgtagcttcatctgtcgtttcagtggtgaagtaatgtcaatggtaactcttacccttaggtattctcgccatataccctgaaagttcttcggatc

SEQ ID NO: 245742 - DNA, 677 bp, Cannabis indica
taaattttcatcatgttttcccctaatacgaaccatgaggctaaggatctttttatgaattccttgggtcttagtactgaggggtttgtgagtaaatacctaggggttccccaatgtatgggaaggatggataattctatgttccattatctggtccagactgtttcttcaagaattaatgtttggaatggtatgttcttttctagggtagaaaagagacccttatcaaggttgttgtctaggctataccctcttatgaaatgttgttttaaactaccaagatctacctgtaaaaacctccaaagacttatttccaaattttagcggggatcctcaaataacaagaatgaaattcattaaaaaagctgatgtagcctgtgtttctcaatttttttttttttggggggtgggggggggggtctaggtttttaatccatcatccatcgcaaccaggcattacttttcaatcaagcttggagagtttggatgatgcgtaccgtaagccacaacaaatttactaatatttatttccaatacctccaattataatagtataattgtaagtagaggtagatcccagaagcactatgtttatttaattatacagaaattagtgtcaaaagttagaaaatgggggttttaagattgaaattaaaatagcagaaataaaagtaaaa

SEQ ID NO: 245743 - DNA, 1652 bp, Cannabis indica
tagtaccactctttaggggtatttattggatcacatccaatatttttaggcctattcagatccgatctaattagattttagattttaccatccaatccgatccaattgatcaaacattcattagatgttggattggatcggatccaaccaatgaatgttaattttatataaatatatatatacatatattttattacgtataacaacataaaatctaattactcatctaaactaaatgaaaatattaatatgtttgattggatgttggatgtattggattttggacaactcatctaacatccgatccgatccaataaataacattcaattcgatccaattatgattggacatttaatgtttgacggttggttgtaattggattgttcggctgttattagattagatgaatttatgcacacccctactactcttgcaagaaaattgtgcttaccaaaaagaggcaatccagctttagacgataataaatgtttgtcttctctgtgcattcggttagtaatttgtaattaatgtaatatattgctcattacctcacacagaccaggcgtggttaaagctttggaagagtttaagctttcaatctatggggaccattatgatgaggaaactgaaaatgctggagacaagaaggacagtgaagcctccaaaaagagaaaagctacttccgaaattgcagttcaggagtatgtaaagtatgattggagtaaacttgcagacaacggagaggttagagaattgttttgcttcagtaatctattcttctatcttgcaaagagcatatgatcagttttctgggaaatattttattcttaataatacaaggaaacaaagaacttacacatattgaaagtttgcatagtttctacaatgatgggggctttttaaaagaatccttgagcatgtagaaaatgtataaaggctaacaatagatttcagaaaataaatatttcatgatttttgtcttgcagttgaaagatttgactgtaacagagttaaagtactatctaacagcaaacaacattcctgttgctggtaagaaggaagctctgatcagtagaatattgtctcatatggggaaataagcaaggttagttgttttttcgtgtataccattgttatgttctttgacacaagctgtttacttggggtcattttgtattttgtacttgactgtttgttgacacttgcataatagagaagtgtttattctctttaatagtacaatgaagcgaaaaatcatgtagatgcattcctctatatttgtgatatgaactataagctaattggacacactgtcttttctgttttaattcactttctttctttccttcaatggctcgatatgtgaagctaagcatctttatttttgggttctacatggaatagatctttactaacacgtctaccaattcagccttgaaaatgaaattatgttgtttcaagtgtattagatctagcactgctagtacttacgttatgatatgtaattaatctcaaccatacacttgtgatctttactttcgaaatatcccggcttaggattaattacacaacatttgtgttaatttttgaatgtacaaattcagagcgtctatcattcctcaaatagaaaaaaaaaaaaaaaaaattgtac

SEQ ID NO: 245744 - DNA, 694 bp, Cannabis indica
ttttttttattatatattttaattttaatttattattatatatttttatttaatttaagtttttctttttctaaaaggaaataaataaaatagtccagtctattcttaaaccaaacacagaattactttcagcataatccaatcttgtccagtccagtccaatccttttcagtccaatccagtccaatcctgcgtaccaaacgggcccttggtttattgtcacaatacaacaaagtgatctttctattctatccacaatgcgcaacccgatgacaaattttatcagccatataacatggttggatgcctcataatatgcaacaaattctgttaccatagtaacaatttaagcccaaacccaaaaaaggtcattgatagaggcagaagtaatacacacatatgaatatatgtgtatatatttacgcaactcaatgaaatatatattcaacatgcaaaataataaaatgcttaacaaataaatttataacaaagttaatttcaaatcgaaagtgtataaaaatctatttttcttgccttatgtaaatatttatattttgttagtgatattcataaaaaaataataaaaaagaagagagaaaattctttgaaactaattttggggagtaccacccctttaaaacaatttagtgtttaatttattctgttcatgtgttgtgtggaaagtagtagtggc

SEQ ID NO: 245745 - DNA, 772 bp, Cannabis indica
ttgctattgaacacctttaattacgaacaatgtctggtaatccatgaggaccagtaccaccataataaaaaaaaatacctacaaatgtatatatattttcgatcgaacgcataaccctattttaccaaatatagtgcctccactatttgggccaacaatttggttttctaataataaaatgttggctaattagaattttgcaaatcaaactttgtgttatactcattggctacatgttatgggtataacaaagagaataaattaactctgtaaatttaagagtcgaggtataattgtctcctcacatcataaagctcatgcatgttcttctcacataaaacttatatatacatcattaaatgcaaagacactcaacatattcccgaggatgctaagcttgtcaagtcatttagaaatattcttagtgttgatattgttaacgatgaaaggcttaatttgcttaaacttgctctcgttcattatctcagacatgttatctgaggaatatatgcacccgaggcatgcattcaaaggttgacgaatttttttgagagccttacatcaaaacaatcaagtgtctcgataactgtatcttatagagaagaaagaccaagttaaataggacaattatattattttaaataaaagtagttgcatgttatttcttgcctattagataatatatatgaaacatggggaatgttcacatttcataactgttgtacagattatataaaaaataattaatatcctacttgtaataataacaatg

SEQ ID NO: 245746 - DNA, 891 bp, Cannabis indica
tccgatacagtgcaacgactgggctgttttatcctggggacgaccggcaattttcgactgcttgcacactcctgggcagtgccgcgaacgtcttaaagagagcgacttagtccgcgactcaacccagaattcttcattcggtaatatcgttcctcttttattttgctagcagtttactcaacagctgttcttggattatcggggttcacaggtggctgattttgtcgtagaggttgggcgtttgatgagattaggagctcgccaaaagaaaaattttatcacatttattttgggataatcttctcattttttttttctcattttgagatttatttatctctgattgtatagtaatgtttcttttgaactctgcgttttcccctttttgtctctgctgatagtaggtttttttggtttgtattgatgtttagttttcgttggtgctttgttgctcttttggaggcaacagtaataaaaaaaaatgtataaagaatgtgattatagtgtttgtatggtgttgttagtatactaataatttgattatagtgtttgtatgttgttatggaagaatttgtctatctctgtgattaattgtaaattaatttaggtttttattttaataaaatacatttttgtctatctctaatctatagtgtaatttataaattttagatttagttaattaataaaattatttgtatacaattaatataaattattatttataatatataaaatttgaattaaatcaaattaaatataatttttttaaaaaaaatatttaatacagtggtactttttgtgtggcactttttgtgtgtcactatatctctaaaaatattaataaaaaataaaaaaaaaggaatatagtgacactttatgtgtgtggtt

SEQ ID NO: 245747 - DNA, 1784 bp, Cannabis indica
tattggtgtaatttaatatcgagttttacacatttcgatttattaaataatataaaaaatttctaaccactctcaacgtaccaaatcagtgcagtgttaagcattttaagatgttatagaactcttaaataataatagatataatgtgatttgattttattatgcaaattagatgatattgaaaaacattaaaatttgtagtttgcatcaaatttagcgttgacaaatgatcaattcaaatctctattgtatatgttttttagaatcaaatcttatagaatgctccaatattcaaacatgaccctaatgatgattacaaatgtttgttttgaagatttaatccaagaaaaaggttattagattacttctttcaaaactataaggtcatatgtcttttttatttagcattaattattttaaagaaatactagaataagtgatttgattattttatttcttcgcacaaattaaataaaatgttaatttagatttttttacatcttaatcttgacatatactaaattatattttaaaaatttttcaggtcgttaaaaatttttctcaaactattgagattattagatttaaggaatttgttgaattttactaaaaaaagtctaacgtggatgaaaatttttggagtacaatttaatatgttaagagtttaagaggcatgatttggtaaatatcaaagtttagggacacactttagtatatggacaatcgccacattaacaaaattgaataaaattagacaaaaatccttaaatcgaacaatttcaatagttaataaaaaattaatgacttgaaaagtttaaggagcatgatttggtacatgtcaaaaggaatatttctcaatattttaatgagtaatttacagtatatatacttaagtttaacttccagttacaaataaacccaaaagcaaattttaacgttaataatactaaattatatttttagaactccgtaggtacctggtcattaaatgtcaagtcattattcacgtgttattttcttattggtatatttaaactaatttttttaaaaattaaaaatttaatgacttgtaccaatcagagattgccacgtgaaaatttacttcacttaatatccaagtacctacagaagtttcaaaactataacttagttattaatactgtcaaaaattaaacttaaatatttatttgtaacgggaagttaatctttagatatttattattaattaatatttttttatgtgttataagaatttagaagtgtatatagttgagaaagtaaaattgggtgaatgtaaagtaaaatgcaaaactaattgataaaaaaagagtaatactcataaattttatattattttgattggtgcctgttagaccatctttaataagtgatgtaaaagttgagttatattttgtacaaaaagtaattttatgatatttttaaatcaaacttttattattgtgttttaatgcataattgtaaatcttgatgtaaaatttaataatttattaaaaaatataaaataataatataataatgcaaagttaaatgtaaaatttaataataaaataatagtaatacaagtcatttaatacaaagaagtatgttagctaaaatttaataataaaatattaaaaataatataatggtaaatataaaagtatagcatttattatgatgtgaattttacatcatgttatattgtaatataaatttggatcaattttaattatgtgagaattttgcaattatatttttttttttgacaaagtgattaaatcact

SEQ ID NO: 245748 - DNA, 1049 bp, Cannabis indica
agagccacttgtgatctgttgtgagtctaaagtgccaccggtccaaaaagccgtttatgatccgttgcgagccaaaatactgccggtccaaaaagatacttccgttgtcttccaaagtactgcaatgtgtgccagtttccaatcttggagtctttgacctgtttcaaaatccacaaatttctcgacgtatacacttacaaatttcctaatatttggccttgtgggattctttcaaatgtcacgttcgatcctgtggtctcttaagggtcattcgttatacccacactttctatgcccaaacgtgaggagcgtgtattagagttagtcccacattgctaatgtgtggaaataaattaccctatataaaatgaataagctattcccttcattgcattagttttgagatagaatctcattcatcttattcgcaaattctaacatttggcaatgataattcttcatcttcaatgtatcatactcttattattttcaataaattatttattgaattatcaaaaaaaaaaaatatatttattgttaaaaaaaaggaagcacaattatatacaatcaaatcaattcaaaaactaaggacatctccaaataaagggtagaaagaataggctctgacggagctacttggagactatagggggctgtagccctctccaaattttattttatttatattttcaatattgtattaattagttaagaaaaaaagtatgtgcttttttttttcttcacaatttgcattgacaaagtagttattttctaacatttacttactttattaaaattaagaatagacaactttattaaatatgggataaaaaagagaatacttctcccattaattttgaagtaatttcattagacttttatttatttttattttattttttaatattaaatatacaataattataaaaaaagtcttatttttagtcactctaaaacttataattaaaataaaaatattgtgactatgttgtgactgaaaaaatctatagctaaatgtattggtcgcaaaaattacaattttttatgac

SEQ ID NO: 245749 - DNA, 726 bp, Cannabis indica
attattcactaaatcaaaatttttgagactcgatattcaaatatactaataacgatatgccataatttatagtgtttaccacctctcaaagaattttccttatcatctccaatggatgatgtataatttaagctaaaaaatgagccaatattgggtaaaattattcctttttgatagaaatgtgttaaaaaaaatgtcaacaaaaccaataaatttttattaaaagtatataaacattctattaaatatataaataaaatttaaaaaattattaattacattaataagtggtaaaagagtaaataaaaatgtaatatttattgtgtttaaaatttggtccatgctatattttgttccaaaattaacacaatttttagaatatgtagatatccatgacataatatttaatatgtatatatcttcattcactttagttagaatttaaatttttttttccaattatacataactttgtatgttttttttacttgttgcacacaggttaggtgagattttcctatggtctttgctctgttgtattttctcaaactaaataaaattcttcgtaatttgtggcttttttgtcatgtttagaattgtgtcttttgttttgtttgtactaattattaatatttttattttttttaaaactcacatttttttctatttttcaaaaaaatctcatattttttacactatttcttttttaaaatatattttttcaat

SEQ ID NO: 245750 - DNA, 1104 bp, Cannabis indica
ttttttttttttttccattaacccatttcaacttaaagcaagttatttaccaaataagaaaagagcaatactaacatgtaaggatattaaaacatacacaatttagtgataaaacttacagaagctctgaacttatcaatctctttctctcttttttgttgaagttgtcgatgtagcgcctgattctcttcagacattttaattctccttgcgtggatttgagactgaacgcgagccaaagtttgcatgcatcgcaacgtggtggctacttgtcttttgacagactgcccttgcatcaatgatttcaaccgtactaagcctcttaaagcccttaatgctctcctcgtctgaaatcacaaacaataccagaatagacaccattaatcttaagtaacaataatagaatatcataaattgttttcctacaaagaactgaaaaatccttttctacatactaaaaagagttgacaattgaaaacttttcatgcacaaaacttgtaataaaagtaatggagaagatgagaaatccacatgttacataacaaccaaagaaaaacatcaaacaaattcaagatttggaggcctccacatttcagtgtagaccattcggattgcaattatagtttgacaaattttctgctaaaagttaagaagtaagatcatctacaatgtaaaatttaaatattatcaaatttgacactagaattagaaataaacaaatgttatagttgctattattatgttccaataaacaatagcatttcaagatgcaaattaggaaaatgtaaaatatcattaatttaattaaatatttaaaaaataattaatggtattattataattaaaaattgtgtatcattaatgatcaatgacagaattgtatttattgtatgccaaatttgacacaagattttaacacaccattagaaaattgtttggctgtgttttcaaaagtgagaatagaaaacagttttttgtcattttaaaaatttaatagtgtgtttggcacaaaaatttttaaaactatttttagattttttcttactaaaaaaaatcaatattttaacaccatacatgacatgaacctattcgggttcgagttcg

SEQ ID NO: 245751 - DNA, 2118 bp, Cannabis indica
tttttttttttgtaaaaactattcaaattatagtagatatttctaatagctttattaattgtatttcattatgttttatatagttttctaataatgtagaactgatttggtactatttaaaagtttttacaaaaaaaacatatttataaaatttcgactaatttagctaattaagtaaatatttgtaagacaattataaattcttaatcataaactatattaacaaattatttttaagaaaatgaagagagtgtaactgaagatgcacatttataatgttatacaatcttttgataaattttgtatccattcttataccaaaaatataatttaactttatatatttatactattaaagaaaaaaaaaattatcactaattaaaatattaatgcaattttttaatttttaagtgtaccaacaaaatttcatatatataattagggtctatgtaggtgtaccacataattctccaatatatataattaggttttatgtatatatatacagggtgatatatatagggtccaaaaataggtacactcgcgtctccattatatttatatagttatgattttattataaattttattttatattgtatatatgctcatttaaaatattatgtaactattttttttttctaaaaaaattagaatagtttatatttttaaaaataagatttaaattacttatttcacataaatattaaaaacaagtataactgtaacaataccatatttttagcactaaaataattaaagtgtgtattgtcttataaaataatagaataataattatttatgttacaaaattatatataagtgacatttgatatgctgacatttgactaaaaaaaatgttaacaaaaataatattttaatgacatttagcataaaaatgtaactaaatgtattacaatttcaaaacttagaatttaataacattttttaaatgtcaccaaaaataagttttggtaacacttaaaaaaatataactataactaggtttttgtgacattccaattagtcaaatttgtcataaatgttacaataatagtaatttaatgacatttggtcaaaatgtcactttaatgagaatatataatattttaatttgtagcatttttaaaaaaatgttactataagcatatttagccacatttgagcaaaaatatcaataatttataatatttagttttaatatcatttaaaaaatgttactaaaatatatcagtaatggcatttgtaaaaaatgacacaaaatattaaatttagtgacattttaaaagtgtataaaagataataattacgtctttagtttattaaatattattagataaatttctttaaaaatatttacatattattagataaatcaaatggaaaaaaaagattaaccgtagcctaattacccccttttcaaataagaaatgccccaattaagaaaccctaactctcaatttttctctattttgaggtgggtatcccagtttaggggatcagatgttcacggcgatgtagagctcgacgaaacgctaagtcctaacacgaaatgtgagttaatggtcggtgatgatggattttaagaggggggatcaattatttttgaacttttcttttccagtccgcttgatttggtagcgaatgatgatgggttttgctctgcttcttccattatcaactctgcttcttagtccactcatttgtatgggaaggttacgaatcccaccttctcatctacaaaggtcagttaacataaaaagattgattttttttttcttcatgagttccaattttaattcttatatccagattgtgtagtccttgtggagtatctattattaatgtattatgtatagtaattttacgtatcaaagcctttagtctttacaaaattggagtaacataattcaaattaagtaatatcgagtattatgtattgttcatgtattgttcatgtattatgtattatgatatcataatacaaaatgatgagtattgagttgaaattaacgattaaaatagagattaattctcgtacgatttggtctgttgatgactttgattttggagggcaagtgataaattatggtgagctctaattttgtaaatggtaat

SEQ ID NO: 245752 - DNA, 1084 bp, Cannabis indica
cttaaatgaaacatattttttctagtattaaattagaattaataattaagtttcttatatacttgattatttaattcttttattgaatacatttaattaaattgaaaattaaatatttaagttgatttcattcttgatacttaaatatttacagcagccctatgtcagttctgttcacccggttctggaagggaaagccgtggcaagtctgatgcaaattcatcatagaactgggatgtggaggtgatatctaacttgtttaatgacagatttatctctaattttaggcattcctctctctcaacaaattgcacccgactgctagttttgaagcagagaagctgcttgtttttgttcagttaaaagcacctacaggcttattcagaatgaggagggttatgctcaaagtagtgacaatttttggaaaagcttctggcaaataaaagtacctcctaaggttcttcattttggttggagagccatcactgggttccttccaactaaaatacagttgcagacaaaacatgttaatgtgcctctgtcatgccctttctgcaactctaagagggagagcactgtcgatgtgttaatcgattgttattttgctagatcttgctggaatagatcagctattagcttcggttcaggtggtgtgaatgatttcaaaacctggtttgttactgttactgctgttagaaatagcagttcggctgctgaagtcttgatggttgcttagccgatttggaatgcaagaaatgacgtattgtggaagcagaagacaagttcggctgcgagtgtagttctttcagcaaggtcgaatcttaatcaatggttatgtgctcaacaaagaagatggatcgtttacttgtttacaacaatcaagttttggagaattagcattggacaaaacctgtggaaaatatgattaaggtaaatgttgatggttctatatttgaagcagaaaattgttttggttttggcgttcttgctagagattctgaaggacgactgattgaaggcatttccaaaaagctgccccggccgagtttctcctgaaattgctgagatttttggtcattaaaga

SEQ ID NO: 245753 - DNA, 2283 bp, Cannabis indica
aaggaccaaaaaaatttccaccatgccattgaactgttagagctggagcaaagttcttcttctccaagcttagatgcaaaatgatgtccactttgaactgtatatatccctgagttatgataatgccaaactagtttatcattggtgctgaagtagctcaagagggaatagtaagaattttctcaacatcaagtggacaaatgtcttgctgcaacatggagatgttccacactctttcttccgtaatgtagttcgcaactacaccacgtggagatccattatagcaagttggaagaaaagaggaatgacccgggagccaagggtctaaaccgcatctaatagagcgtccctctcctattttccatctcagccctttgatcaatagttcacgaccccaccgaataccttgccaagttagtgatggagaatggcccgtactcgcatctaggaaggagttgtgagggtagtatctgctcttgagtagttgcccgaggagtgagtttgggttctcacaagcctccatgcttgtttaccaagtaaagcttgattaaagtgtataaagaccgaaaacccattccaccttcaccctttgttttgcatagcagattccatgatcgccaatgtatttttgatccattttcattcataccccaccaaaagttagccatcatactttcgagttgtttacaaaaataccctggcaaccgaaagtaactcattgcataggtcgaaatagattgaacaacgactttaagtagaacttctctactgccaaaattttttcactccatatgagttcatcagttttcaaatccgttccttgatgttactgaagagctctttcttatctcttcccgcgtaaggtggcaagccaaggtacttttcatggcactctcgaattggcattaagagatgccgatgaaagaaaacttgggcaaccaatgttgtgttcgaagaaaaagataagactgacttgtcgggattgagcacttgaccaaaggctctatgataagtgtccaataccctcttcatagcaaggcacgaactctcatcagcttggaaaaaaaagaagactatcatcggcaaaaagtagattggaaatggttggcgctcgccgggtgattttgaaaccatgtaaattgccaagttcttgttcatgatgaagcagtctagataaaccttctgcacaaattaagaagaggtacggggacaagggacaaccttgtctcaaacccctagttggaatcaagtgtcccgtgacttcaccattgacaagaaaagagaaactgttagttgaaagacagcccataataagtgtaacccaaccgttagcgaagcccattttcctcattaccgcttcaaggaaacgtcattctactctatcaaaaagcctaactcatgtctagcttaagagatacaatgccttgacgcccagaagttttgttcttaattgcatgaactaattcaaaaaaattaattatacgttcattgcacgtaacatcaacctagttattattataactaactaaacggtaagaaaaaaatatatatttttattttaattaaataaaattatttgctattttcttttatttttttacatttgaatagtaacaaattatattaatttttttgaatgtattagatttattatattatctaattaaaataaagagatatatgttgaaaattaaattttatttaactagatttcaaattcttacactaccaaaaaatgacctctagaaacaaaccaaacatagaaagaggaaaatttttgaagaaattatattttatacctattctttatttttttattttaatttttcacttttattttatttttttttaattatatctaattttataggtcatatctccgtaatgtgcgttagggactccaattttaataaattattatataatgttatatttggtactttgattataaaaaaatatatctattaactaaaattattttgcagttatacatagttaatgtctagtaaaaataatagttctcaatttattcttaaaattttggatgattaaaaattaaaacaataattctcacgcttaagaattaaatttttctcaaaattaatcaattttgatagtattttattataataatgctaaataagcataattccttgaatagtttaaccaatttgatagttaaatgagatttttctcaaaaataaaaatgaagagacaaaactttataagaattgtaaagtccttttttggcaagttagttgacaaaataatttttccttttat

SEQ ID NO: 245754 - DNA, 1463 bp, Cannabis indica
tagtattatataaaaatatgatatataatctaatttaatataatacaatagaagcaaatcctaatatgacgttccaaaacgatttcttaacatttctcaatgtataacataaaacataatacataagagtcatgtgatggatatgattttctttcaaaagaaaaaaaagaaaacttgtgaagccaccgatatatagagcattggagagcacatatatctcattctccacaaccacaattgtttaagttgcttagaacctgacactggttggaagagccaagatttacacgaattacactgttcacggattggttatttactgttttactcttaaatttggtgatcaattgtaattgaattgattaattgttattgaattagatcagtttatagacacctctactccttctaagggttgacagtgtcctaaaaaaagtaactgtcgtttacatttatttcttactatattaaataaaaaaagagaaagagctcattgattaaagaaagttaataagaatgagaaatttatacatacatatatactaaaaaaaaaagttaagtatacttaattttatgttaggtactttttaatttaattaaaaattatataatttaatttattattatagtctaagtgtatttttttttaataaagtcattaataaacctatggaagagaattggaaaataaggtaaagaaccatgctaaacaaaaagtaaggtaaaacaaagagtaaaacaactatgcccctgtaaaattctacataatatttttttttttttgaataagatacataatattaaaaaaagaagaagaagaagtaggcgcatgtatatacaaaatacgatgactaacatacaaaaaataaataaaatattggtcctctaccaattattctcaggaaatatagacataaataaaattcaaagagcttacaatttataaaggcatacaaatttcagttctcattcatatccctatcaacaatccacttgaaaatcttagtgtagattagcatttaactggtactcatcaataaatgttcttaatcaaattccaaattgcagagaaaattgcttataatcaagttcttcactttacaattatatacactcaaagatctaaatttcaatatttactattgaatgtttataattaagttcttcactttacaattattgatactcaaagatctaaattttaataagttctacattccttatgaacaccaagtctccaatcttcaaaatttcaaactatactaaaacacactcaaatcatattctatctggtaaatctctaataagaccaatttacaatctaaacattactctatgatgaaacagatgaaaacccacttggcaattgaattaaaagtgacaaatattacatcaaagtgatcttttaaagacgttcatcttagaagatgacatggataatgttgggatgacttattgactaa

SEQ ID NO: 245755 - DNA, 850 bp, Cannabis indica
aaagctacgtgatggaaagcgttgtggctgtgaaagttcgtttgataaatcccaacttggagctgattctttgtcaatgaggttctctatctgaaatccatactgagtttaaggccatttactataatttaaagttactttagttatgtattatgcaaataatctaaacaaacacattcaatttggggagcacaatttgatatatatatatatatattaatgttcagaggtcatgatttgcaacatagacaatcgccatattagcatccattagtaaaacttttgaatccaacaatctcgataatatatatattaaagttttggggcaaaaatcataattaaccgaaattttatataccaggacttgaacagataagttctccttgtcaacttcttttaatgcttttttccaatatcttgaaatgttttcaggtgtgtctcttgtcacaaattcgccatcaaaatcttgtgactttggagggattttgctatgaatcaaagcagcaaatacttgtttatgagtatcttcccggtggatcattggctgaccatctttatggtatgttaatgtgaatccattaaagcaatttcattgatctattttctgatatgagttgcagggcatccgttattaacacatatcaagttcatttcaggtccaaaaagccgaaaagtttcgctgagctgggttcgcagactgaaaattgcagttgatgctgctaaaggttcctttcttttcctataactataatttgaatttctgaaagaacaaagatctcatatgaagaaaaaaaaatacattcttttgaaggacttgactatttgcacaatgggagtgaaccagaattat

SEQ ID NO: 245756 - DNA, 622 bp, Cannabis indica
ataatataacgatgttcttaaaacccaacgagaacccctaaaaccccacttgacgcagcaaataaaaacgaaactagctgtagaaattcagcatcctccgaaggctaagaaaaaaattcctcggcaatttttgaagtgaccaaacagaattacaaacatgagaaagttcagaaaaagcataaacatttgctaaagcaaagtgggtttatatggttaagtaagtaccttgaggcggtggaaccggtgggcgcttgagaatttcggaaatggaatcgaccattcgggcggttgaagcagttaaggtgatagtcgggggagggtttttggagacgggaggggttttcttggggtttttgggggcattggggttgtaagaaaccatttgttgagtgtcccatgaagccctaagtctcagtccgaaagttaaggaagacgaggaagaagaagaagccactgataaggtttgcatgtctttagtgtagagtactatctcaagactgctttgcttcaagtctcagactcttcagttagggtgttctttctctctttgccaaaatatcctgaacagagaaagattacgtgactctgttccgataaatcaatgcacgacatgtcgtttcac

SEQ ID NO: 245757 - DNA, 759 bp, Cannabis indica
agagagtggagaaatgggtcagatatatagagagagagagagagtaatttaattttggtcttttttatttctttttggtgggtatttacttaccagtttagggtgtagaaaatagttgatgatgatgtttgtttttgtgtcgtttttttttagggggtttgtttttgtgcttctaatttggtttttgtggacaagtttttatttatttatttatttcttttttcaattctgaagttaaagagaaaagtcaccaatataagagagaatgtaatgtgttttgtgtgaagagttgtggaaaaagaaaaataataaaaaaaagccttgtgtggttggagagagagaccatatcttttggcctttagttgctgtgaaacacactacataggcatttgggggataattttactgagatgttggtaaacaaggagtagctttatttcctatttttatttatatttatatttaagattactattgaaagaaaaaaaaaatatgtatccttttaataattttttttatggggctttgagctggttggttgcccttttgttgatgcaaagagtcattgaagtgacaagtgtcccagcaaaaatattattagattacactctttttcttgtttttaatatttggtaagtactatagatgatggcagtcatgaataaggtgctttgtttaatataaaaaaaatcctaaacttgtaactaaaaaaagaaaaagaaaaggtaaagcgtttttttttaaatgtgaaggaaatta

SEQ ID NO: 245758 - DNA, 618 bp, Cannabis indica
tgtaaaagaataagtttgttgtgtaatgaaatattcatcagtaacgatatagggtgttgggcaccgttatttagcatttctctcaatcatactttgggtgccaaaatattgagaaatgactttcattgttattagaaatagtaaagtgggtgttgattattggactgattctatcttgcctcttaaaattagtacttttaattatcttctattctttattattattattatttgttcattcatgactaataataatgcctttactgaaactagctatctgagcaggacatgtgacaataaactaccgcaacaagagcaatataacttacatcgcagtcaaaatttacataacaacttacataaaaactaccgcaacaagagcaatataaactgtaaatttttttaaaaatatatatatataaaataatcccctccaaaaaaaattacaccccggccacgggctccaagcctgcaaccagtggatatgttgtctatggtgttgcttatcaacatactaagggatttggttcaacattacgcgaagaggtgagatctcgccttgcacaacaacctaacttttctcattttctttaggaaaagaaactaataaatttttga

SEQ ID NO: 245759 - DNA, 805 bp, Cannabis indica
ccaattttcctattaatggaaatttcaattttctctctcaaaaaaaaaaaaaaaaaaaaagaaagaaaacatgtgttagagtgacaaaaccaaaattagagagagaaaactcatccatcctatattgcaccatgtctatatttagtacttttattttatattaacaacatataataagtaataaaatttgaatagtaaaacctcccattaaattcatttttattgaattaataaaattcatgaataaattttttcaataatattaaccattgtaacatgatagcaatatcaattaagaattggaaaatagatttacaatatggttggaagcattaattgtatttctttaattcttttattaatgcaaatagtgtttgatgacttttggtttttacctattattagactaatactaaaaatcagaaaataaataaaatagaatttaaaaacacaattagatgcctatacaatagttaagtcttaaatatgaggtggactttttttaataaacttcgcatcaaaatttcatacataaatgacctttgaaaattaaatgtgaacataatcttatagcttccatcaaaagcttataatcccttggaaatatttgtagtacatttggttgtttaatttagtagattctttatctgtttggcattcagtagagtttttttgatcgtaaattacttataaattttcgaaattttctgaatagtttaacatttaattgttccattagaaaaaaaaaactaaaatacaaaatttattgatgaagtagactcttaacctaaaaaagaaataagga

SEQ ID NO: 245760 - DNA, 1313 bp, Cannabis indica
aaattatcattcagaagcacaaaaataacaatggcatgcaagttcaaacataaacaactgtatcttcttgaaatgataaaccctaggctacaaatcaaaaccaattgtcttaaaaattgggtttatatatagtttgaattttcataattcaataatatatttacaaatctattacactaaaaatctgaataaccacgaatatatcgatccaaaattcttaaagtagccgatttcgaaaacagttcttaagttacacatttaaatgaaattaaccctaattgagaaagacaataccaaaaaaaaaatgcaataaaaatgagtgtacctgaaaaactagaccaacaatagtagtaccagtctttcgataagttggtgggcggaaacctttctccaaaagcatagcgtttcttctgcaaagatcaaaactgaagccacctttgggtggaagatcaaacttcgacgacatagtgagctgcaaacacgaaatggaacaaaaattaaaaacctaaagcgcaaagaaagaaaatcaggtaataaagaagggaaaatgtaaagaagatgaggaatataagagaagagaattacctgagagagttggaagaggaaaccctaatcgatttgagaagaagaaatggagagatcagagtgaagagaagaagatcagttgggttcctcctaaaagcaccacgagtctcctccagtaacctcgacgacaagaaaagaaaagaaaatcatttttaaatataaaataaaataaataattttacaaaatatttgggcttccaaaataggcccagacccaggcccaggcccatacatgtgcctcactcaaaaagggctctctctgcaaactaggaagtctcattgggcttagcccaaaattaattaattgggttttaacaatcaaacaactaggactgttcatcctatccaatccgcattttttttaatcaaataacattcaatccgcactaagtgcggatcctaaattttagatccaattcaatccgtatgactttttatattttcttaaaaatgagatatataaaaatgtatacttattatatatatttatatatataaatatataaaaaaaaacaaagataatgaagggaaaaaaaaaacttttttaaagcttcattaaacaaaaacaaaaaaaaattaggctgaaaaaatataaatgtaaaaaatttactgttcaagtataaatgtaaaatttaaaattccacacaattaatataaattttttgatatatatatatatataacttataaagttaatgatactaaatatataacaattcttaacaaaa

SEQ ID NO: 245761 - DNA, 810 bp, Cannabis indica
ctcaaactaatggaactataatcgttgatttagttgttttttgttctatagaggattatcaatgctcatctcttggctgtagtttcatttttcttttctcacaatcttaagaataaataaataaactagaacgaaaaattacaccccaagaatttcctaacccagaaatcgaacggtgctcctctatttcagttgtagcttcttttttttaatgaaagtttatcttattctacaaaaaaaaaaaaaaaatctggaacaaaaaattactcaatcccacaaattcctaacccaaaacttgcatggttcgcatctccctaaactcaaaaatctacaaagactcgcccaccattaattgctctcctgaaatcgaatcttaattaaccactatatatcaaatgagtgaactattccattcacttgtgaagcagtaacaacctgcacccatctaacctattataatcttattttttcttctactagattagagtcagcctacaaaatgttcaatatacgactgctcttgtcactccgagaaactcatttaagcaaaatctctagaaaagcaaaatcatccttaatctctccttatgaaaatatttcttttctttgttaaaagtcattaccgctaaaatgggaatacgattaacttcactctaggtttttttattttttatttttttataaaaaaaaaattaaaaagaaaataataatctagcattttgcaggtaacataaaacaaatttgacttagtaacatatcaaaacacttttatacatggagtcctttttgacatcctcatagtaaaaaatt

SEQ ID NO: 245762 - DNA, 796 bp, Cannabis indica
taaactgtgatgcagcagtctgtcaaggcaaacagggatatggtactgcagctgtcataagggcaatggagccggttagtgctgcagaagctgattttcaatctggttggtctcggttctgctggctgaaatctcggctatcaaattgggcctgcaactggttcaaagattgaaggttacaccgtttgttgtagcatctgataatcttactgccatacaccagctccagtcgaaggcagctcctcgggcagattggggggtgcctttgttggaaattctctctagtaatctcttagatggttgtataggaattaaatttgtgaatagagattgtaataaggttgctcactcattagctaagtgggcctttactcatagatgtaattcctttttggtcagaggtttgaccttcttgtgttgctgcgtatttgagtgcagagaagcctgaccatgtgtagttctttttttctgaataaagtgatttactttcaaaaaaaaaaaatactatattttaaattaatcactcaacaagtataatacatttatataataaaaaactataaaagttcaacaacaccgcacgaagcgcgacttaattctctagtttaacaataaagaaaatagaatacctaaatatcttattgggtaatatctatcagaaaaatttacataatattgataaaactatgaatgaatatattttacaaatattgagtgaaaatcatcccaaagtttttatttttatgtagttcaagtgattttaaatgaagatgtaatatatatagctcagtactgc

SEQ ID NO: 245763 - DNA, 1015 bp, Cannabis indica
aatgagcttgaggaaatgaggttgttttcgtatgaaaatgctaagctctataaagaaaataccaagaagtggcatgacaaaagaattcaacctcgagtgtttgagaaggggcagcaagttttactctttaactcgcagttgaagttgtatcctggtaagtggaagccccgttggtcaggtccattctcgttaaatttcctcttttgccattatgtttcttagagccattgctgttgcgcttgcctccaccattctcattgttggaaaattgacagagatcgtctgcagtggttggcatgtcggagagtgcttgagcgctatgaggctctatgcttgttctttattaacctgcccttttgtttgggcttgccagacatcttcttccaactttatgaagccatcaattcgctcaaggaactcttccatattgttcattgagatcctccgaataccttttcagaagtcactcaacggtaggatgcctctgagtatggccatatatcgacctcttctatcaggcctttgaccttggtggcctcaaccatgaacattgaatgtagtccttcaaaggttcatctctttcaatgctttattttgacaagatcctctactcatgaaggtatttgtctttgtaacgccctgtccaatagggacgccacgtgtgtgcttttataaaattcatatatagatactatataattataccaaaagtgtgggtaatgataaatttttttgtaattaaaatcaaacatgtaaaaacttctttatagcagaagataagtaatgagaactatggggaccccctgttttcaaaatagtacaaactagtttactagtacttttacaatataaactttgtaatcccaaaatactatcaaaacgaatcatcctgttcactgggccgatacactgcggctgatatgtacattgctgatacgacctcgaactcatggctgctcaacctttgctttcccattacctgcaccataaagcacccgtgagtcacaaagactca

SEQ ID NO: 245764 - DNA, 805 bp, Cannabis indica
ttataaaattgaaaagtaaaaacaattttatagaacatgcttttgaaaaaaaaattcacttttctacttttaaaaacaaaaaactgattaaaaaagtgttaccaaacgccacctaaattaatgacaatttgtatctaagtactatattttagttacaagtaaatttttgttgtgaccacaagtcacatttagtcacaaaaagattatgtacgttgtgactaaaaaattatcactaaagatgacattttttttttgtactgcaagatatgttgttatgaagatcattacttttaggcaccatgatgtggtgccctttaaatggctaatgattttctttaaagatatgacatcttataagggtgctacacactatggtgcgcccttatgaataacattaatattaggtatcatggtgggccttaagagcattgctattaggcaccagtagtgcttagcactttcttgatatgtcacgttacgattgaactttagcatttttcgagtcttaacaccactataaggtgactccctataaattgctaatggttttttatattaaaataaaatagatgagattcaatattaaattatattagtagtaatataataatttataaaagtactagacttttacttttagcattaatttctctaaaaaaaattgagattccaagtactaaaactaaaaacgttcctaccaagaaattttccaatatatgtatagggaattcaagactttggtaggtaagtgtgtaatgtatattgagtttggccataaatcactaatataatcaacctaagctga

SEQ ID NO: 245765 - DNA, 905 bp, Cannabis indica
tcaattttattagatttttgatagcctttttctcttatgaatttttcgtccctttttcagtctagacttgtctctatttataatttcatagcccggaagttaattacagagttaactgatatctttacgacaattatctcttgaaatcgtgggatttgattgtaaaataaatcctcttttttgtagtggtgggtacctcaattgtgtaagggtagcgaggggagacctcgctttgtgaggatagtgaggggtacctcgcttgtgtgaggttgtaagggtagctagctagggggtcacttcgcacaagagcccaacgagagggggtaaggggctcgcactccgggggtccaatgaggtgggaaccatcttgcataccctgcgtatccgcttatcaaaattgaaaggtactttcccattagtcttcgtacatttatatcttatctaacttggggtcttagctattttaataccttcatcttttggtgattggaaatgctaattatatcaacattaattacacacgagctagagtcgaccatgtaacgttcaagaaaattaaatgtttttccacctagggatatgatggatcgcctactatcaagcgacacatccccatgttctgagcctaaaattatctagctccactttgtaattctcattttgaacccaaacgtttctaatcgtttttatgctcattttacacatgtttatgagcattaattccatctcaaataattataaacatgtagtcatgaatttcacccaaataaattgtctaactctcaaagttgccttacaagaaattgtagtcatatttatgtaatatttagaatcgaaataaattattaaaaaaatataactgaataagtaaaaaataaatcagaattaatatttataacatgttg

SEQ ID NO: 245766 - DNA, 1308 bp, Cannabis indica
ctatgttttcgctccgctcgaccattttgagcggatgtatgtgggcaagaatgttggaagtttattccattttcaatgacacaattggagaatgactgaaattctcctccccaatcagtcttgagagctttgatctttctctcaaattgattctcaaccagatttttaaattgcataaatgttgaaatggcttcacctttgtgtttgagagggtatatccaagtgaagcgactatggtcatctacaaaatgtatgtagaatctatagttggtgtttgagaggattgggacaggaccccaaacatcggtatgaatcaaatctaacatgtttttagcacgctcagaattagtggtaaagggcaaggcatgtgatttgccaaattgacaagcctcacaaaagtttgtattgctattagtagtggattttacattgacaagactcaacacttgactcaagacacgattggatgggtggcctaatctcctatgccacttatccttgattgaattaaaactttgctcagcaacacgctggcttttcgacttagacactaaaccagtaaaaagaaaactagagttgacagatttggtggattgatcacagtgaccttctttggattttggaaattggtatagcccatctttaactttcccttgaagtagcaccttctttgtttccaagtccttcacaaacaattttgagagaaaaattcaacagaaacgttattatcagatgtgagctttgaaatgctaacaaggtttttagtaatattaggaacatgcaaaacatcatttagcacaagatcagtagacaccagatttccacaaccaacatgagctatttggagtctattaccattaccaacagttagagattcctcaccattgtactcagtcttttgtgtcatgttgtttgtctcagccgtgacatggttgctcgccccgctatccgcataccaagccgtatcttcaaccatttctggtgtggcaatgaaggcagctgctccaccttgacttcccttatttccagtgttagagttgtttggatctgtgcccatgtacgcctcatcgtaccgattgtagcagtacgcagcagagtggccatagcgaccacaaacttggcatgtgggtttcgaattacttgtgtgtctgccaccaccacggcctcgagaacgcccagaaccaccagagcttctgcctcctctaggctgtccagaattaccaccacgatttccacttccatagttattaggattgtgacctcttccacctgagaaaccaccaggttttgttgtagcgacattggcat

SEQ ID NO: 245767 - DNA, 1318 bp, Cannabis indica
cagatgaaaatgcatgatggtgaaatcagaatcttacaacagtaaggtatgtacctgaactaaaaagaaacttgctttcaattggtgtttttgataaaaagccaaaacgaaaagatagatgatggagcccttaaagttactcgaggatcacttgttattattaagggaaagcgtagaaatggcatatactatcttgatggtcacactgtcattgaatctgctgcactagtaatagacaagtctttaatttgaaagtagcattaagatgtggcatcttaggctaggtcatgtaagtaaaagaggtctaacaaaacttgataaacaaggagtattcaaatgtggtctcaaggataaattagaattttgtgaatcctgtgtgctgggaaaaagttgcaaagtgaaatttctaaagggtatgcatacaattacagagaagttgggttatatccactctaatcttatgggtccctccaagattcaaacacttggaggtgctaactatttcttaagcatcatagatgattactcaagaaaagtctgggtatttttgctgaaataagaatatagcctttcaaacctttgtcaattggagaatcatgatagaataacaaacaggatgctgcatcaaagtgttgagaaaaaataatggtcttgaattttattcaaatgagttcaaaagttactgcataaaggagggaattagaaggcacaacagagttgttaaaaatccacagcaaaatagattagctgaaaggatgaataaaactcttcttgaaagagtaagatgcatgctaaatagtgctagtttggagagaaagttttagggagaagcactcaaaacagcctgctatctcattaacagatgcccctcaacagccataactttaaaacccctcaagaaatgtggactggtcaatttcctaagtatgaacatctcaaagtatttggatgcacaacctatgctcacatcagacaagataagctccaacctagagccattaagtgttgttcctagattatcctgatgttatcaaggggtaaaaattgtggtgtcttgaacctggttttaagaagtgtatcataagcagggatgttgtgtttagggaagctgagatgggcaagaaagagacaaataatcaaattgaaacagtctcagcaaaagacactaacccatgcattttacaacttgaggtggagccaagtaacaattcagatcagacacaagaaatgcagatagaagaaagccaagataattcagatgatagtcaagatgacctcagcaactatcagctggcaagagatagagacagaagagaaa

SEQ ID NO: 245768 - DNA, 1067 bp, Cannabis indica
ctatacagtgtaattactagggtagtaattacactgcatagtaattacatagtttttccaaacagaccctaaaagtacttatatatgactacttgtatatttttagaaaattctaaataattttcgaaaataagatttaaataattaattatgatatttaattttaattcctgttattactattatatatgttaatgtagtttctctttccttattgcttttaatcaagctttgatttttccttattaaagaaggtttaattgattatttaatttttaattttacattatagtgtatactgaaaattattttataccatgaattttgtgattggtttttgtgcctattgtgtcttattttgtacatgtatagtagaatgtttttgtgatcatgtggcttatttggtaccatatatagtagtttgtttttagtttatcttaagaattattcttaatggtgtgagatatcaataacacaccatccacttcacgtgatagcaaagattagtttttctcttcataaaataatattttggaatgtttattaacttttaaatgaaaaattttattttaatttaatattactatgaagtagtgggttgattaaattttatatatttatatagatgtgatttatttcactcacttagtcattctaaaatacaaaaacttataaaaaaaaatcttttggtctaagaaaaaatcaaatatgatagttatgctccttacaataaaatttacagataagttatagttataacattataataaaaatttcatattttattatttatacaatttgatactgatatactttcttttgtagacatgttggtggttatcacatatttcgagaaatttttttttatattaaagttttattgtttagttttttttggggatttatctttttttatgtaacgttaatgttttagcccacgtattgatttagcattcccttagaataaataattagtttttttggatggaaagaatctcgccacttttgtctttcggcattttttctctaacatgtaatggttactcttacaaacaaaaaaaaaaaac

SEQ ID NO: 245769 - DNA, 1040 bp, Cannabis indica
aatatttttatttttaataatatgtaattaataagtagatatatttcacgagaaataaatttatcacaatgctttagtcaaatttatcaaaacaattttttatttcttgaaggttgggtttcactaccaactttagttttaacttgtaccttctccataattttttttggtgaatcattaaattgtattgcactttaaaaggatcacagataattacagattagcatccaccttacactacaaaactcatctcaaccaaattacatctcaaacaaactatagaaccatagtaaatcatttacaatgactctattaagacttgtataaggaattctattataaacatattgtttaaatcttctaattgtatagtacaccatccatactcggttctcttaacacactacaatattttgcttcaataccggcggagtcaaaccgtcggtatataaaaaaatattaatagcggcagaatactaattgtggtccgccggtattaatgtgtctgtgtgtaaaagtgtagacattaataccggcggaccccaccactattaatccgccgatattaatattattaccggcaaaagtccattttagtcgctaatagtcattaatagcgaccaattaataccggcggattctaccggtattacttatgaccggcggtttggataattaataccggcgaaggtctccgccagtactatagaaaattcttgtagtgacaaatacgttctcagcacgccaaatagagtaaacaagggctgaaagaacatccaagtagacattcttttgaaaactattaatcgtgcttttgtaatccaattatatatacaagaaattgtgcaaatatggtatgaatacctaaccaagctaacaaggattgcacacaatccatactaaacatgtattaaaaaaaaagaggtggttatgggaatcatctcatacaacagatacaacaattcatgtaacaccttaatttataggcatgccacgtatgtgattttataaactagtttaatactaatagaataattaat

SEQ ID NO: 245770 - DNA, 849 bp, Cannabis indica
tctgaaacaagataagattgaaagaaacataaaattaaaatctttttaacatattctacgaatcaagacaaacccagatcataaaaacgaaataagaatcatgggatccaacagaaacgacaaaatccagaagaaaacataagaaaattgaaaaattcacctggtttagcatttacatgacgttgttgggattgaaaagaaatgacgggaaaagggggagtgaaagtggtagagagagagagagagagtgtgtgaagattggttgcgtggactgtggtatagtaaaataaatataatagtagaaatatagtaatagaaaattgagagtgaagaagtgatgaaaacagctggcgaaaatgatcttcaccattgccatagccatcaacatcaaggtgcctctgttttattcttgcttccttttttcttttttggagtttgtaatacaagctttttatattttttggtatctaaataatttacttttaattttgtattggatggtgtgtattataaatatattgaaaaattttaaataatttgaagtgtgaaaaataaattattttgaataccaaaacagttaggaatgcatgcatcggtgcatctattttaaggaggtgcattgtagaattatttcgaataccaaacaatctatttcacatgtgtataaaataaaatagtcacgcgtggaatacactgtttgaataccaaaacagatagagatgcatcagtgcatccattttaaggggtgcattgtagaattttccaataaaatttaatgtaaatttgttttattttatgtgtgtgtaaaataaattattttacaattattttttataatttaaattattt

SEQ ID NO: 245771 - DNA, 935 bp, Cannabis indica
ctgtaaatcacaactaataatgatatttagttaaaataagttgataacgtgcattgaattatgtttcatctattacatttactcatatatgtatggacaatatataaatattaatttttttttagatatattaatattaatttgatatattattttaaatataataaaaatataatacgaaaatatttttattaaaatattaaacaatatacaaaagaatttttctttctataaacttggtacacaatttatctcctaatttttttttggtcggtaaattctaaaattttccctctctatttttaattcagttgagcttctcaattcaaaggctatgtcttcatgggtggttgagacaagcaaggtttcctaatgaagcagggagtattgactccaggccgagtccgtctcttgctccaccatggaaccccttgcttccgtggtttcggaaggcgtaccggagaggaaaggaggaaatcagtccgtggttgtatcgtcaaccaagatctctcggctttgaatttaattattgtgaagaaaggggagaatgatcttcctggattgactgatactgagaagcttagaatgagaggtccaaaaaggcttcaaaaatccgtaagcagtttaatctttcgaaggacgatgatgttaggaaatatgttaacacttatcgcagctcctttacaaccaagtctgtaagaaggctagcaaagctcctaagattcagaggcttgttactccattgactttgcagaggaagagggctagaattgctgataagaagaagagggtggcgaaagatgctgctgagtaccagaaactccttgcgtctagattgaaggagcagagggagtgtcgcagtgagagcttagctaagaaaaggtccagactttcttatgctaaaccataagttttgatctaagaaatttgatatt

SEQ ID NO: 245772 - DNA, 1581 bp, Cannabis indica
aagcaaccaagtggtaaaaaactacttggtcgaccactgccataagaaaatggcagtgctccccaattttggggagcactgccacaatggagtggtagtggtcgctacacaagaagttggccaaattacatttccaacatatatgcatcaagtaaaaatgagaaaagttacccatggctttccaagttccatatccgatcactgccataaggaaatggcagtgctccctaaaattggaaggcactaccgtagtagagtggcagtggtcggctactacacaaggaaaagggatttattagccaaattgtatgttcaatatccatgtatcaaatacaagtgagaaacaccacccatggcttcccacaagcaatggccgaccactaccattgtttggctccaactagtggcagcggtctcccgttagggtttcagacatccaaatgaggtttttgggtcctgagaaccccaaaatataactcaccatcaaaaaaaaacaaatcaaaacacaccccgagggtgcgagagcatgcacagccgaccattggcatttggctatgtcagtgctcgtaactagtacaagacagaataaactaccttcactcaaatgggcataactctctaaatttttatgtaaatgacctagtttaacatgtattggaaagataatttcaagacggatcaaagtgtatctcacaaacatggctcagttctgaagttatcggattcaaaattagctcacaaggcagaatggtacaattttactcgggaaacaagtaatgcggctaagtgagagttgttggaggacactgccatagcacatgtggcattgtatgcgagcattgatactccaaaatatatgtttttcagcactcatcaccaatatcacgcatttttaggagagaggtgacatcctatcactccatttcaaattggtgcatcctcaactgaaaataacaactttcccaatttgtgggatatttgcctagaaataaggagatttttataaatatttattttcttgtaatatgttatgcttaaaaaagagtagtacacaggatcttgttattctgatctgacattttggacttcaaacttttggaccctcttctctctttttagactctctcttctaaaacccttatcctagaaaatcacttgacagcagccaagaacagcaccttgattccttcaccttttttattgagtccaccatactcagtcgacaccagtcctcaaaaacaccattgatacacacctttctttacaaactattggtttatttttcccaaaaactttgcaacctttaatttagatcagattgatgaatatcaagcctcccatgagccttatgttcataaatctcgattaagatttcacctataaattctttgctgtatttttatcatcgcgacataggggtgaactattataaatccctggtatccatttaatttattgcagttttattagtcagattaattcatcatggtcctcttttattttacgatcttcttagatcagttgacaaaaaatcgcgtcaacatatagattaaaggcatccaccatagtaatattttaatg

SEQ ID NO: 245773 - DNA, 500 bp, Cannabis indica
aaattcatatcttttaaattttgagatattttagctcatttgatggtgccaatttttctttataacaaattttcttcatattttacatttacatatatattagcttttagctcatgagtgtgagtacacttacaaggaaagttgctttccttttattggtttttcatacagttaaatccggaattgtggcttcgaatctcaaatctagtccaaaccctttgagaccgcgggaacaaatgaatttggtgtcaataatctagttaatttgatattcatttataactttctgattcaatcgtaatttttgaattcttactaatagttacatgtttgttattgtgctaggtagaatattgatatccatttagtattgtttgtgaactttgcaaaggttagaaacctaccttaaaccaaaaaggaacaatacttaaaaaaacacataacaattgtaaaatacaccatggttttgaagttagcatttaattatctggcttggtttt

SEQ ID NO: 245774 - DNA, 673 bp, Cannabis indica
tatatatatatatatgtaaagttcaaaggcgttacagcacaagctaatgtgctttcaccaaaaccaaaatcaaaatcaaaagattcactccacaccaccaccaattaaccataaaagaaacagatagatagattagatatattcctacctaaataaactcccaaaagtgtccaagctcatccctgtccacaaacaatcacaccaaatatggatggaagcatttcatttctcatagcagagtcagtcactgctctttcctttatatttacacctttacacccacccaaccctaactcctttcttgttttatatataaaagtagaacaacattcattattcaccccttaaaacacctctactactactactataattatctaaaaccagcaagcagtctagttttttgcccaccgcttctttctttctctatactcctttattctggtccttgaccaattaacatcgataccacctcaacttgctgcatccatgcattcttataattacaccactcacacatctgaaatctgaatcattcagatttgattggattctcctatcctctcctttcctctccatttgagatgaacatattttcaaactctctcgtttacaactcctcatcatcaattcaaaaaacactaagtaattcttatactataataattatttt

SEQ ID NO: 245775 - DNA, 1250 bp, Cannabis indica
tgttataaaatgagaggagtagttcactttatataggccaagagcccaatatgcaagttgtcttttttgatagttaagttaagtagttaaagactaactaactaaccgaatcttggttggtggggttaaggaataataccacagtgttaaattactttaaactattataactaataaattttgattgtgtttttttttcgtaacactatttagtcgatacttatgagattaattacgagttttttatcttaaattttgagatataccaaattgagctcttgatttttgatataaatcaaattgtaccccttaaatttttgtcaaatttctttaaatttttactaacagacgcctaatgtgatgattgtccatatactaaaccgtatccccaaactttggtatctgaactttaacatatacaaaatcgtacccctaaacttccatcaaagtcaaccacttgttagtggaatttaacgaacgattgaatccaattatcttagtttagaagaatttttaacgacccaaaaaaattcaaacgaaattacagagatgttgatggcttaataaaacacattagaaatctttaatcattaaattgtgttgttagtatctcgtttgtataccgtgaagccaacaaagtagctcatctattagccaatcacgctttggttcacaaacttgtgctctttggattgggcttgattcctcttgtgctcgtcaagctattgcacttgatgtgcctaatcctttgtaatcatttatgtttaatgaagaatccatttttttaaaaaaattattttttcttaaaagaaatagtgaaatgcggcaaaacccctaatagtttcactttgcttgcaattcaaaacctaaattttggcggcaaaactcctaaaattatgataccattaacaatctacaatttccatcttaatttggcttttaactaccatgttggatggtccacgtggacaaagtgtacacgtatcacaattttattggccaacgtaaataattatactaaaaaaattaaataaaaaaaatatatatttttctttttttttctctaatatatttatatttttcattattcttcttcagtctatatactgtcaccaccaccaccatccatagccaccgtaaacactaccaccaccagtaccgaaatcaccaccatccatagccactgtaacatcaccacccactactatagaattaccaccacaatctatttttcacttccatatcacaca

SEQ ID NO: 245776 - DNA, 1421 bp, Cannabis indica
gtgaaaataatttaaaaattataaggttataaatttaacaatttcaaagaatttaatgtaaaaaaaaatgaattgctaaaataactttgtttagtaacaaattacaaaaaaaatatattaataattacaattaatttaattttgaataaaattaatcttaattaaacttttataaggaaataaattataaggttattttcaagttacaagtcattttttatttatttttatttaatttctaaattaatcacaaccatttaatactgatttattggctaaaacaaatgtaaccatgatggttacaataaaaatgtaaccattgaaacctcttctaataatatatatatttgtgtgtatgtatatatgtgtatatgtgtggatataatattatctatttttaattaatatgtatatatatatttgtgataatgcatgtgattgttttgtattattcttgttatttataggttttaaaatttttgagattgtcctattacaatttttgagattgtcctaaaattttggtagaaataatatagtaagaaaaaagttaaattaaaactttataacacaaaaaaagttacttccaaaaaaaattagtttaaaaaatttaaaaattagaaatcaaattaaataaaaatttcgcaaataattaaaatttttttatgtattttgaaaatcaaagtgatttaataggaataatgatcaaaataataaattagtgtcttttaatagaaaaaattgcattatttattaaatagtaatgacaaattaggaatataaattaaattgataaattattaattaaatttaatacaatatattatttaaacttaaatatatactatttttaattataaattttgatataggtaattaatattttaaattcaataaaattaataactaattaacagtaaattaattatggataaattaaaataatagataaaataaaaatataaattaattatataatatgcaatatgtaatttaaaatttaataaaatgatattataaattttgaaaaataagttatttttactttaaataaaattaaattaatcataatatgtaatatgttatttaagataacgtaagatattgtaaaatagcataagatattataaactagcaaaacatattgtaaaattgtaataaaacaaaattctttgattgatttgatctctttagttataaatcaaagatataatagaataattgtatttgtattatcacatagtggcaatctttttttttttacacatgcatgaaatatcttagatatgtttggagagactgagtcagaaacgtctcttaaaatatgattctccaaattattcatgacttttttatccacatgaatagttttggcttgttttatacttatagtttgatctattacttatttgattgtttca

SEQ ID NO: 245777 - DNA, 1050 bp, Cannabis indica
agatgatctagaagagcttgactggaatcatgttggttccgatgtgcttattcaaatgggtctcccgaagggcataaagattaaggtatgggaagttcttctgtattttgctagtggggttacttgtttgttaaaatttaaatttattctcaatattcaacttttttattttttcttgtttagcataggtaaaatagctttcataatttagttctaacaaatgatacagaaacatagtgcacaacgcaaggttacactgatatcatataggtttataacttgccacttggttttcatcttgaggcttgagttttaatgctttgttgtgcaatgatctgttccgatggtgctcagctataaaatttaaattgtttttggtggggattgggaataagtaacaaagggtcttagccactaaataaaaaaataagtataaccatgataaagaaccagcatagttgaaatacgaatgcattttgcggcacttctctttcctcttattttattttctaaaaagctaacttctaagacaaggagccttagtgctcttatgcactttattctcaatatcatttgtactattctattctgttttaatttctttctatataagcgtgtgattggtcaagctatttatgccaggcttgtttgaaatgacatctgaactattaccgaatcttttcgtttcttttcctaaatacagtaattctatattccttgtaaaacaataataatcgttcactatttattgacttcctacacgttcaccctgcagtttcttacttattattattatttaaaatagctaattatcagatttaatctgccatttatcatttactgtttgcttattcgttgtttaatgtgtatttccatctagactgctattagcctattgctactcagaagtgacttatcatctttcttgtagtagtgaatcataaatgtctcatgttctggcatgttggggtctatattttgctcattctctgtgtggatgatattctttttatactcaatcctgtagaaagcttaactttcagtcattag

SEQ ID NO: 245778 - DNA, 1716 bp, Cannabis indica
ttatcttttttaattccatataatctatatcctaaccctagaaaaaatcctataaatagataatgataggctcttattctacctaaccttcatcagactaatcagtcagacaactgaaaaggaagaacctctcttagatttcaaattcctttctctttcttcttcaaaatttttgaaccctatagtgaagagtacttgcccacacaattcaagtcaataatcaatcataatgtggaagattgtgaagaattccatcatctaaggagatctaggttcagatcttggtaatactctgcgacagaaaggaacaagggttagagatcttaatataatgagcctttatattctgctaccaccaaagtaaagttttctacaactttatatgtatttattttattgttttaggaaattcatgtttaggatgttagattatagattataatcaaatatacatgttggtaaattgagatcctagtaaaacaagtttcaacaactagcctcagagcaatggtaatgatttattttcataaaatatggatttaaaacgatatttgtatgatttagatgtgttcactcacgcacgtggatctaaggctacactcggtcgagacacggtttcagacaatggctatccgagttttctcaaacacgaccttgtttgaacagcctcgtgaccgaggttagacgcacatggaggttgcacgtagcctggttctcgacatacttggcaattttttaacttttaaaaatcatttttaatgaaataaaatttaaatttggtaaaaatttttgtagaatcttattttcaaataaaaatctaattattagattaaaattaattttattattaatctaaattagttttagatattcgtagactttaaattgaaaaattaatttctcaacaaacttgctattttagttatttgaaatttgattattttttattttatgtaataattttcattgtcagatcatatatttacgggataattgctgcaaaagtccccaaaaacttaaggttgatgcaggttagtccccaatctcgaaaattggcggtaatagtccctaaggttgcaatatttgtaagtccgttagtccttttttctaaggatccgttttctaattcaaaatgccacgtgtcgataaataattggtctaaattataattttattaaactaaataaattattttcaaatcataaattattatcttttctttttctttttttcttttttccgttttttttttcttcgtcttcttccttagtctacccagaactacccagaaaaacgaagcacccaccaacccccaacccaaaacccaacaccaccccaccctcgacaacggtgagaccacaatctcggcgagaccaccaccccgagaacaaaaagaaaatagacaataacaaagacctcttaatcgaaaatccctaaacaaaattagtaatcaaaattccttattcaaccaatgacaatcacaacaacaaataactcaaaatctaaaacccaaaatccaaacccattacaaaataactgggatttcatacgtcggatctggacttgaggtttcttgtgcaataaaggagagagcccgatctggccttgaaggaaaagaaaagaaaatgaataccatttaaacgaaattttctttcgatttgatcagtaatgctctcatcactctctcgaatcttcttctgtaatggatgttcaaac

SEQ ID NO: 245779 - DNA, 795 bp, Cannabis indica
aaaaaaaaaaaaaaaggtataaataaataaaaatgaaagaggtgtagttgaccccatgaatagttgataataacaaagaaaatgtttattatatataaaattaaagcttatttatttatttatttatataactccttagaagaataaagaaaaaaaaaagtttaaattgtatatttatatatggcacacatggtcggtaaagctggacccaatggtcacacttgtgggccattattctagccgttggaatcgccattaacgaccttttaaaaatttatcagctccctttagattaaaaatataataataaaaataaaatggtcctacactttaatcaaacactaaacatttgaacaaaactaaaaagaatataattatcatgatattacttagatatataataatatttggaaatcctatttctactatactagcgttttttatttttattattgtgtatggaataattataattattatttttatatgagaatttatattatagttatggtaatttttttaaaataatttatagtattaaaaataaaatttaagtaaattattaaaaatttttcaaaaacatatataatttaaaatagattaggacatacagtaagtaatatagatattaggctaattttaatttttattccttaactttacacatgtatcaaattatattttcctttaaatttttttaaccgtttaaaattttttctttgaaactattgagatttgttagaattcttgtataatttcattcaatttaataatttagttgattgtctatatact

SEQ ID NO: 245780 - DNA, 878 bp, Cannabis indica
ttagtagaaaatttgtatctgtattttatatatttcctactcagattaatgatattagctttctcttgtagagtaggcgtattgccgaaccacataattctgtgtgttttattatttactgctttgatatgtttatcgttatcttttgctatttattgcttcttcgcacaacaaatcaatattagagtcaaatattgcactatcacatatcaaattgaagctctcgacgagacgattccaacgttgcaagaatcacctcaatcgaaggtccgatgcactgctagtagccatcggagtttttctgccgataaccaagttaactcagtataactatgtttatgggactgagtgattccatttttacccatttttaactgagtcagaccgatacctagctattttggactgttctaaattcaactgcgacatttgtttttcaaaataaggtaatgagattttgaaaaatattatcttaagtcataagcttaaaagttttgttatctgtttgcacttatggctgacaataaagatattaaaaaagatgcacaagttgacttaaaaagttttggtgagtcaagaggttctatgagaagaaccatgttatcaaatgcaaagtttgaggtggagaaatttgatggaaccaataactttgacatgtggtaatgtgaagtattagatctattatttcgagaaggatctaatattgcattggagtccaggccaaaagattattccgacgaagattggaattttatcaatcgtcaaacttgtggcacaattcgactgtgtttgggaaaagatctgaattactttgtcatgtttgaaagtgttacagcagttctttggaaaaaaattagaggacaagtacatgacaaaga

SEQ ID NO: 245781 - DNA, 611 bp, Cannabis indica
atattagaatattacgtaattgattctgtcaagattcaatgaatataaaatattcatttatcagaatcaataatattattttatttccttaattagaaatattctaatatgtataccatgtaaactactaaattttccagttggatggtggctaaaatagctggtatggttagagatttatggtgatatttcgaaaaagggaattatgggctccaccttaagacttgggataagttgtgccttctaaagtcttgtgatgacttaggctttcataaatttgatgaaataaatcaagcctttctggctaaattgggatataatatgttaatcggagccaactctttttgttgtaagattttagaagcgaagtacttgcggggtaattgtttccttcactttttgactcatgcttttggaaaaatatagtgaaagctaaatcgacaattccaaaaggtacttgtaagttggttgttgatgggaaggacaccaaaatttgagaggatccttgggtcactcatggtatcaatttttaccctaaatacagtgttaatcctttgcatgactatgtttgggttgctgaccttctgactgagaacggggattgggatctc

SEQ ID NO: 245782 - DNA, 762 bp, Cannabis indica
aataaaaataattaaaaacaaattacacaaatataaaataaatagaatttttacctcctgaactattactattatataattatgaatttcttatgtcatattgaagttcttttgaattattactattgtcaaatcatgtctctccatctaaaagttaatatgtaactatttcacatcctataaaatattattattgtagagttgtgctccctaaattattaatgaattgtgctcctgaaactattaccgctgtccaattataccctctaaatttaagatagagagattaaatttaattattgtaataattcaccatgaatttaaaacaatgtaaaaaaattcaagaacatgattaaatagtggttataatttagagtaaaaaatcatacttatttttgcaagtagaaggtgaattgttggtgaccaatataaacaaattttaaattgtaaaggccattcttagtgtgtgtttattgatcataaccatgaagaaattactagctaattatgtcattggccaatgaaacataagtttcaattgacaattagtctccatgatcaagttaattttaaattcattatcacaagtttagtattaaataacacttatatgtactctaataaattagaagcttatctaaattttcatgatcatctctttcttatagttatcgcaattttatattgtaactcataaattgatttagcatgccttttgactactcccatttgtaactcgtcttcttgaccaaaaaaaaaaaa

SEQ ID NO: 245783 - DNA, 717 bp, Cannabis indica
ccatcatggaaggttgaccaagcctttttcaatggctccccaatcagtatcatatccaccaagagggtcgttagggaggaccgaacaagttctgtaagtccttctcctgacaagcgcaacctcctccactttagattcgtagtaagaactctcgaccccctggtcgaccttaggcacttttgcctggccaatttatagatccccatcctcatgaggctgtgtggcctcttcaacagctcccactctacccattgttgccacccttgcaacataaggatcatgtggcagtgctttacaccatgattgttttgttctagccatgactatcagtctagaatcacacaaaaagagcaagcagacaaattaaatgatctctatcaaaagcaaggctgacaagacctatgacacagcaacttcacctccctaaatcaacactcaaaattacctacatagaagagacaaggggaggtgagaaacttgacaaagctataaacaaagttctagtcaactgtacccaagggtaccttccagataaatcacattatacaaggctaagcatcagcaaagtaccgtatcaagtacatttacatagacaaatagtgattactaagttgtgcactcgactataatagactcactatcgagtctcatacaaagttcccaaaggggaccatgcatgagattacgattgtatatgcctccaaggccgtcacgaga

SEQ ID NO: 245784 - DNA, 1218 bp, Cannabis indica
ataacattttgttgttgcatcgaaacatatcaatgttgactaaactgactaatattaaacttggtaaaatattattaaacataatatataattctagtacaatattatttatcttagaatcaaattaagtatctattatttaatattatttcaaattttaaaaatttatgtatggtgataaagaattatacattttcacctattctaataaataaagtttttataagaaatctataaatgaaattgtaattattctatttaattttttaaaatataaatatatttacaaaaataaaaaataatctcacttatatgtgattattttttttttacagtgccaaatagaataagtaattctacacaaatgacattaactagattaattatccaaaattccaatatgttacatggggatggttcctaaaaaaactcaaagagttgaagtttcttttttagaaaagaaaaaaagagaaacataggtttcatttgaataatataagtacccatgttgatattatattatttctatcttttttttattaaaaaacaatttctaagttcatcttttagcttcaagagtataattataaatatttaatattaagatttttttttttaaaaaaaaacaattaaagctcaaatatttcttatagaatctatagtctatctataacatatatataaagatgggtgatgattttttggttttgattaagttattttatctttttgtgcttagtactattttgtttttttttttttgtgagtttttattattcaataagttaaatgtatatatataataatctataaattttaatgcattaccatttcaaaaaaaataaatcaaataaaatacattaatatataataatatgtaaattaaatatctttatttttaatataatttattgtttttttctttttacttgttatttatttgaaagagcacatatataagttttttttttatttatttaataataaattatacacacaaccacattgtatataataattcaagataattatttttgacaactctattaatatctttatatattaaaagtgtctatctaacgacaattcttggtttaacagaatattttcttattatgttaaaatttaacgatacactttaacatcaatgttacctccaaaaaaatattaaaattaaaacgatagtaaacctaatttcctaaaaaattgtaatttttt

SEQ ID NO: 245785 - DNA, 740 bp, Cannabis indica
ttattttattattattaataatagaatattattatttcgcaccttaagatacccaacaatatacagacatgatacttaataattacttaacagtttttcatattattcactaaatcaaaatttgtgagatccgataatgaaatgcaccaataacaatatgtcaccatttatggtgtttaattagtatctctcttagtattttgcttatcatctccaatatattgtgtatactttaagctcaaacaataagctaaattatattcggcctaaattttataatagtgcttcaaagcatttatgataaaattaactcgtttttttatagaaatatataaaagaaactaacacattaaatttttactgaaattataaaaaaaaaattattaaatataataaaaaaaaaaatgtaataaaattaattttttttgtaaggaaaaatgtataaaataattaattacattaataagtgagaaaaaaataaaataaaaggtaaataatttttttgttggtataaaattacagcatatgttatattttgtggtaaatttagcacaacttttagcatgtactaaatatggaccactctatatactataattagagtttacttttattgaagatggtttgaaatatgcacatacgttatatttttagtctctctattagaaatactcttaatatgcacatatccttaatcactctaattataattttaactttttcccaattatacataattt

SEQ ID NO: 245786 - DNA, 1370 bp, Cannabis indica
aatcaaaaactcttcaatgtagcgtttaaggtaagggaacttttaaatgagacggtttagattagatattttagtatatagaaaagaaaatagtgaatgcttttagatttagcccaatttacttaggtcactttaaaaggaaaaacaaaggcaagcatagcataaggaagccatacatctatctctacttgatatcttagaagacaaagatcatattaagagccttttttcaatttttaacaaaaagagagtcttaaatcttctactaacctttcttgttgtgttaggtaattatcactgagaagtttctgaagcaatgcatcctgatatgataaaaaagttaattcaattacttccaataaaaagataaatagccaaaaaaataaatgcaaggccataatcgaatggttttaatagtttttcatacttgggcttcacaccgtacaactgccatcacacgatcattgaattcttcaatactcaggggaggaaacaagaaatgcctgcgggcatatagctgcatatttagcaaatcttgatattagtaagttaattcacaagaaatactagttaaacaaaaacgttatattgtatcagaaaaaacaaatctgatactgtgcacttcagtcacttattatgatgatttcaaaaggagagtcagtacattaattaagactttaagttgaatataaacagacctcgtaaatgcaatcgccaagatatgctaatgctgctgcattgtaaatggaacgaggcttcttcacttttggaggactaggcaaccacctttcatatcccaagtataaatcatccgttttggtcatttctgcaaaatgaaaaccctattcataaacaaggaacaatttattgaaaacccaattaccatatccataatcaaaatcaaaatctcattatagcttagaggggaaaatgataatataacgatattcttaaaacccaaagagaacccctaaaacccacttgacgcaagtaaaaacgaaactagctgtaaaaattcaacatcctccgaaggctaagaaaataattcctcggcaatttttgaagtgaccaaacagaattacaaacatgaaaagttcagaaaaagcataaacctttgctaaaagcgaaagtgggtttatatggttaaggaagtaccttgaggcggtggaaccggtgggcgcttgagaatttcggaaatggaatcgaccattcgggcggttgaagcagttaaggtgacagtcgggggagggtttttggagacgggagggggtttttctggggtttttgggggcgattggggttgtaagaaaccatttgttgagtgtcccatgaagccctaagtctcagtccgaaagttaaggaagacgagg

SEQ ID NO: 245787 - DNA, 774 bp, Cannabis indica
atggtacattcagtttctgtgagatttagagcaacagaaagagacttggttagatcatccatggtgcaagtgagcaagtagtgactaggatcaagtaagatgatgttaatgcaatagaaccgagtaggcaaactaaaagaacaactacacgaagcttgatagattaaactgggcaggttaaaatggaacagggatgacagcaaactggttggaggatggacagaggtattcgagagtctaaaaacaagataactgctaagtagatgtctatgaactatggggtaatgttggttaggagatttcaacagcggggggaacagggggccaatatgataccttaacctaagaaagaaataatcagagagaatatatatgattataatacagacctggagactgtgaacaaagtgaagattggagaaatcagagagaatatatgtggggattgtgtagaaacctaggctcgactgggttactatattattatagtggctgtagtatatatttaaactatagaagctcttgtaggaaaattcttgcagggaataatacttagtgatggtagggatatatgtacaagatcgcagaagagttctgcacttatataggagatagaatttgggatagctatgaccaaatttggtaactatcccatctgaagcatttactaacgaacagagttgctgcacaaagagatatcgcatagtaccaggcagatcacgattgcaggcaaaatttaatgctaaattttgaaaaactttgacaaaaagaata

SEQ ID NO: 245788 - DNA, 570 bp, Cannabis indica
aatccaatctacggaaaagggaaggaagcagggaacgaggccggttacattgtaggaatgtccacttgttatccgcaaccaggctcaatcaagatagttgatggtgagacattggttcttgagtctaaatacagtagcagccaagcacatactggagttatggggctattttacattctagttgcagaccaattgccaaattcatcaaacatcttttgatcattttctcttctctttgagtgtgtttttttcttttcacttttttaatctataacattttctatctaatatgagttggtgaaatgcaaaatatgatgtgaaaaagatggtgaagagtactggtttctggtcactggtttccaataatgcatcctagagttcaaaattggctgtaaaataatttaagtttcagtttggttgggactgtcatgtataaaatatttgtatctattataaattagaatgttagttatgaaagtaaaagttatgtcactttttccttttttcttctttttgtttattacttttatatatcagtcctggtataattgggaaaattttgatgaacaa

SEQ ID NO: 245789 - DNA, 803 bp, Cannabis indica
caatccttcccgtcgagtcgactttgagccagaaccataagttggcctctctatcccatcctcttggatcccagtagctcgacgttcattgcattggtgcatctcatggccaattcttccacaattaaaacacatatatggaagtctatcatattggaattgaaaccaaattcgtcgtccttcatgtgggaagaggtaacctggaaagattttggattgaatggagttccaaattttaaatttgaagaatccattaatagcaattctattgacttccgctccttgaatatcaagaatctcccccgccattcctaccaacctggccatatttgatttggttattgctttaattgggaggttaagaacacgacctgtagtggtgtatgagcagagagtcgcttcccaatcctccggcatgcccttcattctttccaaaatcaagaagcccgcattcagcacccatggagtttttcccagtattctttccaatgtagagttcgaattatatgacaggaccaagaagatggttgtcgcagtggttttcttgatttttagattccattcggtgtcccccaaattccagagtctacacaatatgttctttagcaaagaacggctaaacggtttctttgtgcatagccttccaataaggcaagatttgccaatgtcttcttccccttcctcattgatttcccatccttctacatcaataaccttcaattggctaatgcgagagagcaatttctctatttgatccatgctttctgagcacatcctttgattaggctcttccgaagagagca

SEQ ID NO: 245790 - DNA, 751 bp, Cannabis indica
aaaatacacaaagcaaaaataaaaactaaaaaatataataagtataattacacgtaacaataatctaattttaatataattagtatataaaatttctaacaacaagctatttttattatgttttattattattatattctagattataacactaatttctttaataatttttttaagaataatttctttagtaacttaaatatttatcacaaaaaagaataagaattttagcattataatttagcttttttctttatcactaataattgaatattgtaaaatgaaaatgagaaaatgtgtgatgaattgatttaatttatcacctaattatacttaaattggataaaactttaaaagccaaattatattgtatcttatcaatttaatcaaaaaaaaaaaaatagaaaaattagagttataaaatgtaacttgaattagatgtatgaaaaactacataaaactatacatataataacaatactaatactgtgatttctaataaaataaaataaattaaacaatactactgccactcaaaaataagtattgtcttcttacattttttatagtgtacttaaaagacgagtgtacaatgaacccttgggaatttaattttctatcttaaaaaactaatttttttttattaccaatacattttacactataaaaaaaatgacactttttccaaaaccccaaaaactaacccctcctactctacttcgtctctctctcggaccgaccaaaaaaaaaa

SEQ ID NO: 245791 - DNA, 919 bp, Cannabis indica
aagaaccgaccgatccaatattttaaaaatatcatccgatccaatccaatcataattggatatccaatttttgcaggacattggatcggtcggtttgttattggattggatcatttctgcaagatgcttctctaaccgatttgaggaaggagacagcgatttgatgaaggagacggtgatttgacaaaggagacgagtgaaagggcttctttgattttcaatttagagatttagtgatttaggaactgaaattttattttcttcttttttaggttaatgtattgttggatcagggtagccccgattcgaaaaaaaaaaacctagtcgaggcggagcagggtgaagacccgaatagagacccaattataaattggatgttggatttctccaaccgatccaatccaatactgtaagctcaaccgaaccgaaccaaaccaatccaataaatcattgaattgaattgattccatccaatggatgaatctctgaattggatcaaatgctatgtttttattttatgcgacattttatggtaatttttgatatttataagagattatttattcttagtatttttagttactttaaaaatattattttaattcatcatggtcctttgaagtgatcaacttgttggttgcagagcatttcctaggaatgtagagctctgtgataacaccttcgtcgttcagcatattggcgagtgaacttaacttctctgtaaaatcaatatttgaagacataagatgcagattgcagagaagcaaaagaggcgaagggttttacagaagggccggcgctaaagtatatattagcattcgaagatgaaccaattattattttttgtttctttttaattttgatttgcagtgggtgatgagatgaaggctgagagctcatcaatgattgatttgcagtg

SEQ ID NO: 245792 - DNA, 880 bp, Cannabis indica
atatttttttatgcaattaaatttgcatgtgatatagatatcaaaacgttttttttcctctaaatagccttaggatatttgcaccaaaatattagataggtcctttatagctaaaaaaaataataaaaacgtcaaaaaaaaattgttcaaaaataaatatttttttttgagaacaagaatccattaaacaaattaccgattacaaagaaaatggcaagtcacattcaataacatgacgagcacaagagagtgacaccctaatccacgtagcactaactttatttttcaaaacgtaattagttaatacatgagccaccatattggcttccctaaaaataaacctcaaaccactaatagaaggacataacaacaacctctgaatctcaaccatgataccatccacctccctacaaccccgctcttcgccattaatgagttttactgcaaacaatccgattgtacatcaaaccttggcagcccccattgcattccaactttaatgtcatcccgaatcccataaagttcagccaccaacggagacatggcccggtgcaaaacagtggcatcagcaaaaattaaccgccccctctccatccctaatcaccacacccgtagaagcaccaagaactgaagaagaaatccagcatcattgcatcaacattaaggactgcattatttaatgtggagacttgtttataaaaacaataaaaaagaaattagaaacataacttaaggtacatattgtacacattaagttttttttttttaaattaaacaaagaatagatagtatttctttctttttcttaaaattttattaaatgataacaaagcatctttaacatcagaaggaacattattcccttgaaacacacagttag

SEQ ID NO: 245793 - DNA, 736 bp, Cannabis indica
atgaaagcctatgacaggctgaactggggagcaattgatcaagtgctgtcttgtttcggtattcccatgaaattttgaaattggatttcccagtgtatctctaccactactctcaacatctgcctaaagtgggggcaagtgggaactattaaaccttcttgtggtctacgtcgaaggggatcctctgtctccttatctgttcatttggaacgactaaaattctatctagactcctaaatggtgccctagataggaacaatattaaaggtataagactaagtagaggaggtccggttctttctcacatattctttgctgatgacttaatattagtggggagagctaacttggatgaagtcagaggttattggaggtgcctggagagcttctgctcttggtctgggcagcaggtcaataaactcaaaacctctatcttttttagtaagaatacgccaaggggcctgagacaggagattaaagacacgttgggtattggttccccggaaggacatgttaaatatcttggattaccactgtttagatctcgtcaaaaggatgctgacttcaatttcattctggataacctctctaaaaaacttcaaggttggaaagctaaaaccctctccaaagcgggccgggctactctcatcaagtcggtaggtctgtctatgccgatgtatgccatgcaaactactaaactatctgtaaagtccttttttggcaagttaggtgacaa

SEQ ID NO: 245794 - DNA, 1541 bp, Cannabis indica
taattttgtatggagcttactatatctaattatagaaacccttaaaaataatcctaaccaccccacatatagtttaattgttatgtgtagtttttaatttttttaattaatattaaaaattaagtgtgctgaattgaaatccaactaaaaattctatttaattaaatattgtagtcatagacatagtttagtaattttatatttttcttcacaaaaagaaagtctaagttgatcaaatttcctcttctcaaagtaaaagaaaaccctctatttaaatattgagttttaaaatctaattagattaatgggataataatttttcaaatttaattattaaattagatttaattggaagttggatttttttttttttttgtcagaataatttataatataattaaataattgaataatacctaatatttataagtgacttttttatttttatactttaaaataattttttttttttttgttatttttactgaatttaatttacacaaaattcatattgtaattaacggaacggagcaatttaaatcgtaactaaaattcgtataacaactcatataaaaaccaccgaaaaaactaatttgaaaacccaaatcataaaattgaaaaaaaaaatttaaaataatatacgagtaatttccaaatttataaagagtagagtcttctgagcactcataaatataagctatggcttataattgacggggacagggctcgaaagcaaaatcaatggaaagatcatactctgcaccacacttgtattctgctgtgtgcatcgtttactttacttttgaaacgaccccatctactttttgttcatgcagtcctaaggaaacataacctttaatttattagtattattcctccaaagtccaattctataagatcttttttctttctttttttgaaaaaaataaataaataacaaaagaatagtgtttgggattgggacacttcagttcaagtagtcttccactacaattgactcaaaatctacctactcgatcacacacttccatttacttagtaattcaatatataatataaataagattctagaaagaaagaaaagaaagaaaacaaaatattttatttttagtcacaattaaatttgtgattaaaaataaaaaaattataactaattataaattataatttttatgttgtgaataaaaaatttatgattaattaatcataaaaattataatttattgtgactaaatatatttttagtcacaattaaaactaaattagtgacaacttataattaaatattatgttttaatcacaagtaatattttattatgactaaaaattacatttagttaaaaaaaaatgatgtgactaaaaattgttactaaaagtagcagtttttttacagtcaaaataatatccaattaaatataataattaggaataatttggaaaccctgtaaaaaattcttggctcataatatcatagcgctatgaactaaagttggaaagacaatatataccagagaaacacaaatggaaaaaaaaaaaaaaaa

SEQ ID NO: 245795 - DNA, 823 bp, Cannabis indica
gatgagttaaacgatgactttcaattacaaaaaaaaatatcatcataatatcttttatttataataaaaattatatcatgttagattctttattttagtcctttaattaactcttgcattattttatttttttttttaaaaaaaaaactatctttatttgaataataatttgtttattactcttcatttataaatattaagaaggctacgtatttggtatttcttgaaaatattttgactataactaattttagagaccaaattttaaccttaaaaaaaagtaagatttaacctaggatatttttatttgcacccgataaagtagtgctgtaaatactagttagattttttgatacaacacgaaatcagtacaagcctggaaggcacgaacatgactatacatgaaaaaatataagcttgaatacgacacgacacgatgctacgaattggcacgacacggcacaaaaatatgttcttaagcacgaaaagacacgagaagcacgaaaggcacgacacgtaagcacgatagactagcctgaaaagcacgatgtgatgtattaaaaaattaaaatttattgttaataataataaaatatgaatttaccaattataaataagttaaaattataataaaatttaaatataatactgaatattataattctataattaaaactataaaaatatatataaaaaaaaactaagatcatatattaatttatttatagggtctgaaataaatactgtatttataagtaaatattcaaattttagtgattttaataaattttttatatgattatttgtaaaatattgttcaaaa

SEQ ID NO: 245796 - DNA, 883 bp, Cannabis indica
atttaatcacatgtaatataaaaacatttatataataaagcgagcgtctgccgttttttgctcctaggcagttattttcctctatggttttttcatccattttttctgctttcttgcagtttttcatcgccattttcatcttaccaatccaaatctccattcctgttcatcaaattctccctgtaacatggatccattgactcaaaaaatgaaaggcatcatcaatcttgaagaagaggaggaatcagtacttgcttttgatgaggaagagtctcccaacttggaagtgaatgaggatcactgcctccttgctcgagtcctcactaggaagcctgtctacttgtctaccctgcaaaaacaaatgaagactcactgggatggacggttccctgtaaaaattacagaaaaagaaactgatctcttcatgctttctttcggttgtgaaggagatatggaaagagtcctcactcaagagccttggcacttccaaaatcgccacattgtcctgaaaaaaccctctgcacttcaaaacttaactcccactgatcttaaactttcacctttttgggttcaaatatatagactaccctttctcagcaaatctagagggttagcaaaagcattgggtaacattatcggggagttcatggaggtttacactgattctctcaatgaaggttgggggccgtttttacgaattagagtgaatcttgatgttaccaaaccattacgaaggggaaggaatatccgtttacagcaagttcgggacaagttttgggtggatttccgctatgaacggctacccgaatggtgtatggaatgtggttgcttaggacatccctaccagaaatgttctacattccttgaacttattgataatggt

SEQ ID NO: 245797 - DNA, 604 bp, Cannabis indica
gtgaaggtgaggaatcatgtattgtttcaaaaaaaatatattgaaaaaaatatgtattaataatatataattattctaaacgttaagagacataaacacaacttaatacgaaaaaatataaatttaaacatggcacaatcttataaggaccaaattgagatctgactatacataaaaaaatgtaaactcaaatataatataaacttacaaaattcgatatagataagtacatgttaaaaaacttagtaattaataataataataaatatttatttatttataaattaatataattacaaatatttaaatttcaatcatataaattattattttttttttcatataattgtatgtatttattataataatactttagctcattaataaaaatttgaaaatgtgcagcataatttcaagtatgtttaactcaaatccgatcaaaatccattcgaacttggttcagcttgaacccggcccacccacacccgaaatttgaaaacccgataacacaaatgggcgggtttggataataattctagggaaacttaaaaaaatactgaaatttaggtaacttttacaaaaatactgtcacacggaaatcttt

SEQ ID NO: 245798 - DNA, 1181 bp, Cannabis indica
aaaattaatttttttaagaaaaaaaaatatattttaaacacacttagtataaaaattcataaaatatgttaatttttttttttttttcataacaggacttaacaaaggtggtattttgattggtttcatcatattttaaaactttattaattaccacaaaaaataatatctatttaaaattgaaatatacgagtctcctattaaaatgtatcaatattaatgtaatgtgatctcattgcttatgctactcaacaattattattattttttaacaagacaagagaagttttttcttcttctccatatatagttattatccaaaatatttataatcaacatatatttttaaaaaatcataattttgttcccctaaatgatataaaacaatagataatttcataatataccttgaaaaaggtcgtgtaagagagttttttattaattatgttttttttatatattatttattttagtaaatgattttttatatttactattggcatcttaaggtgctcagtaccatatgaatttggtacccaataattgaataataatttatttttttctattttgtgttttatttttttataaataacctttgtactatttttttaaaataaatttttgtgttattattattattatttattattattattatttatgtgtcaccttaaggtgctcaataacatagtgacggataatttgtacacaataataaattaaaatatttaagaaaattagtttaatattctaatatttaatgataagcttattgtagagagtaggaattgaagaccaaaaaaaaaaaaaaaaaattaaatagtgactaacaatttatacggactagtgatgataattaaaactttactttggctttattcattaaatactattttagatattgtattttgcaaaaattatcaattgccatctgttttgttaaatgataaaatatcttataattttcaaaatagtaaaaataggacctgagctcaatttctgataattttattttttaatataccaacttaaagacaatttataacacggacatatatagaaaatgtaactacttttactataaaatctctatatcgaattattattaaattttattttaataaaaaattagttcaatgtcttatttatattattttgaaaaatacatggtttatttt

SEQ ID NO: 245799 - DNA, 982 bp, Cannabis indica
attatgtaaatactagttgttctttgaagatataatttcgcaattgtaagattaactcaggaaaccacgtgttgtgtggtgtagtagtaagaaagtttattggtttccttagttgggttaagggttcgactctcactctgccctcattagaatgaggggattatgcttagcccttgaaggttggcttgttgtggtgtgctatctttgggatgggaactttcatgaggtgtaatatgtgagttgaggcaggaagatgtataagacctttatagttagcacgaggtctccaggattatcaaagcatcgaaagggtggggaagagatttgcaccacataatctatttttttcaacaaaattaaaaaaaaaaacaattaactcatgaagaaaattatctactggtgttagactagctcacttggggtagctagctaatgtttagctacatgtgttagactttatttgattgagcttccgctttctattttaagcttcttagaaagctcttcttgagatagctagtaaaatttacttctgttaaaagagtttttttattaccataaaattaacactattttggctggtacaatgataatttaataatacgaaactctttcgctgcgtacctgatttagtaccataaaatcaacaatattttggctggtaacatccatggggatgtgtgatatcaaatgtgaatcttacacactatataaggaggtctaaggttctcatttctgtaacttagttttctatcaacaagcacttgccaaaaaatacaaggcttgataattctcaaagctatttcttatagaattcccttagtgatgggagatagggaaaataaacttttggacaaagttgtaatactttgttcaagtcatagtgattctcactaatctatactcaaggttgtgagtcactaatcttcttcttcatattatatatatgtgttatattacatgcgatgtaatattcatgttc

SEQ ID NO: 245800 - DNA, 813 bp, Cannabis indica
attatatatggagtggttaattttatgagtggtttataccatttcaaacttttatatatggagtcttttcttatgaattcatgatttttatacacgggtaaattattacggtcattctcacttatacacttcttgtaaaaaaaaattcaaaaggttatttatcataagattactctaagcacgtttaactaaattctcaaatgatgaaccactaaaaacaagatataccttgttcataaaaattgtatatatacccacaaatctatttaaactttcttcaacaatataatcctatttctacacaatcttgaaatctttatgtttgtccttctctaaataaatgtgaaattatacaatttactcaatttttccggttacaaatcacgatactactaacgattactattagtaattttatatataataattattaaattaaatcatattattaaaatagtatgacacacttaataatggcgtaaagcataacactaaaggcctatcaccacccccatctaataattaagatgttccaacaatatatttgcattgcactcccttactactttatatattatatatatattttttttatattattgtaatttcttcgataaatttatatgtataaaaaaattataaaaaagttgtataagtggcgtttggtaacatttttttaattagttttctgtttttaaaatttaaaaagtaaaaatatttttcaaaaacatgttttataaaactgtatttacttttcaattttttaattgagaatcaaaattttaaaaacaaaaaaatcatttttaatatttt

SEQ ID NO: 245801 - DNA, 847 bp, Cannabis indica
ttttcatatataatattgtctaattaaactctaaatctattgatcgatatattttataataataaaaatttctaatggtgtcacatgcttattataactatacttattactaaaagtacagttaattagactatactttggatattaattaacttttgagtaaaaagtagttgttaaaatccaagcaatataatatttgcaagggatcgatgagaaaaacctacttcattaacaaacaatattagactgatatattaatattgggattaaattagtttattttgtattttattgattcattattgcagcttgtcgatcatgatatatttattttttcatattatacgtattggtcggtctgtgacgatcgatatcattaattgattttcattactatctctctatctcaccacatgtattgtggttgtccccgtaaaaaaattcataggaggagtggatcaaaaacttaactagggatatgactcctcacttgtcactagaagaattatgggttccatatctatgtggaacaatatagtcgattataaaatatagtctacgattcaaacattttattgtctaatactttgatttttttaaactgtgggtggatttcgtaacacttttttttattaggtttttgtttttaataaaagcgaaaatatgttcaaataacatgttttggaactggacttgggacttcggccctagctaggcacatggttccggaccccatccatggacccaaacccatctctaaacctggatcccagaccctgacctcggaccgagctcagccttgaccctagcgtgccccagacccgaactgaagctagctggacctcga

SEQ ID NO: 245802 - DNA, 824 bp, Cannabis indica
actaaaatcgcaacccatactacaaccattctatttgtggagtggactagaaagttgaggatggaaactaacaggaatggttcaatggtgatttagttgcatgttgggttttaatttttagggaaacttgtgatataggatttcgatatgggattagatgggaatgcaaagatggagaagcacagtaatggcggtcttcctccagctaaaggagacaatatgttgtatgagaagcttcaaactagttctttctttcttcttcgttggaataacacatttgattaagcactgtaaatttgtaataaaaaaagtttatattgtataaataaattactttataaattatcgtatatgtgcataaagttttaactgtaactgcataaatgaaaaaaaaaaggattatttacaccatatactaaaatttctaacttttttattttttattgtggggcaaaattcttttcaaaaatattgtgtaagttttatatggtgtgctgtgttaagttttcactgttattttacggttgctttttagttgctccattgttgtttttagttgttctgttttgtgttccactgttgttttataaaaacatagtatttttgaaaaaaaaatttgtgtggcagtatttttgtaaaaattaatccaaatttcagtatttttgtaagttttcaaaaaaaaaaaaatttgaatctaaaattaaacataaaaattcaaatttttataataatacacattaatatagataataaatattaaaaatgccctcatatatctttatatgttataaatattaacaattatgtggatgtccaaatctttt

SEQ ID NO: 245803 - DNA, 684 bp, Cannabis indica
aagaaaataaagcactaattgttgaaatatatcacaaaatatatgccacaatactaaaattatcaaccaaatatgaataaaattcatgcaattagtgttgtacatactaaaaaataatatagaataaaaaaaaacatgaaaatggtggaaaaatggcctgaaaacacccctgcacgcgcccacatgcgcccattttcttcctctcttttttattacaggtccatatgacatgtcgtttgatgaaaatgacatgtcgtttggataaaacgacgagcgcaacaggtgggcaaacgaccgtcatttgcgaggcacccgcggacaagaaacgacttgtcgttcgcgaaggggctgaatccgaggacaccaaataatgtgtcgtacgcgggaggactccgaggtcactgaacgacgtgtcgtttgcgaggctgggactgagcacacacacaaaacgacctatcatttttggaggctaaatccatgagccaaacgacatgtcattttgcccgacagaggcaaaaatgacacgtcgttttctctgtccctgtcacccaaaaatgtgcctacgggtttgaaattcgaatcgtcgcgacccagtttttgacccggccatatctcccactgttgtgaaaattatatacgcaagtatacgcagtcaaacaagtaataaagtgataagtaagatcg

SEQ ID NO: 245804 - DNA, 2278 bp, Cannabis indica
cttggcatttgctttacttcgaccaggtcttcaaggtgcaagggaagttgacaagagaaggaaaattgtgcacggatctctgatgagaaggcattacatgaggtagaccttcctagaggcaatttaaaataccattgttgggcagcctctgtgagtgtggcaagaaaatttctgcattagacatcacctcttaccccttgcaagtccatctgcatctcaaaatactttagatgtaataaaggatcttcttttcctatatatatattttccaggttgccattatgaactttgggggtaattcgaggacttcaatcttaggggagagtggtgatccgtgtgctcggtggagttcaagattagtgagttttgggccagtcaggccttaaaccatgtttttaagttgatctagtattgtttacacaaatggatgaacttgttgggatctctttgaactagatccttgatactgatacccatttggacagttggtgggatgtattgtttgtccaagccccttctttaatttaggtcagtcttgaggtcatgtgcagcgcttaacctatcaaacactgaagtactaggcgaccttggtgtctgacttgtttggccggcaagttagccagaaattttagttggggtgaagctggtgtgtataacttcacccaaaggatggtgtggtaggatctggtcgtttaccgtttggcccataggtcagacctacgaccgtggattggacggctaaccactgtgagtttgtatagtttgcccaactgtacacccttctaaactgcccaaggtaatactggatgcagtagccggttgttgattggtgaattggtaggcccttcttattagtacggtggcctgccttgtgtgatcatcaatggctgcctgctgagccctcagagtttccatctctcagttcatccattctataaattgacgtctttgtccgtcaaatgcaaggtttatgactgcatggagatcctcctaatcaaggtgtaaagcgttattatgaccttgcatgagcccaagagttgctcaaaggttttggatttcagtgtgacctccaattggcctttgagcattagtggtagacgagacctttgtgttgggagtgaattgatcagttgttgaactggtgattccagtctcttgtacgcctggtgtgatctcagccaaaggggaagtcactccgtggcccacagtaggtggttgtgtattaacatgctcgaggtttgtccctggtggtcctctcgtttttccagaagtttgcacgttgggatctatcaccatcgggtcgctctgatcagcaaggcctctacgagtttatacaaccatcctattttcctgtcaaaacttaagacgaagaacttgtgtttttgctctcaatgaaagaaacaaaacgttgacctcgctttaagccaacgacagtgagtctaataataagcgtttgaataatataattaaaagagaacaaaaaaaattaagtaaaataaacactagtttttaaagatgttcggacccgtgagtggggtaatagcctactccccttgtatggtattggcttaagaaaaggaacaaagtgttcttcccctttgaaagctcttccaactgatctctttgagtaactctcttacatcactatttctctctagaatctcattctctctgaagcaattctttcaattccctttcatagtgaggctaggtcactatttataggggcttaatgcgtgagtgatggtttcccttttgcttactatacataaaataggaaattagaatgattacataattgcaagatatgaaataggaattttaaataggttgccctatttctttgacttaatcccacaattatagggattctcttcgtgtctacacataacaagatcattctgaaataattatctcttgtaagtttcttggcataacagagttctacctggtcggatgtcttctctacaactctgctcgggtaatcgagaattatagatgctgacaaattatgtgtagtctactagggacatttacctccgcacaggtatcaaaaatattggacacgtattgctcggtcctctcgccacgtcaatgtgcgaaaaactggataacataaggttttctacaactttaaatttgtttatttcattgttttaggaaaatcctttttaggatattagattataaaatataaccaacatatatgttaataaatttatatcgttatgtaacaagttccaacagaaagattgggcaacaaagaactcagcaatgg

SEQ ID NO: 245805 - DNA, 2016 bp, Cannabis indica
atgggttttatttagagcacaaaactcaacacataccacgcttgaaaggcttggtgacaagtgggggtaaatgtccatgaggtccccaagctcatcagcgatgaattgagtaagttggggagatttctagccaaaaggagtgttgtgaccttggatccagaaatggaaaaaatagaattgatctagtgtgagggcgtcaataccttcagggttggcaaagttcatgaggcttttatcaaaatgccatggttggtccttaaggacccttcgacgatctccttcacactgaaagatggataagaataagcctgagtggtatttggagatgacagttgggaaacggatggtctaggtttcagccattactttcttgatccagttcggcttggggaatttggaggtgaggattttgataacgagacaatgggaatcagtaaaagtatcagagttgagggaaacatggtaaaaatatggataagattctattcctcagtgagggagagggtgttaggtgggttctgggaagaggaagacgccattgaaaaggtttgggagctaaggaaggtgaaagccataataggtgtacttgcaaaagcataaacctaggtctttaaatagcaaaaaaccagagttaagaaataacacctgaagatgaaaggttgagatggagagtgggaaaaaccatcgtccctctgctcaaatctcccctgaactagtttagacaacatttgagcaataatgattgctcttagtgacctcaaagggctaaaaatggtggtaggaaaatcggagtagagagagtagaggggttgtataccatcagtttttttattctacattaattgtggcaaaacgtgagctgtcagaagtaattgcaaggttaagagagtaattaaagcaaggagggattgaattttttgtatcaggggtttagtcgtcatggcagaggaagtgaaactaacagttaagggcattaaatgcaaatgaggaagagaaagtaggtagaaacctaaaaacccaaaatcggtttggtggaaacttcacaaagaagatagtttcactggctattaattattataatttttctttcataattgtgtgtgttaagttattgagtatcacatagggcaagatcaactcaagtgtaatatatacactctttttttctaacaagtaataatataaaagttgtataataataacaaattatttatattgtattattattattattattattattattattattattatgtttataaaacctgcaactactttgaacttaatattaggtttttttttcatgaaaataaattttataagggatttttatattatatattgaaattttcaactttgggtggaattttttaaaaaaataagttttatattgtgtactgtgttaagtttttacggttgtttcacagttattttttagttgttccattgttgttttaattgttctgtattgttgttttacggttgctttataaaaaaaatagtatttttgtaaaaaattctgtgtgacagtaaaattgtaatcttttgtccaaaatctaatacttttgtaaaaattccattttataatagcaaaattcataatttacctttttaataattcttaaaattctacacttacataatatctgttctatatacgggtgttcatataagggcattttagaattttgtatacattattttaattaattacaaaatatgtgcaaaaaaacttattatcattttctcatacatttttatatataactaaaaactttttttcaattttttttataatatatatggtaataattattgattattatatacatggtaatattggctatgtttatttttatgttgacaattataataaacataccaataatataaaatattttatatatgtgtttattttatcttctattaattaaacatactaatttaataaacaaaataataatattcacataggtttattatatcactctatgtgtgttatgtttattttct

SEQ ID NO: 245806 - DNA, 984 bp, Cannabis indica
agacaacatgagaagcaagaaggagacatgcgatcagccaaactgcaccctagggaggtaccccatgtagcccgattcatcctgttgaactaattctactaatttctcaaatctattttctcttttatttttcttcttggcgtactaaattatagatacgctgaattgaaggaaatggatccatcaagagaatttgactacgagtagcagaaaaacggtcatgaagtccttgaagaaattccatggaacgatcttgattttgttgattaatatagcttttagcatgaccacaaatacatgaaggaatagagagaatggaattgagttcatcccataaggatttgagttgagtaaaatttaatgaaatagagataccttcttgcttgaggacagtaattgactgcttcaattgatatattttaggagcatacaaatttgtgctgcaattttagcatacaaaatacttggacgaatttcaggagagactgaattaagaatccaactactgacgaggtcattacaacgttcctaattagaaatgtcgttttgttcttcgagaatgggcaaggatccatcaacaaaacctagtttgcttttttgcacgaagtgccattctgactgcacgactccaatccataattatctcctgttaaaagaggtgtaacaaggactgttgcacgactatcaaaatgatgaatagcgtaagagtcttgtgtgatgtgagaggataatagtggagtagtggaggtttgattattatcaaacatgatgaaggaataagagaaattattctacagataccatgtgaagaaaagatatacagtaaaaacttgtgtttttattattcatgatctatacatatatattgattacaattaatatatttaaaatatctcaatatcgtccaaccttgcatgaagctcaaaggtggttacaaacccacagaaataggggatattaccgcaagaattgaactgcaaccac

SEQ ID NO: 245807 - DNA, 683 bp, Cannabis indica
gggcataaaatcccaataaattcgtcctcagaagattcagaggaaatcaaaggctcactcgaagataaggatgagctagctactcagagtgttgaatgatcctcaaagagaaaatcgagcatgtcgttgtttatctgaagaacctccccagaatttagttgggttcatctacaaaagaggaaggatagaaaggtgaaacacccaatagcttgaaaaatgtctttccaagaaaaacactcccaatactccgaccagagaggaaacatgaatttggctcaaaaagtttcatctttttggtgaaatttttgaggaaaagggatttttttaggttttgaaaaagctaaaaataccccaaattggaacagagtgattaaaaatgcaaagcatgcaaagaattcaaacggaatcaacttttaacagatgacattgactaaattatgatcaatcaacataataaatcaagatttcagacaaacgagaatgaggaacattcattccaaaaaagattcccacagagcacaaatatagaaatttgtaaaaaaatcatgtaaaagagagaaaagagacttactcattgtttgggttggcattaggaagaagaaaacttcaaaaatttggtccatgcaatgaatgatctaagaaaaatctatgtatgatccaagaaaaatcttcaagaacttgta

SEQ ID NO: 245808 - DNA, 1194 bp, Cannabis indica
ctctctctctctctctctcctatgtagggatgtcgacgtctctggaaccagtgcatggctgcggtgtttgaagctcgtatgaggttttaattctggtgcgtggttgtggtgtttgaatctcatctgcggtactgattctagttgtggtcacttttgaagctcggagtgaatctgaaatttttttaggcttttttagttccaatattgtattgtttgtgttcatagagtatattgtttaatgaatttggatttggaaaagagttcaaatttaaattgttatttttgtttaaaattatgtttatactgtgattaactcgtattttttttttaattatttatattgtattatctctgtaaaggatttattttataaaagtttgtggattgtttttgtatattttcagttaaatttttatcttgtatattattttaatttaaatttattgttgttattttatccaaaataatgtttattgtaagaaaaataaaaataaaaatctgatatatatttttttaattttgttgattgtttttttttttttaaaaaaattacatgatatattgacacgcattaaaagttgctgtaatttttaaagtttcacgttaaatgactttaaaaggctatagtgacacgtactaagagactctaaaataatttagtgacctcattgaagtgtcactatatactacttttacagtcacccacattactgatgcgcaatgaaatgtcactataacaatttagagtctctcattgtgtgtcactaaaatccatttttatagttgtgtaagtcaaaaaagggaataggggtcccctaaccgctggaaagaggccccctctggatggctgtcaaaggaatctaacgatccataaagacagacatcgagtgcaaaatatccaagcaacacagggaaatcaaaggagaaatgttaatagaagtgcgaaagccgcttcaaactactagaaaagggcgtgcgaaaaaccctccatttttgactctcttctcaaaaaaaaagagagaaaataatgcatacacaacaaaagtagtagacaagtaaaatatacaatgacagaagacacgccatcggatgcccatcgaaggggcatcacgtcaacagcaatcatggccataatttcaaggaaaccaaacaaagcagatgaatagactgttgggaattattttaccaggatct

SEQ ID NO: 245809 - DNA, 929 bp, Cannabis indica
attctctgggcgtggccccgtggactaagagtgtttgaaagaacactgataccacatacaaatctcttgtgtcaagtgatttaattttctacaattatttttatattctgtctgttctattttgtcgctacaaaactggtttctgtagtaacagaattatattgtgattctacagacgtatacagttttacatttttgtatatactgtattattgacatctacaaaaattcagttttctatgtattttttgttgatggatgtgtaggtttataggaaagtgagcaaaattttaattagagaaaaatgaaaattatcgtgaagtaataagagtaaaattggtagaatgactaaaaaaaagaaataaatataataaatttcaaaagaaatagtaaaaattaaaaacattaaattagaagagatatatactgtaattttttcaatattttcagctgctctcctcgtttaattacatacaaaataaaaaatataagtaaacaaataaaattttattacatgcatctactcccatcatatggtggaattcatatgacaaaagaaggtgtcctacaatatatatttatatgaagtcgttaaatttaagcattatttgaaaaatatagcagttttatattcattcactttttaattatgtgcttggacatttcttttattattttatggtatttattatgccattatttttttgttattattaattttaaataccatatttcgaagttcaaactctaatttttcagattctttctctctctctctctcttaatcgctctaactctcctccattctcttctcgccgccatctctgggttctggttccgaagctttttctgccattgatggatcgaagaagaccacgtatatcaatagcagtacgttaaaagaagggatattattattatttagaaaa

SEQ ID NO: 245810 - DNA, 1234 bp, Cannabis indica
ctacaacatttacgattatagaaaaaaaaaaaaaaattaaattagaaaattatcatgcgtgccaaaatagatatgtttattgtttgctgaattggattaattccttgtttgttgaagtggtttaattcttcttacaagcgcacacatatgtttgttaagtgtttttcgattaaaaaaaataagaaaggaaaaaatccatacatgttatgttagtgatctatgtatgttaacatgttatcttagtgatctatgtatattagccaaatttataaaatttatttattaaacagaaagttgtaaattttttttttttgaacttggtgttaattgttattaagatgtatagctttatacatttcagtgaaagatcaaagagaatattaaaatattttcgttgaaccaataaaaatggtgcgatagtctggtgttatagatagtagatataattgtacctgttaccaaagtccattccttgattgaacccacagactcccaatcacccttaattaccttcacatttttcaccaagtccggacacatttcaggaatcaggtaatcttttgcaacgaaagatcccataaaacctttcagctgaggacttgagctcaatctgaagctccatctttgctatttgggccatattttgtctctagctatattaatgatatttagaaaggcagatgtacttgggaaattcatgtcttcatctagggttatttatagaaacgaaaaagctactgagcattatgcagtatagtattttctttttattattgtttaaatattcaattaataattaccttttcatcaacttgaatttatattacaattaactaaaattctatatcaaaagcattcccacaatttcttttagttttctcctaaacatatagtcttgatatatataacaaatttattcttaatctcttattaaacaatattaaaacatagggaattctagagcatcatattcgaacactatatccaccacacaaactttaagtaatatataataaatagatgcgtataataccaaagcatgtaaaaaaaataaacatgaaaatgaaaaatgttgtgtagaacacaaatggaaatacagaatttggtagtgtaggaatatctatttatttattatatatgtagagaaatgtacgcgtacctatgtctggcggctaactgattaaactagaggattgttatggggcaaataagtctagcacctttacacatgtcg

SEQ ID NO: 245811 - DNA, 820 bp, Cannabis indica
ttgttggtcccaattatgtatggcatgatgagattagacgtggttcatcctaatggtgatgaagttgatctttgttgcttataatgttttgttattatattgaaaatgtacaaaagaattatttaccatagtctacagttctctgttttgttggatatgttgagaaagatacacatccttaaggaggcaattttaacaacattctttctctatctcattggttactatttcttttcattcaatttttttactttcatcctctctaatgatttgtttatctaatctaagtaattaaatatatacaccatcttggcatgaatgtaaatttgtcatatacaaatgtgaccaaaccaagtgataaacaattgactttgagaaaaaaaaaagtgaaacagttgttaaaaagaaagaaaagacaatacgcattttaatataccatctcaatttatattaatgttattttgtataaaatatatttttcaatttatattgaatatataaaataaaaataaaatatatttcaaatattaacacaaaaaacttaaaataaaagagtgtatatggtttttttagagtttctcttcctaaattcttagccacgtgatgttattttttttcttcggccagacctgttgatccttccggtgtttaggcgtggcttagtcggggtctatagttttgctactatgattaagtttttgttattgtaattagtcttgtttccgtcacacgattttgtatattttttgtttaaattaatgcgatcaatcttgtctctatcacataattttgctatattttattacgcaagtgtatgtat

SEQ ID NO: 245812 - DNA, 1116 bp, Cannabis indica
aaaaaaaaaggtaagaaaccagttataaattaataaggaaaaaaaatcagttaaaaataaaatactacctcaagattattaaacacctctaagacaagttcagaataatctccggttttcttcttgtttgtactctcccaattcagcactcgaggatatgtattagcaatcctcttgcagtattagcaatcctgttgcccccaggtgctatgagggaaatgcctgcaccggacaacttgtcagtacagcttccatcaacatgtagtttccatgttaattctttaggtttttgctattactcttgctctcgcttctctggctcctgcttttctcctaaaacttgagagattttaagaaatgtgtctgtagattcagccacgaagtatgcaagggcttgaccctttatggccattcttgattgatatgtggtatcaaattggccaagttcaatggcccacttgagtagtcggctagatgcttcaggtttttgtaaaacctaccgcaacggttggtcagtgtacacctttatctggtgtacttgaaagtatgacctcaactttttagatatcaagagcaagttgtaggtcagcttctctatgagtgggtatcggtgttcatcgtcatcaatctcttgctgatgtagatattgtgatagatccaacacgcaaatatacatgctattttaacaagtaatactcaagtaagtgagatcgttctcacgaggactatagttaagtaccaatcaattgaattcttatttctatttggcaattgaataaataaattttgaaattaaataaactaaacaaaattaaataaaactaacaaataaaaggtttaacaatggatgtagaattaaggatatgatttcaattgctttgattacccaattatcaatactaattaaccattcttctttctcgtatgtgacgaaatattataaattaacctaaactcttttcagattataaaagtcctcaattgcatgccaactactgcatcccattagggttttagggcttgactaatgctctttatatagtagagcttactgttggaaatttattttaccaggatcttagatctactcacaagtatgttttattaacaccctaa

SEQ ID NO: 245813 - DNA, 735 bp, Cannabis indica
atttaaaattaaaaaaaaaagtaaccttaaatttttctttatttatttttatatttacatatatgaattaggtgaaaggtaacctacaagttaggtctttttagttttatttgattttttaattattattttatataagttttaaaaagattgtaatttaatatatatggacatataaaaatatatctttaccaaaattttttagaaataaaaaaaaaatagaagatttatagtcaagaaaaatagttttgatcagaaaagtatatttacgtagtttaggcattaatattagtctttgttcacaagtaagtcgtattgaggttttgaactttctaaaaactggagtttcggttcaatttgtgcaaagtgttttattttttaaaaagaaaaatgttaacggatattttaaggtgctaaccatcacaaaacgtagcatactaaaaaattaaatataattttttaatttaattattatagaccaaaataatagaaaatctcctacaaaattaaataaatctagtaagagtgattataatatatgtataaatattttttaatgataaataagcccccacaaaataaattttttggatccgtcattgagcatactgctatgcatttaaatatatactataaaaaatacacatgaagaaaaaaacaactaaaaaataactgctgaaccaaaaaacattctaaaaagtattacagctacaaaataacaaaataaatacacat

SEQ ID NO: 245814 - DNA, 1351 bp, Cannabis indica
cctcaatttgtcagattgtcttttctgctaagatcatggacttgtgaaaaaggttgttgctcctttcagtatgtgcttgattaacttctaaaaatccaatcttctaaatcttcaaaattaagataaaataaaccttatatatatgtacatatgaaattctttcaaacatattggtttaataaaactacagtgtcaatgacaatcattaaatatcttttgattatttgcttatagcatcaatcataagcaactattatttggaaaagtaataattaacaaatcatgcaataaatgagatcgtaatgcgaaattggtgacaaacatcatatactaaggaaatacatgcatataatgggaatttagagtttaggcctcaaagtgggacaaacaaaaaatactttcatagcaattagagagggagaaaaaattaaatagaaaaacacgtgcatgaaattttacacaaaactaaaacttccaagtagagcaaatcgaaaagtcaaaagctataaaatctaattcatacatgcatttgggatttgcaaccatatgatccataactttacacagtttccataacaatatgatccataactttacaataagtagatattgggacagaatactacaaccgctccttcattttagcttgttgagttttggttgtgttcttatatagagggcgtattatttcaattatcagctacgatacatttcaatttaaatgcatttctagtttttcgtattatttttcttttgttccttttaggttgaatattagtgatatggctttttgttttgttattagtgatatacctgatgggcctattagtccaaattctgtaagaagtcctaagtagtgagtatagtatgggcctaaatacacggtgcagcttattctttccaattgggctgcttagaaaccaccacataatgagataaatcctctgatagggaaatttacaaaaatactggaatttggattaatttttataaaaatattgtcacacagaatttttttcaaaaatactgtgtttttataaaataccagtaaaacacaaagcaaaacaactcaaaacaacagtagaacaactaaaaaacaccagtagaacaccagtgaaacttaacacagcatactgcactgtgaaacttaacacagcatactacactgtgaaacttatagaaaaacacagtaaaaaagtaagaaaatacctcctgacagtatttttgtaaaaaaaatggaaaaatttagtataccatgtaaattttcctattgatatatgctacgccttactccccaatatccatggtttatatataaacgagtaaataaaataataataaactattaaaa

SEQ ID NO: 245815 - DNA, 1240 bp, Cannabis indica
ttaattattttttaaaataattaattttttaatctaaatatttaacagggttctttttaggaattaatatttatagataattttatttttatattttagttcgtattataactttttaactgtaatatttataataaaattttatttattaaaattagacttccacttctttaaaaataaatctcaatttcaaaaattaaggtttcagtttattccaatctaacatcatgtgaattttttactttgatgtaatctcttacattacaaactcatttctccaatctaccaactacaattagacttatcttttgtttttagttatttgcttgctattttcatactattatgcttatttgtgaaaaagaagcaacaatctcaattagttgataatctattttggaaatttttttttacaatgtctagattgatgaagataatttcaaaggagcaaaaatagttaactaatatttaattttatattttttattacatttttaactattcttttatttaaattttcatttttaaaaaataaataacttcaaccaatctaggactacacacactgatttgacactgaaaggtattgaaaataagattaaggtaatattctctctaattagaggtcatttttacatttttttattatttaaggtcatgtgtgtaataattttgaattataagtagttttattacaaatatttcaattatttaagttaaaaaaaaataattgctaaaagatctttacttagtaacaaatgtttaaaattaattattaattatagtaatttaattttaaatataactaattttataagtttttataaaaaattaaagtattaggctacaagttatttattatttatttctcttttactttctaaattaatcataagaaacggccccaactagttagctagatttccaaaatgctgaatcattttttgggaatttgtgtagagaaatggttcactatttttagaaaaatggtggaccatttttgtgtagaataaacataaaacatcaacccaagctcaactctaacccaaatcaaaccaaaactttcagaacacctaattaagataaatagaacatattccaaccagaaaatacaacatcaaaccttagaactaaaagatgtcattcttgagcaagctttgagttccaaaattccaacttgctcaactaactacattaccaagaaatccttatcaaaaccatctaaataattctaatttaa

SEQ ID NO: 245816 - DNA, 1046 bp, Cannabis indica
tatcactaactaatcgtaaaacactatctttaagtggtgcacgaaactagacactactagcattttatagcaatactcatccatttaggatgactaagaaactatatatataaatatatatttttaaagagtattactattaagtgtttttttttttttttttaaaaaaagtaatttactattagaggtcaatggtgtcctagtgctgaaaatacgggttgggttttataacacgacatgaaattgacacaaacccagaaggcacaagcacgattaggcacgaaaaaatacgagattggacacgacacgacacgatgttacaaattggcatttgacacgacacgacacgaaaaatatgtcattaattaagcacgacacgacacgataaacacgaaatgcaagatacgtaagtatgaatagactaactcgaaagatacgactcacgacaaattcaaaaaacacggcatgagatattaaaaaaaatcctaataaactattaataataataagatatggatttatcaattactaaataagttaaaataataataaaatttaaatataatactgaatattataattttataattaaaactattaaaatataaaaaattaaaataataaattaatttatttatagagtgtgatacaaaaatttaagtatttataaataaatatttaaattttaatgatgttaataattattttatataattgtcaataaagtattgttcaaaatttatataaatataactaaagctttaaaatatacatataatttattaattgtaagaaaatatgaaaaataaagcacgaatttaagctcgaatatgaaaatggactgacctgtttgagaaatacgagccgacacgagccaagcacagtacgaaaatactgaagttacgggccgtgctaggcctaccctttaaatatgttgacacgacacgacacaacccattaaggatgacaattatacttgcgggtacctacccctaatgggacgggggtggggattgactttcgggggcgagagcgggtatgagttt

SEQ ID NO: 245817 - DNA, 580 bp, Cannabis indica
ctctctctctctctctttcctcaggttccccaacggcagccgcttatctcaatcaggtaacatacacaacattctaactaatctcttcactttttatcttctgctcttctcttcaacaggattttttcatctccactgttattctacctactcagggttttaaggaacgtaattttgagttcttaacacactactcacatgaagattattttatcaatttaataaagtgaaagctgtgcttgttgtgtgtttgtgtaattgataacaattttcttgtgaaatttttcagtttttctcatcaatatcatattagtaatggaggtattgcttagtcttggagattgacacagtgcctgcaatggattctgctatgatttttgtccccaaccaggttttacttcttcctgtttgcccaattttcacttctgtttaatacccttgtctgtttggtttttgagaaagtttcatagataactattccatagttgattttttgttgatttttaccctaaaacttagagcttgaatgttaaagtttctcatatggggaccttttattttcttctaatccatgtttttc

SEQ ID NO: 245818 - DNA, 1570 bp, Cannabis indica
ctttatcgctgattatcacatcactgtaaatccagtgcactgatgaatcaagagacattatcttttgaagcatttaatcacaattacattccactatgttgacatcagtgtaattgtaaataactatatgttctggacttaacagattttgtacacattaaaccataaacatgaaaaactacatgtaaacataaatgacttctaatcttctattgataacaaatcagattgtattgtaatgggtattatttagggcataaaatcccaacacttctcagctttctattacaacttgaatcacccaagtcgggttgatattgagggagttatgctcaaaaaatagaagtggtacaaggcttcaagaaggtcactcggccataaaaattcaaaaggtcaactggaaaaggtaatgaaatgttagtcgtccaaagctgcctccactttatagatctccttcttaactttctgtagaaacttgaatcgcccacatcagattaatattgagggacttatgctaaaaacacgaaaggggtgcatgacgagtaagacccacttgacaaagaagtattggaccatcctcaagtcacccagcaagcacttttcgagaagtcactcgccaagcacatcacgggaagtcactcggcatgctctcttgagaagtcactcagcatgcacccttaggaagtcattcggccatgatattgcacatgtcactcggccatgaccttacaaaactttgtggaattttcccacgcaagaggagagtgaagcgacgaggatgcggtcacaaggacaaggcaagcacgcgaagagagtgaagtgacaaggatacagtcacgaggacaaggcaagcacacgaggagagtgaagcgacaaggatatggccacaaagacaaggcaagcacgcgaggagagtatgaccgcgacaaggataccgtcacaaggacaaggtaagcatgaaagagagtacgaccacaccttctgcaagctctgaaagtgaggaggtacgataagtggatgtactgcacatgcaaggtctaaatacccgaccaatggtgcactacagccactacccctgggactcagtaccatctgacaccagacaaatgtacgaggtttaaggccacctcctgtacctacaatttccagcctaaaagagacatcttgtctctttgggacaaccatatatctcatgccattagagcctataaataccccttcctcagatgtgaaaagggattgaaaaatcattcttgtaactactatattgagagtaatagaaaatttttattttttcttctactttgagatagccacttgagtttatatttcatctttctcttcatcttagttctgagtttgatattctggacagcaagttagttggcgagttctcaccgtcaacatataattattttattcgtatatataaaaataaaacttgtaatgattatttatatgttgtaatgattttacaaattatcttacaaaatttttattgaaatacaaattatagtgaacccaaagttcatgaatcgagttgatttgacatgatcaatcatgtccaata

SEQ ID NO: 245819 - DNA, 1475 bp, Cannabis indica
ttcagtgtatacttagcttcatactcttcttgtgtgtagcaatactaaaattctttctctttttatagttttctcattttgagtggtttaaatctgatgacagatattcctccaaatctagaagatggggagctatggcttccttttgatgtgttcgatgaaattgtgtcatcaaatgatattagggctaatctatcccctaaaattcacaacaatggtcctagtgaaatcactcatgtccctaatattcaaactctcccatcatcaagctcaattctcaaatcaaattcatccacaccaaaatactctaaggtaatatttattttactttgtatattctcgtaatcattgtctatgatcttgtataatttttaatttttttttttttccgcaaataagatatgtatagcataataaataatacaagatgataataaaatacattatgaactataaaagacgataatatatattgatatccgacttttcaataattacgcgttttcaagtctcttattgttattttattttttccaatctatttatttgttaattagggattttacattttgaaagataaggtgtttaagatttgtctaaaaaaaaaaaaaaaatttgacttgtaagaacaaggtagcactatatgctggcggcgcataaccctagttgattttttattaatctcccgttaataagttgctcatgattatgaatttttatttttaatttttatatttgttttatgaattttaatgaatggaaaatgattcacttcaacattttgtttttaccggattgatttatcattagtggaagaccaattttctgtaaatctagatctattcaattacccctttcttttcttctttattttccataacaaaatatcatatataccccttatttttacattatttattgaaaaaaaaaaaatgatttacacttcataaaattttaagtacactcaaatatcttttttttaaaaaattataagtatacctaaatatttaaaaattactcttaaatatttttaatgtttttttacattatttatattaatatgaatacttattttaatttgtattttcataatttatcttaaatcatgtataatttttatacaataaaagtttatataatttttattttaatttatttgttataatatttaaaataaattttatttttatcccataaatatatttttttaaaagaaaaaagataaataaaataataatataaattaaagatatatattttatatagaggtaaatactatttttgatcctgtattttgcaaaagttattaattagaccatttattttgttaaatgacaaatggaccctatattttccaaaatggtacaaataagatcctgaattgattttttgtcaaaatgaaatttaattataatccgatctaaaaatgttatgacaaaactgtttacattttctgtatctgttcgtattaggaa

SEQ ID NO: 245820 - DNA, 946 bp, Cannabis indica
acgaccttaaaagttcaaagaacataatttagtacatattaaagttcagtggcaaaaatcttaattaaccttctatatttttgcaaactattaaagattgtcccataatttaaaaatatattctcatgttttaagtacatttctttcatttacgattgagatgaatgagtaatgataagtgcactctaattatgcatcaaaacattacaaacaataatgtatgttttccaactaatcacaattatttcaaattagatcaattatttttttcttcagaaaatattaatacatgtcactatatataatatttaagtgtatgatttagttgtacatatcataattacttgatgagtaataccatagctattttctcatttatttaaacgtatatgttaaaatttacagggaaagatcagtcacgaaaaacttgacgcattaaacattccagtatattttacatctccacaagaattcgaaaaagtggtgaaacaaaatgaacgttttagcatagagataatggagagccaagaccaagaaaaacctcaacccaatgtgttatcctccacaataagagggggcatgggaggaatgtttaagaaacatttcggtgttgaagaagaacttttagacgaagtctttgatttgtttcagaagaaacttgaagaacaatcgtccttaatctatgactcaggatacgcaattaatctgtttgttttgcttaaacgcgtaatataatttatactttcaacattaataaagtagtaaaataaggtgatgataccataaataatgcttcattaatttgtaatgtgttttagatttttgtagaataagagtatctaaataacaaattacatgatgaacaatatcaatatgtaatgctagtctttaattatttctacactctctttatctttgttaatatctttcaaatataaatagtgta

SEQ ID NO: 245821 - DNA, 2920 bp, Cannabis indica
aacattaaatgttatttctgatctatattaataagtacatctgattatatttaaatgtgttttatttagtgcataaaacccaacatcaatatcattgatgaagtcgaatcaatgatgccatgtgcttcctcatcctccaatgtcagcgtatctactctttcacctaacaatccctcttcttgttgctcactctccacgtggctatccataccctcacttgtgattttatattcaatgatttcttgatcatggatgaattcattctcttccatgattttatttactccatgatatttattatttaccaagtaagaatctgctgtcactatatactacaaaattcactattcacgtcagtcaacgtgactgtttatcgcgttgatcgacattaatagtatcatattaaatgtaattgtcatttttaaaatgacacaaataatcaatgatttgcgtcggtgcttaatccttcattaattacataaccgacggtaaaaggaaaaatttgaatatatatatacaattagcgtcgttttaaaagactcgctaatgtgttctctgtcattttcaaattgacgctaaacatgttgctagtgtgataaattgacacaatacctcttattgttcacttactcaaatttcttagacccaaccaattcatttcgtgaactcttggtgtgcgattgagttgatcgaagacctctggcgattctcctctgcctctgcaccaaaccttcaaatccctctgccactctgtctcggtcggtcctctcatctccgccttccctatctctcgccaggttcctctctcctctaccctttctttccctctcattccctctcagtcagtcaacctccttcttctctaatggtggcgacatctctttcgttcttcctcatcatcttctccttaggtgagaatcatcttcttcaatcatcatccgcaatatttttatttgctaagtgtaagttttaatctatattgtgtataatctgtgtattttataatacctatttaggtcaaatcaaattttatttggggcttaaggattgaggtttcttggtctatttctatatcaactgacccgttctcctcgttttctggtgcgttaatataagattgtgtatttttttgacctgttatagttgatatatttgaattttattttattttgtatttgtgcttagttttttcctctcaaattaagatagtaatagtagtaattcaaaggaataatgtcgtgcatcggctaagttagtaatttacgaaggtcaacaaagttaattattttagggatgcatacttgagcaaaaattattaatcttgcctaactttttgactgtaaaattttgtgaaacaagtaggataagatatattaaaattcagcaattagaagatctagcttttctcatctgttcatttgtattaagattatttaatactatgttttgagaaaatttagtgtttgaaatgtagtttgttgtttgtagagtagtatgtattttgttttaccaattatagttggttgatatattatgtattttgtttgaaatagaatttaagaagatcaacactaagcttcattctaaaactactagttgaaatcttcatcaccaattgaaattttcaaaacatggaattttattttcatgagcaaaaggagtttgtttcagcttgttttagtatgtaaactttttttgtactaaaattttgtcaagtactctgatgatcaaatcagttttatgagatttgaaaactcttttctcttctataaagtaattaagctttattcatagtcatttttggatggtcttatcttagtgtgtttcaaaatacttattatgttccattggatgtatatatagagagagagagtgaaggctggtaagtaaagttttttcctttctcatattctcaacttgggtataaggcttaatattaggtatagatgttaaagattaaatatttttcgattatcatgtgaactgcattaacatcaattgtttaattataataatattcttgttatgctagctgcacacaacgtttgtaaatttgtattgcattatatataattatatatatgtattatagattgattagactttacaaaaatagctcaactgagcttatatatagtaagcaacatatcgaccaaactataacaacaaaaccaatacagcaccactaattaactggcatataacagttcaacaataaccacaatttgctatatcaattttcatttatgataaatcatgttagcaaacaaattaatatcaactagctagctagttgtagagaaataataaattaattaaggctaattaggatttttgtcccttgaactttgacatgtaccaaatcatgccccctgaacttttaaagtcattgaaaatgccccctgaactattgagattgttggatttaaggacttttttctaattttagtaaaaaagtctaacatggatgaaagttcagggggcataatttagtgcatgtcaaagttcgaaggcatgatttggtagatatcaaagtctggggaacatggtttagtacataaacaatcattgaaatagtaaaattgaataaaattagacaaaagtccttaaatccaacaatctcaatagttcagggggaatttcaatgaccttaaaagttcagggggcatgatttggtacatgtcaaagttcagggggcaaaaatcctaattaggcattaattaatagtagaaaaataaataagcataagttttctttaatattgtcactctggttttctcattgctccacttatgaaagctctagattaaagttcttgcatgctttgaatttcaaatgatcctttagtaaagcgtggcacaacctagaaaattcagtaaaacattacatagtgttcaattgcagttgatctctccaattc

SEQ ID NO: 245822 - DNA, 1603 bp, Cannabis indica
aaacggttaatactgttacgagtaattactattgaaaccgcggttaggtttcttacttatcatttgcttcatcgggcaacgatagtgacatatatagctcgtggttaacgagcggcaaaaggggtactttataaagtaccaagattgtgcttttatgatgttatgtatatgtgtaagcatgctgacatgagatagaattgatggttattatcagttattatttatttcacttttcttgctgagtctctgcaagtgctttatggtgcaagtaaggggaaaccaaaggttgagaagccatgagttcgaggacgcagcagcaatgtacatatcagccgcagtgtatcggcccagtgaacaagatgattcattttgatagtattttaggattacaaagtttatattgtaaaagtactagtaaactagtttgtactattttgaaaacagggggtccccatagttctcattacttatcttctgctataaagaagtttttacatgcttgatttaattacaaaaaaaattaattacccacacttttggtataattatatagtatctatatatgaatttttataaaagcacacacacatggcgtccctgttggacagggcattacataaatctacctcaaatttatgtccctgtaaaactaactccacctctttacacaattgtgaacaccaaagagaatttccattacccatgtagactttgaaccgtttagtttcttcacaaaataagcccaatcgagctactaaggcctcttcgataaaattattgttactgccagtgtcaattaaaacctccaaggattcgaatgcatgttgagctaaaattcaaaatattctgggattaatagagttggacaaggaattcaagcttacctcatcaactaacccatcctctaactcttgaatcgaagcttcctcctcaagttcaccattgtcacctcaatcatcttcttgagtacaaaggacaagaactcgattcctgcatttatgcccaagagaatacttctcatcgcaagtgaaacacaaccccttctcttatttttctttgatctctgtaggagacattcacttaactggtaaggaagacttgctgggtttttgaatctttgaggctactgttacactagagttggatccgatggaggctaaacctatcccttgataagtcattgttattgttgagttcgaatatcttactaaccaagcagaacgcacaccctcgttacgagcacgacctaacaaatcgtcattgcggtcttcaaataactaagccttcgccattgcatcagccaaatcaacttgtttagatagtaacaattcccggcgaatctcatttttcaagccccagacaaaataattgatgaagaattgttccgatacacccaaaatctgagtcattaaaccttcaaattttgcattgaaagttgacacccgccctgtctgagtaatcttagtaattcttcccaatgggtcatcataaatcgatactctgataagtaaccgtaatgctcgaagaaaggactcccattctgggaacctgcctcctttttccatccattgaaaccaagtatagggagtgccatcaagatgaa

SEQ ID NO: 245823 - DNA, 706 bp, Cannabis indica
tcattgtttaaaacttgacccgatgctttgttgtatgtgtcaagtgttctcctaatggacctggcagattgttcatttgattgacaaaaaagcaaactatcgtctgcgaatagcaagtgtgagactgaaggagagttccttgtcaatctaagaccggttaacaagccagcatgttcttctgattgcaataatcttgaaaggccctcagaacatattagaaacaaatatggggaaagtggatcaccttgacgtaaaccccgagaaggattcacctgacctacaacttcaccatttagtgagaatgaaaaggagcttgtagtgatacatctcataatcaatgatgtccatacagagttagttatatacactcaagtaaaaaaactttattaacatatacgggatgtttgaataatctaatgaaaactttactttatttatattattttaataacttataaatataaaaacttattttttaatggaatagtattaataagtggtctatgtaattaaaaaaagtggtattttttgtaggttaaaatttgacatgtgctatttttttgtgttaaatttgatacagtttttagtttgaattaaatttgacacacattttacatcaccatttgagttaacttttagcaaaatattttaaaaataataatacactacaattatagctctctaaaatgctctaactcatgctttg

SEQ ID NO: 245824 - DNA, 631 bp, Cannabis indica
aaatcaattatttttagttttcaagcaactttttcaaatcataaaattttaaattatatttcaaaaatggagataaatcattctttttcgcttttgtttacagtaatgaataaattcatcaaagaaaatataatgatacaggaactaaaaggaagaaacttttagtcacagacaatcaaagggttttatgttcatgtaaaaaacatgcataaccattacacaaattaattaatcatcccctgcctgcttgttgaaatgtagaacattgtatgtactatgtacggtgagatgaagtctcaagtcatgagcatccatccagtcctctagttagaattataattatttagatacatgattaagttcaacctcatataccttccaaactctttagaaagtttgataccataaactaactatgaacttgatccttaagggaggacattgtatgcccatactacctgctttatgcttccatcaaatcgataatttcaaagtgatttgtgtgacccttgtgtcttgtgcactgtcattaagattcatatgcacagttttgctttgcagttcatataatatttttcttcattttagcttgtacttaatataatataatatatagtgatagaccctatta

SEQ ID NO: 245825 - DNA, 777 bp, Cannabis indica
ccgtcggtggggaatgcaggcggtgcttgaggcggcgcgtggatgaacgcacaacgatggggaaagatttaagctttgaggtgatcgaagaagaagaaggacttgatttaatttacttcaaaattaaggactttaatataaatttaatatactttttacttttttttaaaaaatattattattattattagagtaatttacggtgtaaatacttaagtttatttcttgattataaataaatatttaagttccattttagaccgataataatacataagttatattttcagaacattcgtaagtatttaactgttaaatatcaagtcaatggtcatgtgttaatttttaattaaaaattataccaataagaaaataacatgtgaataattatttgacacttaacggttatgtagctatagaagttccaaaaatataacttaggtattaaaaattttaaaaattaaatttaagtatttatatgcaaccgaaaatcaaagtatttatgtcgaaaattattattattataaagttttatatatcttcttgatattaaaattgaatgtgtttacataaactcaattacttattggacacctaaatgtgtccataaccatatgaaaatatgtggtgttggtgttgggcaatactctactctaccatgtaataataacttaatgtgtaattaataatggtacatctgggtctcttgttctttgaagctggtctctctcatggcccatcaataacgactctgccatggcttccatcgcctacatc

SEQ ID NO: 245826 - DNA, 837 bp, Cannabis indica
ggattggatcgtgcggattggattgaatcagctattttatgaacacccctaggtaggaaagtgtatctcttttttggttgatttgttagtttgttagacaccagtgatgtttaatacaacttagaggtaacgctttatgattagttagcgattatatgagacttcatatttaattgatccaataacgatatgacattgaggaggatgctggtcaccacaggtgtgttttagtatttctcttttttcattattattttattttagatgacgctatgtaatgtagttatttagaaatagggtagtttttataatttacaatatgtgatttcaaactccaactaatttagattaaaccattcgagaccaatgagtctagtgtcaatggttttgttaatccagaccgtttataattttttggttcagtcattattttagaattctcgccagcggttcaaactaaactaatctgcatatttcatttacacatacttaatatatatttttttcaatgaagtattgatattttggaataactttaattaggtagaatattggtgttaatttaatatagttttgagaatatattttcattgttgttggcggtggaaactcgccaactaacttgtgaccgaaaaaacaaaattagaactcgaaacttttagagatgtttacaccaaaagtaaccctgatgacatgtacatcaatatttaacacgtggcaagaaagattacatctcagagttgagtagtcccgcgtcatagcaagtcgacttgggaggggtccctagccctgtgcccaggttgactttgggaactccaaaatggaagttcgagataa

SEQ ID NO: 245827 - DNA, 736 bp, Cannabis indica
atctgttcagtggagagaaagataacataaatagatctagtaagtaaaagtttgaaactgagaggttactcctgtttatcaaaacatattcaaattcagtaaaataattgtttaataatagagaaaatatgagttaacatttgatttgtgttattctatagtaaacaaagaccagagtactttttagttcaattcaatgtaatgaataacggtaaaaaagattgtatcttataccaaatagcattatctttggtatattttttttaatactcttttgttgaaatcatgtttttattatgttattaatcctgtttgtattactttagaagcttcaattggtttgaagaaagaagagaaatgctacccatgattgcctacgaggaagagatacacaacacaatgaggttgtgcttttacttttgaaaaatatgttttcagcatatacatttaggtagatctaaactattttgtcatatatgtttatattctcttcatttgatatttaaagtgttaagatcaacaaaatattttagctagttataaactatttctctgtatatattattcttgttataactttaaatgatgtagctaaatatcctaatttagctatcattttcaatatcaattagttgaaggagcgatttatgaacttttttttttaggtcttttggatttagttaatatatttgattatatttatgttcgatacgtaataaagttatttgcattgatg

SEQ ID NO: 245828 - DNA, 1147 bp, Cannabis indica
  modified_base (1099)..(1099): a, c, t, g, unknown or other
gagatagcatagttcatttcctgcgatcccaaaattaagaaatattaaatagtacattttagaggctaaagttgccgaggtaattgttctttttcttttctccctaatgatctggaaatatatacaactaagtggggttggtattcttcattaaagtacgagatgttgatttgtctgaacaattaaagggcaaatataacagcaacttctggaatattataaaattagaagcccttactttagggggttgggggtgaagggggtttacatacaaccgaggggaaagtgttttatgattgaatctcaaaaacattcttatcatttgatagatccaagtcaataagtaaacaaaagttagcttttattatgtatttgcagagagatgctgccactgctccaaatgttggagatcgagtaccatatgtcattatcaaagcagcaaaaggtgccaaggtagtcattcttctaattttcgttttgtttttatctttcagatttaataaataatttatataaataatgtttatggtttatctcctgtgttgatgttgttataaatcatcaggcgtatgaaaagtcagaggatcccatctatgttttggagaataacataccaatagaccctcagtactatcttgaaaatcaaattagtaaggttagttcaatcgattgagtattcatgtaccatattgatatcacattggtatgtttatgctgtttattgactgtgcacgtctgcagttcataatgtttgctgataaactcacataccaaatctaatctgtgtttcagccacttctaagaatttttgatcccattttaaagaatgccagcaaggagcttctccatggaagtcataccagatcaatctccatctctacgccctcaaacagtggcataatgaaatttgccaagaagcaacttagttgcataggctgcaaagctctacttgggtattgcttaattagttctctggctaccatgttatagcttttgtttatattgtcagtttgccactatctgtgaattttattttactttgtttttttatgttctggtttttgaactttctgagctaatgttgatggccattgtcacnctaaaaaggtttctaaatgcaacacaatggagatcattattttctgtc

SEQ ID NO: 245829 - DNA, 606 bp, Cannabis indica
gggactgtaatgacagaagtgtagaccttccacttcatatattttgctgcttgtttattacaagttaaattgtttttaaatttgattttgaaacttggattactaagctctactgttgctacaggtgttaacagaatacattcttgtctcagtaactagtgctgttacagtgacaatagcaggcgttgtgaaggaggctgtcacaatattggtattaattgttcctcatcttgtttgatttacattgttgtcttgttcctctcagtaactaagctctcttttcctttttgtaatttttttatatcaacctacaattccactaaatatttatagcatacatagttcatgagaaatagaattagagggctggcacccttacatggatttaaatgatcaaatttgaaaagctagtgttacactacattgaatattgaactcataaacatgatttgaaatagctttttttttttttcttttcctctgatcaatgttctacactgttaaacagtgccttttagttttaccctattttatgtgtgctcaggttgcagtcatttatttcggtgatgagtttacttggctaaaaggagcaggcctattcacaat

SEQ ID NO: 245830 - DNA, 959 bp, Cannabis indica
aaaaatatagtgtacactactaaagagtaaaatccatttttttttttacttttattaatttaaaaatatatggcctatagtgacgcgccaggtgcgattggataaatgttttcccacacacttagcgcatcactatatgataatactatgtttttttaaaaaaaaatacagctgtattaattaattaaaaatataaaaaaattatgtttaatagtacattggaaccggccctatgtgagatgcatgggttttttctaaaaaaagaaataaaacgaaaaacctattaatttcacttttataacctaataaaacctaataattttctctctcacccaatactagtgcctctctcctttacaaaccctaatataaactttacctctctcctttctaactctccagcgcctccctgtatcaaaaaaaatgcagccctctctctctcttgttgttggagctgcccagcagaagatggaaaagcttggcctccggtggtctaatccgaccactatatgaagacatttggaaggttcccgttgtattttcctctctttctcttagacagatcgacgtcgaaattttgtggcgttgagacaaacttaggtatgactgctctatatatatctctctctatgacgatctctctttgaggatgaatatgcatatgtggaaatggttggtgaatttgaggatgtgcatttggaggaggatagggaaacagaaaaattagagtacaagaaaacacaaaattgaaagtgataatcactaaactatacttgtttttttttggctttgttttacttggatttatgattgagtttgaaaagaaatagacattcaacacaataggaatggttcatgcaaaagtctccaaattttataactcgaaagtgggccctaagctatgatcccttctaaatgaaggataaatatgtctttcagcattttaaatggtgttgaat

SEQ ID NO: 245831 - DNA, 1248 bp, Cannabis indica
taataaatacacactatttagtagtaaaaaaaaaaaaaaaaaaaaaaaaaactaaaaaactagtatatatataggaaaactgcatttaattaagattttaaaagatgtaaattataacttcacgtttgtatatatgaaaacaattcacacctatcaacgcaaaaataaattcatttacaaaattttttaaactatcataaatataaattgacttataaaataaataacaattttaataaaaaagtccaaattttgtggtgtttaattttgtaaattatataatcctaatataataatatttgaatatattattaattttttattgtaattttttaaggccggccccaaattttaagattagaatagggcttcaaaaatactaagacgccctaatgccaactataattgaagtatattttgccaattatttctaaaaataattatgtggctaaacttacgtccaacaaaaattatgtggttaattataaacttatcatatgggacatctttttaatataattgaatgtccaaacctgccatactcctctagcttctagaagataggaaagtatttcccacgttgtggtcatatatgacctataatgcagagtagtggctttaataataaaagtcttctatgaaaatgaaagcattcgattccactttttccgcttccaccccttctttctttatttcatttctcaccagttaacattagaaacgcctagaaaatcacttctttgcaccaccacacactttcatctatatatatccgggtattcccttgcaactgtacaatcaaaattattgaagaaagcaaagcaataataattatgggcacaacaatcaaagttcatggcaccccactctcctccgccttccaacgagctgtggtttgcctccatgagaaagaggtcgactacgaattagtccccgtcgacatgagagccggagcacataaacaacaacctttcatttctctcaacgtaagttacttcaaaatcaaaactactagacctcacaaatcacaattatgttaagtgttaacattctctcttttgttcaatatttcagccatttggtcaagttccagctcttgaacatggagatttacaactctttggtatgaattctttatttgttttttcaccctacatattatacttcaaaaatacaccaaaactttattttttaacggatttacgtcactttttttttttatttacaaaatatggattaaggttgtta

SEQ ID NO: 245832 - DNA, 952 bp, Cannabis indica
ttagttatgtgattgaagactattcagattagaagaaatttacatgtgtcctgtcaactatcgtttggttttaagtactaatgaacttttttgtcctaatccttgtctgattatttcttgtgtttcttgtaaattgcctataactctgtctaaaatttaaatgtatgttagtccatggttctaattcttgctggcaagccaaattcttattgtgagtcgaggacttcatagatcttttggcatgttgctggaaaattcagtgtttcctgttttagttccttgtttgtttggtgtttctaattagcaaccacattaaattggattaaggaaaatcatgactaaatgtggctgacatgatttactgtttttcctacatgtgtctgagattgggactgagaatttatattctgccttgtcctattttgtttatgtttcataattttgtttgtttactttataattgaaggtaccacctactgattcagcattaggcgatgttcaagctcaacttgaacagataaccttgtgatttcatgaattgggaattgccctacagctggttttatcagtcgaaatggtaagtcagatggccattgaagtctttatagagggcttaatagcagtatatacacataactcaagtgcaggcaaaactaatgcgatggtggttgaatgcttaacaaagtgccgcaaggatgatatgtgcttgattttagagaagttgctttatcatttttggctaggcataaccgagttgctaatggacacccatgaccaattttttcacataaaagtatgatggagtattgccattttcattttttcttttcttttctaaatctaagtatattgtaactagtatctactatttccttggcagttctattttatcttttttgtaaatacataattgtctaatcaaatcattccaatgaatatattctgttgccga

SEQ ID NO: 245833 - DNA, 693 bp, Cannabis indica
actaagcggtctttacatttaaggtgtaaataaaatttcccaaaataaactaaaataaactaagtagagcagaaaaatagaattagtttttttttctttttaatttaataataacatatacatatatagttttttgggtccttctataatgcacccctttaaaggaatgtgtaatctctacttgttttgtcatttagaagaattttttagttcatttttttttatatttgtgtacgttataattatttaagatatcttatataattttgagaaattcgaaataatttacaatatagaaatagtgttcaaacattctatttcacacacgtataaaataaaatagtcacacctgcaacacaatatttgatccctatttttagcatgttaaagttttctgaattttttaaaattttacagaatgtcttaaataactataacatgtatataatcattagaaaaaattagacttaaaaattatattttgaatactatttatagatacatcctttttcttaaggggttgcaatgtaaaatttttcaaatattttttttgttcaaccgatcattattgtttatttttataaaggagaaaattttataattttataaataaataaaataaaacaaaaaaaaatacatttatttgcaatgtatgtattgtcagaccaagagtttttctttttaagaaaaaaa

SEQ ID NO: 245834 - DNA, 1352 bp, Cannabis indica
gcttcagcatgagttgaatcaaataaccccgaaattggaatggccaaccctacaatgatattatcataatcatctttgacaactgctttcaatcctagttttcttcttttgtaatctgttgccgcatcagtacaaagtttgaaagaaccccagtcgacaatcacaggatcatgatcccccatagaataatgttgagtgaccataggggttttcatttgagcattcctgtaatcttcaagataagatcttaaccatacaatagtgttagaagcagacaaataatttttaccaaaaagagtcttattcctattatcccaggtaacccacaaaaacaaaatccctaatacaatactcaaatcatctttattaggggactcaaaagcaataagattaaagtctctaatatcacaacgctaataattcatgtagaaacttttaaagggagacttgcaccaaaattttctaactcttgaacaatctagcaaggagtgtgtcacagtttacataggataggtacaaagagaacaatcaggactaggggtaatgtgtttagaaaaaatattagagactgtattccacgtgtcctcaatcttgaattacgtggacatgccatgttaggtggacaaaatttaggataatattttcccctagtccctgtttgaacatctcttcagatagggactttccaactctcgtcctgcctgtagtagcctctgtcgagcagctttgccttagccaagtatctggcttttcacatggcatgcttttagatctttgatcttctctctccatatatgcctcatcttcttttcttcgacttctcttctttgagtttatcattgataagttccaagctttataaggttttagaattttttttattctcacgtagtattttcacattataattttcttgatagctttaagatgtataatgtttcactcttctgtgaaaaatatttgattctaaactttattgtgattcttgactctttgagtcatgaagaatattaagaacatgaagaacacgtttgaatcttggaaaaacacatatttaatccattacatgccctggccaacccttgggatcttgtttaagtcttggccgacccatggtgttttcatgggggatggttggttctaaggtttgtcctaggaacttggctagttcatgcatgggtcacaggtctctggctgaccctctcaatgctttggaaccctggctgacctaggccttggtcccaagtgggtggccagtttttcatcctcttttgacctcagtaagaatcctatcatgaccttgtgaatctatacaacctttgtctcatacgggggtccattttaaacttcat

SEQ ID NO: 245835 - DNA, 1267 bp, Cannabis indica
cctcttcatctgagtcgtagccaagtaattttctatgttctccatcctgatactttctaaacttatccttcagttcaattattcgtagttggatgtggtctacttgttgctgatttgtgttttgattgagttgatggcacaaattatgtctatttttgtttgatcgctcgcgaaaatcaagctgtcttcgattcaagtgcaagataagatcaagttgtcttcattcataattactcacaaatcttgtctctaaataactctcaaattggtagcttcgcgtattgctcgtactttcttggtcagcataataatgtcgagttctacttccttttcccatatgtatgcttgaccgactatgccctcgagacctcgattgtcccgagcttgaacttgtttcatctcgcgctagccttctgctgtgaaagatattggatacacgtcctctcttcaagtatgtgtatacattatctctatcagcttaaaatggtcattaaggatgtctcggaggacgccacttaaccttggttgatttctaggatttctctcattatttcaagggattcactggtcgaggctgccatgcctcttaattttttcgagatacttctggaatattgtttagttcattcccttggttattaaatcaatgggaagtttgtggagcatcatgttgatgttcctaatttcttgtattatttggattttgttgattatccatggggacattttttgtgttcccaccaggttgctcttcttgggtattaggggtctcctacttcgcttccagccttctggttctagagcctcgaggtcttcctcgtggctccttattgtagggtctagttgattctgtggaactgttccttacgccgtcctggctactgcagcctctatttccaactcaccgtttcgtcggttagatttagccaatcattgtcgaagttgcctattttctaactccacaaatggtaagtatctagttggatcaaaagcatcctcactcctaggcacatatttaggagagttaatggtatcatcgtttcttctttctagaacttgatctccatcaccatcgttcctcctcaaacgtggtattttagaggtgttgggccttagagatctcatgggttgcttgctaggatgacgagttgttttttcaggacaattactgtcattttgattgttatcaaccatcggatatggacagatttgtgtttgtaaggagggatttttctgagtttttttatcaccaaggctctcaatgaaa

SEQ ID NO: 245836 - DNA, 1060 bp, Cannabis indica
gagaggaagagagagggtaagtttttagttttaactaattttttttttttttttaaaaaaaggggtaaagtgggaagttcatataattaatgaaattaatttgtacaatggcgattttattagggacaaaaagtaaaatttcccatgtaaaattctaaattggacctatcttatgttgcctttttatgagaaattccattatcatacaaaagtttgaagctcatatataagttttggttggttgcatgtacttgggctttggataattacttggattggtatcggtcttgtggttgggcccttttaatttatttattttagttcttttagattagcctttttttttttattattacataaaaatgaaataacaaaaattaaaaactaatcgaccacagtgggagtcgaacccacgaccttttgatccgaagtcaaacgcgctaatccactgcgctatgcggtcgttgatgaggttaaactataagaacaatgtagaaatataaaatctgtgttacaaatgaacaataataatccaatgctttcttcttttctgaacagtaaaatactaaaaatagcttaacattagaaggaaccataatttcatttaatttaaatttttagttgttatatttttaaacaaaaataaatagtttaaaaaaaaatgtgttaaaaattcaaaaaaaatctcttatttcaaaaaaaaaaaaaaaaaaaaaaaaattagtttaatggattgagttatatttttaaagttgcttcttcattgtgatgaaataatacacgagaaggatcgatattgtgacttaatcgaagacattttgaaaagtcaaaaaaacaaaaaataatctcatgctctttctcatgtaacatgagtgaaatttcattgaatagtcctgttagataaattaacaataaatccaagatctatttgtatataatatagaacacgataataatatatgataattaagtatatgcgtacctgattgatccatagtgattatcgcaatttgatagtgcaatactatgaactaagtcttcctccctagatctctaaatc

SEQ ID NO: 245837 - DNA, 841 bp, Cannabis indica
taaaataattaaataatttttaatgtactaataataatattagactttatcgtttgtgattgaagtaatgaatcaaatctttaaaggaagctccccccacaactttggactctgcattaatacgttttgattgctacaaaagaccccacagtgtcactactgatcactagttactaaaccttcattagacttgagattgtataattaaaaagttatacaataatatttgtattaaggtaggtggtgacatggtgtggtgggaagtctttttctatgtttttgcaagaaagtgtaatctaatgaaattaaatagtcattgtgtgtggattgtaaaatatagaccattcatatatatatatattttgtatttattgcttttcaaatacagaccatgatttggcttgtccccctaacattgtgtgttgcatttaaaagtatatattaaattcttgacacgttgaagatcattgagacatacaattaaacatgacttattacactatatattattattgagcaagagcaaaaatggtgaaccatttttgaatattggttgtgaagaagacagtgcaaattggataaagctttcttaacaaaattccaattttattttagatctaagaatcgaatttaatgttagtgtataaaagcatggacttgaggtaattatattatgggatatttatagtataagtatttaaaattttgaatttttgagcggtataaatttaatgattttttagcagttattatttgaaatttgttattacatgttttcaatcaaaaatattaatattcaaatttgttttgagaaaactaaaaaaattatagttttattatt

SEQ ID NO: 245838 - DNA, 1313 bp, Cannabis indica
cacacacacacacacacactactctctctctctctctctctctctctctctctctctttcacacacacacacacacataaattttcatgcgttttgaaccacattcttcagtagaagctgaacctggggaaatgacccttgggttgtgaactgctgtcatgtttctggctttgttatacttctgatctataaaattagatgctagttatatgttttattgaatattatgataacacttctacattacaggatttcatgggtggttctcatgatagcatgataactcttgagaatagagtaaggggactcgagagaattgttgaagacatggcaagagatctatcaatatcatcaggcaggagagggggtaactttgcaatgggatttgatggatctaataggcctttaggcaagtataatggattctctgaatactctagtgcaaagtttggtaggagtggggatgggcggatgccttttgtggaaagatttgctcaaactgatggaattgcttcaggcatgcggggacgaggtcctcattggaggccagacgcatctgaggcttgggattttccaacttacggtagttccaggaatgggcagattggctcaaggagaactctagctggtgcatcttcagatggtagatcgcccaaggcagaacatgagggtgatcagggtcccagccggaggggttgggataagggggctggaccaattaggttgggtgagggaccctctgctagaagtgtctggcgagcttcaaaggatgaggcaaccttagaagcaattcgggtggctggagaggacaatggacatggatctcgcacagccagagttgctatccctgaattgactgcagaggctatgggagatgataatgttgagcaagagcgggacccagtctggacttcttggactaatgcaatggatgctcttcaagcgggagacatggattcagcatatgctgaaatgctgtctactggcgatgacatcttacttgtaaagttaatggacagatctggtcctgtgattgaccaactctcgaatgaaatagcaagtgaggtcctgcatgctgttacgcaatttttgtcagagcagaacttgtttgacatatgtttgtcctggattcagcaggtattactcctttaattatttctgtcttttttttttctttccattgtttgttaacttaatgggttaaagatagttcttctaagttagacatgtgcagttattcaacattgtagctttgagcaacttcaactacactaacataacataataagtattcttagcttcttccttgatct

SEQ ID NO: 245839 - DNA, 987 bp, Cannabis indica
tttttaattagacaaaaaaattaaggataaaaactcaaaattttctaattttacccattcatgggtaatacccattaaaagtgcaccctttatatgtatatatatagatggaagatggcattgaaaatttaaagttaatacatgaaagaagaatgtttagaagtatattgcttgagagtattatgtattacaaaattttccaactccttacatctaagaattgagtatttataggctctaacggcctgagatacacatgtggtctccaagggacaagctagcctcattgggttgaaaatctaggtgcaggaggtagtcttgcaccttgtactaatatcctatgccaggtggtcttgagttgcaaaggtggtggttgcagagtacctgttgttgggacgtcaggggctgcgaacaaagtgcctccacaacttgtaccctctcgtcaccaagtcacgctgaaactgtggccatactctgttacatgcccttccaagtgcatgccttctcctttgattccactcttaatagtcttctctctccactcttaatagtcttctctctccaacacttaggcaaactttgtcttcatctctctcccacaccctccccttctcgcactttctccttgcactccccatctctcgcaccctcttccctctcgcaccctcttccctctcgcaccccctctccctcgcacccgcacatctctctcccccatttctctagcgccctcatctctttctcgcccctctcctctccttgcatgacatctaacatgcatgcaccaacttgcacgactatgtctctaagctccatcttgtcaacttctgtttgcagatcgtcacagggacgatcttcttgatgctcaaacacatcccgaaaatcataagtgccaattttcagaggtaacacttgcccctagtctacaagaattcttttaagtattcttattggctgaataaattggtgttttgccttgttgaaatg

SEQ ID NO: 245840 - DNA, 827 bp, Cannabis indica
aaaagtaacttatcaacaaataaaatcaaaacaacaacacatattgacaatcaaaatgaaaaaataaaataaaaaatcattgaccttaaccttagaaggcatcacaaccttattttcatcctcgaattctaaatgtcctctatcaaactcttcatctttagcttctttacgacatcaggagatacatcaagaacacgaattttttttctttctaatacaaaactcaccgaacattttttcacattatcaacacctttgtcattcattttcttataactccttgcattaattctcaacatccttacccattaaatcgttgctcttcttacttctcctttcattcacaacagctctatccatggaatcatcactcttctcaacacccaaacatattttcctcacattttcttcttcttctccaccaccttttctcttcaaaccagaaggcgatggagaaatcaagcttctcgtaattgtcatagaaacacattcaacaccttgtcacaaatgacaaaccctaaaattacctctaacccaaaatatacactccgaaagttgatttaaatgaaaaatgaaaaaaaaaaaagagagagagagagagagagaagaggcaaatactcgcaaaatatatatatatagagagagaactcacttctctactgaacccaaaatgaactgtcaatgaattatgagaaagaaatcaacaaataaaaaaaaaatcagttgatatgatcgaacgtgacttagagttagagtgaaaatgctatatatatatatatagctaaaatggtatatccatctttcatacctaaattaattttttaaac

SEQ ID NO: 245841 - DNA, 597 bp, Cannabis indica
aatgagtgtatgcactatgcaactcttgtcaatttcatttggacatgactctagtggttaaaaacttttatcacttataaaatatttaataataagatttaatttcatattgttataagctcaaaaatatacatctaaaaaatacattttttgattaaaaagaactcaaatagcgaaagtataccttaatctatagatagtgatgattttaatccatctaatagagatgatatttgtggtaattttgagtaataatcttccaaaaatacaagatttacagttctctagttttctctcttgataggagaacatatagtagtttgttctatataaattccctataacccatttaactgtataccaaaagttttttatagaattacttaattatctatccaacatttttgatatatatgttaagtacaaattcacatatatgcttaagcatacattagattctaaatataaataaaaagaaaaatctatatttattgaattctaaggttgctttcagtgtaatgacttacacaacttatttcttttagcaacaagcgtatcacctggtatagtaaccttcatgccaataaatttgaatac

SEQ ID NO: 245842 - DNA, 1238 bp, Cannabis indica
ccacaaaaaaaaaaaataataataaaaataaataataaataaataaatgatgcaaatgcattaattgatgttggtagggatggacccggggccccctaacaaatatatgggcacatgtttttaggaaagttttgtaagtatctcactatgatatgatttatgttttacccattttaatttgagtaatttgtgacataaatacttaaatttaactttgagttacaaataaatacaaaagtttattttttggcgataataatacttaaattataatttcggaacttttgtatgtacctaaatattaagtgaagtaaattgccatgtggcgattcttgattagttcaagtcattaaatttttacttttttaaaaaaataatttaaaaataccaataagaacatgacgtgtggataataacttaatatttaacggtcaggtagacatataacttaggtagagatggagattggttggttaatgtatggggaatgcaattcccgcccccatccctgctatctatttatactctcatccccacccccatcttcgtctaatgataaacagattcggagtaggggaatacccatcgtttatgaaaaacttatcggatatccattaaggcaaataaaaaaaattaaaataattgaaaaaaaataaatttaaattaaaccaatattctcacaaatatttagtatgcatttataatccatagaagataaacgaaaaatctacctcaaactaaaaaaaaaaaacataacccaatagaaaataaaaaataaatatgtctcacctttctcttttcccttttcccttctctctttgatttgtacccctagttgtaccatctgttttgattactcttgttgtttaacttgtgatgtccacccttggaattgtttgattcactttcacctttaacaaacaatccatctctaacaccatatgatctttcatcattctttttctgcatttctttggaatcgagagataccttaacctttgtcatagtcaaagattctttcactactacaaaaaagctcttttaagtccatcaatgttggactagataaagtttcctagtctagtttatgttggacatagtagccagggacataaaagggatacttttcaagtccaacaatttcagactacaaaaacatttctagtccaactatattagacttgataagcggtcccactacgacaattcttttcgagtccaaaaaagttaaacatgaa

SEQ ID NO: 245843 - DNA, 940 bp, Cannabis indica
catctggttggcattgaattgggcgttaagaaagaattagagattagtggttatatttttcgattgtttgatagttattcaggctttgaagagaagatgcatgtcgaattggcaattgacctcatgcttatatgaagttatggaaaaaatagattcttttgtgtattgtaagatttgttatgtaaagggggagcttattgtgtgtgtgaatgatatggttgtccaagctaggatccaaagaattgctaactcttgtttgggaaggattgccctttgtcaatcctactttgctgatttaatcttaatgaattgatgttctctttaaaagaaaacaaaaaaaaacttgagctatgaatccaacatacatacattatttttaaatgcctgatagtattttaaaataaatttatatttttgtaaataaaaagtaagtagtttgtaaacaaaatccctaatatttgtaggattatattaataaatctattctagggtgagattactttgaactaatttaaagttacataaagtcaagcatgaacatgtatatggaaatttgatgggaaaaaataagagaaaattattttaggctcttatttagaaaaaagatataacatttttcaaaatcaataaaaaaatatgtattttttttaaaaaaaattcttttaacccttgagttaggtgggccttaaggtcaggcctaactcgcttatgccgaggaccagacctgcaagagctatagagtaaaactcactacttacttatgtaagtgtcatgtttttgtgtggcaaattagataaatacttttgctcagtgtttctgcatcagtatttgtctttctaacatcttttctgtggttagttgcatctaatatcactaaatttattttagtgccatgtcagctttctgcgtgtttgtttgagtgtgccagctgtactttgct

SEQ ID NO: 245844 - DNA, 671 bp, Cannabis indica
gagacaattcgtacatctagggatcgcgcgatccttgacagatgtcctacgttcgttggttatatgtattgtagtgtcaatattgtgttgttggacaaaatagtggttttcttttagtggtgtgcgcactcttaaacttctacattggcgacaaacccttgatcctgtgagattcggtgtcagatggctaccacgtcatcctatacaaagtctctgaggcgcctcttggagtgtgctctccggacgtatcccaaacacttagttggagggctccaatcactttttctcaggaaggcaggaggccctcttgatccggacaagtcctgtcttggaggtgtgccctctgagccttagatgggattgaacccatccattcgcatgagcttggacacattcttctgtatggggctgggcctaccttcttggtagggcttttagccagaccctaacaaagcaaccttaagtcaggaatgtcatgtgatacccttctaaaaatgcagataacatttactcccaagcatccgagacttgagagtggcggaggcttgcaggcattatgacaaccagtactctcgtgatccgtaaggggaaatacccgataagctgtgcaatcccacattgcatagggaaggtcaagtgtgatgattttgagactgtgtaagtatgggact

SEQ ID NO: 245845 - DNA, 649 bp, Cannabis indica
agatgttgtccttttcatgaactaactatagttcatattttttaatattatgaagaaaaaaaaatgtgtttataatctttaaaaatgtattattacatgaaagtcaacattacattacaaaaagtggacaatgtatacgagtataattattaaataataataaaaattaaagatggtaagagcgcgtggggcccacggcgtgattgagtgttcccttaacttcgtcatccccttaacatccgaccacccccttttgatggcactcactatatatgcaaatgctcataaatttaataataaattaaataaatttaaaaattaaataaaaccaaaaatgcagattcttctcatctgcatcatctaattcccctgaattttaattttgtatatttgtcttctctgtacaattttatagtgtaattctcaagatttgatctttttcttgccaacaaatcaatatgtcaaaactcatctcttaatctgtaagaatgcttttttttttttttaataattgaattttaattctggggttttcccaatgtttgttgtgattttgttttcttcctttatggccaatttcttttgatgtagaagacaaaaaaagagagattttttgatctgtaagaaaaaacccatttgcatttttatg

SEQ ID NO: 245846 - DNA, 1174 bp, Cannabis indica
ctctctctctcctacaataagaaccacgatcctatttttccctctcctacaattccttcgtcctctctctcgtgcgatgtccattccaatcaattctactattggttctccttctgtgattacaaattattcaaccaatgaaaattccagcaaaatccacatccatctccggtagcaacaatatcattatcttaaacttcagattattcaaccttaaaacttttaatgaatcacaatcttggagtcatacatcaacaactacaaacctccaaaaagctttcaattactatctaaaaaaaagcctttcatagctattattaccgataaagaaaataaaacaaggtaaatttatacatatagacagtatatattataataatacatatctgtatataataaaatacataaaataatttagtgacattaattttgtctctatatcatacacacattttttttaaccactcatctatatgactttctagagtcaacattatttaatttataattgtatgtagtagattaaattttttgttctcattttctttttcataaaagaatactgagaaaatatttaaaattcccctttcttttcgattattgaaaatagcttctatagggacaaaaaatagcttcttcaattttagaagcccccctcatttctaaaaaaagaaagcttgttgaggtcaaaaatggtgtagcagttgacaatgaaggaattggtaggagtttgtgggttggtaaaagagttttttcacaatcactttcacaataggatccctttttgtcatatgttttgagcaataatgcacctggacataactcaaatgccaaagggctgattcttacaattcttctgattgaattaatttttgtgaaatatgaatgtattttatttaatttccctttataatgaaaataaaattttaaagagaccaatcttcttaggatttgctggtttataaagaatagaggccccaactttgaagtatctgcaatggtgagtcatgtcttgtataacacataaatccaaagaccaacaataataaagtacgataatgagaataggaagtacagttttaccagcggagaggtaatcctggacattgccctttccgtcaagattgtaaatcgccgatttttacattcatcgagactgttgacccagcattgc

SEQ ID NO: 245847 - DNA, 955 bp, Cannabis indica
aattccaatgtgttgagctgtcaaattatatgtatatggtgaattcaattatttggataaaaataataaaaagtttagtaatttataaagaatttgatgtatattgtataataaaattttgatgtaaaatgacatataaaaacaaaaatacagtttagtgatatattttgaaaattaaaagaaaaatactctaaaatcaaataatgatttttatttaaagttctgtttattctacttttaaacaaaacacatatacaataggtattattgatgtggaaaagtatgagttgtgtatagtaaataggttgagtccacaattctttaattatttgaaatatatatattaaaaaaaagttattatactttctctattttaatgatttcatttctgatgtataataacaatcttaatcacctcctgcttaatggattttaatggcggttttattgtatttagtccactacacattcattttcattcttcctatatttatttttctccttcacttacacactattttctacaaaccgacacatatatttttgactgagcttgttgttggtgataaatctatttaagattggcatcactcaagcttttctttttcattgtcaacctttgatcgcccataaaaattcatgaaattagataatcaatatctactttgaaagagtcttattcaagaaaatgatgtttagttattacataaagttagaagtttgagcatttctaagggatgacctagtgtgagctaagttggcttcacttttgctgatgtccaaccattagtaaagcctccatttcagcaacagagtaagagtcttttcttgtagtaacagatgtaacaaaggcatcatattcagatgataagccactaaagatggcttcaatgtgatcttcaggagattgcttatagccaatcgtagcgaaaagatcaatgatccccttgatttt

SEQ ID NO: 245848 - DNA, 732 bp, Cannabis indica
cagttgttcaaatctattcacaacatttcaactcagattgacttaattcatacatcaatttacaacaaaaaaaaaaagaaaccaatcaaacttataaaatatgttaccagtgtttcaaaaataaaaataacctaaattgcctttgcaaatattaaaattatacttgcaaaatatttttaataatctttctaaaacaaagaaagttctttcagatctaatatatcgttattttcacattcatttactaaaaaaaactaaactaaactaatactattcattaattaatcagggataccgttccccaaagattataatctcatgcgtgtgtatccaccgtatctcgccttacaaaaattactctcaaccaatcacaaagcataaaactgtccatatcagtgttctcctttttcagagttctattgaagaatggtacaggaggcgagtgattgttggaagaacaggggagacaagcagcaactttggcaagcgggtgccagtcaaagcccatgggtcaacgagctgggcaagacagaaagctgatgggctggcacaattgtgttacctcttaattaaattccactttgttcttgcaaaaataccaatttttctttcacatcataacaaaagtaaaataaattaaattctgtgtttcaagatgcaataatatggtcatcagttcgctttaagtcgttaaaatcgattctcttgatagaaacctttggttccaaaggt

SEQ ID NO: 245849 - DNA, 1160 bp, Cannabis indica
ttattgtatgataataaattaaatgctcaatccataatatataattaattatgcatttacaaccgtataatatcttaaatatttgtactaaaaataaatttgtataaataagataaatacaaaaattagaacaatttaattatatgaaatgaattaaatacaaaaattaaagaatatatacttagtggcaggttatcaattaatttaatcaataaattacttaattgataaataaatataataattacacacttaattgtggaaatattcaaatattcacattcttaaaatatcacaattattataattacatgtaaaaaagaaagcaagtaattaatttaccaaattaaaagttttttataattatttcttactaaataacatttatgaaaacatgtgttaaataaaaatagaaaatttaaataaatataatttaattgactaaattaacaaaaataaagaaataaaataaaaaattctaaaataaatcaaactaataaattttcagaatttaaatttttcttaaatttcttttttttttttattgaaatctgcccctgatgtatcgttttccttcatataggaaaaataacgtgtcgttttcatctaaaaatgaattcggatcttcagtaaacgacgtatcgttttcccttgatctatcgaaattctaccttggtcgtctttctagacctgaatttggtttctacatcagcaaattgatgtagaaacatggaagaaatgtgaatttctgtcaccaagcttcagccaaatttttctagattttttatgccaaatgctctctttccagtgccaagcctctttcaatttggaatgaatataactttcttcaatgcacaaattattatccaattgttgttgttgaatccacgccagtctactttcaagttgatgaataagtagctcacattcctcaaaatgatttttcttcctatagttgcagcactctccttgttctgtccatattacaaatcatgttcaaggtacattcacaatatatattctgccaaacactagcaatagcttctttacaagattcttcattggtcaaagctttaaagaacgtaaatgcgatatatcctttgctattaaatatcagggaatccagcagaatgggggatgatcagaccctagccttaggg

SEQ ID NO: 245850 - DNA, 797 bp, Cannabis indica
atctaaagaccaatccaccttctcgtttagaagtacatagggatttccaattcttccaatgtattttttttattatctaaagaaggaccccactaaaattttgccatcatagtctcaatctgcttacaaaactttgtagataatctgaaacaactcattgcatatgtgggaattgattgcacaaccgctttcaagagcacctcctttccacctattgaaaaaatcttatcattccaagcatgcattaatttccaaattctctccttaatgttgttgaatagttgtgatttatccctttcttatatgcggggagtcccaagtaagattcatgacactcacaaatcggcatgcccaaaatttgctgaaaagaatgcttaacagcctccagagtgttaggcgaaaaggacataaacgacttatccgtagttaaaagttgactagaagcacgatgatagatatctagagcacgtttgattgaatcatatgatcagtcattagcttgacataagaggagactatcatttgcaaataaaagatgtgtaattgtcggagagtgtcgagacacaaccagacccttaagtcttccaacttgttcttcatactgtagcaagcgtgaaagaccttctgaaaaaataaggaagagatatgggaagagcggatcaccttgacgtaagactcgttgaggaacaactgaacttgaaactacaccattgataaggaaagaaaaggaatttgtatgtagacaagtcataatgagtgaaatccatttaatattaaaccccatcttccccataaca

SEQ ID NO: 245851 - DNA, 3632 bp, Cannabis indica
caagttttgatgagtcttcttaacgaagatttggtatgtcttggtccccaagttttataactttataaatatgtgctttgtgtgagaaagaggtatgtgtatgaaaaaaaatactgagttgtgaaaagagaggtgtgtgtgagtttgttgtgtgtggtgagagtgaggaaaaagcaaagggtgtattgagatttgggtggagagattgagataaatagtatatgtaattttaaagtgataagtgaaatatatctctttgtgggttcggtagttgtaccaaattgagtaaattgctttgcttcgtttctttattatttcgctgcgcttgaagtttattatttttcccaacaagtgttatcagagccaaaagatctacaccaaaaatgtcaaagattgtgtcttctacaaaatttgagatcaagctttttgatgggaagaataattttagtttatcgcagagcacagtgaaagatgtgttggtacaacaagagctcctaaaggcactgcaaggaaagaagcctgagagtatgagtgatgaagattgggaggagttgcaggcgaaagcgataagtactatttgcttaagtttggctcctgaattaaagtatagtgtattaaatcaaacatgtccgtctgagttatggaaaaagttaaaaagctttatatgtcaaaatccctaacaaatagataatatctgaagaaggtgttatatgaattaaaagtgattaaaggagaagatgttatggatcatataaatagttttaataagtgcataactcaattgttaagtgtagagatcaaaattgatgaaggggatcaagctattactttgttggcatccttaccaaaatcatatgagacactagtgactaaacttttagttggaaagactactttaactgtggatgaggtgtcaattgctcttttggagatagatagtatcaagcaaccaagtggtgtgtctcatactgatcaagctcttgtgacaaggtcagaatcaagtcgtggtaggagtacatcgagaggaagatatgatgatagaagagacaatcacactcattcacgctcttcgagggaagtggagtgttactattgtcacgaaaagggacatgttaggtagaattgtgaagagttgaccaagaatcttgaagcaatgaggaaccaagaatgcaaagacgtacatcagattccacaaatgttgctggtgaaggctttgaaagtgactctgatgttctctctgtcataactgatgagaacttttctggcacttggatattggattctggttgttcggtacatgtgcccatataaggagtgctttgacattataaggcatatgatggatgtactgtttcgatgggcaataattctagctctaaagttgttggaataggaactgttaaggtaaaaatgcatgtttgattgtgttgtgagaacattggctaatgtgagacatgttccaacattaaggaagaggttaatctctttgggagctttggatactcgaggttgtgtctattacgcaaaagatggtgaaataactatcaagaaaggtggcttggtagttataaagggtaaaaaagagagaaatttatataaattattcgagaagactatttttggtagagctgtgaaggtggagtcaagtcacaaaagacattcagttagtgtgaaggaatatgacaaggtgcagaagactccaatttcagttaaaagttgtttgaagaaagaaggcatcaatgaaagattgaagaatgttaagacaaatgctcaagtgaagttcaatgaaagtatgaatttagtgcatatatactcttattgatggtttgagttgtgggtttagagaatttgagtcaaggtggacattgttagagtttgacgcaaattattatttatttatttttatttgtaaagttgcaatttctttttgagtaattattaattgtggaaaaggaaagtcttggtgaacaagttttgataaatcttcttaaggaagatttgaaatgtcttggtccccaagctgtcttgatgcccaagttttataactttataaatatgtgttttgtgtgagagagagatatgtgtgtggagaaaaatagtgagttgtaaaaagaggggtgtgtgtgactttgttgtgtgtggtgagagtgaggaagaagcaaagggtgtattgggatttgggtggagagattgagatagagggtatatgtaattttgaagtgataagtgaaatatatctctctttgtaggtttggtagttttatcaaactgagtaaattactttgcttcatttctttattatttcgctgtgcttgaagtttgtcatttttcccaacaatgtagttaattaatggaaccgattttcgatttatttattttatttaactggttattgtatgtaagtttttattttggttgttttacggaatatatttttttgtcttagatttttcactagttgataaatataaccgatttttttatcttatattttgagttattgtatgttatttatttttacttattttgttatggaatcagttctgcttagatttatgtctcaatatttttggaattaattctcacattttttttattattattataacaattggtttttgaaatatcacgtgatattcgtttttactcacttcgttatggaactagttttatttttaatttatgttttagtattgtatgaactgattttctttttgtttttaaattatatcccctttgaattattatgtatatttatttatattaattatgttatagaatcagttctattttaattataaccggtttgagttatttcatattatttatttttattcattataacactgttatagattcggttctattttaattataaacagtttgagttattttgtgttatttatttttattcattatgttataaaattggtttctttttctattataaccggtttgagttattgtgtgttatttatttttattcttataaaatcagttttattttaatttacatttgagacatctaattccagtgatttttctgacaatgatgacaactccggtgacttttccagtgccgatgatttttccggctgcgatgaattttccgacaccgatgacttttctgacaactttctcaacaacgctgtatacttcagcgactttccaggcaatagttgttattataaattttaccaactttatttatggtcttttgtttagtttcctatgtattttaattattgtttatttttcgttcccatattcttttacattatttatttctaccatgtaaaagtaaattctattatttttttcatatttatgaaaaactcaatcaatatatatatatatataaatatatattattttagctaaaggaaaacttacaaaaatactagaatttgggttaatttttacagaaatactaccacttgattttttttttaaaactactatatttttataaaacaacagtggaacataaaacagaacaacttaaaataacaatgaaacaattaaaaaataaaagtggaataacgggaaaatttaatacaatacacagtatacaaaacacattattttttaacaaaattctgcttagtaaaaaaaaaaaaaaaaatggaaaa

SEQ ID NO: 245852 - DNA, 947 bp, Cannabis indica
gagaaggacttggctatagagaaatcgcgatattgaaagtggctcgcagtattatagtactcgcggtatcaaaagtaaaggctttgcaatataaactgaaagaaagctcgctatatcaaagaaagtacacctagcatatataaggaaaccatagtatcaatggggaaagatgcgaacacattgatttatggaaattaacagtcaaacattcaaggcgcaatcatggcaaacattacatttatttttataactattgtaatcaatacaatttatatattaatgattgtaacagtctcattatgatcatcatttctaaccgatactcactacctataagtaggggattttccctccattcaaaaggtgactgatttgaataaaaaaacagagacagagtactcttttcaacagtggattagataggttgagcccaaaactcttgcggaaccactatacttttatgtgtccattttatattatttataatactcgcatatattatagactatattatttgaatacttactattctaagtgagtactcacatatttatttttaggtattcagatgacccttgaatacttgcacactggcagggaattggcggggagtgctcttccgttcccattctcgttaaggattttcagccctattcccgcttatttcttatcagatatgggacggaaaaatttcctaataaaaaataaagtttataataaaaatttatatatataaaaatattaaactatatgaaaattaaaatattacatattaattattatccaaaacacaacttaaaattcataacaatgatactaataaactaaaaaaaaaactaacaaacaataaattaataaattaataaattattattaaaattaataaataaaataattaaacgaagtacttcatcgaaataggagtgtcatctctgtccctcgtcttg

SEQ ID NO: 245853 - DNA, 1239 bp, Cannabis indica
aaaaaaaaaagaaaagaatttttttttttacaatttttaaattattttttataatattttaataattaatatcacgtgaaccactaaaaatttgtcacttttacacttctgtacacatgggcagtccactgtggcgcttaattgagtttttttggatggaagtctataaagagcaaaatagaatagaggtttagtaagttttgtcgtcaatacttgagtttatgtgattaagtatttcaaaatataaagttcgactaattttgctgcaaatattaatttttataaatagaattaaaactaaataatatattaaataataatgtgtgacaccatagtaaaaagtttgaagagtgcttataaattataatcataggagtactaaaagtaagagtaccaaaaataatataaaagaatgataaaataaaatattatattgattaagagagttttaacacttttaaaaagttccaccattgaagaacctaatcaaactacataaaaaaaaaatgtactcattattacttgggtgttggccctacaaaaaatcttacttttagtcactataaaatttgtgactaaagataaaaagttgtggctaattataaattatcattattgtgttgtgactaaaaagtccgtggctaaaagtattaatcacaaaaattacaatttgttgtgactaaatatatttttagtcacaatatttgttgtgactaaaactaaattagtaacaacttgtaactaaatactatgttttagtcacaagtaactttttattatgactaaaagtcacatttagtcacaaaaaatttatgttgtgacaaattaattgtcagaaaaagtaacaattttttgtagtgtcgactaaaaagttatgtttaacaagttgcttaatttcagtcacataatcttaattttagtgataaagtttgtctctaattgtgaccatacacatttagttatagtaaatttagcttttatgactaataatttatgtcgtgaatattttagtaataacatatactacaaaaataaattattcttattaatttagtcttaacattaattttttgtaactaaatattatttttagttacaataaaaaacttacttgtcactcatttataaactaattaactatttttaaatacaaatcctcattcatttagttttagtcatttgtgacaataaattataattttgtgattattaatggtaacataaatttaatgatacaat

SEQ ID NO: 245854 - DNA, 3223 bp, Cannabis indica
aaaaaaaaactataaattgaaaaataacaaaacaaatgcataaatatacaacaaaaatattctctaaaataaattgaaaatatcacgataaaaaatgcacataagctaagagacaattgtacaataaaagaaacacatataaacaacataaaaataattataaaacaactatagaatacctaaacaacataaaaacaactataaaataacaaaaagacaactataaatcaatagaaaaataacaaaacatcaatcttgttaaaatatgcaaatcattcataaattaactctaaataaattacgaaacatccaaaaaaatatactacttttattaattatgcaaaagatagaaaaatatagaaggactgctcttaatttttttggtgtaagtataccttatcaccgattatcatgtcagtctaaattcagtgaactgacaaatcatgggaattaaacttttgaacatataatcatgattatattccactatgctgatgacactataatcatgaacaaatatatatatatttatatatgttcaggacttaatagaatttatacactaagtatataatcatgaaataaatcatgtgaaccatgcaacataaaataatttctgatcttttattaattagtaaatctgattatattaaaatgaattttagggtacaaaatgcaacaccactaactctgcgagatccatgcaattcgcaacattgccccagaaaagagaagcaagcatactactagcagccaccaacatcctatgatcctatgaagggacttcacccaaagtgtctcattttaggatgcaatgcgcatgtgccccccgttcaagagcaaagtaaaaaaaaaaggtgtcatccataaatcatggtgggaagccgcacgatgatgggatgagaggcatactactcacaggccccatgcaaactatgaggaaaacccaagttccactcaccagctcttgagaaaggatgaacaaaagaatgaaggagctagaagcatagatgcaagatctacgttgaaagatggataccacatcaaagggaaatttagaggatgatgggttcgatcaagattcccctttgtcaaggaaaattcaaattgaaccactaccaccaaatttaaaggagcctcgcatgacgccatatgattgtactactgatccaaagttccatctaggagcttttcacgagctaatgaagatgaaaaatgtgtcatgcaaggaagggttccaacactttttgttcacacttaaagagctgcatataagtagtttgaaaggcttggacaaggaacaattacatcctggaagcaatttttggaggaatttcttcaacaacatcaggtagcgagtgattatgttatgcctataacaagtatcaccattgtgaagtaaggtgaacgagaaagcttgtgaatatacatccagcattttaatgccaaaggttccaaagtagggaggatgtctgacgatgaactcaagtttgccatagccgctggagtaagccctggaagtagactatgggggaatatgttgaaaaaggaattggatggcatagaagacttctatgagagagcatagaagtacatttgggtcgaggagagtaagagagtcttgaaaatggatacaagcgagtgttcttcaagaagcccgttagatccctatagggtctattaggtgatacccacaatacttgtaagccgatacattcaagtaaagtctctgctctacaacatgtgaaaattaaatatccaagatgttcctcaaagtgaatttccactatataggaaagttttcctaccaatggcaagtttgcctttagtacgttgcactaaattaaagaaggcacctatataggcctctgaacgaagcatatgtactcaggtgattaaatatttttattatcaatgaaatgttaagttttcacttcacatatggcattcaacactcttcacgcatctgtttggcttggtcactatacttgtcaatcaaaattgtcaaagtgaacgagtcagtgaaaaaaatatgaaatgaaagggaaaatggtatgactatgagggggatgcctctctaaaaggaatacttattttctctcattcaaaatgcattttaagtgccacataagcaatataagaggtcgagtgtcgtctcagggatataagatccctcattagaattgcaaaacttgaaaaagtctgagcgcaacacaagaggctaaacaactcccttaacctccaataacttgaaaaaaggctaagcgagacccaaaaggatgatcagctcccttaacatccaataagtaatcgatagaaggttgggactgctcaaaaagtctaaactcccttaataataaggttacatctaaaaagaggttgagaaagcccaagtggcgaaagactccctcaaacaaaaagatctcaaggcgtaagagcctaaagagacaattgcaaaaccaagcaaaagggacagcgcatgctaaacttagtctaaaagaacactttaaagagttcttatggactaggggcaagtgctcaccccaaaaattaacaagactaattctcgagattagtcaacaatagtctcgagaagggaaagaaatcggctttaagagtcagccaagtagggattacgaccacttgaccaaacccttgcttgagagccatggtcactcggccatggtttcatgaaggttactcggccatggtttcaacaagtcacccgaccatggtttcaacaagtcacttgaccatggtttcaacaagtcactcgaccatggttttatgaaggtcactcaaccatggacaatgaaagtcactcgatcatggtttcaaccttggtcattcggccatggtttcaactaggtcactcagtcatggtttcaacctaggtcactcaacaatgatttcatctaggtcagtcgaccatggacaattaaagtcacttgaccatatgccaagcatgcacatcacttggccatacaacatgaaagtcactcggccatggacaatgcaagtcactcgaccatatgccaagcttgcacatcacttggccatgaagcatgaaagtcactaggccatggacaatgtaagtcacttggccatgcaccaagtttgcatgtcactcaacatgctcaaggccatgtcacttaccatgctcaaggataactcactcagcaagcatgcaagtctctcaagaaagacttgcatgcaagtcaac

SEQ ID NO: 245855 - DNA, 962 bp, Cannabis indica
gtgttaaaattgcaaaattgcaaaaagtaaggcccaaacccaataagccaaaaataatttccaacatggaataccattagcatccaaacccaagtcaggagaggtcaaggagcatcccctccgttggtatccaaaccagccacagagaaagcaaaaaatagaaaaagtgcgaagagaaaacacgcacggggacagaccaacagaagcacgaaagagggatagccatttccctctaaattcgacctcaatagcctccataacagaccaaactagccagctccaccgcaaaacagagggaggccaacactaggaactaacccacaccagatgcaaaccaaaactcacaccctaatgagagccactctaagggaagagactacgagaaagacacgggggagaagaacctaatacaaaccctagacaaccaaaactcaacctacagaataacaaaaaagccccaagaaaccagacgaggatagaaagcgaaagatggcgagaagagaaaaagcaagcaagaaagagatggtgagaaagaaacaaaaagaaaagaaatgggaaaaagagaatgatgaatgaccattctccatgttacataacagtttctattttaatactattatagaacaggttctattttaattgtaactagtttaagttattttgtgttctttgtttttattcattatgttacaaaaccggttgtatttcaattataaccagtttgatctatttggttttattcattatgttatagaatcagatctatttttatttatatctgagacatctacttctggtgaattttctagtaaattttccgggaactgtgactttttcggccatagtgactttttcggtgacaataacttttctggtaactttttcggcacgtgcgacttttctggcgccggtgacttttccggcgaaagttattattacaagttttattaaatttatttatt

SEQ ID NO: 245856 - DNA, 2244 bp, Cannabis indica
gactatgtgcacgatctctggggtgcttcaaggactaagaccattggaggtgctagctacttcatgagcattattgatatctacactaggagagtttgggtttttctactcaagtctaaggatgaagcatttcaaacttttgttaactggaagaaactaatagaaaatctgtctggaaggaagattaagaaactaagaacaaacaatggattagagtattgctctgaccagtttgcaaaattttgtcaagacgatggcattgcaagacataaaacagttgtgaagacaccacaacaaaatgggattgcaaagagaatgaacaggacattacttgagagggtgagatgcatgctaaagggtgctggtttagacaagaaattctggggagaggcactgcaaactgcatgctatctcgtaaatagatgtccttcaacaacactaagatttaaaactccttaagagttttggacaagtgaagtaccaagatatgatcatcttaaagtctttggctgcacagcttttgctcacattaaacaagataaattggagcctagagcaatcaaatgtttgtttttgggttaccctgatggtgtcaagggttataaattgtggtgcttagaagatggatacaagaagtgtatcattagcagagatgtggtgtttaaagagcatgaaatggtaatgaaattcaccaatatagatacctgtcatggaaagcaaagtgttgagattcaatcagaccaagaggacacaaaaactgtagatgaggtggatacatctgcaacacacagggaacactgaacaaatgaagagcaaagacaagaacaagtgtcttctgagcttcaggattaccaacttgtcagagacagagttaggagagatgtaaggccacctgaaagactaagttatgctgactgcattgcttttgcacttgcagcagctgaagaaattgaaaatggtgaacccaccacttatggtgaagctgttgttggaaagaacataaagaaatggcttcgtgccattaatgatgaaatgggttcacttgaaagaaacaagacatggattcgagtacctagacctaaaggacaaaggatcataggctgcaaatggatttttagacacaaagaagggctgcctggtgaagaagttatatacaaagcaaggttagttgctaaggggtttaatcagagagaaggcattgactacgatgatatcttctctcctgtggtgaaacaaatttcaattagaatcatgatggcaaaggtggcaatgtttgaccttgaaatggatcaaatggatgtaaatacaacatttttacatggaaatctagaagagaaaatctatatggaagaacctgagggattcaagagcaaggaggctgttcaagtgtgtttacttcagaaatctctatatggcccgaagcaggcaccaaggaaatggaacctaagattccatgaattcatgttgcaaattggatactcaagaagtgagtatgatccttgtgtttactacaacaagacacctatctggttattactctatgtggatgacattttaataattggaaaagacagaaaggctatagacatgttgaaaaatcaactaagctctgaattcaaaatgaagaaccttggtgaagctaaaaggatacttggaatagatatcaagagacaaagacctgaccctgttttcttgtctcaggaaggtcacattcagaaaataattgacaagttttgcatgagtgaggccaagacagtcactactcctcttgcctcacacttcaaacttgctcaaaatcaagcaccagacaatgaagaagacaggttatacatggacactgtaccctatgcttcctgtgttgggagtctaatgtattgtatggtctgtaccaggccagatttggcctatgcattaagcatggtgagcaggtttatttcagatccagggaaggtgcattgggatgctgtaaaatggattctaaggtatctaaaaggaacatccagagttggtttgttgtacaaggacaatgcaagttttgacacagaaattgcagggtatgttgactctgactatgctgggagcatagacaccagaagatcgattacatggtatgcatttactgcttttggtggatgcataagctagaaattgaacctacaaaaggtggtagctttatctaccacagaggcagaatatatggttgctactgaagccattaaagaagcaatttggttgagaggattc

SEQ ID NO: 245857 - DNA, 2000 bp, Cannabis indica
tagaaacttcaggagttgaaggttacaaccctgagcgtcccacctttcctccttcttttggtgaggcgcctcttggagggagtgaaggtggggaggaaacttttgttgatgcgataggcctctaggacctagtgtgagtccattcttcttttttatttttagcattcaattttagtgtgttagttggtcgttcttgggcggcatttcaatgtggataagtcttagtagaatgtgtttagaatttttttttagttaaattaaaaattatttcaaacttaataaaacttcaattccaatactttattttttttattctagtttatccgttatcgcttgactttttaatacttgcacagtgcaacatgtcttaagaaagtcggttaatgggagtaatgtcactatttcattaaagttatcattaccatgagagtacttacacagatgtgaattttttttgaatgctcgcttaacatatggctctcgtataccataacataacctatgtgccccccaagtgatcaaagaagtgccttcattggttacatgccataccaaatccccctaaagcatgaatcttgagtggtgttacacctgtgagaactctccacttatctaagaatttgtgggtggcaatgtttactcacttaagaaacaacagaagttatctcaagaccaactcataagatttactcaacgcttagagagcgtcgttaggtctgtgagctataattgattaatttagatgatgtaccaaaaaacttttacttatactttttcattaaattaagtacaattacattactgtgagctaagttgaaagaaaaagtatagcttgatgtagtagttgcagaatctcttcatcatccaagcttagctgaagtgatcctcactatgctaatgccctgttcgacttttagcataggagccataccttagtgatggacctcttaacctagggacaacttcatagcatcttgttaattaaggatgatcgattcacttacatgaggtaaggtgaatctcactatgaagtgagctattttaaggaaatttgcttttatttgtagtatcgtcatagatgtaagctatttcaagaccttgctaccggccctagattcaagttgtagtcatagtgtgccaactagtaagttttgggttcaagtgcttcaactatgacatatggtccttccaaattacgtctgagtactcctattgctgcatcttttatatttaggagtacccgtcgttacaccatgtctccatgcttaatatcccatctttaaccttagagttgtagtgttttgccaccctttgattatacgccgccttactaagctcaaacctttctctgatctctttaattccatctagcgattcgacaagcagctagtgattgtttgttcgtcgtatgtaattcatcgatgggatggaggtatgagctctttgggtatcatggctttgtacccataggttagagcgaagggagtctaacctgttgttattttttctgtagtgcaataggcccataatacttcaggcacttgttcaggccaattcccttttgcttgctccaggcgcttctttagcatatccttaagagtttggttgaatacttccacttgtccattaacttgtggataggaaactgctgagaaactcttaatgattccatgtctgatgtagaaattagtaaagaggttgctatcaaactgtgttccattttttgacactatcttctatgggagtccaaatcaacagatgatgttttttaccacaaaattaagaactttctttgatgtaatggtggctaagggctctactttggcccatttggtgaagtagttgacttccaccacgacatatttaactcagtctttccccttaggcagtgagcctatgaggtcaattcccaaaaaataaatggccaggatgtttgcatactcttgagttcttttggggcaactctgcatattttgcagagcctctagcatttttcacac

SEQ ID NO: 245858 - DNA, 571 bp, Cannabis indica
tgttgtgataaaaaattgtcaccaaaagtagcagtttttttgtagtgtatatagtgaattgttaattttgtgtttgattttttcttttattatattgatttaatagttttgattttgttttaatttgtttagatctcagtcggatctctattaagtgatggtattttatcatttgaattcatctaaaatctccatccaatttttatttcttcaatatctttagcaaagcatatgaaagaggttatattattattattttgaaataatagttattggatggattcacttatggcgcgtttatcaaactttagctagaattataataattaataggacaaatgaattgatttaaaatagaaaataatcggaaacaatattttattatactatttactaaactgtctagaaaaaaaaaacctaaaatcatattattttgtttacataactaaaaaagtaaatcataatgttttaatttgacaaaaaattgtcattattagaacatgtaaacaagaatcatattatttctatttatagatttttaaaggataaatttatctttttatttttaatt

SEQ ID NO: 245859 - DNA, 1470 bp, Cannabis indica
  modified_base (33)..(33): a, c, t, g, unknown or other
gaataaaaaagagaaatcaaaatcatgtatagngttttaacagttacaataagtataatagaaactaactaactaatacgaaaagctaagttacacttgtaacatccataactaacttctttcaacacatataactcaattacttttgttgtatatatgtttagttactatatatttacatatctttaaagatattgtttaggaatgtaattaacaccaataatgcatggattggcataaaagattaatcatttgtggtataaatttaaaactaacaattccccatgcatttgttaaatattaattatattttatttaataaaattataaatatttatgtaactttgattcgatcggtttttacactaaaagtaaaattattcattcacatgtttagatgcactaattaaaatgaaaaattctgagtattactatactatatactactcaattatatattaccctattataactaacccaccacatattaattaaagggattgttttataaatatttaaaaataataaaaaaaaattaatgttttttataaatgaactgttttctatacttttttatggactatattattttttgattattcttaaaaaaaatatttaaacgttgtaaaaatataatataatgttatggtaacatgaaaacaattttattttccttgtaaaaaaataatagtcagtaaaaatatatataaaaaaaaattaaaaagtaaaaatatgtgagttttgacatttaatttgtgtaaatttatcttaattaaaattaattactactactgacggaggcacttgtacaccagagaaccctcccaacaaaacaaattaatttaaagtatatatatatatatatatatattaaatataatatatatgtgattattttttgataaacgtcctatactttatttttattcgttttccctctctaatatttatgtgtatatatatttaaacgaatattgctcatctgaaaagaaggagtatttatatagaattatttaaaattatattatatgtgtaaaatatccaaaatgaatatagtgtttaacaatattttgattataaaagtgtaaaataaactaatatgatctctttacagtatatatattaattgtagtatacatatggatacgatatgcgtacaccgcacagtacgcgttatgctccattaattatataataatatgcaaggtttgaaaggttgatccatgtaaacatcaatcaaaatgaaaatggttgttttctcggtttgcttaagtaattatatacgtcttgaaaaagttttcatttttgttcccctacagttaaacactcttaaactgttaataactatgaagctgtgtgtccacggtgcatttcaatattaaattagacatagtttagtttttaataaataatataaaaaattattaattaattatatcatattcgtgtaatattagacacaattttagc

SEQ ID NO: 245860 - DNA, 889 bp, Cannabis indica
tatttctatgggtcctctcataattggtgttattcacaaatattattattagaaaattttactttttatgctaatttttttatttaattaaaaaaatttctaaaagtaaaaaaaaaaataagtgtaactataaaagtacaatatatatatattttaaaaaattaagtataaaaattaaaaaatttattttattattggtagctggaaatgtatcgtaattacttggaaatagcaacttagacgcggcaaagacttaataatcattcaaaataataaaaagacaaaattaacaactgaacccgaatgctcattaaccctataaatacattcgcacaatcatcccaattcattcaaattaactctccttattctataccactcactcataattaattatattaaaatatttgagagttcatccaccatgaatacccaaatactcttctttagtcttgctttagctttcattgtctttgctgcaggtaataattaattatttatatgtatatatgatctccatgtgtatctactaaaaacatatataatagctagtttcttttttcctttcacattttatatatttatgtacgttgggcattaattgtaaaatagttacgaattacacaataattataatatgatattttatatgtgttgatgcactataagcgtttataattatattcatacagagtgttttcttcttaatatcaaatcttacttacgagacatatatgtatggattgtttttcaagcgatgttattcattaatgaaattttaaaattttttaaaaataactataattaaatgttcattttaaaataaagttttaataatccgttttaataatccaatcaccgataattaaagaaaaattaggaatttttt

SEQ ID NO: 245861 - DNA, 993 bp, Cannabis indica
agatcctggtaaaataatatccaataccatcaaccttagctccttctaaagtacccttgttccaatttgaactattctcacagttttcactcaatttcttcactgaaaatctcttaccggactggacccattttccaaatcgtttaagctcttagccccatcatccaatacatcgattctttgataaggtttcaaatttacaattggtagttttttaagtggttgaaggtcctttcaacgacaaagaacaactataagtaaaaccatgagaaaaagctactgaagaaagtcaattttttggaatggaagagcgaaggaggccacagatagtctcatgttatacaacgctatcatgttactggtcgtgacgattataagaagtaattaattttcttttgtttcttccattatgctttttggtctatatgatttttctatatcaatgttttttgttcaggtattcgggtttgtgtcgaatggtgcataaattgctgaacatattgatgaagatgctatactgggggcactaaagcagagcttggtaatattaatatgaactaaaactttgtaattgtcacattgactcctgaatttcgggaatgccatgtacttttcctgaacaattttggcatctacattctgaaaattatatcctttagaccccttattttgtagtactgaagttagtatatattctaatcttggacgtttataactttctctccattgaataatgcagaggcagttagaaacacttggtgctgaatgggctgttctagaagacatgctcaaagatatgaagaggaaggtgtgcccgaatttctgctataccagtttagggttttatttcaaatttggtttttcatacaaggctaaatcttttgactatttgctttattatgggatgcatttctcagtcattggataagaattgttaatgttacagtaaataattgttcctgttgacttagctgtttgaattatggtatgctg

SEQ ID NO: 245862 - DNA, 923 bp, Cannabis indica
gttaagagattatctatggttaaactcttcacaacttatcaacggatataaccccttcgggatgaatagtttatcggtctgggcgtggatgttcttatttggacatcttgtttgggctactggaaagagagggattcaaaccctcggtacgaaaaattcatacaacggaatgtactcttggacgaggccctcagaccttccaagaggcgtacttttacgcctttcccttgcacacattgtcctttaaatctacctccaatggaattctcttcagtgcgtattcaaattttaaccatacacccccaaccacacgtatacactacgcaatgtacacaacttaacacccctaaccgcaacacaacatagacacattgataggggctcacatgtgagcgcccatgcatcacgggctcgcatgcaagtccttacacacacacacgcacctgaaacacacacatgcatatgggctcgcatgcgagcccccatgcatcatgggctcgcacacgagccctttcacacacacctattacacaacatacacacactccacgacttgcattcgagcccccgcataggcttgcacacgagcccccaacctaatgcacacacacatgacactcacacacactccatggctagcatggtatccccctacatgtacacacacataacatgcacacacactccacaatttgcatgctagccacgcatatgggctcgcaggcgagcaccaacctcatgcaaacacacacaagacacactctagggctcgtattcatgctccgccacttgcataaaaggctccatgactcacacaagtgctccttgacatgcacaatggcacatgggctcacacaccccattttcacaaataagtgttcttagtatttttgtcataactctcttgatatatgttagaatcg

SEQ ID NO: 245863 - DNA, 826 bp, Cannabis indica
aataaaaataaaaaagagaaatgttaaaatacataagtggtaactagtactatctaaaaaatgtgataatattattagtgtatttaaatatatcaaatttattaaaataattaattatttgcataatattacctttaaatagtgttaggaaccagtaaaacttaaagtaaagctctagaagtaatacagaatactgaaattaataatataggaaatctctatagtactcgcacttaaagaggatgatcgggtagatcttctatgtgttttggcaccaagaaaaaaaaattaatctaatttttttcttattaatgtgaacgtaaatcaaatagtttatagtggtgaaattaagattataagaataacaattgtgtgtgtaataaaatatttaaaatttatttttgcccatggtaaatagctcaaaattttctaaaaaattacaaacgttttttaataactataacatacaagataataaaataaaataatactaaaattttattctgaataccaaaacagataaatcatctacggaaacactcagcttgatattgattttttcttggttaaccggccaagcttagctttaaagtccaaacattaactccgtcgacaaatccgaaaatgtcagtccaaaatcccaaactattctctccacgtggctactaagatctcaataactaaacctttttttttatatataaatatgtatgtataacacacaataatcttaaatgtcaaattgggtttaaaataaaaattgacccaccttataaggcctgcttaacttgagagacttactcaagcttttatttttacacacttt

SEQ ID NO: 245864 - DNA, 511 bp, Cannabis indica
accaagatgataaagaatctgcaaacattacagaataagagcgttgcaacaaaagcataaacaatatattgtggatctgagtaaaaagtatagtacataagaacaagaaacctaggatatgacaagaaattttagtattttccattgggatgtaatataacatgggatattagttctcatggaatttcatggcttcagaaggttagataaataacgaagttgaatcacagatagagaaaagtgacatattagtagcttagtaactagaaaatttgagttttcttatccaaatatgataacctaacaatgatttctggatatgttgcagccactgttcataattgctacaataatcgatctattcaaatagaatcaaaatatagaatctattatcactaatgagagcatattaagaagcataatgcacgagaagttgtaacgaatgcatacttcaaaagttaatttgtcatcttggaagtagtgttcaccttaagaagtaaggcaaactagt

SEQ ID NO: 245865 - DNA, 1225 bp, Cannabis indica
tcgaaccaccttacaagttaccagactatgtgatatggtctcaatctcagccttgcagagatgacgaagagggctaataactaccctcctaatcattaattaagataaagttggacgataatgagtgcctacacgccacaacaaattttttatttttggagaaatttttaaagaccataaacaatttcaaaaagatgtagcagtcacctcatcacaaaggtctttcaaagattggaggagctaatatgcactcctcacataatataaacccgtgccttctttaaacaagcatagatggtctcgtgattgagcaaatcttagaggaatttttaaaatcaagttcttatctctttccacaaaaacatcatttagtatatccattgaccctgatcaaattaacaaggcatgttgcatagtagggtgatctgagatcaccataggttgaataaggtcagggagccactactcaccccataatttttgtctcagacctgtctccgacacaccactgcactctaacacgaaccagagattgagcctcccaaacgctgtgccacacaaagtttggattgttcccaagataagcagaaagataattccccccaaggaaataatgagctttaaaaatgggggacgcaagaggatcaggcctagtaataaatttgcaatcttgttttcctaagagagccaagttaaaattatgaaagttatgaaaccacataccaccattacttttatgatgacatatgggctccaaagacatccaagatattccttttggtatcaccatttgagtttttttcacaataatttggccaataaacttatctctactgatatcccaagggagtaagaagatactcatagcataactaggaagagattgagccacaaacttaatcagaatttctttatcaactcttgataaaatctttgattcccaaccttgaagcttcttacgagcatgatcccttaagtaaattagaacgactaatttatttccccccatagtgctaggtagacctaagtacacacttctattatcagcttggaacatttgtagcaagtgattaatacttgttctacaattgacatcagtattcaagctataaaaaaattgaatatttaaccaattaaactttttgccaaaatatgagaagctcacgaattttccgtgcctcttgaatatgggcttttcaatactattaactatcatctgtaaaaa

SEQ ID NO: 245866 - DNA, 1234 bp, Cannabis indica
tatgtatatgttaattatccataattacaaattaatttcataatacaattagaaaatttctattattgaatcttaaaattttatgagttatgatatattatttgcataaaactattgtgtagtttgtgaaaatttcatgtttaaagttttaggatttatataattatattatgaaatcaaatttggatttttttcattatattgattaatgaatgaaattgattgtgtaaatctcattaccaactaatttaaaatatatttacatgatttaatttgaaattagttgagataaatgtcataatcaggtgtttttgtttttagattatacatgctgatctcagatttcagccaaccaacaacaaagtcgtatttaatgctgatgtttaccacgtgttgcacaataagactagaagagtaaatgagacaagattttataaaggtttggtccccttagttagtgggtaaaaacctactccccttttagttttattaatacaagagataataccaactcagattacaagggttgtggaatctggagtggctctcttaagattacaatgtgagaattaagttggcaaattttaagtgagagagagtgcctagggcatgtgagagagaagtgaatggggtgtttgagtttcagacttagagcttgagagctttaggagcttagagatttagaacttaggaaactagggtttgattaattcccttcatataatagagcttacatccagattatcccttaaagataggtaaataaagttatatttacataattaaacaataaactttaaatgagttaattattcctagataatagagaagttactgatactttccctatattttcgtgggttgtcaaggcccaactcggagcttcgcttgttgtccacagatgaaggctacgcaccaaaggcctaccaagtaaagactggctggccatgcatgtaacgctctaaataattcggcaagctacccaagttatttacgaaaccctaatcccctaaacagggttactaatcaaaatagcgcagaatttaaacttttgtaataaacaaaatgaaaataaaacttgtaataatttaaactttacaacagttgggatcccaaaaatatttacaaactttattacaagtctctttcagttagccggcctaagcggcaaaatagagtttcaaaaattcaacacttgtagacccttaacccgcttggtttgatatgccccgga

SEQ ID NO: 245867 - DNA, 946 bp, Cannabis indica
ttacaaaataaccgactctgtaggtgtttttattaaaatttcattcagtaacactctatggcgtcggttgatcattaatttgcagaaaaagtgcctataaaagcttgttttgtagtagtgtacggaccacccatgcaacatcttattttttcggtattatacaacctcggtccttacctgccaaataccccaacacataacagagatacgcctaacagtatccacatcattattcatccaatactcctaataccaacttgagaagcgttagaattgtaagatacatgtggttctattttaaaaccaattggcaagagtagctaatagatcttatatatgttattatctattcacacattagtaatataagactctctaacatcttttctgaagatggtggctattttttactcacaaagcttggatagttcgatcacaagttgctatttttggctcactaaccccagataacaagtggctcgtttggctctactttttggactaactttaaatttttgctggatctttttcactcatgtcataattacaaatgactctttttagcttctactttttggaccgatttttaaatttttggtggctctttttggttctaattttttcgatcaactttttttggatcgaaatcacgtaataggtttttttttttcctatgattccatgttagaattgtttaatacatgaggttccatctaaaaatcaattgactataaaaggggtagttcataaatcttatttgctatattatctttccacacattaataacacgagactctctaacaaaaaaaaaaagccagcacccttgattgaagcaactcttggtaaaaaaaatactcaactaataataagctatgaaaaatagactcatcaaatattacacatttaataaatattataaaacctaactagccattgaaaaagttt

SEQ ID NO: 245868 - DNA, 907 bp, Cannabis indica
aggatgctaataaaacatacttggtagtaaatctagatcctggtaaaatatttctaacacttcaaccttaggcgtggttcgttgtgtttcgctcatcggggtttgtacgagccctttccctatgggtttgagaagaatattggcgattcctcgctgatgacctacgtgctcaaggttgtatcccaggattttccttgtgttacacgatgaatttcctgttccctagtttctgctcgccttctattctcatttctacgagatggttctggttgatcatttggctgctcgcttttagggggagcctcagtttccctaggttgtccttcctgagcatctggggttcccctcagctgtctcctgccccctagttcgtgagtcgtgaggtctgcctcgtgatcctctctctctagggtcaggttgattttgaatattattctcccgtgtcatcctggtagcggctgcctcatgctctaactcagcatttcgacagtttgcctccttcaggcggcatctgagttggcaattttccaactcaacaattggtatgtattttgtcggatcataggcgccatcctcaccaacttgattcagaagaggtctaccaatgttcattctaggtttttcatgccttgttcctggattctgggttctccttgaacttgtggacagtatgcctgggccaccctcaggctgggttctcctgagatgagtggtccgttcagattgtgagttgaaaggcctccgggagcccattggctctttccaggcggaaagtgatttctcatgaggtgtgtcaacattttctctgttgccagccatgcagaaaaattgtttttctgtaatgtaaggagggttttttctgagattttttcataaaggctcttaatggaagcaccaaactgttaac

SEQ ID NO: 245869 - DNA, 3085 bp, Cannabis indica
ggtttgaaactagaaggaggaaaggaagaaagggggttcggctgctatgtttgcagcaagaaggaagggctgaacaaagaagaaatcacacaagtttctgccattgaagagctgctgctgcagcaagaagaaagataagaggaaggaggttcggctgaagcttctctttgagaagaaaggagaagtggctgctagggttaaaggagaagagaaagtgttttggctgctagggtttcagccattaaaagaaggctttatactaccattaaatggagtaggattttgagggaaaaatacattattatccgccaaaggggaagggtcggttttgctcttggttttttgaacgttgggtattggtgtaggggaattttcggaatacattgatttcctacaataataaatttgatattctctataaattatcctttgagatgttggtcttttcttacaaccaaccaaacataatatattgaatatgttgatctttcatgagagtaaaaagtgtgaaagaggtagatgaaaccccatcccaaaaaaaacatatgatatatccacaaacaaaaataattaatccaacctccattaataaaaatattatatgttcatgtaggactaatttgcataatacattattatgtgataacgatacgatttaattgtttatatatgggactcacaaactattgatgattgagaataatggacaattaccacaattatttgcaccaaaatattattgggggacatatgctttgtttcgttatggttgtaaagtatatatttctgtttttttccctctagctaatatttctccaagatcatcaaatcaatgtataatttttttgaatgaagatgtgataatatatacatcatattataaaatctctatatatatgtatgtatgtatgaattatgatggcacattaacatatatatatatatatatatttattgcaagtgtgttatacgatatataatcaagcctgaaagatataatttttttgtaaagttatttttaatcacacttgatactttatgtgaaacgcaattttacaaatattgattatcaattattttacaaatatattttaataaaaaattacaatagtatatgtttacccaattttgttggaaaccgaatttgagcaaaagagaaatgtgattagaagtaaagaattataataaattttacgtggttggagcgctgaagagtattattaatccacgagtcaatattattgaattttttagctatggagtattttacacaagaatagtcttgccaaattttcgaactctttgcatgaatgtgaagagccttatttataggttgtattcggttcgggtaaaactgaacctgttagggtttgcatgtgtaaaataagcctactgatggggtaaaatgtaaaaatacattataatatagattgacttcgggtcggtacgtgaggcccaatttgaggggtaactgttgtccgtacggtgttgcaccatttgatggtcatagctgtgtgtgccccgtcgatcgtgaacagtgaatatcaaagtagtggatattgtacaaatgtagtttgcttcttttgcgtgcgccttttctaggtctgacacaacaaggaacaagcccctgattcttagggattttgtgtcagaggcatgacacgtcagattgatctcagatggtagacgctctgtgatacccttctagtaatcctttgagatatccctagggatatctactatttgtctatgttttctcgaatatgctcgataatttggttgtgtcaaacttccgaatctacttgtctgactctattcgtgataggatcgtggttgaatcggattccaattcaactttgtttttggaccgaactactaatttatttgggactagtgaatggacctacaagtagatttcggctgctgaaatttacacgtattatactcccaaagacacacatacctgtatacattagaaaaatgtaatcaacaaccatcaaaattaccattgaaacaaggatatgtgtattaagaaaaaaaaacaaggatatgtgcattaagaaaaaaaaacaagcatacgtgtagagtcgtcttaaacattttagaggccctattctaattttaaaatttgggtcctataaaaaaatacaatttataaataatattttaaatattatcattcagttatatattttacaaaacactaaaaaactgtaactatttataaaaattgttattgattccaatagaacaaaaaaaataatagaaaaaaaagaatataaaaggtttaaaaaaaataataaatagcagcaattgtttatttttttttttttttttttttttgtcttaaaagcatttatagaattgaaaagtggctttgggaattggtatggaagtgattaatgaaaaattgttagccccttcaaaagttaggttctttaaaaaaattattgagcattaaagaaaaaaagcattgctattaggcaccaatggtgcctagtacattctcgacatgtcgcgttgcgattggctagcgatactccctaaaaattattatattaaattatatagaacccgatacttagttggaccaataacaatattgacacataagagggttctaggcaccactggtgccctttagcatttctcaaagaaaaactatatttggaccttttatttttctcggtcatgtgtaggggtgaggaaacaatccaagaaactgaccaaaccgagtacaccgtccgtccaaacaccgaaaaaaactgaaaaccgaaaaaatcgccttcggttaaaatcaccataacatggttggttttagtgtcaatagcaaattgactgattaaaccgagaaccgaccgaacatatatattatatatattatttttgtacatatttaatatacaattttattaaactaattttacttatatatttttttatttaaaatctcaattattcattccattattttattataatttgatgcatttacgtattatatacacacattcataaaataatacgagttttttaatataactgatcattaccatattagtagcacaaataatttgaacaaatt

SEQ ID NO: 245870 - DNA, 615 bp, Cannabis indica
agggacgcctctctaaaaggagtaccgatcttctaacactcgaaatgtgctctaagtaccacaaatgcaacgtaaagggatgaacgctacataaaaagccacaagttctcccaatacggtcttaaatttataaaaaggtcaagtgtgacctaaggagacataagctcccttatacccgacgagtgacccataaaaggttgagaaagctcaacgagctaaaactccttcattacggtaaacacaaacttcaaaaggggctaagataaatcataaggcctacgccactcgcgaagggtaacaaaaggaagaagagaaggaaaaattaagtcgtcaagataaaagctcgtcaaacttagtctacaagaacacttaaagaattcttatagactagggggcaagtgttgaaccccaaaagattactaagtgtaatatttagagtcattagtgttatgcctgaaaagttcgcaaaggggagctccatgctacccgctcgcccaaccatcctgcggatagcctgctcacgtgcccagccagcctacccgcgcccagcccgacaggcaggcatcctgcccgcgcccggccagccaaccaaccaaccaactgttgggttttatg

SEQ ID NO: 245871 - DNA, 1806 bp, Cannabis indica
acctcacttttagcaatcaaatcaaaattcttcgaacttttttatgtaatattttttgattaatgaaaccattgaaaaaaacaacaacaaggcggcctgacggccaaaagagcccagcctagctgggacagaaacaccacaaaaacaaactacaggaaaaccaggaacactaacgaaacaaagtcaagcaaactgcataaagcagagaaaaaccagaaaaaaaaaaccgaactaaatctaagactaaaccagtaggaaactaaacagaaaaatgaccatctgcagcaatcaactgcaggaaatcatcaaaattgggcacatccaaaacgccaaagatgttgtttcagtttgcccattgagccacggagtgggccacaccattacacgagcgaggggtccatataatctcatgaatgttgaattccgccgagagttcgatgaactttttaaccttctcttgaatgttgaaatgcagtttttgtatatcagaagtgttgcttttcaacgcactaactgcattcagcgagtcactctgaaaaatgacattcctgtagccaaattttgctgcttctgccgcaccttcaatgattgcagagatttcccctggcagcgggtcacagtgattagatctaaacgtggtgacgcggaggatagatccagtcgtatccctgaacaccgcagcccccgttgcttggaattggccaatagcaatatccgagttgcaagcaatccaacctaccggaggtggattccattcaatgtttggaggattggtagactccttaattgtgtccatttcatggaatctactattaatgtattctacttgcactttcaaggggatcggctgcttaccatggagtagtgagtttctttccttccatatgctttcgaaaataattgcagcacctcctaagaagcagttgaggtccattacatgaggtctgttggccgccacaatgaaccaatcaatccactcctcccaatttgagatggaagggatagaagttctcacacaccacgagcatccaaaccagatggatcttgcaactatacagtcccataataaatgaaagctactctctatataggatgagcagaaaaggcaattcttgtcagtaattggaaatagggaaccgatcttgcctttggtggggaggctgttggataagattcgccaccaaagaaatttcagcaggttgtgaattgatgctccccaaagaattctccattttctatccgaatgcacatcctgattttgagttgatagcattctgcaagccgatttgaccgagaactcaccattcggttccggaagccagagccaagaatcattcgtggtggaatcggggagagaaatgttgagaattcttttagcatcatctcttgcgaaccatttccgaaccatgtcttcattccattgcttgtttataatgaaattactaactaagctcactccttcagatgcttctacacaaggcattggttgtgtattatctccaggcacccaagggtcaaaccaaatcgaagttgcctttccatttccgattctcctgcaaattcccttttgaaatttgtcacgaatattgagaatggccttccaaagtgttgtatctgacagtttcctctccaaatcaaagaagttcgagttgttgatgtatttgttgttcatgagttggcgccacagggagtcatcattggttagcactttccaagcccacttcataaggaacgccttgttcataatctccgtggttcgaaaacccaaacccccattaccttttaaacttttatagatgtatataa

SEQ ID NO: 245872 - DNA, 839 bp, Cannabis indica
tttttttttttgttaatttaagaaattctgaatgtgagttgctcttgctctaataactatgcatactaactaattatttaatcatattttagcagcataaataatattttaaaaaaattctaacaactaataaaatatggaaaaatttatactaactaataatttatcgtattccaattgctgtaacatgtctgttctgtcttgctgctcctgagacgactctgcatgtgctagtgcgatgctcttttgctcaaagttgctggagcaaggttccaattactgctgtggtgcctgatgcaatgttgttctcaagttggaagcgggtttggcatcgtggaatacggctgaggctcttaaggctggtatggtttgttggtcaatttggactcatcgtaacgatttggtctagaactccaaacaccctaatgcgagggaggtagtggcaatggctcagttaaattatgttgattggtttaatgttcaaaaacttaatgccacagatgtaagcttaagcgggccaactgcactacccgtggagcaatggacagcacctgctttcccttttgtcaaagttaatgtggatggtgcactttttaccgaccaagagcggtatggtctgggttcggttgcaaggtctgctgcgggttgggttttgggagccagaagcttatctagagaaggtgctttgcaacctcatattgttgaagtcattggaatcaaggaagctctctcttggagtaaagcaaatgaatggtcacatgttgtcgttgagtcggattgtttaagggtcattagtgatttgcaaaagttcaaaaaatatggcttctccttatggccat

SEQ ID NO: 245873 - DNA, 848 bp, Cannabis indica
aaaaaaaaaaaaaccaaaaatcaccacaaccaccaccactactatcaaaaatgacaatctaatgttttcctcttcaccacaacagatcaacactaccaccaccaaaaacataaagaagaataaaataaaataaaaattcaaaaaaaatgagtctttacaatcagaaatacccttacatttatccaaaaaattttacatgaaaaaaattcatgtcttccaatcttatataatgaatacccatataaaagtttcaaaatttttaacaaaaaaaaaaaaaaaaaaaaaagaaagagtccttataatctgaaatacaacatgtgagaaagtgacaaacaatggaaatgggagtaaagaatgagagtgtgagagcaagcagatctgaagaatgtgagagagcatatttgagatggtgaacgatgcatacgatggcgatggcactagaaaatgacgatgggatctcaaagcattggcgatgtcaacgatggtgggtctcaataggtctcaggattcttggtgatggcaaggacactgggatgatctcggtgtttttagtgtttggggtctcagtcatcagcgttggtacgagttgggcaatctcgaaactaggcttagagggaggctgagagggaagaagaaggagaagaaggaataaaggtgggggtgtgaatttttttttttttttttggctgagaaggggtggggagttttttttttgttagaataaaacttagttattataaactaaacagagaagtcatttacagtaacagagtttagtagatggagggaaagaatccatccaaaagcaagcttcatccaaccctaaacgacatatctagctaaataat

SEQ ID NO: 245874 - DNA, 986 bp, Cannabis indica
ggcataaaacccaacagaactaagtgaagaggtttacatgttgcagcctcctagatttgtggatcccaagaaacctcacttagtttgtaagttgcacaaagcattatatggccttaaacaagctccccgcgcctggtttgacaagctaagaacagtcctactatctcttggttttgtatgctccaaggcagataattccccatttttgtgcatctcctctcaacatataatttttgtcttgatatatgttgatgatatattagttacagggaattctatcactgctattgactctcttgtgtctaagctccatactccttttgctctcaaagacttgggtgaagttgcatacttccttgttattcatgttcatcacacctcctcaggtcttcatctcagtcaaaagaagtatatccaagatttgttatcgagagtcaatatgcaagaggcaaattcattaccaacaccaatgcctggaggagaaaaattttctgcttttggtagtgatactatgtctgatccttatctctatagaagcactgttggtacacttcagtatgctaccattacaagactagaaatagaatttgctgtcaacaaggttttccaattcatgcaaactcctctggaatctcattggaaggttgtcaagaagattctaagatatctaaagggtaccattgactatggtctgcatctcacagcaacaactgatctctccctcactggtttttgtgatgctgattgggcatcagatcctagggctgtacattggtcgatttagtcggtttatattacatattttccaaccaaacgtaaaaatcgagttgtaaagttctgcatgcaacttgccctaatttttttttttaaaaaaattcttaacccaactgacggtttgggcggtttggtcgggttaacctgcccaaacccaaataaaaaagagttttttttttgtagtttcaactaaaataaaaattaaccacata

SEQ ID NO: 245875 - DNA, 658 bp, Cannabis indica
agtatgcctcccaagggtggagaagtaatggagttagagatggaaggagtatggaaagagatggagaagcttgtggaagagaaccttgttagacacattggcatttcaaacttcactctcaacaaactcaatactcttctctcctttgctcaaataaagccttcactctctcaggtctgattatccttgcaactaggactcactcaatttaggagtttaaaaaaataagtttttaggttaattaagatttttttctcctcgaatttagacatgtaccaaatcatgtccattgatttaagatgttgaaaattctttctaaactattaagattgttaaatttaaagacgtttgtctaattttagtaaaaaaattctaacatgatgaaagttcaaggacatgatttagtatatatcaaagtttgagggacatgatttagtagatatcaaagtttaaggaacttggtttagtacataaacaatcactaaaaacgtaaaattgaattaaattagacaagtccttaaatctaacaataaagcacaaaggcccacattgtttattcgacgacaatctagcatagtatcgtgtttattcacattattcagcccccctaatattccaactgagaatattacaaaaattcatagagacttagtagggg

SEQ ID NO: 245876 - DNA, 1366 bp, Cannabis indica
acgtgctaacctcacctagtatcttaaaaatttgcttattattttttttttaaagtaaagagttgtacatataaataaagaaaaagttagacatctcggtcattacgaaagatatagtcaagtatagaagagatctcaaccatgcccaaaatattctgagcaaaagcccacctagccacattatgggctgcaaaattacaacatttaaaaataaacgagaaattacaacttaaaaaccgattagagagttgattacaaataaaaatgtaattatcaatagtccaacttgaataagttcccttcagagcattaataaccttctccaaatcactcttaatcagaacaaaaaggtgtttcttcaacacaaccgattccaatgctactcgacatgtcatagcttcaccaatcagaggatccgcgaaatcgagaatgttagcttctacacacaaaactgtccatgtatgatcccttgccaaagccgccacacacatggatccgctacataccttaacatcacaattgattttaatccaatcttctggaggaggggaccaaacaggggacacaacagccaaagctggagcaaaaatgcaagctgcataatctgtgtaacaaatagagatagaatcaatagagtgcttaatgttactcaaggagttgttatgtacattttcgtttcgggtcttccaaatcgtatttagtacaatcgatgcatataggaacaacttgtcagtatccactcctttcaagttcaagttccagagaaatattaccaaattccaaacacgagctccaaattcaaaaatcggaataactccccaaggggaagacctccaaagatggtacgcgaagtaacaatagaggaagagttgctccatcgattcctcacccgccccacaacgaggacaagaaaccttctcaatactaattctctgagcaagaaggacacaggtaggcagggaatttgaaaggatacaccaccagggtaccttatgcctctccaaaattttagagttccagagtttgttctacaggacgggggcaacaacgcagtcaggggatctctcttaagcctagaccagataagcagacttagtagtaaataaaccattagtctctttcgtccacacccacctatctttaccatggccacttggtttccccctttaatgatgttacttattgtttccgaatcaaaaagagttcggagtttaggaaagtctaaatttccgttatctcctctctattatatattatatatatgaatatataatagagaggagaagagagcaaaaaacaaatagaaaatagaggatgaagaagaacacaagtaagcaaagggggatcaccaaaggcttgaacaagg

SEQ ID NO: 245877 - DNA, 1728 bp, Cannabis indica
tttcatgaattctaccatatacggttttgctatctgatcaatcggctgattaaacagtttgggacagtatttgtctgaatggcctattatgccacagataaaacaaaatgtaggagtcctctcgtatttaaaatttatccaaaaccaagtcccatcatcctttgtgatcttcaaacgcctgcgtaatggtttttcaatattgagagtgatcctcatcctaagataatccctccatactccaatgaaattcttaggatcagattccaagtattttcccattgtattcccaacttttcggagagtagtttcggtcatgaaacctggttccacattgtgtaattgaacccaaatatccaaagtattcaaaggtagtgactttggatctccaccaacattaagcctttcaattatcaattgcattcgatcataagtccaaggacttccattgatcacgcgttggatatcaacttcgtgatagaattggaataaaaatcaattagtatccaattgtttaacgaacatccccatccctggttgccataaagaagcgagtatgttctgtattttttcaaaatcaataactcgatttgataggaatttgccaaccaagcaccaccggtcatctattccttcttccccatcacccgctgaaaccagaactgcttctaagtcttcttcctcaatctgaaatcgtaaagtgtcctcctccattgcttcggtgtttcgactggacgacgccatcctgatcagcagaaccagtacccacaccaaacccaacacaaaaacactaattctaacaaagcttcacaaacaaaaccaacaatacatacgatcaagaactcacaaaaccacccaacctatgacaaagaaactaaagaaaccatgtcaatagacatgaacttttttatccattttctatatatttgatatacatgtattatttatattttttgtttagtgtatatatatatatgcatgtatatgaatttagtatatgtgtaatgaatatatatataaatatatatttttgtcaagtgtgttctaactagtaactagttagataactagttacataaatttggtaactagaaacaacaatttttttattattattatttgcgtttgttttttggctttgaagttaagcatcactgctaaaaaattggtttttgccgacagttttaaacagtcaggtaaagtattccaattaatttctataactgttgcctattcgatgtcgtaaaatgggtggaataggcgacagttcaaaatagttgccaatcaagcattttcaacgatttaaaatcgtcggctataggtgacagtttaaaactatcgactatagtatagctgacgattttataccatcaatggattccattaaaaaaaaaactatcgtcttcatcctcctcgaaatcacttctcgcatatgtcacagccactccaaaaccttttcaagcttcatccccgatcctctaccatcactatcatgtggtcgtcttcatcctcctcgaaacttgctttttccaagctttggattactttttccttaacagtcctcaaaacttttttcggatttcaaactttgaatttcttttgcacacacaaatatcaagatcaacaaaccaaatcatggctaatagaaatttaaaaaataaataagcgaatgtatgctaccttttgttgccataagagagagagagagagagagagagagagagagagaga

SEQ ID NO: 245878 - DNA, 642 bp, Cannabis indica
gagcataaaaattaactaaaaaattataatagaagcttcacaataacagccttaaacttttttttctctctttggatggaagaaatgaattgtgagctcagagctgtgtatagtaggtggtagtagtcctagtggagattattttgaccatttaattattaagtgggtcagtgttgaaatttccactactcgtcctcgtacgaacaacgtttgccctctagttataattagatatgtattaattattacacatgactaattgcaattaataaattaatgttagctcgagtcgtatgtgcttatgttttttattaaatattacaaaatgagtatttttatttatatttgtgaaaagccaaacaaaccaatttttatttagaggtttgtctctcatacgtatatataatcacattaatattacaactattacattgtaattgtagtgtgaagcaataaacagaaaagtatcttctctaatacattagtactttatttagaaacaaaataactttttaatttaataaatttaattatgtacccaaataaaaataaaataaataaataaaagtgtactattactaaaaggacagaatttgtgacggttccaatgacaattttttttaagtactatcactcaaaaat

SEQ ID NO: 245879 - DNA, 1451 bp, Cannabis indica
cttcctttgatacttgcatggaaaatagcaaaattttcatcactcttccatgtaagtttagctttctgttggagaattgagtggtaatcttgttgtttctgtatcaataatcgcctgacttcagcttctttctggtgcaaagttgagttgatggggtcctgctgtataatattctggagttcttctagctcagcctttactctaattttctctgcctgtaagtcattgtacccctcctttttgatttctttgaacactctttttaaatctttgagctttgaaaccaactgaaacattttagtgccagtatatgctgcatcccatacttctctaagattgttaccatactccttatgagacctccacatccgaaagtacctgaaaggtttcttccccgattgagaaaagggtgcaaagtcagtaaactaggtgagtgttcaaaagtgccctcatttgagtaaagaacctcagctgtagaataagtgtccaaccatgcctgatttgccaccatcctatcaattttagagaatattctatcctcaccaaactatttgttgctccaagtgaagtagttgccagtgtatttaatgtcttcaagagcacactgttcaatacaatcaatgaaatctctatctgcatggtatttgactctttggccaactctttcttctttagccaaaatctcattaaaatcccccattatcacccatttttcatttgttttatacccatgcaaagatttcataaggccttcctaccatatctatcattaaaagcatagatcatggtaataaaacaagtgaagtgaatccccatagtttggacatataaatgcattgtttgacttgtacaattaaggatgttcacctgaaacacattagtattccatgccaatatgattctacctcctccatgccaaggaagatttgatgaaaagcaccagcctgcaaaaatgtttgagtataaagcccccaaattgcgagctttgacccttgtctcgagaagccctactaggcctacactatttgacagaataaaatgcttcatttgtccctgcttgtgtatgttattggctcctcaaaaattccaacaaaggatcatatccatttgcaaaggagggtcctcccccctcctttgtgttaccattctgttgcaatacatcatgtgtctccaatatgtcacctattgcctcctgttcactgtcttccaaggcctggaaagtgttctcagtttgtgatacctgactcttctcggcttgtgcaacttttttccctttcaccacttgctgaaatccttcatgatcaacttttggagcctgctgcttcttgtccttcttaactacccattgtttcttagtttcctttttctttctacattcctctactacatgcctcaaaccgaagcactgcctgcattttgttggtttccactcaaagtgaatcccaacatga

SEQ ID NO: 245880 - DNA, 523 bp, Cannabis indica
tccaacatatggctcatgtacatccttctcaaagcacaactcagttcattgaaaaagtaaactaaaacaataattaaggataaaatatgatagtccaaggcaagttcaatcggaagagtagtggacttgtacatatttgacatgttgattatatgatatgctttagtaaactctattttcgccagacaactttcaaggatttgatcaaatactataaatataatacatcattggaaattgtaattttagaagacgggaataaagggtgtttgaataaaattaccttggtatctgtgatgtctccaacagcgaagacatttaaatgacccttgaccctgaagtgctcatcaaccatcaatcttccatgtgtgtccacacaatctttcagaacagtctcagcaagccaagatgacgccactggtttaccaatacacaagaaatggcaatctgcttttatagtttctcccttagacgttttgtaaacaccgtcagttataccatccagattaactgattgatctaa

SEQ ID NO: 245881 - DNA, 986 bp, Cannabis indica
ataattttaaaaaattactaactatttttgagatgtttgacattgtgcacaatatcttatagcaatactcacctataatatgttggactagatcgagtagaacttatgttgctctcaaagagaaaaaataagactatatagaattcaatttatgttagttgaaccttgccaaaaaaattatgttggttgaatctttctattgggccacctttgactgcctattaatttagactttaatggatctttttaggttaaaagtgatttgtatgtattatatttgtttcatgttttttttctagaagaatgcatatatgtatcgataaaatattatgatcgaaacaaaattacaaaattattaagaagtggaagaattttttcatcgaaataaatttattgcttagcctaagaaaatataattaattcaatttatgatgcgatttataaatattatgactgatggaagaaaacatgctccaaaagttacacaatataatttgttctgaaatcataaaagaaacactcaaaataggaagcttgactttgctctcaaatgagtgtcaacaaaaaagcaaaaatatctatttggattaccatataataacatcctaaaaatcaaaagttaatttttgatatcctagcaaataaataaataaataaaatttttaatatatttttttaaaataaatttttttagtaattatatagtgtacgtaattatacataatttcatgagatgagagcgtaattgacacctgtgcaactagttggtcagacaaacatataaaattgtgtaatcaccttcaattacacctaatttcaattccttctggtttttcaaacttaaaagtgtgtttgaaagtagccgtgtaattattaaatagtgtaattactaggtataataattttacaaactaaagtaattacactctatttcaaaatactatgtgtatttcaatgtcaatttgtaattacatatgaattcttat

SEQ ID NO: 245882 - DNA, 1003 bp, Cannabis indica
aacttttgttttcttccctttgtagaatttgctgctgaggaaagtaacatcttcataggcttagtttcaatccctttgtagaagattcaaaggaaaagtgaaaaaaattacaaaagaggattgtttggtaaatttatccttgagccaaatgtgtgttttacataagtggtcaaacaatagtttactatgatgagattttatatttatttattttttttttgaataaaagcgaacttatcataaatgataaatatggttagacctcatggttattactaaataagtttttccgtatggaatctactatgataagaccaaacatctggtaagcaaacgcctatttagctatattatgactttatgagcgacaaaattataagctctactaacgttaaaaaaattacaattaataaacaaaggagaggacttaatgagattttgaggttggttatccaaaattatgctatttgggtgctgaggaatctttcttaatccaaaggctttctcatgattcattatgttatgagaattctcatgtagttcaaagcatatttgtcaattctagttgtgtgaatatgaggcgatcttaaaatgggaaacaatctcacttaatttactttatacaactatttatggttatataatgtaatttgcaatcttttctgcaaccataaaagattattttactaataagttttttttataaagactatttttatagaacactctcttaaaatccaatcaaaacaattaggtgcgtttctaaatttgaaatatttgcatgtaaaagtgaaagtactcattttattacatttgtaatatttaaatgttcattttttttttttttcaaggttttggtgttacttattactaattagtattgatatatgcacacatagatttatattgcatttaattttaactattcatcatattttacttcttaaaaatgacttgtaacgtaaatatatacagtagaacctctatttaagaatactctatt

SEQ ID NO: 245883 - DNA, 678 bp, Cannabis indica
tttaatttataaatcaaatactcaaaaccaagctttttataaaagataatacttatgtataaagtaaaatgttgatgggagagagaccatttgttcaaaacaagtcatccttgaactcatttttgttaggtaacctcacaatgatcctaggaccgttagtgtgggtaccaaggcaataaaaacctcctgatccttgcttccttgcaagaaaaacttttatagagtagaaatatacttttttaagggagtaggacactcccatcccaaaataaggtataaaacctttaagcaggctaaaatcctgtaagaactcgaaattaactaaaaaggggcaattctgagataattacagaattccttatagtactatctcaagaggagtactactttcacctgatgtgctcgtgggtccaagcccctattcaagatgagctactagtactagcttcaccacactcttcgtgattactctttctggtggaaagcagctaaattcccttggagcgacatacctaatgcgacatcctctctcttgtttgatgccacaagagtttactacattaccaacacaagcccctatggatcttactttggatttgatgagttttgcctcaaaactaactgtaggatcttcgggggactttgatttactagcttgagtggtcatgatttcaaaat

SEQ ID NO: 245884 - DNA, 611 bp, Cannabis indica
aaaaaactagtagggaggaaagagtgagttagtttaactgcttttatgaaatgtgattaagttttaagcctttggtttctttatatatttggtattgatatatggtccacggtcattaatgtgttcttacagtatcttcacgtatttgtacaaattaaatcctttgacaaccatgcaattaatttataaaatcgacaaaggagtcattgacaggttggggtgtgattgatattaatgttacatatataagtcaatgaaatatgtcaaccctatatgctctagttaatgtaccaatattatgtttgtctaggaaatttaggtaaaaatctagatgagaaagaaatgtaccaatcctatattattggctaacatttcagttgctttctttctactcattcctattcatagggaaggtctattggctcagattaaagatggtgagtcttgaaaatagtacctgcaattaggtaactactgctcattatgaatttattaacaatgacaattgagctagtcattcttttcagcccaagaaattgagaaggaaaaaatgaaaacaaaacagattaatagtcagttttaagattacgttcatatctttaaatgaaaag

SEQ ID NO: 245885 - DNA, 660 bp, Cannabis indica
gtctttgagctcttctgaaagcatcatctctatgctaattgaaaaaatgtatttttggtcaattaaaaatagagtacttgggacatatcatttctcagtaaggggtagctactgacccccaaaaattttctaccatgtttgagtggctaacccctaaaatcatcaaaggccctcgagggtttctcagtctcactgggtattattgcaaatttgtagctaattatgcccgtacatcttagtttttaactaatcaactgaagaaagaccaatttaatggggtgttgaggccgagcaagctttccaacaacttcaacaagccatgatgaaggtgcccatttagcttaacccgatttcacttagccatttgccattgaaacagatacattgggccatggattaggggatgttattttacaaaaccagcgtccaatttcctatttcaattaagttttgggagtacaataaagaaatacatatataaaaaatgaacttattgccattgtctatgtagtagctaaatggcgtccttacctattaggccgtaagttcgtagttagaactgatcaacaaagcctgaaatatctcttgcaacaacaagtaatcagatttgaatatcaaaaatgggttttgaaactaatgggaatggactttgacattgaa

SEQ ID NO: 245886 - DNA, 920 bp, Cannabis indica
tatacttattggaaatcaaccaaattgttagaaaaggataagcattaccaaatgatgtagagctttaatacctacctttttggttaaaaattgtatgtttgaaatgactttaatttagccgtttttaattactttttttttgttttaatgagattctaacctgagttacgagaggcaacaagtgtcgaagccagagctcattatcctcaagagaaaaggcagttatggtgtcaggagcaccaatgtggataagaagaaatggagcccaaaaggcttgtatgatgtcgtctgctttgttattgggataagaactgtcgtccccgcccgaataatcgccattttgtttgctggaattgtggccaacagcgaagctcgccgcccaatcaggaagcaaataagacatcggaagtaagaaaatgagaaatctattggaggtgcgttttctgaagggagcaaccacaattagaaatgcctgtcaggctaaaaagaatgatccctctaatgttccactccttccatatctctcgaacactttttgaaattggagtaaccattttcttcgatctccaaattatgctaaattttaaacacaaaatgtggctaaatttaattatgattcaacgaaaaaatatatttaatctaatagcaaatatgatgatttctgagtgcgaaattgttatctaataattataaaagtattgtaatattggtacaattttttcagtatagacgcgctgttagtgttttccagattctaaattattaaatttgcacagaagtatgtaatatgagttactttttgcattctttcttttgataaactcaaaagggagtgtaagaaattgataaaaactacacttttaataatattaggtaatatataatgctaatgaattaattaatcataagaaaagatgtac

SEQ ID NO: 245887 - DNA, 1457 bp, Cannabis indica
attaaataattaattaacacaaaaataaaaatttaatagggacatgaacaagctaggtgcttgccatttatctttaggacaaggatggtgccttttgtcctaacaacttttgtcctaacaaatcttgtctcaacaaattttgtcttaacaatttttatcttttttcctatttaattaatatgaaaaaattatttatttatcacaaaaataaataatttatattttcccaattcaaaatagattttcttcaaacatcgtaatacaactttttgtccctacccttgacagtatttcaaggtgaaaattcgaggaccatggacctataattctaagctccaataaactagattatttattgaatctcatcaaccaaataatcactggtttattaattctatgattactccactataaatatgaaattacactcttagtaattatagaattgtgtttactgagtttaactgcattgttcattttacctccagtcgtctcttcacttttgggggaaccttttttacctccaggacaaaccatcttgtcctttccttcagagtactaatatagaatctcttgatcaaaggagtaaaattatgtgcatggagctcctggagggccttgttcatttgggaacaggagagaagcccagtagttagcacccctcactaaattcaaaaataaagattgaatagggtcccttaactgctgagaagaggctccctccgaatacaacgatgcatagattgattgggttgagtatcgggcaccaaatgcaccgtatttgagataaaaggcaatgaaatgtgtgaagaaagtaaaaagaaggaaatgtgcaaattttcacaaaagggaagcccaaaacaatcggtatgcgcaagcaaaatgggcaataaaaggtttaattatgaaacaacactcttgccttcgaatatattcacagagctaatattcataaagaaagtatacacatataatcaaagtgcactagatagcagttacagaactgggtgaacacttacaaaggtgggatcgagatgagggtgatggcactaacaagcaatggcagtaatacaaagcttggtagagtctaaggaaaagtatgagaaaatctaacttgattgggaattcttctagtttgaaactataaagaaatgaagcaaaaaaagagaagtatgaaaagtgaggagggaatcactatttatagctcttaggtcacgatcttggcatcttgatgatcctacggctcccttcaaattccaagaaacacacgcaagtccaatggttggaaagaagcctaaagaaacacatttataagggaacatttgggtactcaaatatttgactgacactacatttcatgacctgcttgaggattaaggttagggaagcaaatcgacatcatcaaaattgaggaacaaaagacatgctaatgcaaaggccattcgcaataaagcatg

SEQ ID NO: 245888 - DNA, 1162 bp, Cannabis indica
aaatgaggtttacataattattaagtgtaatatatataaatacaaaaattactcatacatgagtaataatgttggacaaacacacaaactttttttttgttataaactctatcacataaaagataatatttatctaattgataaaatcctatcgttaaactttaatagctactaaatataatataaacaacaaataaaaatagtattaggagagaaagtgaaaaagggttgaggatatgtaggaaattattttgtctatattgattgatttcacatggtcttgttggttgagttccctgactactcatgataattaatttcatctaattattatttattcaaaaggaattaatatttaatagggtgatgaatttcacgagaaattcacgaaaagaaacaaaaaatagaaagagagaaaaaaacttataaaatatatttgtaatggggtaagtttatagtatgcacctcttataaagtttttaaaaattatgagtaatttacaatttaaaaataaaatttaaatattttattacatttaaattttattttttacaatgtaataactacaccttatatatgtgattatacttaaatattaaaattgataaaaaaaagttatcaaaacgaccaaagcctccattacaaaaattccctttgttatatacaatacaaatgttgtgcagaaattttttagatatacaaatgtaaattaattggaaaatcaaaatatcataaaatagcaagagaatcgtacatgcacgttgcatgttggtgttttttttttcttttttctttttttttttaaataacaataataataataataataataataataataataataataataaaccgcaccataataaataaatagattattatatatcttaattataaattttttaggggaattacgtaccctatatactatttttttaaaaaatttaaggtttgagtttctaaaatggttgtagcactaattgcaataaagatttctatatgattttttgttgcaatttaggttgcagtgctagttgcaataagagtttttatgtagaattccgtacaaaatcaaaaaaaaaaaaaaaaaaaacctagttttaaaaagttagtaaaataaaaaataaaaaattaacgtaaaaggacataacactatact

SEQ ID NO: 245889 - DNA, 1303 bp, Cannabis indica
aaaaatataatttttactatttttttgtcataatataatttttttttttactaaatgtgatttttagtcataacaaaatgttactggtaactaaaatatagtatttagatacaagttgtcactaatttagtcacaacaaattataatttttgtgactaataactttagtcacggattttttagtgacaacataagaattataatttataattagtcacaatttttatacttttattaacaaattttattgtgaataaaagtaagattttttatagtgtttgttgcagtcctactttcttttgactgttaagtgtcagctcaaaaacactttgaggacatatttttctaatttatttaatacatggtctaaaaatatgtcgccacacgtttttcatttgacatttaatggccaaaaggtacgactacaacaaaatcataagataaaatactttgtcgtcactttttttattaaaatcatatgtgtgacaattgtaaatattaaaggaatttggccacaaatatcccttatcattgttgttctgttttcagcttgtgaaattctataggagaattggtttcaaagtggtgcatgaagtgagtggctcgagattgggtgatattgggcacatgttggtttggggtggagttgggacccgaatggatgcccttatagatgagcttcttctgaaatggtgcaccaggtttaagcctctcaagtctgatgcctagaaagaattattacataattacagaaaaaggaccaaattacacacattgtaaaactatcaaattgttttgtaaaagtaaacttaattaccaaatgtaacaatattctgtttttgtaaatgttataaacacagatagacctgcttaggcatcttaaatttaaatttctgtattattgggttagttaattctaggaagaacaaagtgataattgcccaaaaaagagtgttatgtacttcaaaacattatacatgtcactattaaaaaattggataatttcgacacccatatctcggtactctaaatataaccgtcaaaatagatactaatattggcggttacacacataatcagtgtatttttttaaaaaaaaaaataacaaaaaatattttatgaggatctaatctcggcgggtcacatgcgaacaaccgatattgggttctattttaaaaaaaaaaaactaaaacaaattaattagcccgccctaaagaaaagaacccaaaaatttagaggtttttgactttataacttaaaagggaaattgattttctatacttatatatacctaatattttat

SEQ ID NO: 245890 - DNA, 1387 bp, Cannabis indica
aataaaaaattaatttttttaagagttggccgagttgaccgggtcaacccgccaatccgaccaatcgaaatccgccaacccgtgacccgctaacctgccaacctgccaacccgtgccctattcgggtccgggttcggttttatttttttaaacctgaaacccgtgtacccaaaacccgcgaatccgaaacccggtaaattcgcccgatgttcagccctagtacgatctacccacagtcaacacattgattgtactagcaaattagggaataacaagctgccagcccctacctagcataggacatgccaacgttggccagtcaccctatctaggagtggttgggcaaagccagcaacagagcatagggctggccaacctccaccataccctctcctatagtatggccagacagaccctatcacattcagggctacaacccattcaacggatcttcttgtgcaaccatagttggaccaaaatgggacatgatcaagggcctagctggtccaaaaccttcagaccttgaactagacaggtcaaggaaatcactattcttgacatatattaatgccttgcccctaccaaagtttaagatgtcagtatggaagatgtataccaagtgagaagacccactagcacacatcaagtactttgagatatagcttgatctccaaaaaattattggtgatgtgcaatgtcagatattctcggaaactttgtcgaaaatagttcagcaatggtatttcaagctggctctaggaagattcaattcctagaatgagttttcccgagaattctacacacaatgtgttgggttttgtgccctaaatagaacccatttcaatatattcaaatttactaattaataaaagttcagaaataacttttatgttacatggttcacatgatttatttcatgattatgtttaatgtataaattctattaagttcaaagcatataaatttgttcatgataatagtgtcgtcagcacaataaaatataatcatgattatatgttcaaaagtttaattcccgtgatttgtcagttcactggatttatattgatatgataatctgcgataaggtgtacttacacattagataagtgtaatgttctttccagggcattggcaaagtttaccagtattggatgtatggagtatacattggattggaccgatattgatcttggataagatatcaaaaacttaccgttatatctttctaagtcaatatcactggttgatcttaggtctatagatcttaatcctgatatggttaggttcaacttagttatattatttatgctcttcaagttgttcgtgaaagctaaccaatgaatctggcggatacttacatcttgggagcatggtagttcaattgagt

SEQ ID NO: 245891 - DNA, 1236 bp, Cannabis indica
cttttttgtagatgcagccattgaccatcataatggcctaactggtgctggttttgtctttaagcgtggatatcagactgtgttggcttctcaataccgtcggctgcctggtgttgtctctcctattttctcagaaggccaagctcttttgcaaagtctcaagtggtgcattgactctcagttttccccacaagtagttttctccgattgtctaaacctagtctcaaaagtaaatggagattggcaggacaattctgctctttctggtttagtttctcgcattcgaatgctcctctcaaacttccctggtgcttcgttgcagttccttcctcggcaatttaatatggatgctcataatcgtgctcgagaagctctcaggtctggagaagtgagctagaggaagtccctcttcttcctctttggctgcttgttgctgttgtttcttcctcctttgcagccttctttttctcaaaaaaaaaaaaaaataaaatactacgcttgggtttctaaggcttcgttttttagtagtaacaattgtgaattgatttatgtgtctttttgttcaagtttcatttattaatatatttttttaatatacattatatatatataaattgtagtgtatgtagtaggtgtagctgtacaaattatggttgtgttgcgtgatatcttcacaatgctaccttaaccttactttaaaaaaaagttcatataaaatcatagcggtagctttaaataagaatactatatattatataataataaatgaatatttttttttcttttctttattttttttaataagtatattagcacaaaactgtttttacacacaatctgtttcaatactagtaacaggccccaatatcagatcactgtacaaagattatcaacacaattttgatctttaactcccactctctcttctgtaattaggaatgggaaacgggtcgggccagtcccgacacgccccaactcaacccaacccgataaaactttggccttgacccgacccaaaaaagcacagtttgctattcccatgtgtaatcaatactcgcagttctattgacaatgatatatatttcacagacaaaacaaatcaccaaatatttattacttcttgttgccacaatggcttattaatttttctctacccaaatcatgtatacacatgcattgaaaggtagtctataaatttctctcctcacctatcgctagccttgcatcttcgaattc

SEQ ID NO: 245892 - DNA, 786 bp, Cannabis indica
tttttttttgtaaaaagaagcccaataatactcacattttacttgagataaaacacacactcaaaaaatttcttgggcctattattactcatggttggtcctgcttacaactcaaactcacataacaaacacctcatcaggtagcgtttggttggaaggaatgaaaccataactataataagaatgacattgtagtactttaaaataaaaccaaacttagaaatgtaatcaaagttgtttcttttccattctacttcatttcattacctctaaccaaatacaacctaagtaaccaatcctagtgaaagtttctgattggacaaagaactaggaaccaattcttcataaaaacacttaagaaatctcaaacatatcataatgaatgttttcctaaatttaaagaacattaaattgtcactttttaaattctagatactcatttttcatttatgtctgtcctaataagtagttgtgttaagtattggtcaaatgctcaaggacaaactcgtctattagttatgacagttggtactcgagttttagaggttaagttagttgcttacctctcataactaaaatggttacaacaagttttgtaattgcagctaatgaagggcatagtggcggttggagaggagctgatgccacaccgaggaggtttcccagctcccagggtggcttcaccggtaagaaacatctcgaggaacaggacggtggcgattgcagaataaattggcccaactgttgtgaaagtatgttctgagaaagtgtaacgtccccgcttca

SEQ ID NO: 245893 - DNA, 795 bp, Cannabis indica
gagagagagaaagaaagaaagagggtttggtacatgtaaggccaaatctgagactatataggccttttcggacccttacttttagaattatataaaaaaaatattaaaaaagagtattatgagactcaaacccacactattgtgtaatatgttatacactacaacgaaccaagctgtgaatatttattgtttacaatatacttaattttacttaaataaaaatctaatgagaccttttatttttattttgagcccccagaaagtatgggccctagaccacgagcctagcctatctatacttagagccgtccttgggtaagtggatgtggtcgtgcttctcggctaggcatagagagagaaggggagcggctgagatattgaaatgggatagtatgtatatatattaagattttatgctaggatttcatatttatagaagagattttaaattttttgggttttttttttctataaactaacgtaaattcttgtcggttgaaaacagatgcaaaattttaaaggcgaccttgggtcaatttttgggattaaccgacatgttgaacaatgtagattgtattattcatagtcgtgaagtatacctattgttcatgactacataagcaaatttgttttttaaagaaaatattaaaaaaaaaaaaaaaaaaaaaagagagaaagaatgtaactgaagatggacatttttaaatacaatatgtataacgccctatccaacagacacgccacatgtgtgtgcttttataaattttacaaattactaataagtataattatatc

SEQ ID NO: 245894 - DNA, 757 bp, Cannabis indica
ccggcgaatcaacttgagaagaataatagtatcaaatcaaaaatcaaactgattgatgaatgatactgtagaaaaaactagtttgaaacataaactcaaccctgaaaaataatttaaattccataaaactaattctcctaaattcaatatacaaattcataagatgtagacctacaagaaatagatctcgagttcccaatcaatctaaatcaggtataatccaaacaaatatgtatcactataataactaatattctaattgttgcattaacgttgttctcatgaattttaatcttaaaattattcaattccaatcacgacaataaactaaatttgcattcatcttgtgtcatggatctgaccacgtatttttgatatttttgtttctgtgatgttgcattacagttggctgtcagttttattaacgctccgaaaattgatgtattagtaattacacactgatcaggctacactgtttttagtctcatttgtaggtatttcatataggcaacacaacacaaggatctcataaaaaaataattctaatatggtaagtttattaatattttaacattagttgagttcacagtgatttatagtgttcttacaattatttcttcgcaaaatatttttaaactacaaatcattattatcagtgcaataatactttgttaaatattttcttaacgatgtccaaacacattgtatatacatagttgcgactacgttgcttgtttgttgcctaatagttgtgtta

SEQ ID NO: 245895 - DNA, 874 bp, Cannabis indica
tttctatatatgcacacatctctctgtgtcatttcttgcttttgttactttttcactagtttggtgaatacataagtacactcatcgaaaaaattaataagaatatggaaagaattttcactaatatagaacatgtttacacattttccttgaatgcaatcgatacaagcatccatatatagtgaaatattccattagagttttctcaatttctgccaaaactcgctctgtgactatattggggtctctaactttccaagtttcaacaatgttattcttgtaggtactaaaagaaagcttcaaaatatattgtgcaatcaacgacggaattataaatcttgtagatatggtaagcttatacatccgttaccttgtcaatctatttcgatactataatttttcttgtgaaagcaattatttccaatgatcaaatgtacttgaatatttttcatgcagttctttgatatgtcaagacatgatgcagttaaagctcttgatatttacaaaagagctggtcaacaggtaatgtatgaagtttttattaggaaaaaaatcagcatatgatggaaacaaattatacataagctatcctctaaattggtcattgtataaactgtctagattatgcaactttttgccttgtgcaggctgaaaatcttgctgatttttatgaatattgcaagggactggatctagctagaaatttccaatttcctacactaagacaggttctactttttttccagattaatatgtttatgttgaggttttattattgtgtttactaagaacttacacaacagaattggattaggaataagtcctcaaaaaacaaatgtcactttaatgaaaaaaaaaaaaaagaaagaaactc

SEQ ID NO: 245896 - DNA, 645 bp, Cannabis indica
gtaacttttacaaaaacacaaggtctaaaatagtatttaccatatataaaataaggaaagctggtcctttttatatcatacgaaatataatatttaatattttgaaaaagttggttccattgtcgagtataacagattataatgtcattgtcatccagtgctgggttgaccaacatgtgatggccttaattaattaactagattaaagtttaataattcacacagcttttaattaagtactaattaattatatgataatgtaaattattattattaagtatatacaatatattctcttctttcggctgtgaaaaaaagatcataagaaatgagaggagagcaaggtttacgatcgaggagcaaaataaataaataaaatatataattaaagtctcaaatcacttaatcatttaataaaataggaccggcaacctgaaccagaatccaaacctaggacccgaacctaaactcgggacctagaccagggactcgaactcgggacgcggacccaaaccccgaacccgaacctggactcgaatccggacccggactcagaccccaaaccttagaccccgagacccggacccgcacctcggaccggacccgtagacttaacacaggatgccaagacccgacgaccctcga

SEQ ID NO: 245897 - DNA, 600 bp, Cannabis indica
tcaaaaaaaaaaaaaaaacgactgtgcagattgttataagccacaaacttaataatagcattaaataaacgatccatatagtagctgaggaggagtgtgttagtactgttcacgtataaatggaagaaaagtgagtgagagataatgaaatgaaatgataggacaagaagaaaaatattaaacaagatcctattgtgattattacccattaatatatacgtacaatattttattttttctgtttggacagtgagaaaagtggggcccatttagtgtactaaaagaatcgtttcaaagatatgggttgagtatttgagtgaccgtacaaagcataaaatataaagaaattattattattaataatatttatttatttggtaagttgagctattgaagtgactcttcttaacttaactcttcaatcactagtcacttaatataagactagtctcatcagtcgtcacctcctccttccatggtggtaactggtaaccttctttttttaggccgccgccgccgctgtggttactacctttatttggaaataatacttaattaatttctaatttagagagtagggttttatttattatatttgtg

SEQ ID NO: 245898 - DNA, 809 bp, Cannabis indica
tatccaagaaaaataattctagaacgaaattgtaattattttacataaaaatttcgcaaacatcaattaatcatcaataaatacatagattaacattaatcacatccaaatcacacatacatcgttttaaatccatatttcttgaaagtaaatcaatttccatggctctgagaccaattattggaatatattttaccaggatctagatttactaacaagtatgtttttaacatcctaaatataaacttctaaaatgatgaaaattaaacacatataaagtatgagaaaccttacattggaagtatagaaataagtagttttggaataacaaacctccctcaatcaatgatgttgttttgtccgcttctgtttctcttgatcaatggaagaaagctcagtgtaaattgtcttaatcataaaccttaataggatcacatgatgatagtgctaagctttgggcttcacctgtttcaaacacaatcaatgtaaatattgatgtaagctttgggcttcacttgtttcaaacacaatcaatgtaaatattgatgcaacaatattaaattctgagaggaaatttggctatgggattgctaaaaaagatgatattgggtctttaattaaggctaaaagtttttgctacagtggatagtattctgccaaagtggtagaagttttgggcatgaatgaagctctttcttgggtgctatcttctaattggcaacatgtggtcattaaacgtaatagtctactcactgtttaagctatctgtagtaatgttcacatgtcttctgttttttagcttttagtca

SEQ ID NO: 245899 - DNA, 1024 bp, Cannabis indica
ttctttaatttagcaaaggttctgtagatgtatgatttagggttttctatattaaagtacttttaagaatatatttagatctgtaatatatatatatatttcttgactgttatataaatcctaacatgagagagtataaatattttgtatgagtgagaaacattgaaaatatatatacgttaatattaatatgaataatcgatatttctctatagtttgaataattgattgaattggatattttttttttttaagatgtgatgctatatatacggttggaataattagtggagtaggtaagatatttgaacatgtatatatatatatggttataaatttttatttgtttggtaaaaaagaaagagaatgagatgttagttgttagattagtatacatataattaacaatcaacgttatatatatactttcataaaatttaaaattcaaaatatatgtgtattttttatatataagaattaaaaaataattataaattttttgaattaattgatcaataaatatttataaatctaataaaaaattaaaaaataaaagataattaagaagaaaacaaaataagaatacatttagaggaattttagtatcgctatgttaccgcattatacttcaattatatatttatatatatatgtgggtgactactcaatggttgtatttttattgtaaccatcatgtatggtcactattttttttacctgtaatagcaggttaccaataggtaaaattctttttattgaacaagaaaatgatctttattcaaaacaagcaaggaaaaatacagtgcaaaacaggcacacacagccgcaccacactaccagctatctattacattgaatatataattgtctagagcctcattcctcctactgctacaacctagaaatctaagttttacatccattttaatttcatcgctaacagccccaacagccttacatttcagctcaaaaatacaacaattgcgatttttccaaactgagtacatattagctaaaacaatac

SEQ ID NO: 245900 - DNA, 1494 bp, Cannabis indica
tttttttttttttttcctatttactaaactaacaaatttgactaataaaaggttattaacttaccattatttaattaaagggcagctatcaagttattgtgaagacactcaataaaatagggtaagttattaaactaccctcatcactaaacctagttcaataatcgacttagggggaaaatggtccaatacgacaaccccgccaacactaaccatttgagcttacatgacataatctctattactacaaagctttatatttccccaagtgactaaaataatctccgttgtatttttcatcgtcactgagctaaaatcataaatataacataaccattcgcatgaaacgtcaatattaatgatgataataataaaattagtacttataatctcactaattcatatttaaatattgcagtccctacagaagtcacttgacctaaggccatacgggagattcagtaggagcctacgcagtttggccatctcagagtaggggcaagtcttttcgagatagccgtcaagaacaaaacaaattttcagtcagataacttagaataaaagacatggatgaattcaaccaattctaatgcaaataatcacttacaattatacaaaaagtggctgtgccaatcggggacaggccagtcgtccaaaagaagtcgtccttgaaggaagcttagtttggaaaatccacgatgattttgcgattgctagagtgagtgccgagatagtaaaagccccctactgcattcttcctcaatagaacgaccttaacagagtagagatactctatttccaacactcccaattcaagattttgtatagaaccctcaaacttgcaaggattctgcaagagacgggatttagcctgaggtggtttacaaagtccttgaaataatcacgaaaggggattattgctcctgccgtgatgtgctcaaggctccaagcacctactccattcgagccacttgtactggtctcgccactggccccttcagaggtctctcgtgtaaattgcacgggtgcgtaacaacttaactcaccgactcacactgatctaaccctttagtctcgcttatactcgatgtcccaggtccttagtgaatcgcctacgtaccctgcgatggttcgcaccctcgactctattaactttgcctcgaaggcgatgtgagggtcctgtggagtctttgatttacgtggcttgggagacattatttcgaattccaagtcacctggttcaaaagtaattatgagtttggataaaaatagaggtttagcaaaaggaatagacgacacactgggaggtttaggccaagcagcatctcgcaagaaacggcatttgccttcagtgatttcttgcaagaagcattcgtggttactaacaatgtcttcctggtgaattttcactaagtgttctctaatgcttacatcatttacctctaatttggatgtgggttttgaaattttgggtctgtaagggatggcaatttc

SEQ ID NO: 245901 - DNA, 1497 bp, Cannabis indica
gatcgtagttcttggcgacgagatgaccttcatcagtcagcatcatttgaatgtcaacttctacctgagagagttgattagtgaaggtaccacgagcatgccttcctatggcgagatggacgcctcgctattagttgtatggatttatctgattattacacttagtttgtgtgtcgtgtattatacgctgtcttatcggcaattgtatctcgtctttaaatgtgtaatgaggttgacgcctcgccttatacatctgaagttgtacgatttctcactaatgcacgaggcaacaatttgcatatccttatctcgcctaaaactttatagtcagcaagttgtaagtatactgtcacttccacatttaataagttattccattttcaaatgtaattaccgttatattcattgattcatatctttcctaattggacacgtgtcctcttttgaaatgatggccgaatttcgggtataacagatctaagatcatttaagtgatatttacttagaaaagatattacggtaagtttatgatatcttttccatgtgaatatcggtctagttcgatgtataacaatacatccaatataagcttactttaccaatgctttggaaaaggcataccactatctaagtgtaagtaaactatattgttgtttatcatatcagtaaaaatcctatgtactgataaattagggagtaatatttaatcacgtaatcttgattatttttcactgtgtagacaacacaataatcatgaataccattgtgataagaatttaaaaatatatcaaacaaatgaccatgaatcaaacatgtgaaccaataattatattaaacaagtaataaaataattctcttcctttattaataaataaaattcaagataacattgaaataaagctttagctagagcacaaaactcaacaagaaagtggtctttataagaagaggagacaaggtcctgtctggaagtgtttttctagggtttgctagctcaacctatccactcaagttcttggctctatcatctgactaacaccactctagctttgaggcctttggctatatagctagatcttcaatgaaacatatcagaaggcgtttcaaagcataaatatagaaaaatgtcttgccctcacctgagaagcaagttttaatgggtaggtgcactgccacttcattatttgaagcttgaggtcaacctccttggggctgtagggcttgatttgttgtgtattggattttagtttttgttaaatttttttcaataatggtatttatgagccattaatatccccacgacccaaattgtgggggttttttggagttttcatgataaatgtttcttttatgttttcattctcatctaattgattataagttttttaagtccatttgttaaaatttgtaatatatttgtatgataaataaagtaaacgccagtttcctttaacatgaagtactgcgttagaagaatagcattctaatgaaaataac

SEQ ID NO: 245902 - DNA, 1421 bp, Cannabis indica
aaaaattaaattaaatattttttctagatataaaaaaaaataaataaaaaattgtatcaacacatcttttaaggaatagtttgttgaaaaaaccaaaaacttaatgaagaagatatacggagaccgccgtataattcttttttttttttcttttaaaaatttaaaaaaaaaaataaataagaaaatcaatcaattaaattcaaattagcacactgcacacgtacaatttaagagattacagatatgatatagatacaaatatgtatacctaaccacacaaagggtcaaccaatgataatacagccaccaggggtctgtttacttttctcattggtttttatattaataccatgcaaaattacataagccatgttataattatacctacattaattaatatataaatatcttccacagggacatgttatattgtgttttattttacttttttaggttacttataataatataaaaaaggatgtgtaaatgatagtgtagatggatgtggtcagattttacctgaacataattaattaataaattaacaaattatatttgcatgcaaaattagatttgttggcaaataattatataataaggatacgaaatgaccattttgggtatggaattttgcccaacaaccctatataactttgcgtctttgcgtggttgtaagctcattatcatatcattaaaacaatgaatattgcgagagaaatgtgtcatactgtcatatatatcacaatttaatggaataatttttaaaaaatatggctaaccaattgtagagtatcatttctagaatgtgttaggcactattaatatttaggctgtgtataaatcgatccaattcaatgacaattaatcgatccaattacaaccaatcacactaattagtatttttatttagtttggataagtaattaaattttatattgttatacgtaaatatgtatatataaaaattaacattaaaattttactatttgttttggatagaattacttaacttaaaatattagacaaatccaatccgataaaaaaaaaatattaattctaaaatatgggataaactcaaattaaactaatgaatatatttgaaataaattcaatggatagaatcgatctaatctaatatccaataaatgttggatcgattagattactaaaattaactgaatcgaatgatgaaatttaacatccaatatatgattcaattaaacacttataactgatagccaataacaatatcatattactagacactagtaatacttatttaatattatcattacatatagtattttgagaataattaataatattttgtgataattattaaatttattaaaattaataaaactcgatacttaattacattcttaagcaaattaacaataatagacattgctaataccttc

SEQ ID NO: 245903 - DNA, 2299 bp, Cannabis indica
ctctctctctctctctctctctctctctctctctctcacacacacacacacacgcctaccctaggttgtccagcacttgaacaccataggttgtccaacacttgagttttgccaaacattgattcatatattgtaatcctaagggtactatagcagatcccacctatagcgatctggatagtaattccctcggtataatacaactaaaaggggagtaggtcattactcgttatcacaagggggtcgaacctctataacaaatcctattgtctattgctttttattcttatttatgtacacacgtggaaagcatcacatctacaagaccctactgtcaattgatcactttttgaggtcaacaatttggtgctttgattaagagtgtggatatcgtgatctaatcaaacgccatggtgaaaacaagaagaactcttatcgcaccatctacatctgaaggtctccctcaagacccatagatcgcaaatccaagcactcgggttacagtcacaactggaatccccatgaatactgcagatgtggtgaatctcatcaccacagcaagcacaacaggtctggccaccacagctagctagccagacaggagcaccccgatagatacaatcggtaggcccacacctccaagagtagacccaccattggcgcctcccattgaaggaaggactgaggggcgacagcctcctgagataacaactagacctcaattttagttctacgctggagagataggcgcgggagtgggcgagcctcacctggacctaaaagaagacctcgaattggccagacttagggaagttgtaggtcatgcagacctaactgaagaaccacgcgctactgattgtgatgttttcgcttagtagagacgcgaattcttaagatggatggatgaccattagtacatccttcgatctcaccaagcagaattagatcgccgtaattgagagtccagcgatctaatgaggcagttcaatcaaagaatcaacaaaagaggccaagatctccttaggtatccacttcaaggaaaactattgctaagttcctcaggaactaggatagatcttcccctgctagaaggagaatagacctttcctcaaaggtcaaacagcgagaataaccatatctcggcaactagcggcttggggggccagccagggatctattgcttaacaacaaatgtagcctctagccggccagccattaacaggagtacccatggccggtcatggtacatcacttcctccccaaggagagcgaggtgcacagagatcgatctttgatagacgaggactcagagtgggtggaaacacccaaaatggtgatttaagaagtgaaattgatcacatcaggaatatggatccaccaaactctagcaattagtgtgatctacccctaattaacacacagccaacaccagtcgaccgtggagtcacgggtggccaaaccctgcccaacgcaagtctagccggccaaagaagtatcacgggcagccagaccttgccttttgcaggtctggctgaccatggaggtgtactgggcggctagaccctacccaatacaggtctagccagccaagcacagtaaccaggtgtaagcctggccggcctaggccaactcctgcacctgggaatggccagcctgggtctgcagggcatggtttatcttcaccatacactctcctagggtatggctagattgcccctatttttttcagaatctgcagcctcctcaaggagggccagtcaatcaagtccccacagcagcagattcttctgtgcaagcacagttggaccaatccaaggacatgatccagggcatagctagcctaaagcctttagaccttgaacttgatcgatcaaggggatcaacattctcagcatatataaataccttacccttgccgaagttcaaaatttcagtatggaagatgtatagcggacgagaggacccggtggctcacattaaatactttaagatccagctcgacctccagaaggtcactagtgatgtgcgttgtcgcatatttccagccacactgtcggagacagcccacaatggtactttaaactcaccccggggagatttaactcctaagctgagttctcacgagaatttcatgcataattctcatcctcgagacttgtaacatcatagttcgaaaaccttgtcaaagtcaaatagcgataaggggagcctctgaaggattatgtttagagatttatggccgaagctaccaaagtcaaaggtcttactaaagaaggccgatatacggccatactggggg

SEQ ID NO: 245904 - DNA, 953 bp, Cannabis indica
aagaaatgccgttagataggcacttttaatatataaagatataaaggttaaatattgtttttttcaaaaatatagagtttattttatcacttaataaaatagaggttataatttgtaatttttataaaatacaggatctaaaatagtatttatcctataataaatataaaatataagataaatctacagtacaccttataaatgcgtgtttcagtagattctctatttattttaacacgataatttttttaatttaattttttttataatcatctatattatagttatttatgactacttgtaaatttatcaaaaattctaagtaatttataatgtaaaaaacaaaatttacatattttatttacaactatttcttatagacacaaatcttatttttaatattgtaaattattcaaaatttaattaaaaatttataaataatcttaaataattacaacttatataatcatgaaaaagaattatactcatttttttttataccaaaacaataaaatatttaccaaaactacctcaaaattttctaaaatatataaaagggtaaatagcaacacaagtactcaatgtttataaaactgtaattattctctaattttgtgagtacaaactctattattttcttaaataggctacacataagatttagattctaaatcattgggtctagacagaaacatgtagtatcagttaattttaaatgttactttaataaatttaaaactgagtctctacttacaaacttaaaactttgggtatttacaccgctatttatcctttatataaaatgttatattatttataataatataatatatatagattaaatatgtgtagtaaactaataatatgtaacatatgactatattagttgtcatctttttgtaacatttggggagttgttactatgagtaacctccaccattatcaccaacatt

SEQ ID NO: 245905 - DNA, 884 bp, Cannabis indica
acaggtcagagagagaccaaagataagaactttgttatgtacaactccaaaataagctatcaacttcagttttatatatatttatatgaagaagtatgggaaagctacctgatttgagggtgaaaggcctatccttttcaagataaattggtcagaggcagagccttaaataaggtaacgcgggaaagagagagacagaggttctccagatagtgttctctttttttccttttcttattactttattttcttttcttttggtgtggttgaaaaagagtagaactttggttgggaccagagtctatacagtagacataatatacagtgtaaaataatagtagagcttaatattaaaaaccgaaactttattaagaagaaaatgaaatgaaaccgcgttgtaatagttgtcatttgcttgaaatgaaaggaaggcatttaactcaattcattgattgattgttgttcatatttgtaataaaggtaataataatctggaatggctacaccccacacacaacaaaaatataaacttttcaccaaacaaaatgcccattaattcccttaatttcgccagtgattggaccttgctttcattctcttcttatttctcatactaattactttctcttttctcattttccatttcacattgaaaagttggatcttttcgtttatttggaagcaactgtaatgtaactaatagggtattaattacaatttacccatgtaccctctattttaaaatagattgtgtgtttggattttaagtagtaattatatatgaaatttattttcctggcaaaggagttagtaattaataatattgattatttaaaaacgataatattatatcattatactgtataattacattcaattttcat

SEQ ID NO: 245906 - DNA, 1554 bp, Cannabis indica
ttagtgttagtttaattattattactatatagattttttaaatatatttagatgatattagtgttagtttaattattgttactatatagatttttaaatatatttagatgatattagcgttatcttaattattttgactatataaatttgtaaaaaaaattaaaaattaacgcaggaaaaaaatggcagaaaatcagtattttccctatatgtttataatgtaacgattgaaaaaactgtcgctgaaaaaaatattttaaacttaaaaatcataacttgtactgtatggcacggtttaaaaatgttgcatataatagggtataggggacaattttaaactatcgcctatagtatagggcatggttttaaaccattaattgggaattggaaattagcgactatttcgaaccaccacctattctgtccgttctgtgacgatcgttaaggtgacagctatagaaattgacgagaatactttacccgactatttgaaaacatcaagaaaaaccagttttgtagtagtgaatggatggtctggatgtcttaaattagctatgtactagttagaaatgaggaatgatggatgctagatattatttatgtattttattgacttgataaatctatctattcactgactacataactgtagagatattattgctcttttatattgaagagtggtcctaatattattccaaatattttcttatagacataggacttaatccattaatattctcaataggtattttgtaatataaagtaaaagatcatttataaactttatcttcctacaagggtcaaagtttgatatttgaccacctaagttatggatatattacatatctgtcacaacctaagactcgggtcgtcacattgattgtcacttcatcggagacaaaatcaaagattccatgatcagactcataccaataaatggcacacttcagctcatacagatgcctttaccaatccactatcccttctatagttttgacttctcacatcagcaaaatatccttaaataaaagcccatcttgagggggtaagaagttctaatatgctttgttattgttttgttattttagttacagtctgtttgttcattggttagttgggttatcatgaccattgggcttgggttagtttggcctaactaatgagagttagtttattgttatgatttggttagttaatatatgcttctcattgagctatatatataggctcatctctataatcctaattcattcagttttaatataatttcattttcattttcctctctccaatcttctcgttccgcaatagaatgtaatttttatctttcatttctactatatttgagatcactcgattcttatacattataattttatgtggtttacaatttattatttgttattatttctcatgtttagatcaataggtatagagttcactgactattattttcaccaaccatacatatagttctatttataatgtgtaacccctagatttcattagtaatttaccaacaaatctagcttgaagagatccgacataaaa

SEQ ID NO: 245907 - DNA, 1456 bp, Cannabis indica
gtttgttttggtgtaatcaaagttgcaatttaatgtatcattatattatttggtttcactttaaaacattgtaatcctattaggtggtaattgtaattatcttatttattataatgatgattaggcgagtgaccatgtttacaatattctattaaactttccaaattctttcttttatattatactaaatcttttttcttcttcttcatcttccttcaaatagggaacacttatgttcttccgtagagaaacaggagaaagacctaaacggattatattctacaggttatttatttacctcacttatagtaaaaaaaatgatttttcattactttttgcctttaattgactagattttgtgctttttggcagagatggtgtcagtgaaggacagttcagtcaagtgttaaattacattgcaacacatgatgtcgatgtcacagatgccacaaataatgtcgatgccacaaatgcaacaaccactgcagattttaggagtacaacttacaccttcgtaacaaactcgagggaatgagaatggtggtgatgataatgaatccacgttttagatgtttagtttattatttttgttagtatgaacatttatgaacacttttaaatattggaacaatgtttagtattaaatatgcaaacaatgtatgaactcttttagtattaaatataaaaatattttgtttttaaggaaattatttagaaaaagtgtgatattaaaaaaatttaaaatttaatttaaataaatttaattattctaaaaaatatctcaaggacgtgagtttcgtttcttataataaaacagtcgttcttaataatgtgtaaaaactaagctcctaactaaattttttggaacgactttcacttttcaggaataactcatttttcgtttccaaatattttagtcatcaggcatgtgttgggattttatgccctaaataaaacccattacaatctaatctgatttgttatcaataagagaattagaagtgatttatgttaacatgtagttttcatgcttatggtttaatatatgcacaaaatctgttaagtccagaacatatattcattcacaattacagtgatgtcaacacagtggaatgtgattgtgattatatgattcaaaagactaagtccctgtttcatcagtgttttggatttacactgatgtgataatcagcgatgaagtgtacttacactttgcatagtgttatgttctttccagaacattggcaaagtatactagtttcgaatgtatggagtatacattggactggaccgatattgatcttagttaagatattataatacttaccgttgtatctttccaagtcaatatcactagttgatcttagatcaaaagatctaaatcctgatatgcttaggctcaatctcaggagtgctattcatgttctttgatttgtagttaagctactttgggtca

SEQ ID NO: 245908 - DNA, 828 bp, Cannabis indica
aacataaataactgctaatttccaaattaactaagcgggctttacagccttagtgttttaactacttgttatcatgtcagcaatctgagtgtgtgtttgattggcttggaaaaataggaagcagacttcagaattctccacctcggttcctaatttctttaaggtaacacttagtggatttaggcactttcttaaggctctaggaatcatgtcttgataccaagtaagtaaaatgcagcattgaacttactaactcgtatcacttttgtcaaaaaattagcagggtttatgtcaatgtgaatcttcaccactttgataattcctttgttgacaatgtctcttagaaaatgaagattgatatcgatatgttttgtcctttcatgaaatagtgttcttggataagtgtatttctctttgggagtcccaattcacttccttctgtgcaaatcaactctgtcgtgattccttttagccatagagcctctttaatagcttctgtaagagcaatatactcaactcaagtggatggaaagtgaaacaacatgtagcaagtttgatttctaactaaccccacctcctccaattgtgaagacataacaagtcaaagatcttcttttctctagatctccagcaaaatctgagtcacaatacccgaacacaccacactttccatgctattgtcttttgtagttgataaacaagtttttagatcctttcatgtaccttagcaagcctttcaatattcaagtccatatctgctcatgaatctactaaccaatccaatgccataggccaaatctggttattgaaatcatggcatacatgatg

SEQ ID NO: 245909 - DNA, 526 bp, Cannabis indica
tactagcgggagcaccaacaaatctttcattaggccaaaatcaatcggtaataaaaatcaccaatagcttaatccatttagtttgttagaaatataattgtttttcttttttaattattttaaaactatacttcaggcatatattttcagtgaagaagaaagatgtattgcatttcttatcaacagtgatataagaaataactatactgtacaatttcaaaatcaatcctacatgttgatgccaaaatctataagtattcttccagattgtgaaaatgttattttcaacacagcacaggttagtccatatatacaaacatatataatatatgtatatagctaatttaaacttttttataatttatagtataataagtaattaattagtgtacatagaaatatcaatttggttcaatgtatatgctgaattataatatttacaggtaagaacaaattccaacatgagaattacaagaccaattctgagatttgaattaatggaaagatggacagaatataaggaagt

SEQ ID NO: 245910 - DNA, 708 bp, Cannabis indica
gtgagtagtgattgttctcctactccagaacccatagtgcaacactactattacttcgagtagatcgccatagaggggtaaggccgcttcatatgggaattgaagaaaggtttgaggcattttctaccgtccaaatagaaatatattgtctggccaggaattgcttacactcttcctattgtccttccaagttcggggaacttcggcattctaattgctgttcctgctgttacggttgcccgacattcacaccagtgtctgtttagcagtaggatgatggctagaacaaagaaaacgatacggaaggtcaacgcatttgatcctcatgtggcccagctcaccacattactgagcgctgaacaagatctgttcatcgaggatgagggagatcatgagggggacattaaggtccaagagatcgaggagcaggatgatgtccatccagacagcccttccgaggctgaggaggaagaggaggctgaaacattaaacttttgagggtataacgaggtcgcggagccggtgtctgcggagggagaagccttggttgaaggagtagactacgtcaccgaggagcttactgaagtagttcctcataagtggcaaggtgccttgggtgccatatgggtgagccctccatcctagatcaccgaggcacgcatgaggaccctggacaaggagggacatctgggcggtcttgagtgttac

SEQ ID NO: 245911 - DNA, 767 bp, Cannabis indica
gcaagcgcctctattaaggactttgggtcaaatagaacaccaacttttgggtcacgtacggaattcacatagatctgtatcagtcacaattgtttttttagtgtccttgttcatcagaaatgtaaagtactggaagttgagtcgctaataaagctacataccgaagccaaaataacacagcagtttccaaaaaaaaaaggaaaaaaaaaaacaacaataacaataacgacaacgacaacaataataagtaaacctcacagagttgatttaattttgaaaaatccataattctgacccccaaagtaaaccaaatccgtgatcagagacgcagtctagtgctacttcacctctcctcaataagtcccaaattcgaatgccgcctcccagtatcgaggaaaagaaaaaggttttgttactcgagtttgggacttattgtgaggagaggtgaagtaacaatgtcaatattttacccaaagaatgacaggctacatcattgtttaatcaaatcatattatattaatattatataatattatatatatatagagaggagggggggggatgacaacaataattttattaatctcttaaacagatcagtgagcatgcataccacatcaaatattccttgagcagccaaggtttgagcgtttacaggaatttcaccatccttgggaaccaaaagggtattgatgtattgtcctggctacaaggaaaaattttttgggtgaaccaatcgctggaattcaaaaatgaaaataggatga

SEQ ID NO: 245912 - DNA, 1176 bp, Cannabis indica
gaatttgaattccattttaaaaattcccataaattattttgtttcctataaattttacaccaaatacaaaagtcaataaattatattttcttattgagaactcatttacattttgtcaatttcaataatttaactatttatatggaactttaatacattgttcaatgtagaaagtatttctattcttaaattcaaccccatctcatgtatattttgacattatatcttcttttcattttttattttactttgtcattctaaattactatcctagtcaactaaactatttagttatatatattcaatttgaatcttcctccaaaaatccaagaattatatatttataagtttatatacttatatatttatgtgtatgtgaatgttaactaattttgataatatattttaagtgttgaggcaaacaaagtcaaattaattaaatgttatgcattagtccatagcatcaatgagaaagcaatattcaatttcaataaatttgtataaatactctaatttaaagtattgtatctcataaactaaaatatatatttatttatagttacactatctatattctatctattagaaaaatgtacatatcatttattatgaattcaaattgtgatttttttaaaaaaaaaatacaaatgtttaatacaatcttaaatataaatttatataaaaaattaattaaatagatacaataaaggacttctatattaatttcttatgatggtttttttttctataaatgaatgtatatcatttttatgaagtagatgattcatttttaaggggaaaaataggttgaagtatgaacggagctcttgttcaattctcaaccttaacaatagaataaatttggttatcaaataattgaacaacgaaaaataatttacttatgatacttagaatatatttggcatactttttttaaaaagctaaaaactattttttaaaataaaaaagagataatttattgaagaatttatgaagtagttaaaaactagtacaacccaattttttagagaaaaaaaaaactattttgattaaaagactttataataaattattttgtattaaaaatgtatttaattatttttatatatattacaaacattaaataaatttttaaggaaaaaatatttaaaataaaaattttatatatatatattt

SEQ ID NO: 245913 - DNA, 708 bp, Cannabis indica
ttttttttttttgttgttttggttgggggtgaggtaagaccgaagttggcgggttttccactaatggaacctgcggccaaatctatgcatgcctatttcatttgtgatttgatggattatattatttggccgacgtgggatttaacttaaggaatctttaatcaaaattctttgtcaattaaacacattaaattcactaaccaatcataataggaaggaaggaaaggaatgttttgttactatttgccgtctgttatgactgcttccatttccaccaccccactgtggctaattatggataatatttatatttaattaattttcaaccctcttttggtcaattaattattcaaagcattttataggcaatttagcattcttcttctgaccattaatttgccttgcttttcctatttgatattggatttggtttgacctcatattcggagaccttccaaaataaacacgtccctcagtttaaaattataattagaagattgtcttttattatttttattttttttgaagggaaatgacagacagcatgggtaacatctttccattctaagtaaaattttgaaattgaaagaaaatcttactcttttacttttcttctttaaagtaaattgtcttagagcatgtttacgaaattagaacccggaaaaaatatttaacaaaaagagtaaccatttttatttatattatatt

SEQ ID NO: 245914 - DNA, 1675 bp, Cannabis indica
tttcaacatcgtagaaactcgatggattggtcaaagatgtcacgacgttaatgatgagttgtattagaatataacaactaatttagaaagtcgagttgttagtttagttagagtagttagaaatgactaaaatacccctaggttacatttagtttaagtattgaagagaagggtaaaatagtcattctatagagttttagatttttgtcttatatggattttctaggctgattcattaggtttatatgttttgatttatttaattaaattaaggatcaatgcatatacctgaaggaaagtgggagtaagatctgttttcttgttttatatgtggacgatattcttcttgcatccaatgataaagggttgctacgtgaagtgaaacaatttctttcaaagaactttgagatgaaagacatgggtgaagcatcctatgtcataggcattaagattcatagagatagataccgaggtatcttaggtttatctcaagaagcctacatcaacagagttttagaaagatttcatatgaaagattgttcaccgagcgttgctccaattatgaagggtgataaattaaatttgagccagtgcccaaagaatgattttgaaagagaacaaatgaagaacattccttatgcttctgctgtcggaagcctaatgtatgctcaggtgtgcacaagacccgacattgcttattctgtcggagtggtaggaagattttagacaggggcggccctgaaacaaactgggccacagggaaaaaaatatttgggccattatgttagaaaaaatgtggtatttttcaaaatcagtaaaataaatatatatataattttaaaagaggaaaaaaaatttagggcccctggactgggtgggccctaggcacaggcctagcccgcctatgcccagggccgggcctgacataccagtagttaaaacaaaataataaaagaaaaagaaaaagaaaaagaaaaagaagatgcattctagcaaaattattatttctatattattaatagtgaccaaataaaaaataaatcaatcaaagtttattcttctttcataccgtttatttctctcataatttattcatttggctagttttggatagtgctttgagttcgtgcatttgccccagtcatatttatttgtattttttaaaaaacagattgtgtcatgtacgtacaataaaatatggatcgtgacatgtagtgccaaactttttaaagaataagtctgacacgcttcgtaagttcaatatttcatgtcatataggattcgtggcgtgctttactcgtgccagttcgtacttcttaaataggacaatctatttttatatccgaacttaaatttatattttacttttatttttacaattactaaattatatatatttcaaaactttaattatattaatatgacttttaaacagaattatataaacaaattattaacatcattcgaatttaaatatttacttataaatacttaaatttttatatcaaataaattaatatataatctttatttttcatgttttaatagttttaattatagaatcagagtaatttgcggcgtaaaaatctaagtttattatctagttgcagtttaatacttaagttaaaattttggccgtaaaaataccttctgtgacacatttagaagtttcata

SEQ ID NO: 245915 - DNA, 1340 bp, Cannabis indica
aagagttttggagttgaagcactaaagggtaccaactccacattcatgtttattaaggaatgttaaaagggcgcgacaacactactacaaaatgtcatactgttaatctgatggtggtattgagctcttatgagttagattatagctctcaataatgataattttatttttaccttttaacatttgcttatgaataattcaatgtatttctttataaatgataatttaatttaccaattaaacataatgaataaaacaacattaaaaaaaaacaatttagtttgcttcaatatattattacacgattataaattactattttcatcatcttctctaggcgtctattataaatggatggtttagaagcatcgttgctgttggtctcttcgacggattagtttcaaagcaatttagcaaaaaatcttttgcctcttttgaaacatgtctagttaacttatcattccacttccttctttttgtaatcatagataaaacaatgacacccactgcccaaatatccgaacattgttcttgaatttggtgtttactccaacattcaggagccctataaaaagtagcgcctctaggaggagtgggattcgttcgatcattagctatctttgccaattcaaaatcagcaattttggctacaaaatagttatcatcttctcgctctttgaccaaaagtatattgtcgggtttgagatcacaatgaacaatacccttcttatgaatgtactcaactccttttaaaattgactttatgtgtcgcttgatttctttggactcgttgtacaaaggtgagttattgataaaattatccaaggtcctaccagacgcatattccaagaagacattataaaatgcaaatttattaccatcataatcaaaatcgatagttgtatcgtctccatagcattgaataatgtatggacaaccagcaaaaagatcgagaatcttcttctcattgagtaagtcatagttttcgaaagcataagttgtttttacgaccataacagggtggtagccattgattcgagactcttgtgtgggtcgtcgaatcattttagccatataaattgacgaatgtatcccttcttcaattagaaaacccctaacccatatatcattgttatttgggtgaatactcacctctcctctatcactatttcccattttttttttctttctaattcgaactctatctacttctctctctctaaaatataagttgacttgagtgttgaatatatattagtaatattttgacataatcctaatgttaatcatttttttaaattaaaataaaagatatcgtttaattttttattctttttttt

SEQ ID NO: 245916 - DNA, 1138 bp, Cannabis indica
gagtagttgaaaagagaagaaaaaaaaaaagaaaaattgtaaaagagaagcaatcgagccttacctgatcaaatcttgtgataggaagctccaaaagttataaatcgccattgttgatagtggatctcaagccaaatctctgagatgagcttgacagagatgtagccctaatttctgtgggtgaactcttaaataatttctggtgttttctctccatttctctctttatttttcattctactaatttctgtgtgtgtgagtaagatcctagggttctaactttggatcgagcaagttcttctcaagaacttgctgtgctagggtttcgagtttcaatacaaatgtgtttgtgtgtgttgtgtttgccgaattaggatttctgacttttcttgaaaagtctctttggccttagattaaacaacacaagaattgtggtcgttttggttaggtgttgtcgttttggtctaaattcatttagacaaaggaaggtcaaaccttgcatactgataattggtgtttgttggtgtagggttaaaacagttaaaattcctacacatataaattaggggaaatgtttgacaaattataaagctataatataaagtcagaggtaagtatgataacgaacttgatcaataatctctcctaaataatgaagctaagctagaactaagtagctacattacatggcacatggtagggtaagtataaagtttatctcaacactaattattagtacttttttttgtatattttaaatttaatattaaatttctacatattatcgaggtaagattttgaatctaagattaaacatattcacattttttatatacattttcgtactctttctagcttgatttggactttgtttgtatataggtgaaatagagaatatggagaccaatatatctttttttgataaatttaattacatcaaacacaataatatttattcaattatcaaaattttattatggaattaagatttagtagctactaacataatgtttggtatgagattagacttgtggaaattagaatgttaaagaggttagtatttctaagtaaatctgacacttcagttctttattttccttaatctaagtaccttctaacatttgtcaaaaaaaaaaaa

SEQ ID NO: 245917 - DNA, 743 bp, Cannabis indica
ctagtctagtggcgagagttaagagtgacaatatatgatagcacgatttcacgacctcaaaacggtgcgaaggtttgggtttggcataaacaagtatggatcaaaataggttaaacacaattaaatatcaagttaacctattaaactagaaattgacaggttaaatacgattaagagcatagaaacaaattttaaatatgttaatatgaaattagttaacatattagtttattagtagaaactataataagttatacatgttaaaatgataatttgaacttgtttgtttaattttttatgtgggtaaagtaggtcttaaataaatcaaatatgttaatgtgttgtgtaacattaactaaaattaatataacatatttaaatattgtgctaattatgccatgtcacgagttaaattatttataattgtgtctatttgtatttacattttaggatatattatttaagcatataatatttatgttaagtataatcttgtcgacctaaaacacgaaacaaattgccaaccctatcaaaagtatagtaagctaatttaaaattttaaaatataataaaagttagttgataaaatattattgaaattctataatacatcctaacaattaggtatcgatacatttcattcgtgtttttaaaatctaaataattttgatcttatttttttatataatagtgtccatcttaattatttaagacatttaacaaaaattttaaaaaatttaaaa

SEQ ID NO: 245918 - DNA, 608 bp, Cannabis indica
tcaaacagagtaggacagaatttacaggcagcacaaattgaggtactaaaacaaaaacaatccattatcaagtaagtggtttaaaatgaagctagtgggtttttaaggttcagctagtgttcagtattctgttaaaggaaacaagacatatgatttagcatatctctttttattcagtaaaatctcagtagaatgagagcgtaccagtcttcatggcgaacaacctttccttccacgacatttaatttgatgagggatatcacatctatgtttctccccaaaaatttatactgttgcttgttatcaattaatatctagattcattacacaaattgaattcaaaaggtcaatttcaacccaagaaagaaacatctctagattaatgaaacaaatgtatgttaggaatgtaatacgaacctctccatttcgtggtgaagtcaaattttctgtcacactgtaatccacaattttggactcaccaaagacctgagaagtccaaacaaaaagagaaagggaaatgaacaaaaatacttaatgacagcaacaattacaaaaattaaataaaagctaaaattgacaaaatattacacgattgctctctgatcaaa

SEQ ID NO: 245919 - DNA, 1010 bp, Cannabis indica
aaagggttttatttagggcacaaaaccccacaaaaaccgcatttacttagcgtgatttgtaactcaaatcccatgatttagggaataattgttgtaaagattacagtcaactttgtaattaactgctcactatattattataaataggtgcaagcaagacgaggagggggttgaaaaaaaacctcatataggaggaaccctaaaaaaatcagaaatctaaataagattgactcgtggactatgcagaattttaactacaaaactacgtaaaaaacctcgtgttcatactttaatttttacagcctttattttttctatgtgaaatcattactgtgaggctcaaatttggttaacgaaaatctacgttaacagttattgtttacttttcttactgacttgtgattcacaagtgctttgtggtacaagtaagggcaaggggaaactagggcaaccatgagacgatggtcttctttagaaaataaacatgtcgacttattcaacttgtgtgtttaagttttcaggaattattttggtctacactaatgtgtattttgacttacttttgtatatagccctttttgtaaacctttcgtaacaagagatccgcgaaacaaatttttagcgatgccatcatgtataattttactttggtgaagtttttactattatcatggatttgattaattagttcatgtactattattaaactatgttccaaaagcacacacacacatgtggcattcttaggagttagggtgttacaatcataattgatcctccagcttaatactcaccgagaataacaactagttgtgaatcattatagatttcaagtgactctgctttgattactagtgctcatcgtagtcttgctatagtgcctcatactttctttgtttttatttaagtgaacttacactgcaatgcacactaggttcgaaatccttctagagttcctaagatgaatcctgcaccggagccatgctcattgaggatccatccacatacag

SEQ ID NO: 245920 - DNA, 1495 bp, Cannabis indica
cgatcgatctaagtcgttgtgcatgcatatgattatcaaatttagagctagtttgctagatattaggtcttttctttttttatttttttttctttgatctccaactactttagttaactaccagtactactagctagaattcgtaagtgcaaatcactggccgtgtaataaatagatagaaaaaaatatcattattcatctattttattaaagcgaaataataaataatgcacatttcaaacatatagttactcttatatatatttatatgaagtattgttatttagcatgtttaaaataatatttatttaaatatatgtgagatgtaatattaaattttattaataaatataaattcatggtttatatatgaccactagttgtttaccatactcattatattattattattattattattataataataataaataaaataatattatattggacaataaaattaaggaatataatatatctaaaaattttttgaaaaaaaaaaaaaaaaatatttttaagtatattatgtaaatttctcttaatttgacaaaatcatataaatatgtttaaatttattgatgtgtttgtatttgtataaatatgaacagaatgttagattcgactacgttactaattccataattcaagacgtaatatcacgtgatagtaaacaatttcatatcaatgttttgggtggagaaaatattaccttcttaggtgttcgagtaattgctcctgaaaatagtcctaacactgatgggatccatattggacgttcaaatagaattaacattatcgactcaaatattcaaaccggcgatgactgtgtttctattggagatggtagtaaacaaataactgtaacgaatgttacctgtggtcctggacatggttttagcgtcgggagtttaggaaaatataaagatgaaaaagccgtagaaggagtgattttcaagggttgtacgatgaaaaatacaatgaatggtgttagaatcaaaacttggccagattctacagatggtttggcatcaaatatgcattttgaagatattgacatggaaaatgttggtaatcctattcttatagatcaagaatattgcccttggaataattgcaacaaaaaggtatgcataatcaattattggttactatatctaaatacatgcatattgtgaaatttttacataatagatcataaactaaaaaaaatacaaaaatacgttaatatggataaattttattttactgtttaaactttttatttataaaaatacagacttcagtataaacaaaataaattgctaaatatctttgttttataatttatttatagttgttaaagggttgatttttttcgttgtttttttagttatttttagaattttaaaatcgtattttataaataaaaactttaggtcataaaattgtaaataaaatataaaaaaaaataatatttttaaaaacccctaaatatattattgtattatagttc

SEQ ID NO: 245921 - DNA, 1618 bp, Cannabis indica
atatatcatatatgatcaactgcttcattttcatttatttaatggatgctctcacgatattagtaccgtaatttcagacttttgattcttcaagacaataaataaacttgccatttgtcgatcaaaatttttatagtttaatgctacgcgtttttttccatttagatatgtttagattatatatttttgaaagagacccttccctataaatatatataagagttgacattgttataaatttcaactgtttttttaaactagaatgattgataaaagtcaaattaacgcggtttatattaatttatttagctattgcttttcatcagatagcaaacgatcggtgcgctttgaatagcagtacaatttcttttcttttttttttaattaaatgatagaattttattaataaaaaaaatgatacacaaatcagcatccataataagacaacaatagatatactcacttacatattacaaataaaataaaaaatttgttgatctcttttagaaattttctcctaacaataagttataatttcaatactctaatcaaattattcacataaaaaatcataaatatattttattcaaaaatacaagtattttgattccactaaataaaatatattgttgtcgtataagtagccgcaacaatattatgaaacatgttgtgatctcatttaatattcagccacattagccaatcgattatgacactaaccaaattgtcttaccaagccaagacttaattacatacagaagttgcttgcttggaaaaaaaaacactcaaagaaaagatgagtatgacacccatcaccaacatcacacattgggagaaatgtacctcttgacagtaggtgattttgttataaagttatcatgagaggcttgccaaatgagaaatgtatgttttggtatggataatttacaccaaattattttacaattatcaactttagcataaagaacaagaaaggaattgtaaagtaaaatctgagcaaaaatctacccccttcccagcattcaggattgtctcccgtgtgaaaatattgagaagtttacgccaataccaactcacatcccctttcttatcaattacccaaaaaacttagtttttgaagtagatgacattgatccatttaacctaaagaacatcttgcttcgtagaaagaacccaaatgtatcgagcaatcaaagttttgttccacttggctccttctcaaaaactcaagcctccatacttcttaggcttgctacaagatcccacgaggctaggtgaatcttactagtattgcctttcacaaaaagttcctatggagtttatcaacatcctagacaactttctatgggagcataaagaaattcatccaataacaataaataccaaataatatcgagtgaatcaattgttctctccctgcaaacgagaggtgctgacttttccaactatataaaacttcaattgaattttataagaaaataaatacaatatccactacctacattttttttggtctcattgttacaccgatatacttaagaggaaaatgacccttttcaaaaggaaccagatcccgaatggccattttaatcatttcatcaaccccgccaaagtaaat

SEQ ID NO: 245922 - DNA, 764 bp, Cannabis indica
ttttaaaatagtttattttattattttaattttattaaattataagatttgaaaatagcatgtgggcaatgcatccagagtacaaggcagcagtgaagcaagtgtggcagcaagaagtaaggggctccaaaatgttccagattgtctctaaacagaaacttctgaaaggtgtctttaaagagctaaacaacaaaagcttcaatgatattcaagcctcagatattaaagctcgagaagacctcaatcataaacaagaaatcctccagaccgaaccactaaatgttgtttttcagcaagaggaaaaagaggcgagagaccactatgctatgactcataaagcttatatctcctttttacaacagaaatccaaagtttcttggataaaagagggagaccaaaattcagcattctttcatagctgtttaagagaaagaaggaggcaaaacaagattctgtcaatagaagatggagatggacaaagaatagaagacccagctgccatcacagaagctttcctgaagtattaccaaggtctgcttggatcgaaaatgcaaagtagaaagccagttaacaaaaagatgctgagacaaggagctgtcattactaagactcatgaagacatactaaattcagattgcacaaaagaggaaatcaagaagattgtgttcaacatcccaaaaataaagctccgggtcctgatggatatagtagctccttttacagaaaattgggacttagtggaagaagatgtgtatctagctgtc

SEQ ID NO: 245923 - DNA, 551 bp, Cannabis indica
cattcaattttaactcacccggagcaagggtagccacgacactggtaaggcggggagcagggtagccacattcaataaaattttacataactttttattttaatatttttgttataagtttttaaatataatttattttgtttgaaaggtatagtttttaagaatatgtattgaaaggaaaaataatgaaaaaaaccaatataattaaatatatttattttatgtaaaataaaaattattaaaataacttatttataaagttttgaagcgcaatgaataagtttaatccaaatccaaggcctcatatttttgggctttggatcttatgagtcacaaaaacaccaaaaattgacaaacttttgaggacagccatgcccaactcccacaatgatcaaattaagtaaaaattcatacttaaaaaagattacatttttatttgcttgtttcatatttgacgagatagaaatatttttattatattaaacaacaaaaatgatttgattcatattaactttgtctattcgcacaatgcttaaatttatgataataat

SEQ ID NO: 245924 - DNA, 1023 bp, Cannabis indica
tagctattatattttatatttttttctcacataattgaactttggacctgaacctcgaagccggaccctaacctggactccgaccccagtcccagacccaaacttagaccctggcctaaacctcggacctggacccgtacctcaaaccccagacctgaacctaaatcccgaagacagaccgagaccaagaaccgaacccaaacccgaaccaagattcagacccgaaccccagatcccaaacctgaactcggacctcgaaccccggacccaaactcggactcagaccctggacccttgacccgaacacggaccccaaatcctagatcccgactcggacccagacacgtacccaaacctggacacctgacccggcccaagactcagacctagccccaagttcggggtttgggtccaggtctaggatctgggtctgagttttggtccatagtccgagtccgagtttggatttgggttcagggtcagcatctgggttcgtggtcgggtctgggttcggggggtctgggtccaagtctagtctagtccagtccaaacagcctcttaatgtttccatggtggctgaagttgtatatgcccatttttttttcttttttgatttaagacacgtactgttttttttttttctttttgtttttatttaagaaaataggttaactcctaacaaataaatagcatgtgcatctctttttattcttgcccgttgacatcacgttcgttagttaaatgtttgttcaataaaatagacaaaagttagtgtaaaaggtagaattgctagtagttattataaaaaaaaatatgaatttgattgatatttttttgaaattcgtggacaaatttgcatattcacatataattgaaagagtcaccatgctacaaattctaacttcccgtttcaaaaaaaaaaaaaaaatactaacttcactatttacattatatttttcaaatgtcatgtgcttgaatttttaattgaaataagaacaaaatatattcaacatatactgtaaa

SEQ ID NO: 245925 - DNA, 1344 bp, Cannabis indica
agtatgttgggttttgtgccttacataaaacccatttcaatataatcagatttactaattaatataagaacagaaatcgcttttatgttgcatggttcacataatttatttcatgattatttttaatgtataaattctattaagtcagaacatatcaatactacaaaaattagcttcagtgacccattttgagagactctaaaaggtgttagtgaaatttcaatgcgagtcactaatgtgggtaactggaaaggtaatatttagtgacactatagtctgtgttactaaaaccttttagactcactccccaagcgtcactatagacttttagagtctcaccatgttagactctaaaaataaaagccacacactccacgcatcactatatttatttattttaattttaattatttccttttttttttttgaaaagtatttaattattttttatatagaattttattttttaaaataattttggtaaaaaaatatttaaaaattttgaaacaatttttttaatgtagtactatataaattgtgtttttttacttatctcggtagaggaaaaatgcctaaatatactacaagaaaaatatcttttagctaccaaattttattgttagcaaaaaatagtttattgctaccaaattttagtagaaaaagttcttagtagtcaataccaaacaaataagaccaaatatttctactgcaaaattatttagtaggcaaatgttcattttagctaccaataatttttggtagtaaaatttttgtgtttagctaccaatttactacaatatttcttagtagcaaaagatctttgtatttttagctaccaattgtatttagtagcaaaataatattttcagctactaatttttgctactattttttgatggtaacaaaatatgaattgttcgatgtacgcattttactacattatttgtagtagaaaaatatttcttctctcaatcaatgcttagcaattattttctcttgtataaaaatattatttaacacttttttattttatatttaataaaatataatattttgttacttactaatttattatagtaaaaataatattattatttctaatattttcatactaaatattagaaaatacagtaaataattgactttttttttactataataaaaacattatttttaatgtttgtccaatgaacttaaattatttatgtaattttgtaattaattttagtgaaatggttttattctttttcttatcttttattgtatttatcacctaaattattaatttggtaaatatatacaatttgcatgtatttttaaaaaaattaaaattaattataatta

SEQ ID NO: 245926 - DNA, 1046 bp, Cannabis indica
cttgagagcatctttgtgtttatctttgtctttgtcacggcggctacggtggtgccgacgagatcggcgatgggaggaagagggagacgacaaattagaagagtccgaggaagatgaggatgaagaagatgccgccattagagcaaatcagaaactgaagtagtgatccttcaaaatgtgaatgaaatagggccagcttcgaaacccaatttcgtattcagaaatttacgaaatatccttctaacttgcttaaattatattttcaactctaacttaagaataatctatctatatatctatataaaaaaaaaatataaagctgtaacgtgtctctctaaaattattctaattatttttatttatttatttttttaattttcttatttttttatttttattaatttataaatataaattgatataaaataataaaatatatatatttatttattttattcttaattctctcatttattttatattttattttttaacaataataaatcaaacctcaaatacacatcaggtttttggcttttttttaaaaaaaaattaagatatttaaaatctatgtgtatatatgacacttctataggaactcttattttgtctttatgggtagggacattttattgtacctacattaaaaatctaagggtgataagagagtggggtgtataaaagtgaaggtagagtttagtctatattaacatatctcctccttgtttttttaataatttttcttttattttattgttttagcaaaaacaaaatggttttactttgcacaaattttcttgaccacctttgattcagattttttttttagttattaattttacttgaaaaaaattctcaaagcctttttattcttcttctaacttttgtaaaaaaaaatacttatttctctttctttcaataagcattaaacccaaatttgtacataaaaaaactaataaaaactaaacaacaaagatttagaattgtactagtgtgaatatgaaaacttacaaacaaagtgcgagatcaatctaaacaaaaataaa

SEQ ID NO: 245927 - DNA, 1165 bp, Cannabis indica
tctctttctctctctctctttttttttttattatttatatatatatttatttttattaacgaatttatgtagttattattctctttagctagattggattggatggatatatacttgtatatatataaataaataaatataggttactataaatatggccaaaaaaattacaagttgcatgtcacgtagttatagttcagaatagttagaatagagaagagagttcttgaaaaatgacatatatgtatgtttgttttctaacacagctgtaaaccataacacatcacaacaacattcctgaattctcatattatttatatcttgtttaaataataaaacaataaataaatattaattaattaattactatttgcaaaataatattttttataattactatttatgaataatattattaaatttatatttgttttgtatttcatgccaagtttatttgttcatgtgcttagtgtgctttgtttgtatatatgttagtttgtcatgtatatatcatgtatgatggttcaagttaatttttaagttcatgctaaaagttgtggtgtgtggtaattatgacagttcgagagattataatatcaagataagttcttcattattttcataatttgaaatgaaaattatgtggtataattcttctaaatgaaaaaatctctaaaagttatttttaaaaagttaggtgtcttccaaatgttcttttcggacaactaatttatccattattccaaaataaatcttgtggattaatgattgtttagttcgaaagagagttttcgaatgaatattatgtctacttcggatttaatcttcaggatagctagccctcttccagaaaagtgttctagacaactagttattcttctattagaatgttattttcattggaaggcagtttcggatagttgactccagttggttctatcctatatatctggaagcctctccagcgagtacctttgatccgtgattttggaagctcgtatttgtttccggatgcactaagactgatgttgacgtggagatctcgtatttgttaaattgtaattttttattttttaattttaaattattttttgttaaataagtaatataataatgaatagttaattttatttattattttttaaaaattacttatttttattaa

SEQ ID NO: 245928 - DNA, 863 bp, Cannabis indica
tgtattgggatatatgaatccctacatttaaagaaattatttaaaatctttcaactttgtagttttgactgcaaataatctttggattgagattctttcctgtgcgtattccaaatcctttcctttccaattattcacaaggactgttcaaagtcaatttgaactgctaatagagatctaccaatctcaaactttgataagtttgactttgacattagtggcaacctcatttcgacaagtgggaatggtgtcgtttggtctacaaacacagcaggaaaagaagacatagccatggaattgagggactctgttaacttggtggtgattgatgcagaccatggaggaatcatttggcagagtttttttgcctgaccaagaattcttaccagaaatgacactcaaaagctctcctaatcacaacaatttgcttaaaatcaaatctgggaacgaaggtggcagaggcggagaggaacgctatttcctcttcttgtgatgtttccaactctaagcagctagtggtgagaaaggatactgctatgtttccttatttagagcctatttcaaaattttatggggagtcgtgtggtgttgatagagagggtgtgtttgaattggttgacttagtcaactcgtgctctttggttggggcggtgggccagttggatgttggggatagtgggccgagatctttaatgcaacaaatgggtaatgttgatgctcctaatatccttaattattctccttttatttcggccacgttttcaagaagttgtcagtgggccatataaaagagagtcgtgtatccaagataagtgcgttgggctccttcaagtcgaatgggccgtgcagaatgctagacagaa

SEQ ID NO: 245929 - DNA, 589 bp, Cannabis indica
caaacaacacatctctaaacatttattctatcagctcactaaatacacttttcactgacttttgataaatacaaaacaaatgattgaaacgtgcattagcagcttaattacttctctaaacattagactaagagaataattcctctataatgtttccaccatcaatctcaactcaagctgctatttagcctaacattttgttgataaactaattcattgaagcctccgttgttgttggggtacattacaacaagcacaaacaaaccaacaacaattacattatagagagagaaaccccacaaaagaagaatgaacccaaaagaagattataagtaaaatatagttgtttgctaaatggaaatcagagttgaggtgcatgctaggtgagtagtatctgactagcatgtactcatacaaatgataccatgaacacctccatgtcaaggttcttatacagttttcttaactcactctcctgaatcccactccacttgcatccagtccaaatatatttcttattgctgacgcaaaacaaaagtaaacaaaaaacaaatcatttagaataaaacaaaaaagaaaaagaaataga

SEQ ID NO: 245930 - DNA, 985 bp, Cannabis indica
gtagttatttgtatggaatgtaatacattatttatttattatttggaatattcagtccgttattttgttttaaataactcatgtattctactaaaaaaaaaaaataataaactcattattatttttgtttcaactatcctttgttccataaatttatgtatttcaatttatgcaaataagcattcattttcctaatatatttgaatttgtgtttaatattttactcatagtaatgctcaagttcaaaatcaaaagtttacaagtattatttcttttttccctctctgaatgagttatgagttctaaatttataaatgagatgaaaactaacttcgtgaatgaatattcagcttcccctatatcaaaataatgttatgtattacaactacaactaaactgtattgtatgaaactgaaaatgtctatatcttactctagctctctccattttcttgaatctgtaagactgcgtcgaagttgaattgttcaccttccttaaacatggattcgagatactcaaagctttgctcaactctcaaatccttgctaacatttaaaccttcctgttgtaatttataaaaaaataaacagataattaaaaattgacccttctcttatttcgccatgtctaatggtaacatgtaataatattcaatatttagtactaaaaaaccaggttcaaactttaaactcaaagtaccttttctacatattcattaacactaatgttgatcactttcttgattacttgcttgaaaactttagaaggtccaatgacttccaatagtacatctttcggtatctgatgtatgagatcattcagtaacaaagatgttattttacccgaaaaagcttattgtctagtcaaaagacgtgtaaatttacagtttccttaaggacttgtgactacgatgagaaatcgatgtttaagaaaaattagaccataaagcctttaaatcgatgtttaaggagctgatattattggt

SEQ ID NO: 245931 - DNA, 569 bp, Cannabis indica
aaaaaaaaaaaaaaagatacaaagcatgaaccattgatattatattgacaaagtatcgagaacttatcaataactcccaaattaacagaacaatcttacagaaacataaatcatcgctaaactattgatagcttattgataaatactaaattgacaaagtaattgagacaaactagaaaccgtcgataaaacataaatattgtgtcgataaattgacaaaaaaatgtaacaaattagaaaccatcgataatatattggcaaagtatcgagaacctatcgataactactaaatttacaaaatagtggtaaacaaatagaaatcatcgataaactatcgataaatacaaaattgataaaataattgagacaaacaagaaacatcgataaaccagaaatattgtgtcgataacctatcgataaacaccaaattgacaaaactatgttacacaaatagatccataaaaaacatatcgataacctattgataaatttggtcgaaaaacaccataaccaccaccatctaagatctcaaacaaatacaaaatcctaaaaaaataaaaaaaaattta

SEQ ID NO: 245932 - DNA, 1388 bp, Cannabis indica
tgtcctttattcccaacattggattcacacgaactccaaatgcaggtattccatcttctgtagcaactcttgatggtataaatttagccggtggttgtctcatgccattgatgaatccatctagcctatggccacgtataatggttgagaccattgtctttcacaagatgtaattatttttgttgcaaagcaaatggttgtgacagagtgttaccaaaaggagtgctagttaaaatctccagtccacttgaaagaccccgactaaggtactccattaaagagttgcagggaactggtttggtaaggtacatggttttgatttgtcggttgattattgacagctcctgtgcctggttctgaggtatcgggtgatggctggttcctgaaatagtagcgtgagcttttgttgctttgataccagtttggaaagtgccaaacacactaataggaaaaactcagctcaaaaagaagctaggagataacaattcattatatagtgaaaatttacaatacatggcaaaaacaggggacaaatggcacaaggcctacaagcaaaaggctataacagaattgtcctacattcagtagtgtgtgcaccagcacactacttttagcagaaaaaattagcagccaaattacattgtttaatcaattcttaactgcaacaaaataaaaaccctaataattatgataaactttagagaagtgatatgttacgtatatagtaactttgcattattattattattgtcaatattattttattagaatgaaagaaaataactaataagtgtaaccattacagatagaaagagagatctcttctatctaaaaaaattcatcctctatccatagatatatttagccaattcatgaattgtaacattaaaattactatcacattgctcatcgtattatattatatatttatatccataggtgatttaaattgatttgttatatgtggggtttatttactggtgtaagtattggttagttagttattacagttggttaataactgttttctgttatttttatgtctgatcatgtactcttgttcgacctatatatataaaggtcattttgttattcagttaagggagagggtgtgtaaacagagagagtttatggtcttgtaatagagcctgagatcttgaaactcagtggctctcgagtgacacatgagggtgttgtaggagcatgactccatgaagttttgtactgtaatgcttgttctctgagctgaatctaataataacaaaggcaaagcctcaaggcggttcctcccaaggattagatctaagtgctcctcacttgtgattgaaccttgtaaactcttgtgttcttattgttctttactgctattttgtttattcttgcttctg

SEQ ID NO: 245933 - DNA, 813 bp, Cannabis indica
ttttatcgatgtgtggtttgagagtatcactagaactattttttagaaaatgttgggactttaatgggggatgtttctagtgtcaaagccaacggtctagactccacttaattccctatttcggctggtaacatccatgaggatgtataatatcaaatgtgaatcctaggaggtctaaagtgttcatttttatatactagttttccatcaataagcactttctaaaaaatacaaggcctggtaattctcaaaaccatttccatgagagttgtcttaatgcttagagatataggaaaataagcttttggacaaatgtgttatactttattcaagtcatgatgattctcactaatctatatttaaggttgtgagtgggtgtatatatatttaactcttgttatatatatgtgttatacctgaaattcgcctatcaaccagaagctgacacatgtacttcaggaggaatatgaatcaacccaataattatattattaaatgcaacttacactactacaaaagtgtgtttttgcatcggtcaacacgtcagtcaaactgacgccaaaaaacaacaataagattttttatcagtttggaattgagggcattttgtgtcggtttaaaaatgacatattcgacatttgcatcggtttatgatagtcgcaacctagcgtcaatcagaaattgacgcattaaataaagaaaaaaaaagcctagttcaataaagacccaattgacacataaaaaccctatgtataaagtaaatataaatctaaacctaaaacacaattagccgcaccccatctctctctctct

SEQ ID NO: 245934 - DNA, 1611 bp, Cannabis indica
gcatttcattattagtactacagttcaccccttaaaatggaaatataatgcacccctatctgttttagtattcgaaataagttataattatttaagacatcctgtaaaattttaaaaaatttggaaatgtttaacataccgaaaactatgttcaaacagtgtgttgcacgcgtaactattttattttatacgcgtgtaaaatggactgtttgaacattgttttttatattgtaaattattccgaatttttttaaaaatttatagaatatcttaaataactataacgtacatgaatatgaaaaaaaattaagccaaattttttttactaaatgccgaaacaagttaaaggtgtatcagtacatcccttttaaaggggtgcattatagaatcaccctacaatttttttaacataataattattattattatttaaaagaaatatcataattattaaattaaaattatatgtacgatataatattaaatattgataaatattattattgattttatattttataaaaatttctaatttgaaccctttattttgttaaaaataataatttagatttgtataaattttaaaatagtactctaaatttaattttggttaaattaaaatttaataaaaaattttaaaagaacaaaattgacctaaagtattatgacttattatattttttgctctacacttaaaaatatctttttacttggttatatttaaaaaaaatagataaaaattgagtttaggatattacacaagtccactttttcatttaactaaaaaaaacaatcagtaatttttatcaataaccctcatcgttaagtacatcttcgttactatatattaacaaattacaaaagactaaatataatttaaattatgacaagaagatatatgtattaggatcaagtattcattataaattttgttgtatactacgtatatatattattacaattaatgtaactcaatttgacgttacattttttttctttacaaaagaataatctgtcagtatatatatcaaagaattaaagaataattaatctctaaaaaaatataattaatcagctcagataagcttgctagcgaattcgtcgatggtagttccattaagacgagccgaagcagattttgcagaaagctctttcaactgcgacaagcttcttcctaatttcaaagccaatttcacttgaaacaactccccattctctcttttctcaaactcttcttctgcaagggtagcctcaatctcatcttcaacaagtttgaaagcaccgccacagtttctgtacaattcaaacaccatcccaacttgtccaccatgctgaaatccattaacggccgtagctaaagccccggcagttactgccaaaacaccagcccaagatccatgtccaacaaacggagaactaacggcagcaatgccagttagcaaaggccctgaaattgccaatgctttgtttattttcaaaaccaagttccccaatctctcgtaatctactctatcttttgtcttaacaacttcaacaacctctctcatttctttctcaaggctctcgttccaaccattattgttttcttgttgaaacgattcgttttgaccc

SEQ ID NO: 245935 - DNA, 893 bp, Cannabis indica
ggtaaagctctacaattttagttcaaaatcttggattgtttcagagtaattttaatttttatatcatgtgaatgtataatattatattttttttcacattatttttggtatttttatttttaaaagtatttgaatggtataatatttttttttaaaagcggtatatattatattattatgtatataaaataattaaaaactataattatatatctatttttagatttttaactttacattattattagtattagttaaatatatataatagggataattaaggtaaaagttctcaaaaatttagggtttatggtcttcaactttaaaaatcagtggtgatagttcttagttagtaagtgtgttggtccctgattcgttaatttattttaaaaatacgttgatatattatcggtccaaattataattttaattataattaatttaaaaataaaaatatcattaaaaattaaaaatattattattatttattttctttatcttgtttttctcgtcttcctcaaaagtgtgagggtctccacaaatttcacatccaactgaagcttgtatagcattggcaactatagttgtctgctttaactgtttagtgaatgtagctacctgaactgttaaagcagtactgacatcaacttcatgaataccatttgttttcttcttctcagatgctctttcatcaaaccactgatggttgttcatagccatatctttaaaaaattcatatgatcttatgctcatgaatgtgcctccagatgcaacatcaacaatgattctagtagtaggtcataaactattataaaaattgtgaaccaacatccactactcaacacaatggtaggggcactcactcaatagatctttaaaatgctgccaagctt

SEQ ID NO: 245936 - DNA, 550 bp, Cannabis indica
cttccccaggcgatgtgggattgcacagcttacccggtatttccccttacggatcacgggactactgactgtcacattctcaatctcatgaaccacttctctcaggacacgatttttaattgaggctaggaaatgtgagagattttgggttagtaaactctacaatatttttctcactccttatgcaaatgtgaataattgtaaagtgattggactatacacaccaaatcatagatttattctctagcaaacctctcataatcatttattaactagagatcactcgaggaaaagaggtattcctattatgtctcaactttgcaaagtgtgcaatataggtgatgactgtcatgcccatctcttctttgagtgtcatttctctcagcaaattatagaattatataaaggtgattcactcttggcttggtgtggccatttggccaaataattacttgggctagttggcatggacttctacaaagagacagcgtatagttactttttgatgtttgcagtagttgtgcggtaacagtttatcaagtgagtaatg

SEQ ID NO: 245937 - DNA, 643 bp, Cannabis indica
agagagcaattcggtaagttggatactaggatctctcaactggaagaacagctcatgaatgttcaaaaattatcggttgggtctaggtgttggtaccaagaagtagagacaagaaaggcccttgatgaggctcttaggaggaaaatggtattttggcaacaacgatctcgtgtgtcgtggatcaatgatggtgataagtgctctaaattctttttcttaacggtcaccattcgcaaccgtcaaattgcagttgagagtatattgaataaggatgaggtttggattacagataggaaggacattgggaaagaattcttggattatccgggggacatctttgctagcccaatccagggcccttcgaagaggttggattttctgatctcaaatcgcctaacccctagtgagcaggtggatctggaattgatcccaagccagctggaaatttgtaatacccggaattaagaaatggattagcaaaaccctaactagataattatgtataatggaggaattatattattatatagttcaatatatgtgatttatatgaattttaatatattaaagaccccgttggtgagccaggggcattttggtaattaggacccgagaagggtaaaatgatgaaattaatttaatt

SEQ ID NO: 245938 - DNA, 1214 bp, Cannabis indica
aaatattgcaataatatatgtataaattatatattttaagtgattttataaattattattgaaagatgttaagttgatagttattgataagtgtgatttattaaattggaaatttattatctttggcacttttttaattaaaaatgttattagtgtttttaataccattattaaaagtaatatgacttgcctatttgttgatttttgcttttttttttttttaaataaaatatagttctcattaagattaacaggcctcagccataacaatgtcacacaagaacaaagagcattcagctcattactacgtacaacttgacgataaatttatgagtgatataacgatgtataaaaaagaaatgaaagactgctgggatatttatgagtactttttatagaaatttttaattgtattgtacaatatgttgtacattctttaaaacaataggacctagcaaccatttttgtctttttaataattactggttggtatttaactgtcttcgtcacgtgacctgtaatataaatttttaaaaaaaaatttgttaactatgttgattttttgtcttagtttttcatgatttttgtaaatttataagggccaaatttatttattcattttgtggctctaaaaatatttatgatattttacacatattttatttttataaaatagaatactttaatttttttaaaaaaaaaaaataattaatacataaaatacttggttaattttataaaacaaataagaaataagatttttattaagtttaattctttttaattatgaggtctactaattattttatagggtgtaaataatttttttttaaaattaatacacttttattatagttatagattgatagatattgtctcaatttaataaatttatttgttatatgtgatgattattactatctaaagaggttatataattatcaaatacaaaatattcacttaaaaaaaaaataaagaaaccttattaatttaaaattatatttgtcattgagagactttgataaaataatcacctccacaaatatttcacataagataaaatataaattggagaacaagcttatttagcattgaccttaataagtaagaggaaattacacttagtatgggattttaaaagttcttatgataaatatggcacatttaagtttggtaaatttatatggtaatttttttattttttaggttttttt

SEQ ID NO: 245939 - DNA, 597 bp, Cannabis indica
caagctgtagaacaattgaactagattaaaaaatggatatttgttcaagaatgttatcttaatggaattgtccataggttcatccttcgaaaccatatcatatcggacaataacagaaaggcatattaaactaacacttctcattagtaagaccgattgattagtaactatataaacatctgttgtcacatcaggatgttcttagaatgagtccccaactaaccatagagaatatgctatacattcatatcacattatatgcaatgtagaaggagtttggccaaaacaccgactctgagagcccgactaatgaatttttggctgagggaacatagttagaataaaaaagttgcatgtatctgtgcctgatattctgtaagatctcatattctgtaatttcaattaaaataacctaaacaataaggcgtacatattcttctccccttttctctgttcaatcgaatagtttgggaaaaagttaaaataattaaagctatatgatatgcatttgtactgggttgctatgttaaacgattttaaagaaattgccacaaacagaagggttgtacagaaataatgtcctaattgagacgaaga

SEQ ID NO: 245940 - DNA, 827 bp, Cannabis indica
ttttagttttttaattttctttttctagtgtaactctatttagttataacctctcaattagaatataatttacttggtccaaagtgtattcttgaatagaggttctactgtatatcaaaaattgtttacaacgtgttcaaacaaaaaaaaaaaattatttacaacgaggtagaaaattggttgtttgaactataattgttactttcaaaattgcaaatcatactgcaccgtgtagtttggtgaaaattcaaatcacaaccgcactgtaaaaaatttaaagttgtaatttttgtgcagtgtgagagtttaatgaatacccatattaaataatacgatgcacattgtattaaagtatagagtaatttacataaatatctaaatttatcttattccggttgtaaataaatacttaagcttaatttttagcagtaataatacctaagttataattttaaaatttctgtaggtacttggctgttaattcttaaataaattgtcacgtgacaatccttgattggtccaggtcgttaaatttttatttttaaattgtaactgtaagttaaacttatgtatttatgccgtagattactctaaaatataaggttatgatgattaatacaatacaaaattatatccaagcatagtgttatttgttattgaatataatacgacccttttacagtctaccaaacaagcccttaaaatatcaattatggcaatgctacataataatttgtaaataatttgcatcaatagatctccaatggagatgcaaatgtaatatagctcactttgtcaaaattttactccaatggtgtgtcaaattg

SEQ ID NO: 245941 - DNA, 1304 bp, Cannabis indica
gtagctggtattggaggcagcttatagctctaaaaaactagatttggcctcttattgatgcacacaattttataacagaaaaatagcagatggctacaaaccgttgtgtcctgttctgcaaaagcaaaggtggagtgagcaagtttggggaggtttaatacccccaagcattgctttattttgtggattgctgtgcagggaagattgaggaaaaaagacaggttatacaagtttggaatcagtgaaaatgtttgttgtgttctctgcaacatgcacgatgaaaaacatgaacacatgttctttaattgcagcaaaattagagggtgttttgatgagattgctacttggatgggatggaaaacaattgatactacacttacccgtgtcatcagaatgatacaaagatcaaaggcaggtaagtttaagaaaaagatcatggctgattgttttgctagcttagtgtacaatctatggaggatcagaaacgaggccctatgctaaggtaaatagcctaattggaatagtatagtgaattgtataaaagaaaatgtaaagcaaagagttgtattagtgtggccttagaaggttagtaaaacaaaggaaaagtggttttattctctgtgaactgtatagaaaattaaaggctatggcatgattgtcatggtgcttttaggttgtacaaaatagttaatttgtaataatagtcaatgatttataaaaaaatgtgttatttctatatccaaaattgatgtcagtcactgtaattcactatttctaaaaaaaaactcattgaccattatagaaggaaatttataaatggaaattaaacaattcagtcactaaattaaattattgaagtaaaaaaacataaatcaatcaaaatatactaaattagaacaaaaactaattaaaaacatataaatcaagatttaagaatagttagttaagatattttatcttttatattttttaattataaaacttaaatacatgagaaagagcttaaaactaaccaacgttttttttttaaattaaaatcttgttaacaacaatcagagtttaatacatcaatgagaatagaaggaaaatccttaatcaaagccaattcatcatccaccctaagtgcattcataggtaattcatgagcagcctttttggctggacgtcaaacatgaattagggatgcctcatcaaaactggaaagcaaactagcaatatcatccaataaggaacctagttcattacaaagggaaaaacgctttgggagagctgaaaccaaggctaagcaatctgactccaccaca

SEQ ID NO: 245942 - DNA, 651 bp, Cannabis indica
catcttacgtgtcaccacaaatatatgtagtataggaatttgtagctaccaaataatgctaagggacatcttaactcattgttatttgatagagcattgctattgggcaccagtggtgcctagcaccttttagatgtgtcgccttgcaattggttagcgatactccataaaaattattatattaaactatatgggacccgatacttaattgcaccaatagcgatattgacacgtaggagggtgttaggcactagtagtgccctttagcatttctctatttgatattagtggtgtttagcaccttcttaacatgtcgtattgcaattggttagtgatactccctaaaaattattacattatgagacttaatacttaagtgcaccaataacaatattaacaagtaggagactgctagacactactggtaccctttaatatttctctaacatttaacatgtcaactagtgcaataaatatttattatcatcactacattcagcatggtgtagagccagaattaaattgtagaggggccaatattatcgagtggtgcatacagaactgttaattttggtgccttaatttcattttaatggtgcctacccattgaaaacaatattataatttgttttataaatattttacatgtta

SEQ ID NO: 245943 - DNA, 641 bp, Cannabis indica
atatatgagctcaacataatcatcctacactcataaataaatagtaattaaagacctattaatttagagtagaaaaaatacatagagtagaaattaagtagctcatttatgaaaaaataagacttaaatgttgtaaagattaagttggaaaatgacccaaaatagatacagtagttaggtatgtaaaaaaatgaacaaaagaccaaatataataaatatataataaaaattataaaactatttcatgtcaataaattttgtttttaattttttatacaacgataatatattttattaaaattctagtattacatattaattacagtaattacaaaaaataaatatactatatcattaaatatatgcattacatataaaataatttttgatgtatcgtagtatagaaaattaatataacgtaataataaaattatataccacaaaaaaaaaattaataaaaatataattagtatatcatactcaaaaggtatatattatgctaacaaaattatatatactactactaaaatatgtataccatactaacaagtttatatatagtcatattatatataggaaaaaaatagaaaaattccaaaaacggtaaaatattacaatattactgtgggccggcccaatca

SEQ ID NO: 245944 - DNA, 970 bp, Cannabis indica
agccttagtttaagacaataacagagtctgtactgatgaaactggaagaaaactacagttttataaacattgggtacttatgccgactaaaaaaatcattgggttcatgccgcttacaaacttaaaactttgggtacttatgccactatttacccatatacttataattgatatttttttttttttgacaaaatgttaatatttaagaacaactttaagtagaatattgatattaagtttatatttttacgataataattttttattattacttatgtataataaacttattaaaaatactgaaaaaataaataattattgtaataaaaaaaaatagagcaactataaaatacaaattatggttcaaaccaaattaatctgttttttagtggtttgatttggtttgatcattttattggttttgtttggttttgaatttttaaaaaaccgtaatagcagtttaatttgaaaaaattaaaaatctgaaccaaaccgatctgtaaacaaccttacgcataaaataactgtaaaatttggtggtattatatataaggaaaaaaacaaggaatataacatgaactcatgaaatctcattgaaatatttttcgtatagaactagaacatataatttaaatgttaatgtaatcagttagaaaatattgtaatgaaagctggatatatctgatgatctatctaggctattgtgaatcgtgattttgcttgagttaggatttttaattagagcactacaatatacagagacgtgggctttaattaggaacgaaagtattaaaaacaacatattaatactaaagacattcttaatactaaaggcattaacgacttgtacgtattaggaacaatttgtgtttttaggcaagttgaattttttgatgaaaaaaaaaattatttctagaaaaaaagtgtgaaaaatgcaaaaaaaaaaacaaaataaaataaaaataaaaaa

SEQ ID NO: 245945 - DNA, 734 bp, Cannabis indica
cataaacaatcactgaaacagtaaaattaaataaaattagacaaaagtccttaaatctaacaatcgcaatacttcaaggggaatttttaagggctaaaaaagtttaaggggcataatttagtatatgtaaagttacgagaaaaaattgctaaagtaaaaatactatatgtatgtataatatactgtagatgctatttcaatgaaaccaaagaaagtgggaagttaaaataatgaaacttaaatcttaaaagaaaatggaataggggcattccgagaattgaactcgggacctctcgcaccctaagcgagaatcataccactagaccaaatgcccgtttgttgttaaatcaaaacctaaaatataagtggtgaaataattaagatgcttctcttctaaccgaccaaggtgatagaggaaaggatgtttaaaattcctcacatcaccaaaccaccacacatataatattatagatatattcacgagaaaatgatgttttattttatgaaatgataaataaacgtgagggtggtccaaatcggataataattaagctcaacacaagcgtatatgattttacaaaagttcacgagactaatccacacacaggcagtcaattactttttgtaggaattcaactgtaccgggaattgaatataacataagttaaaacattccaaaataaaaactaaaaaatacatttgctcagtcaacaaacaacaacaacaataataat

SEQ ID NO: 245946 - DNA, 1075 bp, Cannabis indica
gattaaaattcttaatatgggctcatatgtatgtaggggtggcaaaacagctttcgacacggcacacgaacacgaacacgacacgaattttacatgttagggttgggaaaattagacgcgggtcaaaaacgggtcgacacgacacgacccgcttaacacgatgtgacacgtttgacacgatttatttaaatataaaaaaatgaaaattaataataataatataattatataaaaaatatatatttcgtgattcaatattaaattaaaaaataaattaaatttaactttctttaacatgaaattaaatatattttaattttttaatttttattatatatataacaaactatatatacataatgtatataagttttctaatagagcttaaatttattatttttccctacaattctagcttcaataataacaaaacgggtcacagtgggtcgacacgaacacgacacgattttttacgggtcgggttagtgctgagataattagacacgagttaaacaacgggtcgacaagcttgacacaaaatttaaaagccggtcacataaaatatgacacaaacacgacacgatgacaagctttgtcacccctatatgtatattagtgtattgctatttgcagttagacccaaaataaagtgatcattttagtaattgtgggtcaggggtattaaaatgtcataggttaaatgtgtagataccttaaaagatatttctaatttattgagaggctaaattaaaaatacttaaaattaataacctagctatgaggttatatatcggtagtggtccctaagaaacaagagccaatctaatttcttcttcctccatttagagagaaaattagagaaccctaagtcttgctttcttggaagatcattacccaaaatcactacatagatcacttctattaatgaattaaggcacgcttattctatttgagttattctctttgaatcaaaaaatgttttatttagatctatacttataataatatgtaatatgtttgtctataaaattaatcttcatattgtatatttgagtgataaatttttttaacaatt

SEQ ID NO: 245947 - DNA, 655 bp, Cannabis indica
acagttttcaactcagacaacaaggtcttacattcttgaataacttgaccaaatagcgataccatttcaatcgcacttcttaacgaacaaactttattttatttagtcctaattcagcaataaaaatcaaattaacaaacaaataaagcatttattgggacgaagagtgcagacgaacttgaatactcgttcaattataaggggccgtttgttatggttattgggtttgcttgcaaagtagtgtaacacttgaaaattgagggacaaatgaaattttgtgttgaggttatccataatattgtggtcatagatttagtctagtgaagttccaagttcgaatccttttttccaatgtaaaaaaaacacccgctaatcaattattaataaataatataaaaagtggcgtactattattggtacattttaatatagaaactcattcattttcatttaataaataatataaagaactgctaatcaattctaccacttacttacgacactacatcaatttagcatttgacactttaaagtaccaaataatcacatccatgattcatgttagaatgtgatatttatttttaaaatggaaagctgcatatttcatgcacttgaaatatttctaatattcattttcaaaatatatatatttaat

SEQ ID NO: 245948 - DNA, 1233 bp, Cannabis indica
ttgtccacttgtattgtattgtggttataaataatggatctctcaattatgagagataagcgtttcttcttcttcttcttcttcttcttactttctctgattttaccatcttcctaagcttgctctagctaagcttctacatggtattagtcgcctccaatgaaatcctcgagcaatacctccacttcttccaatcatgctaatcatggtaaaagtggagttacatcacttaatctctttaatgttatccatgaaaagtaccgattatttagtttaagagagctataaaaatcagtaaaatgccaagtaggaccagtgccaaaaataatatagcagtcaaacatatttgaattaaaatttagaagtgttacattaacatcatctttctaataaaaataaaccccctcctagacctacccgcgaaaccttaagttcattattaaaatagaaagcatgacaaaaacgagaaattacattagaaataagtttagtttccataataaataatatacgaggagattactctttgacaagcaaacaaagatgatggaatgcgctcggattctcagacctcacgcattccaactaatgattttcactgcagaattgtctaagaaactacccgaaatatttatttcaggactggaaacactctggtttggctcatctacaggagacaaagttggagagaacaaggcttgcttaggtcccctgcatcttttcaaagttttcctcatagagaggctatcagattgtctctttaagattcgatttggggatgcattttctttatctgcaaactgcttcatagttgaacatatgacaacatctgttgctacaatggtggtcatttgcagaggcttgaaaccaggtgcatcatgagtagtgtaatcatggatggaattggaggataagtgacaatgatgccaacatatggtatgtaaagatcagaaagatcatctacatccagagccttcaatgctcactacaaaaaaagccattttcgccgactagttttttagtcattaaaactcattaattagtcactcaaaattttttggactaattatttttagtcaccatttagtcgctgaaagtcggtcgtagaagagatttagtgactaatatatttagtcacgaataatgttattttctatgactaaaatttagttacaaaatatattgaaattagtcacaataagattgataaattggtcacataaataccaatat

SEQ ID NO: 245949 - DNA, 761 bp, Cannabis indica
gaatgtttaaaattagtgttgacatagcagatcgttctcaatcgaatcttcatggttatgtgcggtagtccaagactcgggcaactcaatcattgcggaattttcctcttcagccccttctggcctgcctcctatctttgctgaagcggaagctctctaacgtgctttatgttggtgtcaagctgttagattcctaatacaactcatcttgttagactgccagaatttgatcacaaaaatttagaaggaggtctatgatcgctctgctctttgaggtgtcattatggatatagtttcctctttgttttcttttccaggtgtttcaaccaggtttattctaagatcggataatactttagcgcataacttgtatcaagaagctttaagaactaacaaagagtgtgtctagaataatcagtgtcccagctttcctggatctttgtagcctagtttcttgttggtctttcggttacagatcttgtatttttccaaaaaaaaatatttatccgcataaataatttatgtggaaaaaaaaaaaaaaactacgaatctaataagaataatatatataatatattgttcacttagcatgtgaaagaaacaaagtaaactaagatttaataaaaaaaatggtgttgaaatttataattatattttggaaagtaatcttggcatcttgttctctccttactttttatttatttgtatttatatatgtataaattttaaataggtagtttttttttattattgaaattgtt

SEQ ID NO: 245950 - DNA, 842 bp, Cannabis indica
ttacaatgtaatgatgagtaactaggctataagcttcaacaacacaactaacgactgaagaggcttttcgatcactactttggttgatatcatgaggttcaaggtccaagaatggttgctacgcgaaaaaagctgacaagtggatgaagaccctagcactagaaatggagcaagacatggcattgcagtttgagaaatctcggtatttgaatgttgacacacgtggaccttatatgttgaatgtccaccctggaggatcaattgagaccagtgccgtagtggacttgcaagaatgaacttgcacttgcggcttgtttcaaattatgtaatttccttgtcctcatgcatgtgctacaactcaccaataaagtattagcatgttcacactatgctcgccatattacacaatagaatattaaaagagcacacatgaaggtacaattatgctagtttgtgatgagactgattgggaatatcctaatgacataaataacatgaaagttggagtgcctgttgagaagaaactagtagagtgatccaagaagaaaaaggttggaagaattaagtcaaaccaaattccttgtaattgtgaaaagattgtaataaaatatacttgtagaaagtgtggtggtaaggggcacaacagaatgtcttgcacctacttagtttaaaaattcttgttgaattttagtaatcgtgctgttatgtgttcttgttgaattcttgttggactttgttaaacattacactataatttatggcatgagcaattttcatttacttactgcaccattatctctgaaaaatggctgatccgatgctagttcgatatgggcccgata

SEQ ID NO: 245951 - DNA, 1104 bp, Cannabis indica
taattatatagtttacaatgatatgaaatgtgtgttgtttttgttatttttttatagtgattgtggtatattcgttgaaaagtatgttgaatcctttatacatgaaatgatcaaccatgtcctcaaatctttgaatatgaatcttgttcgaaagaatatgtgtgttgagctttttgtgcatggtatgaggaaagagtttaatggatatgagtctggttcagagtttactgggacgaagatgtgtgttgagctttatacaagcattgcatgtgagcaaggcatttcatcatattcaaatttctgacagctgtaagttttgttatctaggtttactatgtatgagtcggtataatcatgtactttgtatacaagcaggtttgacgtttctacctgtaaaaataaatattttagttgaagttataaatgagcaatgtttttgtttaattgtttatgagattagattaacatgtatactcgcatgtattaatgtattatttgtcgactgcatcaataaaccaataagttgattaactgaaatatatatatatatgtttacaaggtagtttataaaacaataaaatattaatatactatattattatgtggatatatatgctgttttaagaatgtgtatatttttatattttataaggtttattatgatatgcatacagtaataaactagtaggttcatttatagattatgttgcacaaatggttataaggtaaaacaataggttgttactttatagtttaagatgtcataatgagtatagatttgtaacatttgttataaacagttttgaatattgtaagtatttttttgttggcaagtaaacgtataaaaaatgattttctcacataattaatgaagtatttttgtagaataatcagttatgtattttaatttttataataacctgttttggtagcttttggtggtgcgactagtaaaggcagaggaagacgatgaagatgaacatgttgtcgattacactgggaatggtaaattttgcttaactttagagtttttatcgcatttactgtgtcgagtgtttggttgatctgtcgtgatgttgattgattgcttcgttggttctgaat

SEQ ID NO: 245952 - DNA, 1362 bp, Cannabis indica
gacaccaccccaaggaagaacccgggcaaagtcaatgaaacttggtgaataacaagtgaccaagagtcttgccggcatggtcacttgaggggcgcctataccattcaacgcattgaactggcataatgaacttatgtagagaaattttaaggcttaaaataagctactaaacttgcctctaagtcttgcagccatacttcaacttgacaaagtaaattcgaacccatatgtgtcaaggcaaggccataagaagatagccaggacgatcatatgcttgtcatagatggctttaaggctaaataatagtagtgtttgaaaacagagggcctatagccaaagatggaacatgaaagccttgagtccggatatgagatctttttcgcatgcatgagtccaagcccctactagaatcgcatagccaaaaaagaactagatagagctcctataggggttgcgtaccagtctacggctaaggcagagttccttgtaggaaccaaaccatgttgagtcttaagttgaacaatcgactataatagactcaccattcagcttcatacaaagtttttatatctctatagagccaaactcttaccgaagtaacaagaggatagaaaattggctacccacttagaaccaaggcccatgtcggccaaggttctcaagccttgaaagggtcgtccagggtcccatgacttagccaagaactggccagggtaaccaaacccaggcatgaataggtaagctttatagggtaaaaccctaaagctggccaactccaatgattaagccttagggacggccaagctcaagcaagaccttctaggtcagctaaggtaagttttgaatcccaatatgtgtttttctttcaaaactcaaatatgtgtgtcgtattctttatgactcaaagagtcaagaatcatattgaaggccaaaattgaatattttctatacaaaattcacacattacacattccaaaactatcacgaggattaatataccaaagagattataaactaacatgaatcaaaaaatttccaaaagcttaaaaagcttgaaacttgttaatggcaggtacaaaaaagagacacccaagaagagaagatgagatgtatgtagatagagaagatcaaagattcaaaagcacaccaagaaaaaagccaacacttggctagataaggctgctcaacagagactactacagacaagacgataactagaaagtccctatccgaccagacgtttaaatagggacttagggggtaaatgttatcctaaattttatccaacacttggctagataaggcatgtccacgtaagcccaagatagagtacatgtggagtaaaaccccggcaatagcaaa

SEQ ID NO: 245953 - DNA, 928 bp, Cannabis indica
ccttaataagagtttccttaccaactctggaaaaaagtttatcattccatatattcatatgggaggaaacactttggataagataatggaaaactgaattggtaaccctgcccacacagtgagggactcccagatatttgctaacaaaaccttccccagttagatgcaaagacgtacgaaattcatgctgagactcagttgaagtggtaagggagaatagaatggaagacttatctctattaaccaactggccagtggcttgattatagaggagaaggatagcattaagagcctcactggagcgaggagtaacaggagagaacagcatgctatcgtcagcaaatagaagatgagatagggaaggggctcccctacaaatttgaatgcccgaaaagctaccattagcctcgtgtaaacggatagcagcagaaaggccctcagcaaccaggagaaaaaggtacggagataaaggatccccttgtcggattccaccggaggattaaaaagggtcagagagggtaccgttgagagataaacgataagtgactgtagaaagacatttcatgataagagaggtaaaagaaggaggaaaaccgacatgagtgagcagatgatgaatgaattgccattcaactctatcaaaagccttttccatgtcgagcttaatggcagcccaaccaagtttacccgaacgtcttgagtggatggcatgaatgatctcattggctataaggatattatcagtgatttgacaccccttgagaaaggcactttgattagtgctaataatcgagtgcatgacatttctaatgcgattaaaaaaaaccttggagatgcacttgtacaatgtattacaaagacttactggtctgaagtctcagacagttttgggatttttcttcttaggtatgagaaccagaatagtatc

SEQ ID NO: 245954 - DNA, 626 bp, Cannabis indica
gagagataagttatcaaattaagggtctgaacatctgtatgttacttcatagtcaataatactttttttggaagcaatatcaaaaaacttagttttggtttttttattagaatggctttctctctcttggttctagagaactctagtggcatgcatccctctgttgctccaccgttcatggtggatctggtccatccaaattggtattgtgatggttgtgttcctctaattcatttcttctcttctaagccttctctacttcctttcttttctctcattaatccttgcatttattgctctgagggatataatgaatatccatcccatcttaatatcctctttcagagcattaaatgtgcaaatccctccctctttcttctcatcagatctcctctcttctcgttctctctatctctttcttcttcctctcccccaaacttcatcattactgtaattaaacactttgggttttggaaaatggaggcggagcttgggtttaatgatgatttgaagcttcaaatcatcatttttcctaccaggtctaggatttgggacaagatggctagatcctccaggcgatcacaaagggctttctggttttacctatttaagggaagatcaaggta

SEQ ID NO: 245955 - DNA, 507 bp, Cannabis indica
gatatatgatattatcattattttttgctaattttaatgagatgatgaagaacgaggagggttggaactagtacaactgggttcatgcgaagatggtgatgaagctatggttcaagtgaagagaagttgaggatgatgatgagatgagagtgaaggtgggcgaagggttttttaggctcaggtcaaattatgggtttagtgatcatgggcaaagaagagaggagaaatgtgattggggtatgataatggagtttctgaaaaatggaggtggagaagggtagatggtggtcagggtggtcgtggttcaggcatggggaaggtagagacgaggtggctatggtggttaggatggaaaaggaagaagatgagaaaatagagttttctgagaaaaggaaatttagggtatttgagattgtttggtttggattttattgagaaattatgtttttgttttgttttcttttttctaaaaaatccttcacaactcgtaaagaatcctaacttacg

SEQ ID NO: 245956 - DNA, 766 bp, Cannabis indica
tttaccttaatcgtattaacattcggagtacgccattgctcagtattacgtgcgttctaagatggcacgttacaagctaggtgatgcccacaagttggccaaatagtggtcaagtggtggcgcatgttggtgtgcatgctggtaccatgatgatgcttagtttgtacagtagtggtattttggtaaatatcttcaatattatccagattgggacgagaatttgtattagccatttatttaggtcttcaaatacaatggtgcaataagattcgagaaactcggtgatttggtatatggtgatgaccatatgtctacagagcaaaaatcatatatgttcttggtagaacgctaaaagcttagaatgctctttaggggggagaatatctagtgtcaactctccaccaccccttggcaccttagtgctaagtgagttactactagttagtgcgactagtagggtgggcatatgaggaccatgaggggactcatatgtctccatgagttggaatactcatggacattatcgggccgatccggtaatgcgtctaagaatgatgccagaggttagcgggtacgattccattggcttactagtatgccgcttgcacgggacgtgacctaaatgtccaaaagatgttgtggtgcaccttggccacgagtctcaacacgagatgacacgggtagtcattcgtgggctggtttgcatacgcgcatgggacagttgcaccatgtaggaaagagacagaggtctaatgtatgcatctag

SEQ ID NO: 245957 - DNA, 755 bp, Cannabis indica
aggaaaaaccaataagcaataaacaacactaagttttaaagaggtttgacccctttagttcggtaatagcctactccccttagattgtattaacttgagaataaataatacaatgtttcctctctcaaatctctaacaatataatctctgagtgtttctcttagatctctctctaaagcaattcttttgatcccttttacagtgaagcttgatcactatttatatggtcttaatgcatgagggaaggtttactttttgcttacaatatctataattggaaagaacatttattacataattagaatacatgaaatgggggattgagacagcctgccatattcctctcattcaatcccatgattatagggattgccttcgtgcttgggcttcacgataccattctagagtagtgaagtcttggtacatagctcggagaacttttctcttttttttctcggataatctgccctttactctgctcagataagcagactttgtgcgtgcaaatatgttgcttgaagtctgttcgtaatatctctctgcccaagtacaaggaatgatggacacatgtcactcgtacatgcttccatatcatagtgcgaaaaatgggataacattttccccccaagtctgtgcgggacttctgaagtcgctcgtggacttccctcagtttggatatttatttgaatgggtggtacgtgttcgaagcgtctgttggtgatatggcatgattttgaccaagggtctcttcaata

SEQ ID NO: 245958 - DNA, 543 bp, Cannabis indica
taaaataattatagtagagatgttaacgcagatttttattaactagatttgagcttaaatggtgatagacttgcatagaaaatagaaatagtaaagacaaaaaagcaagaacacgaaggtttttacgtggttttgcagttaaaattctgcatagtccaagagtcaatcttattagatttctgataccgttctaaggctttttttcttatgaattttcgtcccttttttagtgtaacatgcctctatttataattacatagtcatgcagttaattacatagttgcctgatatctttacaacaattatcccctgaaatattgtggggtttgattacataccacgtaaattaaatgcggttaatatttgaaaatcacacagctgtgataggtcaacttttaccgaatcaaggtaatcatgtattaaacataatgtaaatcgcaacgttctgggatgtcccaggcttctagacaattcaaacgaaggtgatgcttttgtctttgaatcatgtgttttagagaatgacaaatccacctggattgttga

SEQ ID NO: 245959 - DNA, 1152 bp, Cannabis indica
ttaattttattaaaaagaaaaataaatatttaaaaatataatttaaaacttaataatccaacatacataataaacattagattagtctaacctaattctaatgatctcgttataaaattgctaaaaaataaattttattcaatacgcattgacaattttattagcgtttaggaagatgagaattaatattttaaatttaaagtattttttcattaatcccatgtattaaatgtatattaaatcaattaatatatatttttacaataaaatatattaaatatataaaattataagtgtgttttaaaaatatataaatataattggatgaccattggatgataattggatcggtttggtcggttatctattggatcgaatgtcccatccgacaaccgatccgatccgattaaatttttgaaatttacatctgatccaattatgattggatatccaattctattagatcagttgggattggatcggtcgattgtaattaaattggatgactctctacacacccatacagttatgtggatgaaagaaaaaaaataaaaataaaaactaatattttggaatgatgtgtgtagtgtacctttgccaattacagatggtgattccattggagatgctctaataaggcgggaacagagatcataaacacgacgagaacggggatgacactctttgccctgacggggacccgtttaatatttagttatctttttgataatattttataatttataatttatatttgtatttttttagtatgctagtatcttgttataattttttaagttgtgttttataggataattaatatattgaataaataatgtgtaatattttaatttttatgtagtttaatattttaatacatttaaatgtttaatataaattttatttttatattaggggatttcttgccccattcccgataaagaatatacggggatggagattaaaatccttaacaaatatggagacgagagagtactccctgctaatttcccgcccatatgcatccttagctaaatggaataaggatcactttagttattgcaaggagaaattgattttgctaaataacctcctcattgatatacaaagtagagttcctaaaaaattgaggcagatgttcaattggaaatt

SEQ ID NO: 245960 - DNA, 736 bp, Cannabis indica
gatttttgtaaacttgttttgaccataatttttgactccaaactccattttggacgttctttatatcgttggaaagcctatgacgagctctattacttggtctagagttagaatcctaaatatgaatatttattaatgtgattttggatttaatcttattgtgttttaatcctaggattttgacaaggattaccagcatttactcgagagcactcgtaaatttggaattctcctcacactttggaatttaggtaagaaagtgaaccttgcacatagagtatagtgcaaaggcacatttgtatgttatgtgagtcattagttagaaatttgagttaggattactaccgaaaagtttctatatctatgcatgcaatacatgaattaattgggtatatgtagagggttatgcgggcaaagcataagtactttaatatatatgttgtgagttgtgcagataagacataactaggttagactcgataatcaaaactgagatataataaggccttatgcaataaatagacgtgtgagtgtaacatatagtgtttatgcaatatagacttaggatgcggtggcttcatcataagcgcagtgacgtgttatattagtacggtggcacggttatctacgaagtggcgtattaagtgtgatatgtatgctatatgttatatttagtttgagattatgctttcttattgggccttaactcacgggtgctctattgtgcagccaaggg

SEQ ID NO: 245961 - DNA, 900 bp, Cannabis indica
atttcacataaatgaggttaaatgcttagttgtttctatttttacaaactattagtttctattttcaacatttaaattgtttctatttttttgaggttaaatgctagttgtttctatttcataaactataatttctacttcgagattgaatgcttaattgtttttcattaaacatgaatgataattgtttccgttttagaaattttagtttttgttttgaggctatattgtttctatttttcaaaattaaattctttccagttagttgttttcatttgatttttatatttgggcaaaatggtctcttagataataggaataggataagtgatattatagaattgagggaagaaggaaagtttgacacaatagtcttctcttctgccaaagcttctttgcccttacaagattacatgtgtccttactctctcttcatatataaaccttttcttctcttttagttttcaacttcaaatttcaactccattcccattcccgaatctctactgtgtactaccaccgattcatcgctgattctttcccttggtcttcaatttttcaccatactataaatatataattagatgcatatctataaatttcacactttaacagtgttctttctaaaacaaataaaatcacacttgttaattacaatatatttcttattcaatttggtatagagaacttctcttcatgtaagataactgataattaaactaaactaaattaattaataaagtgccatatatatggtcgagtattccattataaacaaaacgtgggcccagtggagccttccacctagtttcaattacgacttcacattttaaattctattgccattttttattgttattgttttttctttgttttgttaagtttttactgaagcaaatg

SEQ ID NO: 245962 - DNA, 519 bp, Cannabis indica
ctaagcattctcctattgcatctggagcatgtataggatgaaagactttgaatgtggcttgctcatattgagctctcatggtaagctctcctttttcaacatctatcaaagtcctttccgtagcaaggaatgacctccctaaaataattggaatttccctatcttcctcatagtcaagaataatgaaatcgaccagaaaaataaactatcaaattgtaccaaacatctacaatttttccatccggatggaccatagaacgatccgctagttgcaaagtgatggtagttggcctttcttctccaattcctaacttcttgaaaatagacatgggcattaaattgatactagctcccaaatcacatagagctcttcccacatcttgacccccatagaaattggaattgtaaagctgcccggatctttcaatttgggtagaattttactctttaacatagcactacaaccctctgtcaaagcgacagtttcaaactcaccaagcctccttttctttgtcaaaa

SEQ ID NO: 245963 - DNA, 763 bp, Cannabis indica
ttctggggagatccagtttcctattcttttctcggaccccgctactaagaaagacgttcatttcttaaaatatcccatatatgtaggcgagaacagaggaaggggtcagatttatcccaactggagcaagagtaacaataatgtttataacgctacaacgacgggtatagtaagaaaaatcatacgacaagaaaaaagggtatacgaaataaccatagtggaggcatctgatggacgtcaagtggttgttattcctccaggccctgaacttcttgtttcagagggtgaagccatcaaactggatcaaccattaatgagtaatcctaatgtggatggatttggtcaaggggatgcggaaatagtacttcaagatccattacgtgtacaaggccttttgctcttcttaaagcattaggaaatgctaaatccaatattacaagctgcaaaataggttaagtaatcaaaaaattgttaaagaaacaaataagctgaattataacttctcctattcaatactcacaaaatcacagataatttctaatcctaatgcaggattcaccacacggaggtcatcataaacatatacactttcatcaacaatactaacaatagctaagaaccaatgacgcattgctaaaagggacataaatataacaagaaaaacaaagtaaaatcaaaagggtaccttctcacaaactaatatatccccaacccatcttcgcagattagtaggatctttgattgcaccttcttcaacataggg

SEQ ID NO: 245964 - DNA, 503 bp, Cannabis indica
attagaatatatatcaataattttctcttattatttaaaaatcagtatcaataacagaataaaagaaatgaattaacttgagatagagaggttaccatagtaaaaatgaacctgaggcaataaagtttttttttttttgaaatcaaggcaataaagtatttgagacacttcattgtagaaacaaatatattaagctgaaaatttcaatattttgaaattagaaaaatctttccctgctcattaaaagtaacataatatcaaaactttatattaatacataaacaaaaggaaaaagaagaatcataaacataaaatatacatatttgctaatcaaaatctgtagacagtgagaaagtctttggcgttgacaaaattgtatttactctaaaagaaatgccaccatctactatttgaaattaaattaatacgaataaaatgaaatataacaatactcatacatataatttccaacaccccattgtggcgtatatattgttgcatga

SEQ ID NO: 245965 - DNA, 1482 bp, Cannabis indica
agcgatttcatcatctagattgaagttgagtggcggttctattagaccatagtcatcgtaaagtgatccttcaaagtccaatctgggtccaacaaacttaggcttctttctccatggcggtggttcaccatgtatccgcatggggttctccaaattccatctgtaaaaaaaggatgaatccagtaatgcattagagcattgataggaaatgtgaaggacatatgtacagaggaataggagctgactgacattgttaaaattttccgagcaagccagttggcatctgcaaggtattcaaccgacgcccttgatgtgtcccgtccatagattacctcttcggctgccctccctcctagtagaacctgtttagatcaacacaatgagattacatgatgtttgaaatgaaattattcaatttaaactttagccaacctgaaggcgatgcagcaactgtggtcggcgctcaaacatgtatgattcatcatcaagccgatgaaacacaacttgtgataatgtctgcaaggatcacttccaaaaattacacagtttacaagtaatcaaaaacatacagtcaatagtgaaataatcatcataagcatcaggctatatgaaatagagagctttgtaaatggttagcggtttttcataataacgattaaattacaatatgtgaaactcgatacttttattacaccaatagcagtatgacatatcatggttatttttgcgggcaatctccagaaaccttataagcattgaaggtttagtaagaaaagaatggtaaacaaattaagttttgtaatacaaaggagaagaataaggacctgaccacgtgggacaattgaaatgcgatcgcagcgttcaatttctgcattctcgtagcgccttagcaaatgggaagtcattgcaactccaacttcagtagaagcacgacgacattgtccttgatgacccaactctattccaacacgtttgggacctaccgttagtctatcaactgcatcatccatgtccgactgaagaattgaattatgccccttcctaaccgctacaagtgcagcctcttgaacgagctgagctaattttgctccggtccatcctgaaagcttttcctttttaatgaatcggttgctatcattaaaccaacaaacaacaatagaacagcaaacaaaataataccaggcaagttctgtgcatagctcgatagatcgagagattcagacattttcactttgctcgcatgaattttcaaaatctccaatctcccctttgcaggaggaggccgaatttttatctacaagacaaaagccgaaataataattaacaaccaacccccattgacaaagcaagcataaattatagaatatagaagtatttttccccgtgacctctgaattattagcgatgttaaatattccccctcaactttgaatgttagtgaaacatggaacttctgttactctttgtttgacttctgttaaa

SEQ ID NO: 245966 - DNA, 1382 bp, Cannabis indica
taaggtggttaaatatattggtggtttatgccctttagacgacaagattggtgaacctgttgatcaccaattggagtctgagtttgacatttggcttggtaaaggtcttagaaagcaaaaatcaacgtaagtctttttaggtgtttttaatggaatatttattttttttttgttcattttctttttgttttgttgtctgttttgcttttttgtcatctttttagcacaacaactaatatgtattgtaagggtaaggacaaaatatctccgccatttcgttttggtgttgaggaagtcagtagcaagatgtggtttcacaaccttagctatcctaattgctttctttcctcttctgtatggtttttttaatatgttgtttttgttcttgtttgtattgtattttttccttttctattttagtgttgttctgttatttttgtagctgattaaactcatttcagtttatttatttgtagcacattgatattattttctactattttcataagaaaataaagtatgctatcgagccaaaaatcagggtcacgataactattgtctttttagtgatagcataacaaacttgtatgataagtttgttgaaaaaaacaatgatatatctgttttgtctcttgctcataatgttgcacaacacatctgtggtggtaagctattatgtgccactccttggcacttggttgatcacgttattatgcctattaatgtcaaactgcggtatcattagacttatggtcatttaaacatatatgagcatcggatatacctataccattcattgcgttctggtaggtttataacagctgccaaagaggcttgcaagtctttttttgtgatcttaccctactatttctctatgttagactttagaggccttcgccaatgaatctaagtttagcatgatagaatcgttttctattgttgttgttgatggtttactcgagtaggtcacaacgtaagtttgtcactcatgtataatgttttctttttatttgtcaagttatgatttgttctgtgattttgtttattttcttatgtttttttggtgttgttttgttgttgttgttgtacagtgattgtggtttgtttgtagcatattttgctgagtgttttattgacgacaaacctattccatcctctgatttcgatgtggaagttcaccgcgatcgtttggctgtgtcgttttatcattatgacatgaagaagtaacttgaaaacattgaaagtgaatctgagacccctcctagccttcaaaagaaatgatttattcttttcaatcatattgtgcttatttttagtttttagcagtgtttatgtagttttttggaacaaactttggtgttcttttatgttttttagctttt

SEQ ID NO: 245967 - DNA, 781 bp, Cannabis indica
aaaattcaagtgctctcgcatgcacattttttgtgcaagaaagatcatttaaggtacgatacatctttaaccctccttctcgtaattgaagggctgcttaaagtctatcctactccctgtgatgctttctctttgatattatcaagggaagtctaagcttgaatttttatacaacttcaaccttccttcttaaaatccaaagctttcttcataaaaattcaacgtgactctcgcatgctagttgtttttcgtgcaagaaagatgactaggggtacgatgtgtcttcaacactccttcccgaaatagaagggctgcttgaattctatcctactccctacgatgttttcactttgatcttttaaagcaaattccaagcttgaattttttatgcaacttcagcctttcttcataaaaatttaacatgactctcgcatgcatgctattttttatgcaagaaagaaaactaggggtacgatacatcttcaaccctctttcccagaatggaaggacttcttggagtatgtcctactcctcgtgatgctttctctttgatcttttcaagaaaattctaagcttgaatgtttatgcaactttaaccttccttcccggaaagtaaagcttgattcataaaaattctgttggaattagttttaccaggatcttagatctactcacaagtatgttgatttaacaacctaaaaatgaacttctaaaacgataaacaaaacacataaaagttaagaataacttacagtgatggcagcggaattaagtgtctcct

SEQ ID NO: 245968 - DNA, 998 bp, Cannabis indica
ttctggatatatgtataatttatataaattttctctatcatatcatagataaacaataaaagtatacaatatatgtatatatatgaattcaataataaacatataagaataagaacataaatatacatatataatatataaatatataaataaaaaattagatagaagaaaaaaatgggtttttgaaattatttcagttagatgagtatatatataaatatatatttagtgtatcgtgaccttaaaacaattcaagaactttaataaaatatttaccttgaggcttgggcaaagactcgtgctgataacgtgttataaaataatatagaataatataaaatagataagaagaaaagaagaagaagaagaagatgatgatgaagagataaagagaaattaagtgaatgagaatttctcagttgtttatttcaatggggtgaacccttatttatataaaagtattgactaagggaatggaaaactaaattaatatgcaataaagaaaaatacaatcaaacatcaatggtgataattttttttttttataacagaaacttcattaaaaaccagcaaagagaaatcattttatagtaaagggtgctacttccctttccaacagggggtgaaaaacattgtgagacgtagcccaagccgccacgttgtgagccaccgagttagtcgaacggggcagccaaaacacacaaccatgagctacaaaagaaagacaattaaacaaatgcaagaattgagaagagagttgccaaaccgggatgacagacttatttatagcagcaactaattgaagacaatctgaaaagaagtttgcctccctgcagtcccacttcacacatcaatggtaataattaatatggtgatttggacattcataaataatattacataataaatataacaatttttgttaaatagttgtactttatatatagaaataaagaaattagagggttaaattttacccactactacaatgttagcct

SEQ ID NO: 245969 - DNA, 1459 bp, Cannabis indica
tcctctgagatagccaaatagaggaatagcatctctccagttgtagttttgccaaaactggaggcgtagctagatgcctttttatgttttgaaaggcttcttcacactcttttttcaactcgaacttcttgttgcctcgcaatatattgaagaacgacacacatttatcagttgacttcgaaatgaatctgttaagtgcaaccattcttcctgtcagggcttgtacttccttaggctttgtcggtgatggcatgtctattaatgccttgattttttcgggattttcttcgagacccctcgcgttaactatgaatcccaaaaaatttcctgatgaaactccaaaggaacattttcttaggattagcttcatgttatacttctttaatatcttgaagcattccgtaaggtctgtggtataatccctactttttattgattttaccaacatatcatcgacataaactttcatgttctgcccgatttgatttgcgaacatttcatttaccaattgctgatatgttgccccagcattcttcagtctaaacgacatgactttataacaatagagtcccatgttggttacgaagcttgtatgttcttgatctcggacatacatttttatctggttatatccagaatacgcgtccataaatgacataagcttgtgcccagcagttgcatccactaactggacgatcctgagtagtggaaaataatcttttgggcacgccttattcagatcagagaaatcaatacaagttctccaagttccgttaggcttcgggacaagaataagattagctatccatgagggacaaaacacctcgtgtataaagtcgttgaccaacaacttatccacttcctgttttagtgccccttgtctctcagaatccaagggtctcctttttttcctcttcgctgggtattttggatcaacatttaaataatggcaaataatattagggtcaatccctatcatatctctatggctccaggcaaattgatcctggtttgccttcaaaaaacttattagctgctatttgtgctgctcgtccaggttcttcccaatgtatacacacgttgtggatttcatgtactgtttaaagtaacctcgagcgatgagactttctatctcatctttcaattggcgacattcgtcagtcgtgtgcccaatatccttatggaatttacaatacctgttaggatctcttttgctcctcacattcctcatgggctcgggcttgctgaaggcaacctttttctcatgtgcgaggtaaatattctcttgagtttcattaagctcattataaatagtatacactggcatgtacttatcgtgcttctttagtttcattttatcctttgacggttccttagaaccttcctttcttttcgaaccacaagcccccgagttatcaattctcatggaaacagtacttgttgaaacgttactgggttt

SEQ ID NO: 245970 - DNA, 815 bp, Cannabis indica
atgcatatgggatctcatttcaattataatttcaaaaataaatgagaaaaaaaaatatataaacaactaacgaaatttcaacccaaaaatatcactggataagcgcaacgctaaggccttaaataagcacggttaggaattttcaaacaagggaagcgccagcttgacttgactcctatgtgcaaaatgaataaaatcagatcttccttgacctacatggatttgaaaaggttattgttgtagtaatttgtggcataaatactttagttttaattccctattgcagataaatatttatgtttaaattttgacggtaataatgttgaagttatatttatagaaattttgtaagtacctaaccgttaaacgtaaatcaatggtcatgttgcagtctctgattggtccagatcattaaatttttattttttatttaaaaatagatctaaatataccaataaaaaagtgatacgtggataatgacttaacatttacctacagaagttctagaaatataacttaagtattattacgtcaaaaattaaacttagatatttatctggaatcaagagttaaacttagtgttattccaatttttgttagatacgcaaaatcgtacttgtttttgtatctccagcagtatgcatatgggatctcattgaattatatttcaaaataaatgagaaaaaaaatatataaacaactaacgaaatttcaacccaaaaatatcactggataagcgcaacgctaaggccttaaataagcacggttaggaattttcaaacaagggaagcgccagcttgacttgactcctatgt

SEQ ID NO: 245971 - DNA, 1029 bp, Cannabis indica
tgatgccaaatgaacaaaaaacagcaatttactgctcgggcatgcctgaaaatgaagtaaatagaattctagaggcatctaattacaagagaagctctcttcctttcaggtacctaggtattccaatttgctctaagaagatatctagagttgaatgtcaatgtttgttagaaaaaatgactagcaggattcgatgttggagttcaaggaatctatcatacatgggtagggtcaccttgataaactcggttttgcttgccatacacacatattgggctcagatttttgtattgcccaagcaactattgaaggacatagaggcaacatgcaggtcctttctttggaaaggcatacaagaggcagcagggcctggtttagtggcatgggagttcatttgcagaccaaaagctgctggggggctgggatttaggaacattcagcaatggaacatagcagctttagggagatatgtttgggacatagcaagcaagaaggactgtctttttgtgaaatggattcacatggtatatctgaaagagcagagctggtggagttatgttgctccacaggattgcagttgggcttggaaaaaaattgttgctgttaagaacaagtttcagcaaaaaggagacatggagagctttgtacagcagagatatcgagttaagcaagggtaccttgatcttttcccagagcatcctaaacttccatggtgcaatctggtttgggatagactaattattcccaagcatagattcattctatggttagttctttggaaaagactgaacacaaaggaaagagtaagtaaatataatcctaccatagacactacttgtgttttatgtgggaaaggagatgaaaacatagaacacttgttctttcaatgtgaatatagttcagaatgtttgcaggcaatcaaagtatctctgcaatggaatacaccagcaactgatattcccaaactgctgcaaatctgccataaaacaaagagatttcctgcagctaagaagagcatgataaacacaa

SEQ ID NO: 245972 - DNA, 597 bp, Cannabis indica
catttaaactttcttcaactgtgtagtctcatgcctacacagtctcagaatcattccacttgaccttctccaggccatgtgggattacacaacttacccgatattttcccttatggatcacaggactactaactgtcataatcacccccttacggggcttgacatcctcgtcaaccatacttttggctgggtcaaggctctgataccatttttaacattcccactttaagcctccattaggccatcattctgcgggtgtaagggcccgatagaggcttgaagcacgaacgttactataacatcttaaaaattaatttaaatttatattttatgtagtatgaagtaaaaaaaaaaagtaacaataaaaaacattgagtttaataattaagacactaaatacaagttttattggtagatgttcaaaaagtaaaatttaaatactaaagtacacatgctttcattaagaatacatttggaactaagcaaattatatattattatttagaggttataactgtgacagtcaatagtcccgtgatccgtaaggggaaataccgggtaagttgtgcaatcccacaccgcctagggaaggtcaag

SEQ ID NO: 245973 - DNA, 586 bp, Cannabis indica
atttttaattttttgtccatatagatggcttcaactggacacaaacctagatctcttgatgaggaagaagatcctgggattgagcatataaacaatgaagaaacaggtgcacaagatgcgaatgaaagtacagcaccaacatctaccactttgcctactacggatgatgggactgaggaaactggattgaagaggaagtcaaacctttcatcatgggtttgggaacactttactaaggtttgtgatactaaaaagaatgaaaaagctaaatgcaattattgtggtgctcaatatgcttgtggtagtaagaaaaatgggactagtaatttgggtcatcatattagatttcaatgtaagaagtatgaggggactttggcagttgacaagaagcaaaaaacactatgttttgaaatgaaaggggatggaaattctttggtgacacataaatatgatcccgaaggaattagagaatatgttgctaggatgattatcaaagatgagcttccattttcttttgtggaaggtgaaggttttagagaactactttggaaaattgagcctaaatttagtgtcccttctcgcacta

SEQ ID NO: 245974 - DNA, 980 bp, Cannabis indica
aacactaataatataaactagagatctaataattaataaaaaaaaaaaagcaataataaactaattgttggtggtgatcatggagctgtcttctgagcacttttgcaatatgatgcgcaatctagaagtccttgagcccactcggcgttagggcacttgtttataacgtcgattatagtgtcacaacactctttaggaatgggtgctttatcaagacgaaacaatgcaatctctttatagcatttatgaagtctaggttcctccgcacaatatttacgtgctaaaccattaaaatatggtgctggtggtgacggtggtgatggcggtggcaacaaagactgtgatggcgttgctggtggtggtggtggtggaatatttgtcgtaggcgcgttgcagtgaagttgggcttgatagaaagcgaaacgagatatgaaagagcggtaataaggtaaagtgtgggaacaaaggtcagtattgggagtgatatttttgactttgtcacaacatgtggaactaataggtttttgcgtatatgtgaagctaaacatctcaccaatgcatggagtaaaatccaagtattgattcatgcatgccctcctattgttgtaataatcaccaatattaccataatcataagaccatccctcactggaattgatcaagaataataatgacaatgccaagacaataaatgagttcatcttcatgatgagaaattgtagagatatagaattttaatttggatacaatagttatcaaaatgtaattttatttatagaaatgtatacatatacactggtaactatcagccgtaaatatctcattttctgttgtagtaataaataataatattaataatatatattagtaggtaattacctttaatttatttatacatatatataaaagttagttatttggcaatatgcatatcatttttaaaaatcaaaacagcatatatttgttctcttcgtaacttt

SEQ ID NO: 245975 - DNA, 877 bp, Cannabis indica
tttttttaaactgaaaattaatctttttttaaatgacgatattttttttgaaatagattcttttgaaatttaaatgacgatattaataccctgactctaaaataacaataatatataatctaaaatatataatgacattactattaatattattattctcgctcgaaaaaaaatagtattattttttttttttgagaagaaatactatgttattataaaaccaaagagatatcgtttacaataacatcgtaaatcggaagagggataatacccatccaaaagcaagcttcttccaaccctaaagcatatctagctaacccgtgggcagctatgttagcattacgcttaacatgacaaatagatacattagggagagaggaaagaaggcaagaaatgtctacaattaagtctttgaaagaagaaattgcattacaagaaacagttagagcatttgaaaccatgagagcatctgtttcgatgtgagtaattggcacttccaattgtagaatccaatttatgctgtggaagagtgctttggcttccatttcatgggaagcaaagttgccaacaagaggtttcgacatggcagcaagaacagatcctgtcgagtctcgtacaaccgcaccaacaccaatgatatgtcgctgtgcgtccacagcagcatccacgttaagtttgagagatgagtgaggtggaggttgccacggtataggaggaggagcaaccagattttgttgggaagtatttgctgcagcagatgccacatgatgtggagtggaagatgtagttgaaggcctgaatttctgctgggccgtgcgatattgctgcaagtaattagcagcaaacaaggaaagagatcttgctggtttagccttgt

SEQ ID NO: 245976 - DNA, 591 bp, Cannabis indica
aaatatttattggttttgattgagatacactgtataaacaaaaaaataaatacgtatcatttttgggtaagccaaacaataattaatcagattaatctcttttccaccatcactttaaaaagagttcttctcgtgtgttgagaattaaactaagtactccgtatacactatatcttactagcccatactagtctttatgtgtggtggaagatctggaagactacagtgtgagttctacgtcatcatccaaggatacaacttacaaaaaaaaaaaaacaatgatgctctgatatgcttcaagaggtaaatttacttttcgtcttttattttttaacttaatgtatatacatatggtgatcctgaggatgtagtacaatgataatcacaaactattattctactacgtacctaatttagtaccacaaaaccaatactctattaatgtgacagatgcagaatcaagtcgccacttttggtgtgggaaaagggcagggccggccctaggcataggcgggcgaggcccgtgcctaagccccatactttttgggggcccaaaataaaaaataaaaaatttattaggcttttatttaa

SEQ ID NO: 245977 - DNA, 744 bp, Cannabis indica
acaagtactgtttccatgagaatcaataactcggaggcttctagttcaaagagaaaggatggttctaaggaaccgtcaaaaaataaaaaagaaacataagaagcacaataagtatgtgccagtgtatactatttataccgagcttaatgaaactcgggataatatttacctcgcacatgagcaaaaggttgccttcggcaagcccaagcccatgaggaatgcaaggagaaaaagagatcctaacaggtattgtaaattccataagaatgttgggcacacgatcgaagaatgtcgccaattgaaagatgagatagaaagtttcatcgctcgaggtcactttaaacagtacgtgaaaagacagggccacggatacaaccagcccagtctgccccataacccaaaaaactaggggttgcaacctcttcctggttaaggggagggccacatatcgcaggggaaagcaataacgcccagaaaagatatgtaaaagagatacagaacgagcagtcggcatttgtcctataaccttccaagaaggtgaaaacagaggaacctccaattatattgacggaggaagatgagaaaaatgtgagataccctcacgttgatccattagtaattaccattcaactcgccaataaaagaatcaagagggtgttagtagacaacgggagctcagtaaatatcctttataaggaaactctaaggaagataggggtcagaaaagccaaattgaggccttgt

SEQ ID NO: 245978 - DNA, 562 bp, Cannabis indica
atttggatatggttgtcctccacttttgtcgctttggctaagaacattgtttaaatcaccaaccacgcaccacgggtcacttgaattgttcaacaaagatcttaaaagattccatgtgtccatccgttgttgcctttggggttctccatagactccagtaagtctccatttcgggttaccatccacttctaccataaagtcaatatggttttgagaaaagccaattattctaccatctttatcatttttccacaataaagcaagtccaccactcctaccttgagcttcaactacaaacctcccttcgaagcccaatccacgggccacaaaatcaatacgagctttattactttttgtttcacataaaaaacaaaattgggttgcttttgagacaccatctctttaaggaattgaaaagcccgttggttcccaagcccacggcaattccagcttaacacattcataattcttggcgggcctgtgacacagaacccgccccaataacgttttttgtcccttccaaaatgctcatgttgtcaccattctcctcattcggcccatt

SEQ ID NO: 245979 - DNA, 618 bp, Cannabis indica
ttatataaatattagagtaagattatagtcttactcgagtcaattatgagataattagtgacttctgagtaagtgaataattgagtgtaatttattaattacgaagattttattggaatatgtgagtattatatatactatttttaaaatatttttggattcagcgaccatgaaaactcgatgaattggccaaggatgtaaggacgataatagaatgagttttattgggtttgtactggattatttttgtattcttgagttgtcaaatcatttggggtagatagcattgaccaaaatacccctagaatatcaactagcttaagtgtttaattgaggataaaatagtcattttactaagatttattattttgttttatttgataatctagtaaaccctaagttgtatatttgatttattagttagtttttattagtttagataattaagagttaaatcaaaaacctaagaaatcactcaactctttctctctccctcttttaggcttaagaagacaccagcaaaacccaagctcttttcatctcaatcttggtcaagttaatcaattctaggagttgtacaaccttgaggtaagtttcttggtgttcttgaaggtttta

SEQ ID NO: 245980 - DNA, 584 bp, Cannabis indica
ctattttaattattaattcaaataaaaaactaaaatattaaataaaactaatactacgtggcttggcacgtaacaatcacctagtatatatatagtacctaattactaaaacattaaattaagaaaaatatatttatttagctaatgtatataaatatttatattatgaaaaatgtctatatttatatatattttgataggggtatgcatgcatgtgtggtacctacaatcttataatgcaacaaaattaataatttcatgtctcatcgaattaacaagaagaaaatttcatataaatatttttatatatatcggcgtcttgttctaagtacagtacattagctgtttgccttattaggcaacgcataataaatagtatttttatttacatggatcaaaagaaaaagagacatatattctcagcttatcaaatatcttgtaaccatagctttttcctaacatgattgaacgagggaatatggtgctgctatagagcaaagttacagaatcagtcacaaacatagctgatcatcagcttcaataatattttcaacagtagtaactagtacgtacctcaacctcca

SEQ ID NO: 245981 - DNA, 896 bp, Cannabis indica
agagagagagagtttgattatcttcaaattccatttttctaatttctagtaaataaaagatattactaatactatggaaatgcaatacaattcagattactcaatctaatttcactaaaggacaaaagcatatggggcaaaatgaccattttgcccctcccacacagaaagggtttaaaagacactgccgggactgaacatgcaaaattatgaaatttttgcagatgacatataatatgcattttgaattcaaataaatcactgttaattaataatttagaattaataaataattttcataattaaaccctaattatctgctaattttcacattaaagctaagcggtctttacagttttaggattcatggatatcctcctggacacaaattgcatgacaaatttccaaaaagaattgcaatcgaaataccactaactcaggaaaggcttctgctaccaacttcaccaccaactctgaaggtagtgaagggaatcatggagacaatacaacagaggatcaagacttggttgcttgcttgactaatgtgcaatgtcaaagattgatggcattgttatctcagagaaatcatgaaccaacaactagtgcacctgctgaacctcctatggtgtctcacttttctggtaagaattctctcacacctcactctaaatggatctatgacactggtgttactcaccatgtgtgcaatgatatttcattgcacaaaattacatagtgtgatcgagctatacctgcaattaaactgcctaatggaaattttgctaaggttatttgtattggtactgtcaacatttatccaactctttcactctctaatgttctttatataccaaaattccattacaatttactttttgtaactgctttgactaacc

SEQ ID NO: 245982 - DNA, 859 bp, Cannabis indica
cacaattttgattctctactgttcatagcttgtaaaaacgtttctggatcatttccaattccaatatcagattctaataaatacacaacatagtctttataaatctttggtttgataggtctagtagatcttcttaagacttcaccaacaggctcttggggagcagcagcaggttcagcaggttgttcaacagttgcaggcaactcttgaacattttgatctactggattatcattaccaacttgtggatcttcagtgattggtaatggttgttcaacattcgtttgaactacaggagtgttaaccattatcaatcttgcttttgaagtggaaggttctgaaggatctttctcaggacctaagtcctttgattgatcactcccactgatcaaggcattctcaagaaattttgcattccttgattccacaattcttgtgctatgagatggacaataaaacttgtaacctttagacttttcagcgtaccctataaagaatccgcttatggtccttgggtccaatttcttctcttgtggattatatattctgacttcagatggacatcccaaatgcgtacatgattcaaacttggtttccaacctttccataattcaaaaggagtttttgagactgcctttgttggaactcggtttaatatgtacacggatgtctttaatgcttcagtccacaaggatttaggaaggttagagttgctactaagcatactccgcaccatgtccattaatgttcggtttcttctttctgcaacaccattttgctcgggtgtaccgggcaaggtgtaatgggcaacaatcccattttcttcaagaaacttcgcaaatgcaccaggtgcttgtcc

SEQ ID NO: 245983 - DNA, 1185 bp, Cannabis indica
gcgcagttactatacgcgccagtaaaaagtcctttaccgaccaagctttccagataatctttgccggtgcacaactgcgccggcaaagctttgtcggcgcagttagggtacttttgccggcgcaacaatgcgccggcaaaagctggttttcttgtagtgtgaaaaatatagttaaccatttagattccaacttcactggctatatgttgattcatgtggatcaacatttgacatgacgtcattactactagtaagttgtattgtgaagaatcttaattgttttccactatagaagtcaaatttatttattattttgagaatacatctcgtattgtgtattaattatagagtttgatactagacctagagttcagaattacccttttaggccattaagagatttttacaacaaattcagctatatttatgcttaaaagttttggtcgaagctagcaaatcaacattaagtatttagcataaagaagtgtaagtggtcattaagcacgcaactttgaattgaatgatcgtattatccttgactaaacacatgtcagaccatataaattcagagatcataaagtaaacatgaaattcagtttcccttcaacaactttcgctgtatagataaattattaaatgaaactctaattttaatattttcttatattcacgtgcactttaatttcatttgagaaaattatctttaaaggaatgaacacaaaatttagggtttattcgtttaagtacattaccacattaagtatattgttatatattataatatattgtaatacttgcaagataataatcgttatatagtgaagacatatcaccatgatatgtttgtgttatacatcaatgataatcattgggctttaattgctaaattaatttaaatgttaaccaagagaatgttagaatatatattttatgtacagatcaatgattttatttataaaatataattaactaaattaattgattaagaatattctaattatgaccacaatttaattactaaatattttagttatttaatttaattttttgaattaattatcaaaatgttattaataaagtatctcacatttaaatactaatttctaaacttattactcattctctgaaaataataaatttaattaaaagagttaaaaagagcttggaaatctaaataccatacta

SEQ ID NO: 245984 - DNA, 1319 bp, Cannabis indica
tcatcaagtctaaacctcatacttaacgccccctaaaattataaccatacctagctaggtggcgtgatcaattttcaccccattagaaagagcttcatgaaaatgttgtatcatagaaaatacatattcatgagttggtatacatgattttgagcacataggacatgttttctcatagctagttcaatatatagatctaatccattgatcaaatttctctcaagcatggaatgtgagaatcatttgtaaggagtttcttcacaacatagtattattaagtagcacaattttcatgttattttctagaataactactattcaatttattataatatgacatcgttatcaaagaattaagttccaccaaccataatttttgattaaaataatggaaaacataattcataatgcatgtctctactatgtttttcaaactgtagaaacttttaatttgtatgtatgtatttttgtggagttgaatatttgataaatttaggtcaaactctttgtagtagaaatcagcaatccatatttttactgataatatattttgtattcttaaaaattgcattatttatttactttccataataaacaattcttagacatgattcatcaaccatatattatgactgagaattatagcatctcatcaagatcacatcacatcggttcatacagttttgtattatataattctatttattttagataatatttaattgtactaatcattaattttccattattttttgttatttcttctaacgtacatctatataggcggtgagttaattagtttcaacaacattaatatatggaatattttttaataaaaattaatttaaaaatattaaactattagattttaatccaatagcaaataataaaatagaaatttaaacttttatacttattaatttaactatttagggctcgtttattacaccgtataacggtcgtgagttggtattccattattaattttttaatacaatgtatgttgtattatttaataaatggtccgtattaacttgtattataatatttacaaaggatttggagtcaacactaatctccgacccagactcggactcgacccggactcggacacggactcgacccgacccagacccaacccagaccggacccaaacccgaacccaacccggactcggacccgcacctggacctggactggatccgaacacggaacccaaacacggacccgtagttggtgttgggattgagtgtatttaaaatatatgttgttactgatatttcgcaacaccaaaaagtacaatttaactggaaaagaga

SEQ ID NO: 245985 - DNA, 2691 bp, Cannabis indica
tcgggcagatatgggctgacttatgatgttttcaatgccatgccaaggttctatgctcagatcaaaaaggattttactctcccggggttcaatgtgcctcctaaaactggttagagccagagccagctaatgagtccgaattaaaatggcaatctgcagacatgccatttcttgtggtaagttcaagcttggggcaactgagaaaacagacaatcgcttatgttctctcatctagtttcttgggaaaaaggtagtcgtaaaaatagttttttgatatatccaagaaagggggagatctgggctctttttaaggactgggattttaactggagtagtgatcgagatgcacatcgtcagtgtgaatatgaatatgttgaaattttgtttgattatgatgctgatgttggcatacatgttgctctattgagcaaagtaaatgggtttgtgagtattttcagtcgggtggaaatgatgggaaagaagacatttcttgttcccccagctgagctattgaggttttcccacatgattccgtcctataaaatgaaaggtactgaaagaggagttccaataggatcgttcgaacttgatcctgctgctttgcctccaattaaagacagtgacacacaaatgaaccattcggtgcctcagcatgacatgccagctccaagcccacaaaaagtggaaatcccagatcctgagttctacaactttgatgttgataaatccaaagataagtttcagctgggtcagatctgggcattgtatagtgatgaggatggtttgccaaaatactatggtcagattaagaaaattgattttcacccatctctcaaactgcatatttcatggctttcatctatccctttctcaagcattactagatggtctgatgaggacatgcctgtttcttgcggtagatttaaggtttcaaaggagggtcaggcttacgacgatgtaacttctttttcgcatctagtaaaagcagagcctacaggtagacgaaatgagtatgacattctccctgggaaaggtgaaatttgggcattgtacaggaactggaatcccaacctcaactctagtgacttggaaaactgtgaatatgacatagtggaagttctttcagctactgttttactaataaatgttttagttctggaacgtgtggatggttttagctcagtatttaagactcacaaggagggaggatcagctattacatggagtgttccccaggttgattttttcaagttctctcaccaagttcctgccttccgtctcaccgaggagagaggtggcaagtatagaggcttccttgaacttgataccgccgccttgccagtccactttttttgttaaacctagatccagaagcttcttataaaaaggtgcactacttgatacaaaagatttctgcactatgcaatttcttatttggatccatggtttagctagctgcattccagagaaagtaggatctttgcacttttttttgttgcaactaatggtttatgtattgatccttgatatttctttgtgaaagccccaagttccatttatttaaaagttaaaactctggtttttatatattttcgttcaagaactttcttttcttggttaactcataaatgtatgaagtagattttaacatacccatttgtgaatgcttttctttttccaccaatttcttactaattaggagatcttttacttctcttcgattgaatctgcatgaaagtttatataattctaataaaacattcagacttttagacaagcgttttttgttttgttttgttatcaactgataaactttctagctaataattattactaataattggtataagctgcatacaatctcaattcaagaacagtgccattacgttcctaaaagccctcttgattttttcttttcttctctattgtcttctcttttctgcactcattcatttccattcatggctcgcatctattgccatagacaccagtcccaacttctgcagctccgccacaagttattgctactaacagcttcttcactcccaaccacagtgagtatcctactcacatttatttgcaagctgtggttttgtatactctggttacttccttatttgtgctgcaaaattcaaattatgtcatctacatgctttttcatataaactctgaaccataaatctgtgtttagagaccttggctctcttcatttcgtggccggcatttcggttattacttaactctactatggataacttcatctatgtcaacacaaggacgttagaaatgtttttggcacaagttcacatgcttgagtcaaaacccacgcctgcacctgtttttgtaaccaaagctttgtttcaacatgattcaatatataagggataattggtataactttcactgctcctaattcttctaattccttacaccttacagctttcatgtagtttttgtgtttttcttggtgaagacctcatatcctagtcctctgccaagcaatgagttgtctcgtgtagtaatactgaattaaagttaatgctgaacttgcatggttcaaacaattgctctttaatctacatttctcaataccacacacaccacctatggtgtgccagcactagtgcagctcaaattgccgttagggatgtcaatttaagatgtctcgccctttaaatttgtggtacttgc

SEQ ID NO: 245986 - DNA, 1029 bp, Cannabis indica
tgtgtatatatataaattaaaccataaacatgaataaaacatgtaagcataaatgatttctaatctttttattgttgacaaatcagattagattgtaatgagttttatttagggcataaaatcccaacatatacgccctagtatggtcgtatatcgacattcttcagtaaggtctttgactttggtagccttggccatatgaataaagtcttttagaggttttgcttgtcgctgtttgacttcgacacggtcttctaactgtgatggtacaaatctcgaggacgagaattgtgtgtagaattctcatgagaacttagcctaggagttgaatctttctggggtgagtttaaagtaccactgttgggctgtctttgatagtgtggatgggaatatccgacagcgcacatcactagtgaccttgtggaggtcgagctgcatcttgaagtacttgatgtgagctagtgggtcttctcatccagtatacatcttccatcattttgaactttggtagaggtagggcatttatatatgctgagaacggtgataccctcgaccgatcaagttcgaggtctgaaggcttcgagccagctatgtcctggatcatgtccctgtattggtccaactgtgcttgcacagaaggatatgttgctgtggggacttgattgactggccctccttggggaggctacagatctgagaagataggggctggctggccataccttgggagagtgtatggtgaagatcagtcatgccttatagaccttggccgaccattcccaggtacagaagttggcctaggctagccaggcttgcgcccgattactgtgcttggctgggtagacgtgcattggacagggtctagctacccagtactcctccatggccggccagacctacaaagggcagggcctggccactcgtgatgcttccttggctggccagacctgcattgggcaagatttggctacctattactccttggtaaactagtgtcagttatgtattgattaggggtagatcatacca

SEQ ID NO: 245987 - DNA, 1095 bp, Cannabis indica
cgggcggcacgatcggcatgtcaagctgatcgtctactcctctcctcctattcagatcttttctgagatcatgagtcgtccccagcctatcaaatgcggaaatacctggctgtctcaatgactggttggtttcgccaatttgctgaccgacaccattaacttgatttgagttattgggtatgacttctccaaatgaattactagacaaggtctgccatcctgccacttggcctgcaggcggaacttgtgactggggatttgacagctgaccatttatagcctgggaggtaatcatcgctggatcttcatctgttttgcccaaggggatgacattcgcaggctgctacccgacagtttgataggctttttgtatcagcacagtggcttgccaacacgatcgtcaatgactgcttgttgagcccttaaagtttccatatctttgtccctccattcggcaaacatgcccctctgctcttcaaacgcgagatgaactgcatcatggagttcctcctaatcatgatgcagggtgttggtatgaccttgcatgattccaagtgcatcacggaggttctagatctcagtgtcaactccaatggttgtttaaacattggtagcgggcggaacaactgtgctatgaatgccttggtcggctgctgaactagtattcccagtctctagcacaccaggcccgatttcatccacaagagttgtcacaccgtgacccgcagttgatggctgtccaagatttactgctggcgtaacccttgtgtttcctgggttctgcagtgcaggatccaccgcctgtggattcgttggatcaaccaaagagcgatccttgagttcaactatcaatgatagcaacaaaattttgacatcgcttttagctaacgacagtgagcccagttttgaaagcggcaagtagtttaatacgattgaaatatagtaaagcaaataaagacacaagaattttatagaggttcagccccgagcagttccgtaatagcctaatcctcgttgtttgtattgacttaagaacaaggagaatagttccttttgtttgagctcttacaacagtatctctgaatatgaattctt

SEQ ID NO: 245988 - DNA, 970 bp, Cannabis indica
tgtggaaaaaaaccattcaaatattttagaatgtggaatatgcatccggaatattctgatgtggtttctaattactggaagcagaatataagaggaactcttatgtatcaagttgtctctaaacttaaaggtctcaaagggatctttaaagagattaatcacaaaggtttctctactactcttgcttcaactgaggaggccaagctagctctcactgactcccaaaattagttgcgagctgatccttttaatgttactttatagctataggaaaaagaatacaaggataaatatgctgatttcaagaaggcttcttgctcttttttatagcagaaagcaaaactaaattgtgttaaagggggtgattcaaacagctctttattccatgtgagcatccgtcaaagaagaatttataacaaaatttattcaatcctcaatgcagatgatgaaagagtatatggagagcaagttgcttatgcttttctcaactattaccaaagcttacttggtactagactagaaaacagactgcaagtaaatgttgatataatgctccaaggacctcttgtcaccaagcaacaagcagactttttgttatcggattacactttggatgaagttaataaggtcttctttgatatacttggcctcaaggctcctgagcctgatggctatgggagttatttccttgaagataactggaagttggttggagatgacatttccctagccatcctttctttccttcactttggccaaatgctaaaagaaataaataatatggttctgactcttgtgccaaagtgtaaatgccccaatatagtaggagaatgtagacctattgtctgttgtaagtcttgtataagaccgcacccaaactcatttgcttgacactcaagcttattcttccaaacattgtggctcagaatcaagggagtttgttaaaagtagatcgattgttcataatata

SEQ ID NO: 245989 - DNA, 1651 bp, Cannabis indica
tgacttttcagcagcgagaaaaattacgacctttctcaaacaaaatcttgatgtttttgcttggaaacattcagctgtggtcggaatatctccacatgtcatgtgtcatcgcttgaacattgaccccgaagcgcaaggtgtccgaaagaagcgtcgcaaaatggaccccgcaaggtaccaggcactgaaagaagaagtcaaccgcctcctcgcatgcggctttatacgggaatcatctaccccgattggttagcaaatcctgtaattgtgcccaagcctaacgactcatggcgcacatgtgttgactttacagacttaaataaagcttgtcccaaagatagcttttcgcttcctagcattgaccaacttgttgatgccactgcaggtcatgaacttctcagcttcatggacgcatactcgggatataatcaaatgccttttggtttgataaacgcaagtgcaacgtctcagagattggtaaatatgatgttcggagatctgcttggggatactacggaagtgtatgttgacgatatggccgtgaaatctcaacaggcaaaagaccatgtcaaatatttacaagcaatgtttgagatacttaggtgatataaaatgcaactaaatccgctaaagtgcgtctttggagtcggctcaggaaagttcctcgggttcatggttcatcagcgaggaatagaggcaaaccctgcaaagatcaaagcattagtagaaatgcgatcaccgactaagccaaaagaagtccaaagtctcactggtaaagttgtcgctttgaaccgttttatatcgcgatcttctaacaaatacaaggagttttttcaaattttaaagggcaataagaagttccaggtgactgagaaatgcgaagaggcttttcaagcattgaaaacgcatttggggcagcccccaatcctatcaaaacccataaccggcaaagtcttgtcaatttatctagcggtgttagaatatgcgattagttcagtactaatccgcgaagatcaaggacgacagtacccggtgtattttgtcagtaaatgcctgttggatgctgagactcgctaccctcaaatggaaaaattagtgttcgccctggtaatgtcgtcgagaaagttgcgaccttatttccaggcccacagcatcgaagttttaacaaactaccctttaaggcaagtcttggcaaaaccagagacatcggggagattattgaaatggtcggtagagttaagccagtttgacatcaagtacaaaccgagaactgcgatcaaggggcaagccttggcagatttcattctcgagttcccaagtaccgaagtggcactcataaacgaagagatcaacaccgctatacaaaaaggagaaggatggacgttgtatgtcgatggggcttctaatagcgaaggttccggcggtggaatcgtactaaacagtcccaacattttaaggtacacgctgctttacattttgaatttcctgcatctagcaatcaagccgagtatgaagctttaatcacaggattgaagctcgctctcgagatgagaatcgagtacatacaggctttcagcgattcccaaatcgtcgtattccaggtgaaagaagaatatttggccagaggtgggcgattagttaagtatctctc

SEQ ID NO: 245990 - DNA, 1141 bp, Cannabis indica
tatatatatatataatggtaaaacttaaaaacataattggttgacacttttatcttaataaaatattaatatagtatcttaaaaaaaaaatagggattttatttgaaaataattatattttttttaataaataatagttaaaagtataaaatataatatttttgaaaaataaaggaagccttaggctgctgccccactcttgagccggcgctggtgctagcctcggcgcctaatctcaaccatcacgcctcgttgtcttggtgttgctcgagtccatcggtttcggtatgaggggcaaggccggtcctaggcataggcgggctaggccggcgcctaaggcctactcattttaagggcctaaataaaaaaattgccttttaaaaaatatccatgtttttcttaataattttaaaaaatactatttatctttatagctcatttcaattcaagactagaggtggcttagaatttctggttgggatgttgtcgctatattgtgttaggtgttttgcggctgtgagataacagacttgggttgatgggagctagggagtggtgacagcgcacattaaggctagagaatcaattgtggtcaacgcattaacattccctattttggtctatatcttatagtttttgagctggaaagtgagtatgcaaacaaatctagaatcaatcacaccattttccttgaatttgaaaaaaagttgagactaagataggtagatgaaagaaatggactaacttcttgaaatatgatccacttatgggcttaacccgtcaaactgaagctttttgagataagtttagaaccaatattcacaatacaagtaaccctgaaaattctttcaaaaaaaaaaaaacttaatcctaaaatatgcatgctatggctcctacaattagacgccatatggctctcttgatcttttgaattatacttctattaaatgaattaataatactaaaagataaagaagtaattaaaaagtaaaatggtaatttgaccaaaacgcattacgaactaacacatggaggactcgactactgaaaattgattatataaatggacactgcagttaaattctgtaaaatataaatctataattactaaatgagctgtttagaacgggttaatgctacc

SEQ ID NO: 245991 - DNA, 831 bp, Cannabis indica
gtagcctacactatagtctacatggtacggtttcaaatcatcgcctataatagtataggcaacaggttaaaattgtgccctatacttgacaatatacgagaccgttttatactgttggaaaaaaaatttggtgacagttatagaaactgataggaatactctatcggacagtttaaaattgtcggggaaaaccaattttttagtagtatgtcgtcaagaatgtacgagactcatttatatgcgttagatattagagttagtcccatgttgataatgtgtgcaaataaaataccatatataagatgaatggactaatcctttcattgccaattggttttgagatggaaccacatgcatcttacaataattctaacaatgtatcagataaactaaaaactttcgctgtctccattttaacctccatttgggatattttcggccaatgtgtgccagtttttagtgtttgggtctttgacctgttttaaaatccacaaatttcataatatgtacatccacaaatttctcaatttcactttgtgggattcttcaaatgtcacgttcggtcttgtggtctcttaaaggtcattcgttacacattgtccaggcctaaacgtgaggaggatgtattagagttagtctcacattgctaatgtgtggaaataaaatatcacatataagatgaatgagctacttctcctattgtcaattaattttgagatggaacttcgtgcattttacaattctaacattggacgcatgatatttttgtaaataggtgtatgggcgcctaagttgcaaattaggttatatgttgtctttatgtttttcttg

SEQ ID NO: 245992 - DNA, 729 bp, Cannabis indica
aacattaaatgttatttctgatctatattaataagtaaatctggttatattgaaatgagttttatttagggcataaaacccaacactgtgtcccaccctcttccatacccaatctctccctcgtctatcgccgctggacccatctcctcctctcccctatcttctccgatctccgccgcaatcatgaccttctccgccacaccctcttcgccctctcagccgccgattctgccctcttcgctgctaagttacgttttcactcagaccaacccgacaataacaacactgaaagcccaaggaaagccttcagattgagcttcatcatcatcatcatcttcttcttcttcttcttgttttttcctttaagaatcttaggctcgcattctcagcaaaatatatagaaagaaagaagaaaagaagaaaagtagcaaagtcattatttgattttctttttgtgcttgactgcatgtacgtaattttttttcttttattttttgttggttgaagaaggcaggaagaagaaggatgagatttagggttatttgtgggatgattgattcgtattttcatttgtttttttaattattttttattttaatttattaaaataattttatgaaaattaaatttaagttagatatattagattaaaaagttaaatttttaagggaattttgattttatatgcttaaataattaaaaaaatttattattataccaaaaacttaa

SEQ ID NO: 245993 - DNA, 714 bp, Cannabis indica
ctaaaaatatatatacaaataaatagtagtttatttctttttcttattttttaatcaattaaaaggcaaatgttatgaacagctgatcaaatttgtcaagaataaactgacgatctgtcttgttgaattatgattgattcagaattttctaaattttcgattaatgtgtcagtaaatttgtaagatagatgtgttgttaaattttttgttgatgagattatttttgtaacttagtaagactcaaccttacaagtctcattttatcacatatatagttttcataagagaaaaatgatgttattatttttcatgtgggacaaaatcattaaacattcaaattcattttatgtatttttattggacaaataatgttttccaaataataaaaatagtaataatcctccaaatactttattttgctgcctaatttaagcacagaaaatataagttaaaataaacaggatacatcatcaattgtcaattaatgttaagataactattaaataaaatagtttcacctatttgctagtcaagccacctccattaactcagttcttattaccatatattcttattaggcacaaataatggtgctaccgaaagcattcaaagagagaaaaaatcaaccacactaaaattatcttttgaagagatccgtttaatacccaaaaactgcagtgtccttcaaattcattattgacaaaagagcaacat

SEQ ID NO: 245994 - DNA, 2465 bp, Cannabis indica
cgctacactcaaaaaagaaaaaagaaaaaaaatcgaccacactaaaattatcttttgaagagatccataccaaaaagggaaaggcattattgacaaaagagcaacattacaaaaactccataccaatttgaacaattaaaaaagaatttcatccatgtgagaacgagcctgttcctcatgttaaaatttggtcaacaaaacaagaggcaataaagagttgactacctaatatttattatagctattaaagaaaacaaaacaagaaaaggtcaattttctagttcactctgtatccagtcctgtgcacacattaaggcttggagggtggccgggttgagagagctccaatggtggtcaagcatccttactccagtataatccgacgtaagtttcgacatgggaactcccaaaacgttgcgtgccatcatagataggataggatatcttggagtgtgaactttccaccaattcaatatgctgaactctgcattacgaggaaacagaggttcctctaagtacttgtccatatcagattttgtgccttcactttgagaagtttcatggaggaatttgtcgaaacccatcagcctatctctggaatccctaggtaaacagcctgaactaccaccctcttgccaagccatatcttggtcaagtgaagctaaacatatggagtgttcactgtaaagtgtcttgacagaatcaaaaacttcgtcgattcggtttggggcaccactaccatatatctgtgcatagtaatattcgaccagtttcatcttgaatcgaggatccaacattgctgcaactgctaaacccaagctacacctctcccagtattcttcaaatttggttttcatcgttgctgccaatgagctaatataatcatcagaattcttgcaccactcgtttaactgcagatacacgtcgcaaaggtctggaaaatagagatttgaagttggtgatttgttcctcatgaaaacattagttatttcaacaaagaacttcaagaagctagtgatgatagttgctctatcccactctacatcagtcgggcacattgtgtaggaggcatctttttcgggccaaagacaaaatgcatccctatgctctaaggcagcttcaagcatagtacatgttgaattccatttgaatgaattatcaaggcacaaagacttctgagattgaactccagcttcctgaactatttcattgaactttgcttggattgcttgtgtactctttacatatcgaatgctttcacgaatcttttcagccaccccattcactgcagctaaagcatcctgaaccatcatgaatataagattagaagcacaacgtacatcaaataaccgaccattacagtagagaaatctgttctgagaaagccggccactgatcctcatggcgatattatcattagtagagctactatcgaatgtcattgagagaagcttccggtcgatatcccaatccatcatacatgtcatgacaacttccgaatgcatgtcttctgtctgtgaaggatcaatagcaacgaaatttaaaatcttcttatgcaactgccatgattcatcaatatagtgtgcagtcaagcataagtactcggcattgtccaaagaagcccacttttcagcactcagactaattttaccaggcaatttgtccaacacttcggtcactttttgtttttctttcaagtatatctccacacagtcagcctcaactctatcacagttgacaagctcaaacaatggctgtagatttctaacaaacaccttaaatccaacatgttcaaccatggccaatgagtaaccatgcaagatgatcatgcgtgcaaggtcgaatctacttctcctttgatcaaagctattatgtacatatgtaacaccatcctctttcatatgatcttgctctaatttaaaattgacaagactaagaacctcatccttcttctgctcttgatctgaattgaaattggtaatagcaaggtttccttcctttttcttttccctgggtgtatataactgaggtaaggcatgagaggttctactttgacacctaattaagtggttcctcaaatgtgatgtcccactagtacttgatccactgagtttcttcttacagtgcctacaaacagccacacaagtatcaccttttttaatcctatcaaagtcattccaaacaacagactttaatcgggtagatttcacaatcactacatctgacatatccattggatcaatctaccgtggcataatatctgcaaacaaaataatgcaaatgacattacacacacacacaaaataaaggaccaagctaatagaagacaagacctgttggaagctttagtaaagactattactttttcttttataagggacaatattacttttatattccaagagagcaagtatgttttgcaagttcttaattctctataaaagatgtaaacttttgccgagcat

SEQ ID NO: 245995 - DNA, 631 bp, Cannabis indica
tgatctaaattgtcatggttaacttattgacagatccaatgatatgattataaccaatggttcaattgtcaataggtcaaataaataatttgtaacaagtaaattttgcagtcttctttcatctgtgtataaacctagtaacatggtaggatctatccaaattagtgtgtgtctgtacctatatatttactttgggcttagatgcatatagcgagcgctcaaggagctatataaacatccttggccggtgaagagaagcctataggctggccagagtgagcaaataggccagtcaggatctgggcacaagctgactggccaaaaagtaacttttggaccaagggagcttccattcgaccaagggaatttggcctctacaaggaaatggtgtacaaagctggcctcctcttggtaaagctatagtgacctgcaggatcgtggcagacacatgacttgccaggtcctggtaggagcatggctggccagacctcccctataggtctatgggtggctaggactaacctagcaagactctatgcgtagcccaaaacgtggacaacaagctacttgggaattggcgcggccttaacaacccagcaaactgatggaaatatctgctttcaaggggtag

SEQ ID NO: 245996 - DNA, 718 bp, Cannabis indica
gcctaataggaagcattttagtagactgatagctgaataggcgcatggtttaaatttccaaaataagcggtaattagtaagttgttcttgattgcgatctgaccagactagctcttggttacgtagggtgttctaatagaatggacgccaagcaaaacaccaggagtcagggtaattcggtcggatctagtggcggtgagggagctcagattcccccaaatgtttggggctaaggcagaggccctagaggcaaggcacgcgagttggggtgatgttaacccgccgcaggttgcccaggaatgggaaaataggtttgcggcaatgcaagccagaatgaacgagcaagaggaagaaatcagacacttgaggcagcatggtgctcctaccatgcctactctagaaatgcaggtagctcctgtccctactctacaagcaagaccagttactacagtgaaccgaatggaaccactgtacgaaaggttttgcaagcaggcacctacagtctttctgggaggtcccgatgtgatgaaagccgaacagtagttgacaattattacaagaattttgaatttcatgagcgtcaccggcaatgatagagtgtcctgtgctacattccagttccaggaggatgccctagtttggtgggacatggtgtccctgacctatgatgttactactatgacctgtgaaaagtttcaggagttgtttaacgcgaagt

SEQ ID NO: 245997 - DNA, 986 bp, Cannabis indica
gacccaaactaggatcaaaatccacacagggactcgagacccgaacttagaatcgaacatggaattagacccgagaccgagaagtgggactgggagtgggactagtactggaccctgatctcgatcctgaacccagacttcgacttgggacctatactgagactcgagtctgaaccagaaccagaccgggacctgtgactaggatttggatcttgacccaatattggggaaccgaggcttttaatagacccgtagtcggtgtctagattcgggactcaaattaggaccaggaccctcctccggacccagacctaggacccaaaaccagaacttgaaccagaactggaccaggtgcctagaataggaccaggaccgagaccaggacctgaacctagaactagaactagcctcggacgaaaaaccagactcggacccagacgaggatctaaacttggaattggacccaaacccagaaccaaacaaggacccgggcccgaacctggcacctgacccaaactcgaaaccaaacctaaaaccgaacctgaacccagaccaggatgcaaacccatataaggatcaaaaccaaggactcggacccaaaacctaacccggaccaagactgggatcgaaacgcgagattcagacccacacctggacccatacttagacctggacccaaacccaaacctaaacttggacccagacctagactgggatccagacctagacccgaactcagaccaggactagaaactcgacccagacccaaaccacaacctagacctaggacctagattgggacctggcacctaaactagaacgagataaggacccaagtttgggttcatgatctggacctagggcttggaccggacccgtagtcggtgtttggctttgcgacccgaactcggacccacaccaagactcacacccagaccaggacccgaactccaacccaaatctaaaattgaatccataccccatga

SEQ ID NO: 245998 - DNA, 1056 bp, Cannabis indica
gtcttggctaatcgacttaaatcggtgcttcactctgttattagccccaatcaaagtgcctttctcactggtaggcaaattactgacaatatagttattgccaatgaaatcattcatgccattcattctagaaaagctggcaaattacgttgggctgggattaagctggatatggagaaggcctttgatagagttgaatggtccttcatctctcactttcttcatcacattggggctcctcctacgtttacttctctcatcactaaatgcctttccactgtcacctatcaattatccctcaacggtaacttatcaaatgtgttctcttcttcccgtggcattcgtcaaggtgatcccctatcaccttatcttttcttaatcgtggctgaaggtttgtctgcagctattcgcatccatgaggaggctgcccttttctcaggtattaaaatttgtcgtggagccccctcctttcccatcttctttttgctgatgatagcatggttttcgtccctgtttcaactcaatcttcagaagctataaataatattttgcatttgtatctccaagcttctggccaatctgtcaacagagataaatcttccatcctcttctccccaaatacctctcctgactctcaatccacattccgatcttccttactccttaatggtgaaggtttcgttagtaaatatcttggcgttactcactgtgttggcagggttaaaaattctatttttcactatctcattcagaaagtttcatccaagcttaatgcttggaatgaaaagctcttctctcgagctggcaaagaaaccctcattaaatctgtcattcaagcaattccctcatttgctatgtcttgtttcaaacttccaaaatccacctgtgcctctattcaaagtttaactgccaaattctggtggggctcttcttcgaataagcagaaaattcactggaagaattggtctgctctctctgcttccaaattctttggtggtttggggtttcgttctcttacttctcataaccatgctcttctggctaagcaggcttggc

SEQ ID NO: 245999 - DNA, 1122 bp, Cannabis indica
tactttatttagaacatccaaaataatacacacatacctcccattgagccatccatgtgagccatttgaatccaagaatcacctacaaaacaacacaaaactcaagattggagaagagcacaatgtggagttatcccctcttcacttcctattaccattaaccttaaccctttcacttaagacacatatatatatgtcacacccctctaaccctaattggttatttactaatggggcttaagtggttcaataattgtatactataatttaatgggaaaattatattttgagggtgctctcatgtacctctaacataataaataattattatccatcccattatggttgctgaaaaacattaggcacatagttaatgattgtgtttatggtattaagcttatggttatattagtctacaataatacttctaacattctcccacttggacaatataatcaactaccgtaacattatctaccacacataaggttaatcaattaaaacatacataatatcatgtcgacaagatacatatattatgtatgaattgaccttgaagatatttaatccaataacaatcattaacaatcaatccaaacatgcatgaggtacaacaaaattgagactatgcgcattcatctccttttgtacctatcacttgagtaaacaacacatacatgcatacatatgtcaacaataactggaagtgactacaatatcattatgcatgttcaaaacacaagtcataagcattccatacaagatactagcatgtccgatacataataataaaactctcactgagctcaacaagctatgctcctaataatcccattcgagcaacatgctccaaaaatacacatacgggtatgcctttcgttagtgggtctactaacatgccagtactaggcgtgtattcaattgaaataagagactctataactttctctttaacaaaatagtactttatgtcaatgtctttagagcatgaagtacttctaacatttttagagagagctatcgctgcagaattatcacaatactatttcagcagcctcgagatagagtccataacacccaatgctgaaatgaagttttgcaaccatattgcttgacatgtag

SEQ ID NO: 246000 - DNA, 1152 bp, Cannabis indica
agaaactatatatgaaatcaatagggaacttaaaaattatgaattggggagtaagaacatatagtagtatagtactattcttgcctttgcctttgaagatcctatacctcttgcccacaaccagttactcattgccatttttcaactgagtattcaaaattttccaccaaaatttgaattccaaaagtaacccaatacaaatgaaatgatgattagatatctgaggatgtttggttaaggattttagttatttatatacacatcagttttttcaatatagattcgtaaagattgaaaaagttgagtcaccatggtccatgcatgactctttttcttgtcctaagatgtgatctgaatgtatttttaatggttggctagggtcatgccttgtgatttgttaaaactataatgggaatgtaattaactagctaagataccaaaagacactcatatatgatatataaccagttaaactctcaaaattatattaaaatgcccccatcacgactcatgacatatgttatatatcatattttaaaatccaaaaaaacctgttatatatatagatattcctattctttattacactattaatatattttgtacagctctaattttatagataacatatccttattatatgaacccattaattaatataaataactaaaaatgtcatgtatttttatgcttttatagttagggattatatttacacaaattctgttgcgtagccactttaagattaacagttaaattaatgttatttattatttattatttattattttcatttttaacaactcttatactcgagatcaattttaaccttccagccctagccttaacatgcaaacatagttgtaaatgcatctatcgcgctcgttcgacttatattctttagactttttaagatacaaattatgtcgtgttatagccataaaaaaatacaatctgtgttatgttgtactatacaaaagtatggatcgtactgtgtcgtgcaacaattttacagggtacgcccgacacggcccgcaagtctagtaattttgtatcgtgctcagatttatgatcagggcgggccaaaggtatgctcggacccaaactctaacctatataaacccttttaccccttcatacacacacacacaa

SEQ ID NO: 246001 - DNA, 1488 bp, Cannabis indica
taggatttgaaagaaaaggaaaaacttacgaaaaaatactagactttggtttaacttttacaaaaatactgtcatatgaaaaaaaaaaatcaaaaatactgtgtttttataaaacaacagtggaacacaaaacaaaacaactaaaaataatagtagaacaactaaaaaacaactatagaacaacaatgaaaacttaacacagtacacagtataaaacttacatagtatttttaaaagaaaacacagtattttcaagaaaaaaaatccactccacaataaaaaagtaaaaaagttagaaatttcaatttgtggtgtaaataatccattagaaaaataagtcaaataattcgccgcctaattttaatcttttgacaaaaaaactaaataaaatcacataaaaaagattgcaacatcagaattaactttaagaacaatgaagtaaaattataactaatatgcagaatcaaatcaactaagaacttattcaacaaacaattagcaatgacaagattaactatatacaaaaaaagaatcgatgataatgcagggatgaacaaaccaataaataccagaaaagataaaaacaataaaacaataaaatcaagaccaagatatatacttattcaagtcatctagatcaatgtgatctatggctttactttagttctggaacaccatcaaaatcgtctttattgattgagaaagaatagagtacattacaatcgagattgattccctatttggattttctcaaaatatttatctatcgcactcttacccaagaatcttcttcatttataaaagattcttcatacaaattctaaactcaatctctatcgtttctcgctacctctcaatctcaatctttaacttcaaagtcacctctcaaaactcgtacctccaaaatgataagtgttggtggttgttattcatgtttctgagcaagggacatgtggcataattagagaagaagatttgttaacctcccaaattagcatagacgaccataaagatttcttgcggagatgtcttgctaatctgggaggagttttacagatacttgatggagagagtcatccactacaataatttggtcttttagtgacactatttagtgacccacacaaaaggtttgggtcactaaagagttaggagtgatttttagtgacatgcacaattagattctaaatattcaatgttagtctcttttaatgcgcctcactaaaaatatagaggttcactaaagagtaaaatcaatttttttttaatttttattaatttgaaaaatactggtttttagtcacgtgtcaagcgcgattgggtaaatatgtcccgactcacctggcgcgtcactatatcataatcttaaattttcttaaaaaaaacacagctgtaaagtttttttcaaaaaaaaagaaataaaagtaaataaaaatataaccagctgtaattatacacagctgttaacatactttaataattaaaaaa

SEQ ID NO: 246002 - DNA, 2057 bp, Cannabis indica
aaacctaattctgttcactgtttgtttctttgatgtgtaagacttcgtatgtccatatggcttgctcccacaaggtctgaggttcgagtctcttctgggtatctacatagaaaatagaaattgttatagttttttagttcccaaatattgtagggttaggtaggtgggggtcctacttttttatttttttttaaaaaagaaaagacttcttttgtccatatttagttaggtttcttcatagtatgcaatttattttcttattaaaaaaaaattaagattgcatcctaaatttttaaatttgagtttttttgtaagataatccttttcattaaactaaatgatccagtcagataaaatggttgacttgtctttgttttttgggcatggttcaaaatgatctatgaatatgcttaatgtattaattatttgcataaaaaaattatatgaggaagacatttgaattgagtgttttttgtgtaattacttattctttttctccaggactggacaaatgaaagggtggagtatgagatggatgtcattgagaattctgtaaaatctctacggtcgcttgctaaagaaagccgtgaaaggtaatgtcattttctttttgagcactactcaactatattatctttcatcttggactggtttgtgcctaaaatgatcttgttctaattacttgttttttcctcatgtgctcttttttgtcttttttactttgtgaacattgatgattcaatgtgacatctggtaatttgactatctcaaaagcggggctaatttgttttttctttttctcaagtacattgtaataatacaaacttactagtagcgttttaaaacttcctagttcaacataagtaaatcgtttttggacaagtatttgtctcttaaaaggggtttaagttatttcatgttttcctgaatgtatcacatttccttagttgaatagaattgtagagaagttggtggaagtttgggaaaattgattgatctgtttatttcaattcaatacaaaaggtttacagtgctgtaatttattttattttttgttcctcagacgaccagcttatgtgcattgccgaacaagtccagtcaaagagattattaacaaccatgaattggagattgtaactttagcaaatttatcaaccttgacggtgagtgatatgctttgcaatgatgtgtgtttttgcatatactgtatacaacttcctttcccttttccagttatgctggaaggtaccttgattgcttgtgtttctttcaagcatcaaacttacattattcttgctggattgctttgccccttctatactagtaaagttgtaaaatttatccatgtataattcttcggggttcaagtatcatattaaaattctctggtcgctgctgccatattatgagcatttataaatgatatcttcagttgaagattacatggttgatatttcttgttgtttatgaagcaaagtacgcactatattaagccaaccagcaaatagttgtactagctagttgtcaggagtggaactcaaataatttactactggtcactagataggataaattaatccatattctatgtatgggtaatggctaatgccaggtttttgttgtataaaatatttgtgttaaccttgtaaattcagtgtggtctcatggctcatgaagcattccgtcgcttcttgacgaggaccaatctattaaatgtatgatagagttccggttctcccaaattttgtaatgcttagtgggaaggacaaattagcaaaaaaaaaaaggaaaaattgtgttgtgatgtgcccgcaagtaatagatgtcttaaggttttccaagttgctgctggttatctttatgtggcgaatcatatactgatacctcagtacatgcatcctgtattcttgtatatctcatataataatataatatatttgaatccttataataggacgttaacagaaaaggttgcttcttaattatcaattctgttttgatatgttctgattatgagagcccagttgagtatagtgtttgcctaactttcttgccat

SEQ ID NO: 246003 - DNA, 996 bp, Cannabis indica
cttgaaaataattttgtgtcgcatttggaaattgagagagaaagatagggattttaaattaaaaggcaagtgtcactcttcattgttccttgttttgtctttcaagaacccatctcacttaaatcgtattgtgtctaagatgccccaggttatttaacacgttttcttgattcttgaaagaatgaaccgcattcctctgaattgggacaccaaattgctatggttaccgctagaaggtcgtgtgttaaacttgccaatcccttcaatgacttccaataaattgttgcgattggcttttatggcgagaaaggttgttccagtctaggagctcgatgttccaaaaattaatcataagaactcaaaatttttaaatattacccattaaaagtgcacccatatataaatatatatatatacgtgcctatatatattataagggtctcatatagagtaatatacatatataaattgagaaaattacactcactataagattttaaaagttgtttacttaaatatggcaattaagtttgactaatttatatgattatttttttttttattttaggtatttttatggtatttgatatgccatttatgtgtaaattaagttttcaaatctcatatttaatgtttttatttatttaagcagttttatttgtcactgatgccgaaaaagttgctggagtttgctgcctgcgccgaaaaaatcaccagagtagcttccggtgtcggaaaagtcgtcagagttgttgccattgtcggaaaaatcatcagaatgacattgtctccggaaaaatcaccaagaaacaagtttcttgatgaagtaaccagtttcttgatgaagaaaccactttcttggtgatttttccgatgacaatgccaattctgatgacttttccgagaccgacagctactctggagactttttttagcactgacagcaaacttcggaaaagttgtcggaattggcatagtcgtcgaaaaaaatatcaa

SEQ ID NO: 246004 - DNA, 581 bp, Cannabis indica
tgagtttgttggcactaatttaatcgtgacctgccaataacaattttttttttgttgtagtgaatattatatgtttaatacaacaattgttatatattaacatatatattacaatattttcatttttggataaatttcatcaagattagatgaatcatgcacattgttatatatacatatatattctgttcgatttttgttggctgccaaaaacaacaaactatgatttttattggtatcattattatgattgtttttattaatattattttgtgcttattaatttgacagatctaggttaggattaattttttcactctctattatagataatagtagaatatttttcaaaaatactgtgttagttttatactgtgtattgtattaagttttcaccgttgttctactgttgttttttagttttgttctattgttgttttaattattctatttagttaatttacggttattttataaaaaaatatttttttttataaaaaattctttatgacagtgaaattataattttttactaaaattcaatattcttgtaaatacctctattattattattattatta

SEQ ID NO: 246005 - DNA, 1211 bp, Cannabis indica
aaataagattatttcagtaaaacaatgcccctgaaatcaagcattccctaactgaccttataatattttgtgaccaaaactttatgacaatagctatgtaactatgcaagatggactcgaatctcagacctagcaggaacaaattacacatttgacatttgagctatttagacaggctaaactccagttgggtgaaaaatgttggtaacatttattcccaagcaaggagacaattgtcaaacaatagtaataggaaaaaagcacccgagacactttactagtttgcatccaaattctgctttctttcatttggctggatacgattggtttttatcagaattcctttttggtaattattcagataatgaatgcaagttggatagaagccctaatgattatgtatttctgtatgtttggctgtcttctttcacagacaattgtgtttgtgtacatatatatatgtagaaagtaatgtagtgtaaccattatttggcttaattatttccaaaacacttttgagaatcaagtaaaagcagtagcagaacctggtagccttcgatcgcgaacgagcaaagtaatttctgcccctttttctgatttgttttcaagagtttcaaatctgttagtgtcagtgttagcttaattttcttgagaaaccagtttctctagtttaatttgtgttatttgtgcgttctgtgattttaaaaattgtcatttgaaaacctatttctatatgaagatctcagtttctatatcaggtgttgtttgggcttatcctatacctaatttggaatcagttaaaaaccagtttttgagattacattttctatattacttagaattgatgcaggtgttgtttgggatcctcagatttttggtttgtgaggtgttttaatgttcaggttaagcacgtgagattcaggttaatgtccttcttgcctgttgtttgttcttggtacataacctcttcaggggaatataagacaattctagttagacacttgtgttttagaggttctagattgaaataaactagtgtaatcactagtaccctactgaatgatataaaaggagaaactggtttcaaacatcaatgtaatgcacatatttgatcatacctattttggaaacatgtcaaaaaccagtttttacagattgatttgtgttatttgtgcgctctggatttttggtgtgtgggtggttttaaggtt

SEQ ID NO: 246006 - DNA, 1008 bp, Cannabis indica
ttattattgttaattgatattttttggtttttaatttttttttttgagtaattctatttagttataaccttccaattagaatataatttatttggtcctaagtgtattagagattgaaagagagagagatgaggaaagagtattacagcataggcagcagcaagtaaattcatatcccaaccaatgctccacaccgagagtttgtgttcggcaacaaaggtgacagcaacggcttgtattgttccaattaaacacactaacgttgtaagggaaagttggtgattcttgtacgtctttaacgccttgttctgacaaaattattacaaaagtccactactcaataatcatgactataagaaaaaattgtgataatattttagtcactatataaattgttaatgactaaatgtgatttttagtcacaacaaaaaattatttctgactaaaacataaaacttaaatacaagttgttactaatttagttttatccataataaatattgtgactaaaaacatatttagttacaactttttcacttttatttaatcacaagttttattttaactaaaagtaagattgttttaaaaaaaaatcattattataataataatattaatctgcatgtatattccatgctacgtactagtgaatttattcttaatttaggatggcccgctccgaacttttgtaaattaagaacattgatattagattagatttaaaataatagtaataatatggtacccaacctattatttattaaagtaaaatagtatttaatatttaattgtactaaactagttaagtggtgctggacacacctgatcataatgtgttgaaactaaataccatatataagatgaatgagctacttctctcattgccaactaattttgagatggaaccacgtgcacttttaccacacactcacctattctactaccttaatcatatacttctgcgttctaacatagaaatgctaatatattgttgatgtacttacttgc

SEQ ID NO: 246007 - DNA, 522 bp, Cannabis indica
atgatctctcaatggaatgcatcggaggaaacaccaggaaaaacccaaccaatgctggaacctctgctcctgcacaagacaaggggaaggcgaaggttggtgaccctaagaaccttaatgctcccatacctccttggagaaacgcatatctagccaataggccttctcaggcacagaaggcaaccgacgcctccgggctcgacgcccttttgcctagaaagatactgtagcaataaaaataccaaaagcccaagggaaggaaaaattgcccaaatgattcagtaaactaggacgatgggacagggggacagtactctgacgacagctagtctatggtggatctcagaaggtgtttagacgccaagtacgagaaagtaaaaagcgagaaggcgaggccacgtggtaatgacctcagaaactacttgaatgacaaagttcgtggatgagatctctcgaacagtgacacaaagaggttggaagaacaaattgctgcaatgaagaaattagtccaaaaataaagtg

SEQ ID NO: 246008 - DNA, 953 bp, Cannabis indica
ctgttgttaaaccacttctcctctacgctcttttaatggtataatgactagaatcatgtttccactggcagttgtaaacttgacagttatagctcttcctgggttgaccaaggttgttgtaggtaataattctcttctatttatttcagtcaaaggaagtagtatttcatttctttattcggtaaatatgatggatacataatatcaagtaccaaatatttgcagttgcagagggacaaccaaaaaccattgttgaagatattgaaaatatggttcctccttatgttgagaaggtgcgtatatgaaacatagctttctatctctctcttttaatattttgttagtttgaatttgaagaaggtggctcttataaatatattttattcaaaggaattaaaccactctttgttgatcatttatagaagaattgaaaattttgttttctatacataatttcaacaacagtcttcttttgctcttcctcatacttattgatattttctattttgtagcccaactctatcatattggctatatctcctgtaaatcaagatactgctacatcagatgcaataaaacttgcaagagaagttgatcctttaggtagtctgatacttccgtgtcttattttgtgttgatcggttttcatttacaggataagaaataatttttctccattataacttatgttttaggtgaaagaatatttggagtgctaacaaaacttgatcttatggacaaaggagccaatgcagttgatgcaagtatattagcgtcttcaatgcataattaaattggacaagaaggtggcatctattacgtggcatctgttagcaccccttttttttcaaatacatctgcactgtaggaattttcttggtgaaattccaagattgccctacaccactcaagcaaattatcaaaaacgacagggacaaacttgtcccagaaaa

SEQ ID NO: 246009 - DNA, 555 bp, Cannabis indica
cggtcacatctgagcttggtcaaatatagtggagatggttgtttaaaaggaaaaaatgaagaaagaaatgttgatatgccaatcaaggagagaggaataaaaatgaaaacaaaattttaatgacctaagtagattccacaatattatatatagtttttggggaccggtcttcacatgatttgtacccgtctttgacatacattgtcggagttgattacacaaaatcaaggaattttcgtacatgggtatttcattactcataatataatgatatctcaagatttgatatgacattatggaaggaaaaagttcattcaagttgtatgatcaatatggatcttggaaagacttatgatactattgatttgagactttcttgaagcaatgttgtccagtaaagtttgttcatttgatagtaatatgtgtttatgtgttcgcattcaaaaattttctttcatgttgaatggatctcttcataatttctttgattcaaagagaggccttccgcaagaggaacctatatctccgctcctttttattttttaaaataaattt

SEQ ID NO: 246010 - DNA, 1019 bp, Cannabis indica
aatgagctctttctcctgcttggtccaaccagcccggcttggctttgcctttttcttcttctctttcacgggcctcggtacaaagtcctcttggaagagtttttacatgacatagttggtctcactggccaagaaagtgatgtttagagaaggttctggcaattgaagaattttttgttccatccccctgaacgcttatgtgaaagagggatggcagtacgagggaatctactggaattgagtgtagacagtatccattccctgaaaaaagtagtactcgtccaaaaaatgtcctattttcctgacatcggtgtctacagtgcccttcagccacttctcatccaattgatagaagtagaaataccccgacctactctgcttggcagttaactttagatcaaaaagccagttggtgtcgtgcggggatggctcaccccatctttgtgaggcgtaaaagacgaacagggtggataaatatttgatgcccttcagactgaactgggtcgagcaaaggtggtagtagtatacaatcctcttgaagtacagaagcaaaggccgcattataccttgcttggtatgagcgcccgaccaggcacaaaacccatgtcttcggctagttgccctgtgatttggagaggggaagaagcattcgaaatttcccaagtagttgtgcttctccaaattcttcatcttggcctgggttactatggattgaggtgaaacccactgagctcctaaggcaccttatcttctttgaggaacaactttggtgtattcctcggtaacatagtcttcaccctctaccatgacttcattagtctcggacatggattcccctacctcgttaaaacccctaaagggaaatccctgagcaactccttcctcctcagctttagatggagtaacaagacggacctcgccctgatcctctagctcttggacttcggcgtccccctcattgtcttcctcctcggcagcaggtcgggcctggtcagtgctcgacattgtggaaatccgag

SEQ ID NO: 246011 - DNA, 862 bp, Cannabis indica
caaaaaatgggagtgtcaatatcataagtgcatcatttcagattgtaataatttaacagtatttacaaaaatgttagaataaaaggtgcggtaacaaataagaattaatgattagtaactataccatattttttttgttggaagtaacaatatcatattaataccattacaaaacattaatgattttatcattataattgtctgatttcatagacattttgcaagtcttttacattttgcaagtcttttttttttaaagctttttttaaaaaaaaaaaagtaaataaaaatttcattgaaaagagaaagccaaaacgcctacagagttgagtctaaacaaacaaaccaacatactaaaagtctaaatgtctaaaggccaacatgccaaaacaaagtgtaaatgtcaaaagactaacatcctactgcctatttcaaaaggccaaaagaaagtgtaaatgtcaaaaggtcaacttgtcaaaagaaagtctagccaaaatagtttcactaccactgcctatttctatccttgttgagatgttcttggtatttcttgagattgttctgctgttttccttgccttttttttttctctcctcttatttcttttcacagtttctgcacttggatttttctttggtggccttccttgcctcttgctagtactagttgcttgttggttttcagtattagcctgcaagtaaattaatttacagcatttataagtagcttataaaaatttaatacaaattaattataaaataaagtttacatgctctcttgttggattcttacaagtacgacgagaatgacctggttttccacatttgctacagctgttgaactgtccaaatcttctagcctt

SEQ ID NO: 246012 - DNA, 2650 bp, Cannabis indica
aataaactaacattacttgatatcttatacttgttagtacagtgtaattactatgatgttggaagacatgtgatcttattgtaacttagtgatctatttgggttttggaaatgggaaattgattttttttttattctttaatgggtgcagtaaaatagtgaaaatgatttttggctcagcttattgtaaagtaaatattcccaaacctacatctatagatagtgttctgctaggttaggaaattgaaatagcatagacttaattttcaattcttcctcattcgtttactatagatggtgatcgataagacttggacgacattgaatcgttgtgatcctgctttctggattggtctccaagcttttttggcaatggcttcacaacacgtagattgtgatgggagaatcaaatgtccatgcgtcgaatgcttgaatctaagattgcacactttagatgttgtgcgggctcatgtacacagatggggtttccaacaaagttatcaacaatggatttaccacggggaagttgaagtgggtgttgccaatgaggaagtggatgataatgacatagatgagatgatcgacgtcattgatgattttctcccattgacaaatgatgaagaagtagccggtatcgatgggagtcgaatgggtcggtattatgacgagttgttcgaggagattaaagctgagttgtatcccggttgtaattggatatcatccctaaactttttagctaagctgatgcacttgaaattaaaaggaaagatcccgaacaacatatttgatgaattattgaaactattgaagtttgcattaccaaaggaaaataaaattcctgtaacacactacgaggccaaaaggaagctcagccgactaggattgggataccagtccatccatgtgtgtgaacatcattgttgcttattttacaatgagcatgcatctaaagattcatgtccagtctgtgggagtagtagatggactaatgatgagaagaaggagggaaacgcatgtatacttcaagacatacagcaaaggagatgatatggcatcatactggaaaatcaaagaaaaatgggctaatgcgtcatccagttgatggaaccgcgtggaaagactttgatgtcaaacatccagagtttgcaaaagatcctcgaaatgtccgtttaggcttggctgctgatggatttaatccatttggcaatatgtctcaatcctacagcatgtggccagtggtgataatagtactacttgtttgtactgtagagcaataataatagtactcatcaacaaaatcttaatgaacagacccttgttaagtactacttgtttagtactaaacatggtcttgtttagtactaaacatgggatatcaatatcattttattttcttccactctattatttcattttctgctgtaaaaaccatttgttagtgggaaagttcctattagttttctttgcttgtgaatctgagaatcaggggcgagagcttaagaatgatgaactcagttcttttttctttatttaggatcccttttgtgcaatagttgttcatatctcttaagaaattaatgccaatgttattaataggttcctggtacttttattctttaacttcttgaaactttgatccccttggtgtatgaggccagaaatagttcatttgtccatcaatccattcaaatggacattactcaactgttccttcggttagttcattttggtagtgaaacttgtcactacctacactgatgggatacttaccaaaattcatatattgtctggttattatgccaaatcagtggcaaagttagttggggtatgttaagaatagaataaatagatacttgtttgtttattggataaatttagaagttgtatttgattttaattattacaagcatgcatgcagtcagtctgtagagaatgtgaagagtattttcttggaatcattgagatggataatatgaatttgaattttacttttatacttgagtctcttaactcttatctgctaagaatttgtatatataggtatgcttctgaattttattccttttatgatatcttatacttgtttgtggctatatttttgttcttattattcttgttatttttctaatgttcaattaacagctttgaaaatggatcaacactgaagcaatcaattgctgaagtgcgtaaatttatttgacttgggtatcccgcccgatgagtgtgcttatatttactgatttcgttgtaggtgctgataggaagttacttctgccccctggattgtctatgctactagaccagaagttggatttcgatgtcggtcattattattgctttttgttggattaccatactatgtacattgcttgatacatatggtatcctgaaaccggaaagtttaaaaatgaattacaccaattcatttgatatataactttttctttgtaattgaaattcaaaactgtttacaaattgaaattcatttgatatattacatttaattgttgatgttaaataatatagggttgattaatgatactaaatgttggcatacttgcatgcgaataggggcgaaattacatttttagggagaattttttttgctcctaatttgcataaaatagaggcgattttaatacttttagggg

SEQ ID NO: 246013 - DNA, 1903 bp, Cannabis indica
actgaataattagggttgaaaatacaattaaattttctaaatctctctctctaaactcacgcaactctctctctcttacacgtctatctctataggtggtatgtgttgtgttcttttttatctcagtcaccatattttatgaattgagtacagactgtgatcagtaaattatatccattcaaattaaatctaataactcactatattcgtagagtgttgagtcttctagagtgttgagtctgtgaccaacatcaggtctgtatgctctttatttgtgtccacattaatacaagcgtcacattattcttcaacctaaattcaaggtataatttcaaaaacatatatataaaaattggtgtcacatataattatctctaaattcaattcctttttcacttgtcatgctttccttattatatcgtgtccgtcatttcatttatatatacaaaagccacgtgtataataaaaggaatttttataccacatattaaaatttttaattttttttcttgtagggtggaattttttttcaaaaatactatattttttttcgtaactattgtgtaaattttatattgtatattgtattaagttttcactgttattgtactgttgtattttagtttttctatttttggttttaattgttttttttttattgtttaaaggttcctttaagttgatttataaaaaaataatatttttgtaaaaaattcagtgtagcaataaaattataaattgttattcaaaatttaatatatttttgtaaaaaccctacaatttatgtacgagtagtgctgcttttttttttttttatttttttaaatcaatatatcgattggtgcttaaaatccatagaaattattaagtccatggaaatttccatatgttcattatattatagggatagcctgcgggccttattcaatataattgaagtgggctcattattttcaatgaatattcttaaggcccatttttttgggtcgggttctatatttttaatgggctatttacgaaattattgaaaaaaattaacattgtttataaaaacatggtatatttttttaaaaaaaagtttaaatatgaaaattttatagaataaaaataagaaattattcaatatttaatataagaaattaacaacctcatatatgaataagaaattttttgatatttaatataaattattcaataataaatattaacaatttaacatttaaccatatactaaaatattggactctttatttaataatcaaaaatatttttatagacagggcataaatcctaacataattcacatcatgggaaactttttttttaggtgcaatgctttgttgaacagtgaattgtgaattagataaacctagcactaataataataataatatttattattattagtgtattttagacttctattttatacaagttttttttatctaattttctattttgcttatatgtttaaaatattataaaataatagcctaaactcaattttcattatttatttttaatataatcatgaaactagtttctagaccgatcaaatgtaaaaaaatatatattattataaaaataatatattggttacacatgctcgtgctaaacactagcttcagggtgttagaaattagagatatgaaattgagtttaagatattaaaagaaatgataaattcataccctaacctctagtataaattattattaaattttattttgacaaaaattaagttcaatttatcattttttatcattttaaaaaatataaaatatgaattctcatttaataatataaaaaataggaatcattacatagaaaatataaattaatattttatttatataaatacctccataaggtgtggacaatatttataccttttatgtgattt

SEQ ID NO: 246014 - DNA, 379 bp, Cannabis indica
taatttttttggcggtaaaaatacattccgttaatattttgttacaaattaggtacctaacgttaacttctcagttaaatggcaactaaataaatacgtagcaatttctaattagtctaagtcattattttaaatttttaatttaagaaataaaaaaatattatataaaaatatgatcaattaaaataactaaacaatataattggaaaaaagaaagaaaaaatttttaaaatttcaccttcgcatcaaaactcaacaactgagaaactttttcaaaactcaaatattttatcacctataaagaaaaattcttaaaatcatcatagtgaacaaagaaaacttgtcaactcctcattcagatctcaatcagacttcgcac

SEQ ID NO: 246015 - DNA, 870 bp, Cannabis indica
gtcatttagtagtagttttcataattttgcatttccggtgcccggtattttggaactcggtgtttggctcagtaaaatcacaacttagtatgttagtagtttgggacggtttattagacattgggaatgtcgggaatggccgggaatttagaatttcccaaaaatacccctttagtgttatttatgttattttagtgtggaggggcaaattggtctttttgccccattattattttgtcttctagtgattttaatagttgaattatatgtttattttattatattttggctgaagtaaaataggagtaagtgacatttaatttcatttttcaattttctaaaaaatcaaaagtttagaaaaaaaatagaaaaaaaatgacaatttttttcgatcattttaacaattttcggggaccacgtgttagttataggggccttatacctcaacctgctttaattgagttatcagtaactgccttaaggattcccgtcacatagatgacactacctacatcaagccagctcagagagacaagcctttaatcccttcgagaggagttgtggtgggtttcgaatcttttacccaagcaaggaaagatgccagtaagagcgatccctaccactacaccacacaacacgtagtagaaaaaacaaacctaaatatttgattcagaattgattcgttttgggcccaggaagaactgaattagcacgtagctgttatagttatttttggtcatataattcagctacctataaaaaaaaatcgttttattttctagcataagtttcggatggcagacatttttgtagtgtgctttttacagttttaaactcttgcagtgcaatcgcagtttgaaaaattatgaa

SEQ ID NO: 246016 - DNA, 1359 bp, Cannabis indica
ctttttcttttttgattttatttaagtctggtctaattccatggtcagatttaggttcgggtcagaggttgggttcaacactagggtcttggagaggatttaggtctaagtatggtcagagtccaaactattgataaagaaaaaaaaaatttaagaaaatattaaaagtgtactttttttttattttcaaaattttaattctcaattaaaaaattgagaaatgaacagttttataaaacgtatttttgaaaaatattttactttttaaaaaaaaaaaaagattaaaaaaagtataaccaaacggtcacctaatatttttataataaattattccaattttagtacatatgcttgttagggatgaaaattgagtggataatgaacgagtaatggacctcctaacctcgtccccattttctatttatgtctctcatcccacctctgtcccgcttaatccccgatggatttggagtagggaaatccccatttggtatggagacccattaggtacccactaaaattaaaacaacaataataataagaaaatagtgtaatataactaaaaataaaaataaaaaacaaaatattgattttaaaataaacaaacattctatctattgaaaagtctttattacacagtaaattaagaaagattaatagtcaacttagtaagtataaccaatataattttaatacgtaataattaaaagaaaattacacgaaaagtttgaaaactatatatttggagtgggtaatattacctcttacccgctccgaactcacttcgggtatataaaattgcactccccctgccccgttacccattaaagagcacaaagaggagcctcaaagtgaaagataccacttctaatgcccaagagactagcaaaccacacctacctagccaaaggataaccaaagaaaagatgccaaaatgaatcaacattctcattacaaatagaacagttaacaccattaccatagcggctaccacatggtaagatgtctctttcatgtttctaaaggaaaaatttggtgcgctcatgtagaggggctttccaaaagtccttccaaccaaacatcgttacattctccaagaaaagctttagtacaagtgtgataaggtcatctccaatgggactttaaaaatgaaaatttgattttttatacttacatataattaatattttatccctaaactaatatatatcactattgaaaatatatgaccactttatctaaaacacaaaaatacccctctcaaattttccatactttttttagtgcaaaaacataaaaaaaaatataaaaagcagatcgggtccgatagggtccgatggtcacctaatgctatttttt

SEQ ID NO: 246017 - DNA, 6261 bp, Cannabis indica
gcaaaaacaaatgctaataaagtgctaataaaagtataagcaaaaaatatttgaagtaaatataaataatctcaaaaatttaaattataaaaacaatattaataatctctaaatataactatcatttttttttttttttgaacacagaaacaaattacataggattaggcatgtcttgctcaatagcaaaacgtacacaagagggattaaccccaatccacatagcactagccttgttcaccaaagcataattggctaaaccatgagcgaccccattcgcttctctataaacaaaagaaatacccattacaccagcttgcaacattagagtcctaatacaatctaatattccatcctcatccctacatccatcctcctttgtttggatcaattggatagcatgtaagcaatcagattcaatacaaaattgccgatatttcctttgaatccccaagagaagcccctccttaatggcatacaactccgcctgcaatggagttaattcctgctgccgtaaggttgcagtagccaccaggacccgaccctccccgttcctcaccacacagccagctcccatacagcgcccacccgctttaacccccccatcaacattaattttgaacgtaccttgtcccggaggagcccaatgcgcaacagaccgcaactgagcatgaacccgttgcgaagattggccttgacagtcgctgagatatttagcacaccactccactatatccgctgcccgtggtatccgccccccatgtttcgtattatttctaatgtaccacagctgccaacataacaccaaaaacatctcaaactccacccgagtacaccccttagccaaccgaattaaaaacgccatgacatcttctttgccaacccgctgcaacttactcttaaaaccactcaatcgccatacctccttattcgaattgcacccccatatagcatgaaacaccgactcccgctctccaccactgcatctaccacagccactgtctacatccgtacccctatacgccactgctgcattcgttggcagccaagaatgcgccattttccaaacaaaatgttttacttttggagggatcttcaacttccacaccatcctccaccattctctaagatgactatcatccgcttgcccaacctccttttgtagctcaagtgccatccgataaccactacgaactgaatactcgccattggtactataatgccatagaaccttatcctccaaccttggattagacaccggtaattgaaggataatttcagcatcgtcatgattgaaaagatgtcgaataaagtcctcatcccactccccatcctgaagtttcaaatcaaccaccttaagctgtggtggaatataaggcttgtcataaactttaaaactccgagggcgaggtaaccaaggatcctccaaaatcctaactgactctccatttccaattctccaccgatacccattaagtattattttcttcccccacactaagctcctccacacaaaagaagcatgtgccccacacttagcatccaacacactctttccaggaaaataactcgcctgcaacaccctactacacaatgacataggctgccgaatacacctccatacttgctttgctagcaacgcttggttaaacatctcaagatccctaaacccaagcccaccttcctccttaggcttacataaatacttccacttacaccaatggattcttgtatgtttttctgtggatccccaccaaaatctggccgccatcctatgcaagctagtgatagtactcttcggaagcctgaagcaactcatagtatacgccggaatagcttgaataatggccttaatcaacacttccttcccggccatagaaaacatagacaccttccatccccgtaacttgttccaaacccgattcttaataacctcaaacacttgcttcttattcctcccgacaagagacggcaaccctaagtatttcccatgattttccaccaccttcatgctcatataacctcccaatgccctcttctcttcgtcccccaccctcttgccaaaacaaatttcagatttgttaaaatttacttcctgtcccgacgcactagcatatttgtccaaaattcttttaaatctatgacaagcattcatagtggcatcaaagaacaccaaactgtcatccgcaaagaacagatgtgacacagacaacccttgcctaccaaaccgaaccccactaagtctcccagcctcctcctcgtggcaaatcaagctagaaaaagcttcagcacagaacagaaataaataaggagataacggatcaccctggcgcaaccctctctgtggtactacacaacctttcacctcaccattaatcaagaaagagaacctcacagaagtgacacaccgcatgatcttctcaacccacacttcactgtaacctaaccgaatcatcatggctcgtaagaagccccactccactttgtcatacgccttggccatatcaagtttcaacgccaactttctcccattttgaaacctgttcttgcgcatacaatgcaatccctcatacccaataatcgcattatcatgaatcaaccttcctttgacaaaagcactttgtgactctgaaataaccatccccaaagaatttcgcatccgattagccaaacatttagagacaattttataaataacattacagagacttatcggtcgaaactcctctactctagttggcttctcgactttcggtataagagcaataatggtttcattaagacactccacattagccccattattcaatatattcaaacaaaccaagattacctccgctcgaagcttatcccagaatttctgatagaacaaggccggtaaaccatcctcccctggagccttagatggattcatttcaagtacagctcgttccacttcatcctccgtaaagttcaacaccaaaacttcattggtcagagcatcaactctcggttgtacaacccccagcacctcctccatgtcttccacttgcaccctagaggtcgtgaagagccccttataatactgttccacaattcgctgaaccactaggctatctgtctgccaaacaccaaatgtatccattaaccccctaatctcatttttcttcctcctagccgaagccttatgatgaaaatatttcgtatttttgtctccccattttagccacatcgcccgacttctctgcctccaatattgttcatctttttccagcaccacatttaattgttgctcaatttgttttaactccctccactgctccggctcttggttcaaagttaactcgtggagcgtcctctttaacctatcaatccgctcattcatttctattttcttcctcttgtgccaactaaacagaactttccccactttaaaagttttttgtttaaaccttcccacagaggcttcggctcttccttctctccaaaaggtagaaacaatatcactacattcctcctcactacaccaagcctcttcaaaatgaaatctacttttccttcttccttgaccacacctttccccactcccctcacatggaatatccactaccaatgccctatgatcggattcccactagtccaatagttgaacatcggccccctcaaattgttgtagccactgaagattacatagagcccggtctaacctctccatgacctggctcgaattatgctcattacaccacgtgaaatcagacttgacagagcaaaaatcaactaattggcactcatcaagaaccttcctaaactcctccatcgctacggaccggcgaactcgacccccactcttttcagacaaactcacaatctcattgaagtcccccacacacagccaaggaccctgcgtttcatggtaaatatctctcaatagttgccatgagaaatgcctttggggcgcctcaggatgcccataaaaacccgtaagagtccatggcaaaaaatccttaccagctatatgagccacaatatgccccggagaactcgacacaacttgcacactcaactcctcttgccacatcaagatcaaacccccactaagaccaattctatcaactatccaaacattagttccaaaatttaacacctcactcaatctcacagcttggcttcgagtaagcttgctctccgccaagaaaagaatacccggtttaaactcacggatatgggattgtaacgctcttaatgtccaagggttcccaatgccttggacattccaacttaatagcttcattgctctcggcggccttgcagagcaaggctcgccgcttcatcattagaacaaggagaaaataaatccacaccagtagaaatactcacctccttaaactcattgtgcttctgcatatcagtctcggccacttcatattcagcattaaaaatgaattcaccagtacctcccactcgattcagactctcagcttgattccccacctcccccaccgctgccgaggttgccaatgagacccctgctgcacacgttttcggtctgttccttgccctgttcttaattgaaatcttccttcgctgcccctgcttcgcaccactccccagatccacggctccactctcaaacccagcaaagccatcacggctacaccccaaatcctccccaactatttgtttccctttctccagcccccgtcgagcccgatccctctcttcttcacaaatcacttttaaatttttcctttttttcatatcagtctcatcgttttctaattcatcaactcccacaggcctcttttgaaaacacttggacccatccctcatgtccactaaagaattattaaagcccaacccattcggcccatcagcacccagcccatgttgacgttcagttctcagtccactctgattatagtccactaccttagcagaaataactgcctccctattttcctggccagtagtcccacgatcagtagtgacctccccattcacacccgctccaataaccgcttctccagccgtggtggacaccgccgctggctccgaacccgtcaccatctccgttctactaacaccattcctatccccatcatttccaaggaaggcctcttcagtatccaccctcacatcaatatctacattgcgatgtagccgactttgctgaaatgcaatgaaacaattaggcattacttcctcctccttgagccacaccccatattttggcactaccaaaccatccacccccctcaccgttatagactcaccattacagtcatattgatcatggccccaagtgccacacttaaaacaaagtaatgggagtctctcaaatttgaactgaacccagtgttgatgaccaccattaggcaagaatcgccccacgaatatactctgttgcaatgggaatcctattcgagccctgacatatccattcagaaacattctttgctcattattccatttcaactcgtgtaatgtcccagccatctcagctagcctaatgacattcttcttggtaaatgccttcaacggaatgcctttcatccgcacccagcagtacatcttgtctaacttggcatcacgccactgtcccgtatcaggccaatcctcaagcatcaaaacccaccattaaagatccatggttgcttgtccacaacaattctagcatcctctcttgacttcaaggtaacaccaacataaatactatccccttctgcagcaagaactttcacttcccagtcagaaatgcctttccatagtcgagtaaaaatcgaagtaaaacgtctctctttaatctcctgcttcgaaataattctccccacgaccgaccgtcccccaaatgaagcaacagcctcttcattctcttcccagtcctcctcagattcaacacccaaccgacttgtcatagagacaatatcttccacttcatccgattggttcccgatcaccataacagccagcaataaacaccagttaaaactccttcttagtcccaacgactattcgctcagagcagggtcctctcgaccataaccatatatattttgccgaatgagatgattgtacaaaaaaatattaatataactatcatttaatgacaataaattagacttttatcacataaaagatcaaatgaatacataataatactaattgccttgaaatttaaaccgcacaactatttgtatatatatgctataaataaaaaatatccgatattatatatgctataattacaattaaaaattacataaatatactaaataatagaac

SEQ ID NO: 246018 - DNA, 722 bp, Cannabis indica
caataacccaccaagaaacaaaaagcctagaccttcttgttcacattgtggcaaacccggtcacttagtcgacaaatgcttcttcatacacgggttcccaccaggttatggagacaagaaatgcagtgataaaggcaaggctcaggtcaatcaagcctctacaagtaacccaactgatcacactactgctcaagccaaggctgcacctgctactgacctcagttcgcaatgtcagcaactcattttattgctcagccagcagcttagtcaggccattcctcagattgaccctgctatgaacaatgcatcatctaaccaagctggtaaatctctttcaaatcatacttttaattggattcttgatagtggtgctactcaccatatgtgctctaatctctcttgttttacatctttcaaagactcttcttttcccaaatatgtcatttgcctaatggacaccaaatcgttatatccaacatagggacagtaagcataaatcaatatctcactcttgaaaatgttctttacataccaaattttcatttaaatctattatctgtcactgccctggttgattaaacaaactactatctgttcattaacaccaagaattgtgttatacaggatctttctcggagtgtggtgattgggacagctaaacgccacggaaagctatatctcatacatcaagatactcccatagcagctactagtttagcttt

SEQ ID NO: 246019 - DNA, 852 bp, Cannabis indica
aagtccaaatccttttgtagcttctcgcgttcaacctctttgtccttgtcggtagaagctttagttgaagagaatgtgttacttttgttgttctgatacaacttatatagggaagtcgatccaagaataaatggtaagaaaacggtactattatcatggaggagaagttggatcatggcagtaaaaagcaaatcattgattgatcgcattttactacttctgataacgttaaaattaattaataaataaaaaataaatctttagttaattaaataatttttctttaagaaattaagtgacacctcacccgccaacacagctcggacggcggcgcgtgtggtggtccagtgtatgagtcctcacccatttgtgcaaaactggtcacctaagacccatacgtaattctcaaacatgcactatttatatacttctaataatttattcctatctcatgtgggactccaatcattcacacacttcacttttcaatttttatataatttgacaaaacttccaacagttaatttactatatataatatgcgtacaacttttttttaaaaatataaatagtattagatgaacataattaattaggggcaaattattatttttcttactcaatttaatgattatggggagttagacggtgtagcatcactaattaaaagtgttatatatatatatatataaatatacatttaaaagatgctgatcttgactagttcatccaattttcatttcgctatataattaatatatgttgaattacttacattatcttataaagaatctcccattttttttatggattatgcattaaccattattaatgaggtacaacatcttgtcc

SEQ ID NO: 246020 - DNA, 515 bp, Cannabis indica
taagttacctaatcattagaaaaataaaataaaattgaagttattggcatttgcaaatacctaaccattagagaaaaaaataataattataaatcacaaatttcaatccagcataaaaaaggggcaagacattaatatgatccccaaatggagggtcaacgactctgatattttcagtcatcaatatcttttgtttgacctatatatatttacctaatgtttggttttctttttatttatatatagtaacaatatatagttaggtgaaaatattataactcatatagattaatgagtgcagcttgagaaagaagtgttcttaattaggagagactaaactataaattttaattgggtattatatatagcaatatatttttgaaaatgattaagctaaatgaatatatattagttggttgggacatggagcatgagagtatgtgaacatgtaagctttttgaacccttgcgatgaaagcaaagctaccaagttccttttctttttgtatatcttat

SEQ ID NO: 246021 - DNA, 1483 bp, Cannabis indica
gaatggattaaatttagaggctcggtttcgttttctatcacagatttatgtggtgttttagtagtcttggcttggctacaaaatttgcattttttaaagtcatttaaagattatttaggaattaggcctaaactactcatgttctttattatgtgtttatttacgtgacaaagtaaaacatgacaagtattaaaagaacacaacatataaagagaagcattaactttattaacttgaacattcaatttaaacattccctcagttgcatgccccttccctacaaatattaatttatttggttacagtttacaaatcagctcctatagtctgtgtgaaccctatcttgttgacaaggtagcccgagacgaaattcttcctcatctctggagtgtgcatcacatcttttagaatcacaattctgcaaaggtgaagttcaattccacatttctagtaccaaaaactatagtggtgtgggagtcgtccaacaacactttttgatcttcagtagaagctacacatattttaaacatatttctatcatagtagacatggcgtgaagcgccagtatctacccaccacccttcagatccaccaatgagattgatctctgaaatcatagttgtaaatgacagctcttttgtcaggttatcttgtggagcagtactaagcatgttcttacactttcgtgccatatgacctcgcttataacagttgtaacacatgaacaaaccagagtcatttctattagggggtacttgctgcctattattttttgttcctttgatggttccaattttgattgttattattagtccgaggttgactattatagtttggattcactttgcgattatgattcttaaagtttttcccattgggtttcagaacaacagtggatcttttattagtgttgttgttgtttccaacaacaagaatctcttccttttggtcttattttcgaccttcctcctcaattcgaagacgagtgatcagactttttaacgaaaactcttttgttttgtgtctgatagtatttttaaaatctttccatgaagggggtaatttatcaatcataaaagcaacttgaaattgttcatcaatagtcataccttcaaacaaaatttcgtaagctattttttgaagctcgtgagattaggattcgactgatttatcatcggtcatttaaaacttcaagtagtgactcacattgtatttcttggttcctgcctcctttgtatcatattttttctgtaatgcttcccatatatccttggcagatttgttagaattataataatcatacaaatcatcaagcagaccattcgaaataaaatttttactcagaaaatcattttctacccaagagttcatccttcttctcggcaagagacggagtcacagacacaactggtttcaaaacagtaagctcaaacgcaactttttttcatgatcagaaaaataacatctttagtctccaacgttt

SEQ ID NO: 246022 - DNA, 806 bp, Cannabis indica
gtttcattctagatgtgccagcgaggcatcctgctcggcatattgttccgtgcagatgctccaagtggaatccacgtgtcaccattcttgtgatgccacgtcagagtgccaaatttgggataacaaggtgaatattttctaacattcttctttctcttcttgctagaagaaggagaagtatgttactcggcaacatttacttcaacaatttatttctaaaaatattcaaacatttgaagcttattaagaagctaagttaatcctatatttccgtttattcttaatataatttctacgaaaaataatggaaaagatcaagtaatattgaatgatgagagccacttaagtagcttcatctattttagtcccattagactcagcgtcatgaaaatatgttataatagatcttcttcttcttcttcttcttcttcttatctgattgcaactagggagaaattgttggtaggatagtgcaaaggtatcaacatcgactgggtgtgacccagcccccacaaccctcgcctcacaaccgtgaccttcagaacagaaagagagagagaggaaagatatcagtgaaagaccgcctcaagatctacaatgtttgtgactccatcaagacccacgccatcgtcgtctccatcaacacccatgctaatgttgtctccatctctgtcgacacccacgatgccattgtctctgtcaagaccgaagaaatcgtcatcgatgtcatatgctgacaaggaagagcagaggcaaagagctttcttgtgagagaaagaactatgtgattttttatttattttttt

SEQ ID NO: 246023 - DNA, 791 bp, Cannabis indica
taattaattatttttttcttaaaaaaaaaattagggtgtaacttcataaggtcgcatatttagagtggaaatgtaactcctatttttctatatttttaacgtttttttaaaagaagatatttctgtaaaataattttttaaaaaaaaaaagaaaacctataccttttaaaactataaaaaagaaagtttggcattaaaaatagaaatgttgtaattataagatttggatatctataaaaaagggaaagtttggggtgtgaaagagtaaacttgatcatagacacagaaacaacaaagagttgttctttgcgctttcaccttaattatttccatacatatttcccctttattatttagtatttttaaagcatggaaaactcttcaattatggccttttctgatagccaaattgctcagattgagacacagtttcctcttactgctcaccatattttcaatattattattgaacaaactcctcccaacaccaagttggtaagtgttgcccctgattttgcccaatatacgtggaccaatcagataaggacacgtggatcaagcaattcacaatatttgctaagtctttatgccataaggtaacgtccaggacgtagcccccggacgaaggcacatggaaccctatatgctcccggagactcgaatagcgctaaggcatctccggaaggtgtcaggcttctccctaagcaatcaagtcgcattaaatgccgcatgggagggatgcgtgttgggactgctacacgcaataaagtctgacggcacaacctccaacc

SEQ ID NO: 246024 - DNA, 1132 bp, Cannabis indica
tattttgctaaatttcaaacatatcttgtggcaaaaaatatgtgacaattataaggtattttgtgtgaacaatacgttagtgcaaagattaatatattgtttgacacaattttattgtcaatatttgattgctgcaccaagagtaccgcttacagttaatattactgtccaaaaacttgatattaatgtgtgtttggtatcttgggatgggattaacaaaaatttgaatttattattttattatgcatattaaatgtaagcttgtgttatttgttctatattcagcttgttcatcttctgttgccttaatatctgctaatattaattatattcctatgcttaatgggaccaatttgaaggattagaaaagaaacttacttatagttctggaatgtatggatttagaccatgcactaaggagtgaacaacctacacctctcactgaggaaagttcccatgatgataaaagggaatttgagaggtgggatcgttcaaatcccatgagtctaatgattatgaaacacaacattccagggcacagaatccgaaggggttattatggctaacaatttccttgaacaaattgaggaaggttttgctaaaaatgataaggttgaaatgacaacacttcttggttctttaatgaacatgaagtataagtgccaagaaaatgtaagggagtaaattatgaaaatacatcatattgtctcaagattaaagacacttaagattgagctttttgatgatgttcttgtactcatggttttgctaacgctttctccacagtttaaccaatttaaatttagttaaaactgccgaaaggagaaattgactctcaacgacctcatttctcattgtgtgcaagaggaagaaaggttgaaaaaggacaaaactgaaagtgctcacttggccactacccctaaggataagggcacaaaaagaaaatttgagaatgaagctgctaagggtccagttcaaaagaaacaacaacaggattctataggttgtttcttttgtaaccaccctggacatttgaagaaagattgtgccaaatatcacacatggcgtgtaaaggaaggtatttatcttactttggtctattctgaggttaatttagcttcagtacctagaa

SEQ ID NO: 246025 - DNA, 816 bp, Cannabis indica
gcaaggtataagagatgaagatcctcacattacttattaaattcgctagtcaacttggattctagttttcatctaaagaaatcttggattctggtatgtgaaatgaaacaatagtaaataccatttcagaagcagctcgtacacagaaatctttcacatccttcccccatggtgttttcaggctatcccaaatgaatgccttactcgccaacatgtctatgtcacacatgaaccagtggggagttttagttatgcatatgaccgggacacacatctgcatatgaaagggacagaaattagttattaccataacatcattataattaactaaatgattaaaaaaaaacttgaagggtcattacatgttcaatttttgccaacttgccgtaaaatagatccctccaattttattgtcttgcccaaatgctaacagaggatgacaatccaagattttcatgctatttaaacaaatcacaaccattattatgttaacatacctaaaatatgaaaaaaaaaaaattatttatattaatgctagcactcaagatctaatgatcaataatctcattgattatccatatagacaaaaatttctaacacacaaaaaaagaaagaaaaacaaccaaaagatcgatctaacctcctcctgggctgtattctgtatcatatttaatcacaagttcatgcattattgatgaagtacatgtgaataatgtacttcataaataatattgttccaacaacacaaataaaaattaaataaacattcacaatactttgattgtataatttcatatataaataaacaatcaatat

SEQ ID NO: 246026 - DNA, 571 bp, Cannabis indica
aaagacaagtcctcgaaaaactttgttttaaaaacccaagtagctgtccagaatttaattttctcccacaagtcctctactgaacacccatccccttcgaagattctagcattcctttccaaccacacagcccaaattattgctagtattgccgttctccatatctttgttttgcgtttgctaccatttaacttgctaactaccatttgtggtacacatcttggcataacccatgacaatttaaattcctttatcagcttgaaccataattgactaatgaaactgcagcctaagaacagatgtcccacgtcttccctgctagctttgcaacaaacacaccagccaggtgagatggatgtgtatggcctcctcttttgcatcatatcatgaacgttcatttttcctaaagacacaagccacccaaaaactttgacttttgacggaacacaacttttccataagggccttacccaatagactctactgccattcgggttcgctgtaaaccaagagaaggctgacttgcaagaaaaattctggacgattctggtttccaaattcggctatcatt

SEQ ID NO: 246027 - DNA, 711 bp, Cannabis indica
gtaaagggaaaggaaattcaaagactaagagaagatgttatgtctgcaacaaacctacacatttgagaaaagattgtccaattctcaagagttacaattcaaagaaagatggagatgctggtgttgtctcagatggtgatgatagtgatggctatgacagtgcaagtgttcttgtgattaccaagaatgacagggacaaggtgtggattattgactctggatgttcatttcatatttgtccagataagagtcaattctctaactaccaatcaagaaatagtggtactgtcaagttaggggataaccattcatgctccatacaaggaattggaactattaagttgcagctcgataatggaaaagtagtagaactgaaacaagtaagacatgttcctgatctaaagagaaatcttatttctgttgcaatgcttgatcatgaagggttcaaagtaaagattgaaaaagggttgttaaaggtgataaaagggtcagaaaagcttatggaagctagcattgacaatggcatatatgtcctgcaaggatgtattaaaagaaatcaagccaattcagttctgaaagtccctgatgatgtcaccctcaaatggcacaggagacttggacatatcagtcatggtggcctaaaagttttgagtaagaaggtgtatttggaaaagaacagatcaaggaattagatctgtgtgagcaatgcat

SEQ ID NO: 246028 - DNA, 967 bp, Cannabis indica
gaggagaaggagtaccccactcctgggaagcgtacaggacgaagagggcagacaaatacttaatgccattaggagtgaattgggccgggcagacgccgaagaagtctgccacatccttaaagtatttatgcaagggcatcaacgctgcccatgggcacccgaccaggcacacatcccttgtcagggtttgtggcacgattgttgtgtgcgggaatgtagcagtccagtttgcccaggtatctgccctggtcaagagttcgaaggcgcgcttccgtaatcttcgacggagggcttacccacctagcgcccaaggcaccctgccttctatgaggaaccgtcgcagcaagatcctcattgacttagtccacgccctgaaccaggacgtctccatcagcatcgactggctccctcgcctcgtggtactccctgtaatttggggggttcaatctcagcctcttcctccgccttggagggactgccaagacgtacatcgtccagctcctcgatctcctagacctcagcatccccttcatgatcctcctccatctagacggccggatcctgttccgtgctgggaaaagttgcgtgccgagccacttgcggatcagatgcgtcagccagacgcgtggttttctttgtacgagccatcattctatggctgggtacagggttagaagagtgtccttcgctagaggaaggaggactagaacgaagacgaagatgatccttgtgcagaagttgaagtagatcctggtcgatccgatgtccgagttcccaagactcacttgagttcatctacaaaagacaacacacgagatgagtgtttggtctatttatcggatgataaacaagcaaatatgcctaccagaagtactcaacaaattaaagaacgactatgttcaaagaaaagtcaggactcaagatgtcaaaaattttcttgagttagggcaaaaaacttcatgaagct

SEQ ID NO: 246029 - DNA, 652 bp, Cannabis indica
gtagaagtgacatcaaggatgtcgtctacatactgataattaggaaagatagatctaaggtgaacatggtcaaaaaatgcttaagtcttagtttaaaatgaaagatttgggtactgctactaacatcccatggattactattgtgtgtgagacaaaagaaaaggaacatgaaaattgctccaagaagactacatacagaagatcgtagagaagtttcaaatgacaagtgccaaaatgataaatcagcctatcacaagtcagtacaatatttctaaaaaagaatgcactaagacagagaaagaaatagaagagattagtaaggtactgtattttaatgtttttgggtccataatgcacttaaatggtaaatactagatctaagatttcttatgctgtaagtgtgctcaagtatatggttaaccctggaaaattacactatcttgctatgaaatggatatccaagtacctaataggaactgcatattttggtttggttttcaaacagtcacaaaaccaaactttgacagaagaattttatgactaggattatgctggtgatagggacacaagaagttccacttctgcctattatttcataattggaaaattgtataagttggagagtttagttgcaactagtggttgccttatc

SEQ ID NO: 246030 - DNA, 737 bp, Cannabis indica
aaatctcccataagacaccaaggcaaattagaccgagtaagaagagttgttaaaagctcccatgttttccttcgaagacttctattgggttcaccatacactcccgtgaatctaaattcttgttgtccttcaaaagagactttacagtcaatatggttcattgaaaaagtatccaccgaaacctcttcttggttcttccatagcatagccaaacccccacttcttccttgggcttctacaacaaaacacccctcaaaacccaaagctctactcaagtgatccaccttcatcttcttacacaacgtttcacacaaaaacacaatattgggccgcttagtagtaaccatctctttaaggaactgaacatttcgtgccggcccaagcccacgacagttccaacataaaattttcatgatgactggcgagccccaataccaaggcccgccaaagatgagttttttgaaaggttactcatttccttttccacctcagcattctcaacttggttatcaattgtcatttttctttttttattatcaaaaataaccagcccatcattactatttttttccatattagtctcatcaaaattcctatctccatcacccaaaatcactcccttcattctagccaacagtatcccactattacctccaccattctcggccgaatctccatgaatgtcggcagtagcagctggagccattccaccattttttgagccaggttcattcatc

SEQ ID NO: 246031 - DNA, 934 bp, Cannabis indica
tgttagtattaattgtatttttttagccaacttttattactatttatgattttttagtcaactactatttaatagttttaaaaatataattaataaatacattttattataacttttactagtataatttactatattaatttcacatttattgtttgtcaaaaaaattcacatttattgtatttcatatcatacatattatttctatatcattttttatttctgttttattatttttatatatattgttttatagcgtttcagctttgagaatcttttggctcttctatttttgctctaatctaccttataattttttcttttaataagtttaaattgattattccaattgccaaagcttttgtttatttattgggctttagttttcaattttattctcagtttcttttttgtttttaattactttcaatgccattttttgccgttaaaaccttgtgtcaagtacatttattataattttatttattttggcataaatctttcacacttttatattattaattttattatttacttttaatttaattaatttatttcttaattaataacgatttaattttaattttaaatttttgttatacaaatatgataaaatattctattattcatatttattaattatattcgtatttatttatatatatttaaatatgaatgtttgatttatttctaatactagctattcaaatcgtattattatatgactaaagtatatatgcttataagaccataattatttttgcacattttttccatggttttatgccttttaaggcttttgtgcctagggatgcacattttccccatggggatggagccccgaggggacctgcccctaatggggtggggattccccgtctaaatggggaacgggccggggccggggatcaaattttgtcctcgaatgttaaac

SEQ ID NO: 246032 - DNA, 1600 bp, Cannabis indica
actcaatctcctttgccgatccatcggcttcagagcacagccctggtttagcagtagggcgtttcaggagacaacattcttgtacaattgagttcaattttggtggtgatgaagaaaccaaaaatcagcgaaaacataacagtcatcaagaagttgaaccaagcttggattcactgagatgtggtagccaaggtaaagaggttaaaatcacccttgctcttggcatttccaccttatctgattctagcaaagtgggagaccggaaaatggaaagaagtagttgggagagaactgaaatgtgtaaaatactgaaagagaatgtgccttggcaatcagaaatcattccttcggtagtagaagcaatgatggtttcagaatcgaccaaggagccggagacttgttggttgttgtttccggggaatgactccattggaaagaaaagattggctcgggccgttgcagaattggttcttggttcttctgatttgcttctccacttgaacaatgacaaaacgaacgagaatgtgatgaacccggaatccgatcaattagtcctttccatggcaattaaaactcacaagaaactcgtggtgtttgtggaagatatcgattcggcagattcccagttgatgaaattcctagcagaaggtttcgagactggaaaatttagtgaagcaaaattcattcatgcaattttcattcttagtaaaagagacacatcaacagttcatgaaaatgaaggcaagggttcatcagtaatccagatgtcattgaatgtcacagaaacgacattgtcaggagaaacctattttaacacgctcgaattcgatcatcgcaaacgaaaagccatcgaatgggacctcccgaacaaggagattgtcacaaagaatcaacgaactgaaaagaaagagaatcaactttcgaggcaatcaagcttcaacactgatctggacctgaacgtcaaggcagatgaggacgagggcggaagcgatttgactcgagaaatggcggaaagtaccgagttgatcagaaacccgatgggattcatggaatccatggagaatgtgttcgtcttcaatcgaagcccagccagagatcgagagatgaaggagcttttccagtggaagatggaagagagcttcaacgagatttgtgggaaggaaaatgtggtaatggtgaggaagagtaggtttagtgtagaagagagagtgttagaagatgtttgttatgggtctggttgttttactaattgtttgtttgagaaatgggttgtggatgtttttcaaacagctttgaaaacggttagatttagtgggaaaggaaaggattgtggtagtgatagtggtagtggtagcggtggtggtggtggtggtgttggtggggttgtaaggctttgtttgggtggcaaagaagaaggtattttggaggatgggtttatgggttcttgtcttccaaccaaaatccaagtttcttacaaggactaagaatgtggccaacccaataagcatcctgcgtgcaccgcttaaaaattggccacatttagttcgtccttgtgtaactctctctctctctctctctgctagttttcttaataggatat

SEQ ID NO: 246033 - DNA, 954 bp, Cannabis indica
tttatatgtcccaaccgcagggctttaaggatgaaaggtatccaactcatgtgtgcaaacttgacaaggcaatttatggtctcaaacaagcaccccgtgcttagaatgacaagctgaaaaacactctcttacagtggggatttcatagcagccgatctgatacttcctagttcatacatggccaaggctctaaccttgttattttgcttgtctacgttgatgatatactcatcacaggcccgaactcatcactgatctctaccatcatagctggtttaaacaaagttttttctttgaaagatctaggaccggttcattacttcttgggtgttgaaatttatagagatagttctggggtgtttctttctcaatcaaagtacataaccgacttgcttgtgaagctgcacatggaaggagccaaagctagtccaaatccctcaagtgcagctgccacattaaccttaaatgatggagaaccgctcgaggacataactctttatcgtagcacaattggtgcacttcagtacttgtccctcacacagcctgatgtcgactacataataaataaacttagtcaatttttacatgctcctacatctacacactgggaagcgtgcaaaagggtgcttagatatcttaaagggactctctctcatgggcttgacatcaaaccaagttcctttctttctctcacagcctactcagatgccgattgggcaagctgcatcgatgataggcgttcgacaggaggctacttagtctttctaaggggacaaatttggtgagttggtcagcaaaaaagcaaaatgttgttgcaaggtcaagtacagaaagcgagttcacggctctcgcaaatgctgcagcagagattcagtggctcaaatctcttctgtctgaattgtatgtttctatgcctcactgtcctataatttgggttgacaatcaaagtgccac

SEQ ID NO: 246034 - DNA, 1556 bp, Cannabis indica
tttttctttttctttcttttctttttcgtcttcttcgccagaaacctaaccccaaaccgtaaagaaggcgactcactcacacagcacaacgtttcctcactttcacctctctttcgtacaaatatataaatagatagatctaaagacccaagcttgtagactcaaatctgcatcaagcaatggagttttagtgctcttcttcacccactggatccatcgccaagctcagcagcttagccattctgattgtgttattgctttcttgcttcactttcacttctacaggtcagtgcctcccaatatccagatccttcttctctttacactcctcatatacttggttttcttgactggttttttctttcccacttctgggtattgcttaagttctccagatttcttttgggattcaagtaaaaagtcgttattttcttataatcattgcctggtgtacaagacttgttgagtctttggaaatcggtggtttaatttccgagtataggtatagttcactgaataattgagttgtgaaactttggattcggttatttcccatggttcatggaattgaattttgtttgttatttatttatttttatctttttcgggaaaagtttgaaatcaatgattactagagagttaagttgaatcaaaatggattgatttaccttcgtctattattggaatagagttattgggaactagtcgaagggctaggttgaatggcaggggaccgtggacggtggtcgaagggggttgggtggacggtggcagaggaccgtggacggtggtcgaagggctaggttgaatggcaagggaccgtggaccgtggaccgtggacggtgctggttggggttgggtttctggcatgagaagaagaagaaaacgaagaagaaatgaaagaaaaagaaaaaaagaaattatatttaacttatttatttatgtttttttaaattaaaataataatttggaccaataatattttgacacgtggcatttgaattgggtttaatggatctcttaacttggagaccaacggacaaataaaaaacatgaccttgaggactattgtcgctatttttggaagttaaggacttatctgtatcaaactgaactttttggagacttttgccgcaaatccaatataattagtgtttttagagagaataaaaatattattattatggcatgataagtttctctccagaggaggcaaggaaattcttcttaagacagtaattcaatcgcttcctacttatgccatgagtgcttttctcattcctattggcatttgtcaagagattgaaaagcttatggtccggttttggtggaaaactagttcaagtaaaggtcacgggatcatttggatgtcttgggatcgaatgaccactcataaacatcttggaggtatgggattttgatatttaagtgatttcaatcttgctatgcttgctaagcaaggttggcgcttgttatgtaatcccaatactctagctagccgagtttacaaagcaaggaattttcctcactctgattttctcaatgctgaacttggc

SEQ ID NO: 246035 - DNA, 1093 bp, Cannabis indica
aacggaaggagacatattattcctctgcacccaatgtaaggtttctcatactttatatgtgtttaatttataatcgttttagaagttcatatttagggtgttaatcaacatacttgtcagtagatctaagatcctggtacaataatttccaacatatatatgtttaaaattttcaggttgagcgagtcgggtacgggcaggtccaggtcaaacccgatcaaaatattcagtcataatctcaatgggagatccctcatatgctccaccaactttaaacttctccttgccagggtcttgggtaggaggaacgacttcagtaggtctactcaccttccaaagtttcttctttgtacgagcagaaggagcagcaaggatacccaaataacctccctgacagaagggtcaatctcctttggcccatgaaccttcattttcgaataggatgccatggatgccaaaaaactcatgttgtctgcaaattaaaaaagaaaagtggttagtacaacaaaataaaataagacaaaaaggtacaactactgaacatggagcatcaaggacctgttgattctccaactctttctagaaaagtctgagtaaaagtaacttctcaatcatcctagtctaagaatacaaatattcttcctaagtattttgggtcattatgaacaaaactctcatcttccaacactgtttgaaacaggatgtgtaacgtcctaaataagtaggtacgctacccaataaacttataaaaccctaatcccctaattgagattactagtaaattagcgcgaaaactaaaccttaattacaaacagaatgacaataaacttgtaatactttttcactttataaaataaaagatacaagtgtcgggatcccgaaagtactttacaaaatattattacaagttcgtttcctctagccgacctatgcggccaaacagagtacaaaatacatcactggtagaccccaacccgcttggtctagtatggcccgaacatgtacattcctcgtccagcttctacactcatggttgatcaaacacagctttaccctttcctgcacagtagagcacccgtgagccaagcccagc

SEQ ID NO: 246036 - DNA, 728 bp, Cannabis indica
catttgcctttgcattagcttgatattaaaaatacttttcttcatgaagatcttgaggaagaagtgtatatggagcaacctcttgggttttttgctcagggggagttagagcgtgtttgtcatcttcgcaaatccttatatggattgaaacaaagtcctcgtgcttagtttggtaaatttagtcaggctattgagaaagttggtttgttgaaaagtaagtcacatcattccatgttctataaaaggtcaactcctggtatcattttgttagtggtgtatgttgaagacatcgttgttactggaaatgatactgaaggcatctcatcccttaagtctttcattcatacccaatttcacacgaaggatttaggggtgctttagtatttcttgggtgttgaagttgctcggagtaaacaagatatttttctgtctcaaaggaattatgtacttgatttgttaattgagacaggaaaattgggagcagaaccttgtaatgatccaatgagtccagatgtgcatcttacacgtgatggggaaccatttgaaaatcctgagaaatatcgcagattggttggaaagttgaattatctaactgtgactcgtccagatattgcattcccagttagtatcgttagttagtttatgtcttctctaacaattcatcattgggtagcattagagcaaattttatgttacttgaagagagcaccaggacgaggtatagttta

SEQ ID NO: 246037 - DNA, 1394 bp, Cannabis indica
ttgtgcctcgtttataatacatgactaaataacgcgagtcgttgaatattcaacctcgcatgtagctttatgttgttttatgagttaatcttatttacaactgctacctcgattttcctttttgatgaaaaggttcaattttttgactttatattgttcatagacaattttaatcaattaaatttttttaaaatgggtgggttgcaatgtatcatttatttctagataaattaattccagttgatgtacacatatatatggccctcaaataattttaaagaagattttgtaattacttgaataaaatttaactttattaataatagaaatttacattctagatagagaaatacaacatggagattcaaaatttactagtaatagggtctcaaatgttcactgttctagtggttctttattagcaagccattaagccgagccaatttataaaccctgattcctactattgcctcgataacataaggaccttcccaatttagatcaaacactccaacagatgcatctcgtgtgtttgaaaatactcgtcttaacaccaaatctttgacattgaagagcctttacttaactcttttgttatagtatctcgtgattcgatgttgatatgctgcatttgtaacttgcgactcagtacgtctttcttcaagtaaatccaaggacaacttaaggagttcttggttttcttcttgattgtagaattatggtccgtgagtcgcaatattaacttctactggcagcattgcttccgagccaaatgccaacgagaatggaatgtgccctgttgctgttttttctgtcattctgtgagcttaaagtacttgtggtagttcatctacccatctcccttttgcagcgtctaatttcttcttaataatatcctttaatgttttattaacaacttctacttgtccatttccttgggttcttgaaactgacgagaagcctttaataattttattcctctcacaaaactcagtgaataatttgccatcaaactgagttccattatcagatactattttaatgggtatcccaaacctgcaaattatgttcttaacaacaaaatcgagaacttctttgcatgttatggaaactagaggttcgacctctatccattttgtgaagaaatcaactgctactaccgcgtactttgctcctccttaccctatgggtagtgacccaatcaagtaaattccccgtattgcaaatgggtatggcgaggtcatcattcttaattttgttggtggtatgcgaggtatatgtgaaaatctctagcatttatcgcatctcttgacaaattcatgtgtatctttgtttattgttggccaataatatccttgacgaataatttccttgataaactttgccaacctgca

SEQ ID NO: 246038 - DNA, 767 bp, Cannabis indica
agaaaacaaaaaagataaatatacatcaaaaaaacaacattcacaaacactaacaaagaacaaaattataaacatataaacacctttttttttccggccacgtgtttccttgacagagggctgagcctcttgttcaactggaactttagaactagttccagattcaacattttgaacaaaatcgtcatcagaaggatcaacattaaccttgaaacacaaaacataaatcggttaaaaaaacatacaaaaacaacatttttaaaaaactcataaagaaatttaaaaatcggttataataattaaacaacaaatgaaacacaaaatatgttaaaaaacaaacaaaagaaaccagttaaaaaagagtataaaaactcaattacataatataaacatttgaaaacccatttcttaaagaaaaaaaccagttgtaaataatataagaactaaataacatcaattaaacatttataaacacatttttaatagaaaaaaaaccagttataaaaagtataaaagctaaattacatacaataaacaattaaaaacatatttctatactaaaaaaaaaccagttaaaatacaccaacaataacataatcagttaagaagctcaccttcttcttcttagcgcgagatttcttaacctcatgtttcttaggtgcatcaaccggaacttctgaaccagttccagattgagcgccaacaaacgccacattattagactcaacttgttaacaaaataaaaaatacaatattaaaactggtta

SEQ ID NO: 246039 - DNA, 1780 bp, Cannabis indica
cagaaaactaactatccctaacacaccccctcaaacttagcattggtggaatcaccaatggtgagtttgtatctgaaattagagaatagttggcttgaaatcggtttggtaaaaccatcagcaacttgatcaaaggctgggacatgcttaacttgaacttgttgctgaacaattttctctctgacaaaatataaatccaattctatatgctttgttcgagcatgtaaaactggattagcagtgaggagaatggtgcttaagttgtcacaccacacagttgggactttgggaagcacgatgtgtaactctgtgaacaaggaatgaagccatgtgagttcggttacagtgtgagctaagcttcgaaactcagcttctgtgctgctgcgggagacagtgtgctgctttttacactgccaggcaataagattgttgccaaaatagatggcaaaaccagatgtcgatcgcctgtcatcggggtccgtggcccagtcggcatcacaaaaggcagtaagctcatagtgtggtggttttctgagatgaagaccatagtcccgagtgccacttagatacctaagaatgcgtttgacagcattccaatgggattgtagagggttggccatgaactgacacactttgttcacactataggaaatctcaggccgagtgatcacaagatattgtaaagcacccacaattgatcgataatgttgaggatcatcaacaggtgggctgccataggcagataacttgagaccactaaccattggggtgttagatggcttggcctcatccatatcagctttgtgaagtaagtcccgaatgtatttggcctgagataagagtaaaccagcttcagtattagtcacttcaatgccaagaaagaaatgaagcttgccaagatccttaagagcgaattgagcattgagggctgctgtgtaatgggagatcaagttgggatcactgcccgtgatgatgatatcatccacataaacaaggatgaaagtgacagataatggtgtatgtctaatgaatagactatggtcagatttggaagaaacaaagccaagatgcagcagactagtgtgaagtttctcaaaccaagctcgaggagcttgtttgagaccatacaaggctttatggagcttacaaacaagatcaggagagtctgaaccatataaacttcctcttgaagttcaccatttagaaaagcgttattgacatcaagttggcgtatttcccaatctttagaaagagcaagagtgagaacaactcttattgtaacgggtttgacaaccgggctaaaagtttctgtaaaatcaaaacccggttgttggtgaaaccctttggcaactaagcgagctttgagtttatcaacacttccatcaggattttctttaattcgatacacccatttacaaccaattgcagttctaccaggtggtagcttgacaagggtgtaagtcttattccgtttaagtgcaagcacttcatcagccatagcgttattccattgtatttgctgcaatgcctgtttgagggatgtaggaagttgagtgacaagtagagctttaggctttttgattccatttttagctcgagttgtcatagtgtgactgtttcttggcactgtggagacaggtggggcattgtttcgtggcactatggtgctgatggaaggatcaggtggtgttgttgcagcactggtgtgatcattaagaccagtagcagtgtgtggttcactaggaacatgagatgaacattctgtaggttgaagaacctg

SEQ ID NO: 246040 - DNA, 1003 bp, Cannabis indica
atttgaggagaaaaaaagagatcctaaaaaaatattgtaaattccattaagatattgggcatacgatgagatattttgccaattgaaagatgagatagagagtctcatcgctcgaggccattttgaacagtatatgaaaagacagggccagggatacaaccagccccgtcagccgaataacccaaacaaccaggggttataacctattcccgtggaaggagaggacatcctggttattttgggaggccacatatcgcatgggaaagcaataacgctcagaagagatatgtgaaggagataaagaacaagcagtcggtctttgcccgagaacttccaaaaaggtgaaaactgaggaaccccccattacattcacagaggaagacgagaagaacgtgagatatcctcacatcgatccgctggtcataaccattcaactcgcaaataagaggatcacgagagtgctaataaacaatgggagctcagtaaatatcatttataaggagactctaatgaaaatggtgctcgaaaaggccaagttaaggccttgtatggtgaatctttctggattcatcggggatagcatcactagccttggcataatcgagcttgcattaacattaggcaaggcccctttaactgctactgttatgcaagacttcttggttgtcaacctgccctcggcttagaacatattattgggtcatccatcactgatcggactaggggtagtcagttcgatcaagcacctatctttaaagttccaaacaccagaaggcgtgggagtggtgcgtggcaaccagatgctggctcgcgattgctatcgcatagagttgcagcatagaaaggtcggtcatcagttgatgatgatcttggcagaagaaaacgagaagaaagaggaagatcttgatccccgagtttaagatgaaagaaacctgctaaaatcaattgaagaattggaagaggttattctcaacccaggaaatcccaccaaatgtgtgtacat

SEQ ID NO: 246041 - DNA, 1929 bp, Cannabis indica
actccgagtatctacccgcaagatatagtctgaacaggatacctcatatgcatgcctgaggtaaagcaatcagcaatccgcacatagcgaccaacacttagcgaattcagctttcgcaccgtgggtcatcaaggaaatccctataacttggggataagattgcagagatatggcaagctgtccaaatcccacgatcagtgtattttgtatttattatgcaatctttctgtttatatctattgtaacaagaagggaaatacttcctctccaagctcatatccctataaatagtgatgcatgttcactgggcaaagggtcgaaagattttacttgagagatattatctaagaattcatattcagagatattgttgtaagagctataagaaaatgaacctttctccttgttcttgagttaatacaaataacgaggattaggctattaccgaactacttggggctgaacctctataaaattcttgtgtctttatattgctttattatctttcaatcgttataaactacttgttgcttactaaataagactcactgtcattggccaaaagcgaggtcaacattttggtgctttgataagagcagaatcaagaatcactcttcattctaaatctaacgacaaatacgatgctggtacaaacttgtaggggtatggttgatccggctaatccacaggcggtggatcatgcattggagaaccaaggaaacactagggttccaccagctattaatcctgaacagtcgtcaaacgtggatcatggtgtgacgactcatgtggatgaaatcgcgcttgctgtgtaggagacttggaataccagttcagcacccatccagggcattcataactcatgcaaggtcataccaacactctgcatcatgataaggaggaactccgcgctgtggtaaatcttgcgttcgaggaacaaagacgcatgtttgccgaatggagggagaaagagatggaagctttaagggctcatcatgtagagattgacaatcgtagtcgtcaagctactgtgttgatactaaaagcctaccaagctgtcgggcagcaacccccgaatgtcatccccctgggtgaaacagacgaagatccaacgatgaatacttcccagactataaatggtcagctgccaaatctccggtcacaggttccgcctgtgggccaagcagtagctgggcagaccttgtctagtaattcatcaggagaagtcatactcgacggttccaaccaggccaacggtgccattccacatatcaaccaagtcaatcaatcactaagacagccaggcgtttctgtattcgaaaggttagggacgactcatgatctcagaaacgatttgaacagaaggagaggagtagacgatcaacttggcacgacgatcgtacagcccagaacccgtgctctaattcccgctcagaaagatactgacgtgactcaaattggccgaaatgccgaacaggttagtccagctgtgcaggcacagctagacgaactaaagagtatgttccaaggcatggccagccagagaaacaatgatctcgagttggaccgagcacgtggaacccctttcactcccgagatcaatctcttggctttgccccacaagttcaaaatgccaacctggaaactgtacactggaagaaaagatcctctttcccacctcaactatttcgagatgcaaatggatctgcaaggggtacgaggtgacgtatgttgcaaaaattttcttgctaccctctcggaagccgcccaacaattgtatttcaaggttgccccttgaagcttgccccttgatatttcaactcatggaaagccttttcctcagaattccatgcacaattctcctcctctcgccaacttccgttgcatttaggagacctagtcaaattcaagcaaagaccaggcgagcct

SEQ ID NO: 246042 - DNA, 828 bp, Cannabis indica
cttagtaaaaactcaatatctctattttatttattttaaaagatctttatctcgttttaaatcttaagaaaagagctatatttttatgaaggaagtattatctggatcgatgtgtaattatatttaaaattattttttttaggctgtatccaaaaatcggcatgatccaaaattttaaaaaaaattgttttaataaaatatacataactcctaggttatatccttgttaactgagtgtcaacataatcttgctaacattctcataacttgggtgataatcctgcaaattatttaacaatgaactttttgttcagtatgcgcctttagtgatcaaattgcagatgttttaacaaaatttcttctaaaagacaagtttcactacttcaagaacaaacttaaaatgtttccaccccttttcgcttgaggggatgagaactaacaaattaattagtgttaattagttgatttaggattaatctttattctttacaatctcaattttgaaactaattttgttctaattgaatttttgtttatttaataattaagtctataaataaagtgatcctctatgaattaatgcaaagttttctaagcataattctgaggctttttcattcaattattcttctcattttgatatctttcaattaatcaaaacaaattaagaactttatgactacttagctagttttcaatttatacatgatagctttatatgataaataaattatgtatatatagggtaatactacggtaggacctagcaaaagttctctaccggtagggaacttttttttttgactgttgattttagatcttgtggtt

SEQ ID NO: 246043 - DNA, 542 bp, Cannabis indica
tttaaaaggtaatggaagattttattaatagttcaagatattcagtcgagaaaatgcggtagtattactctaagagattcaaagaggatgacgagcttgggcattttgcggatgcaaaagaatagaagcggtttgacatgctccatccacagaagagtagaagcgatttaacatgcgctatccattcttcgcacttgaacttaaaaatgtgaggttgaatttggccactaatgagttcaatctatttggcaacataagcaactcgtgcaacatgcagtcgttaatcttagtcccatataacttacactcttggaagtgcatgaaaatggtgatcaaaatcttgacacgattcaagagaatgagtttcccgaagtatcaagtgagtattgttttctactaattttattattaaatatgatttatgttaatattgattatattttaatttaaatataaattaatcaactccagacaaacaaccctgggaagtatcagatgagttgtgcgccatcacaaatccctttaatctcgttgtttattgt

SEQ ID NO: 246044 - DNA, 1024 bp, Cannabis indica
tttaggaaaccatgctcaaaagggaattcactctcattgaaaatcacatgcctagaaatatagattctcccatgtggattaagacatttgtatcctttgaaaacctcactatagcctaaattcacacacttaatggagtgaaattgaaacttatgttgttggtagggtcgaatgcaaaggaaacaggctgctccaaatattttcaaaagcttataatctggtattttagaatttaccacctcataaggtgatttgacatttaaaacagtagttggcagcctgttaatgagaaaaatcgaagtctgaaaagcatcagaccaatattttaaaggcatatgagcttgagccaagagagtcaagcccatttcaactatatgcctgtgttttctctcggccctaccattttgagctgatgtcctaggacaagagtgctgaaactcaatcccatttttgataactaggtcagagaatgcatcatattctcctccccagtcacatctcaacattttgattttcctttcaaatttatttttcaataagagctttaaactgtatgaaagcagcaagggcatcagacttttgcttcaagggaaacaaccatgtgaacctactatgatcatctatgaagtgaatgtaatatttgtagttagtgtgtgatgctaatggtgctggaccccagaggtcagtatgtataatttcaagtatagttttggctctactgtgagagatattaaatggcaaagcatgggatttaccaagttggcatgcatcacaaaaacaaagcttatcattgacagaattcttttcattagacaactttaaaacttgatttaaaacaggtaaagatggatgacctagcctcctgtgccaggtatcctttagggaagcagaaattacattcttagatgactgaacttgaacagaaaaagaacaaggattatgttggctgcggcagtaagtaggtgaagtggtggttgttcccaaattgtagagaccatccataagagctcctctcagtatcacc

SEQ ID NO: 246045 - DNA, 1538 bp, Cannabis indica
ggtaaatgatacttgtttttaattgttaacttattcagctctcgatagtcaatacacattcaaaaagttccatcattcttttttacaaaaaatatcggagctccccaaggtgacacacttagtcgggtgaaccctaaatccagcattccctagagtggtatctttagctctttgaattctgcaagtgccatacgataaggtgcctttgaaataggtgctgccccaagtatcaagtcaataatgaaatctatctctcgctgaggtggtagtactggtaattccttaggaaacacatataggaattctttaaccactttgacctcctcgggtccaagcaacacaggtttaccataatcaattacaactgctagaaatccaacgcatccattgcgtagtaaatgcctagccttcagtgttgatattctagggacacgacaaccttgaaccgatcccacaaaaacaaatggttcctcatattctagttgaaaagttaccatttttcgcttgcagtcaatactagcagaatatttaaacagaaagtccattcctaacatgatatcaaactcagccaacggtaactccacaaaatcagcacttagttccctgccctcaattttaattaacaaagatctaatccactgtctcgaaataattagttccccattaggtaataatgtttcaaaccccatttcaaacacatcactaggcctaccaagctaattaagtatcctttatgctacatatgagcgtgtagcacccgaatcaaataaaacagtataagtagtgatgtggataagaagctgacctgtcactactgaagggctggcagcagcatccgcctgggtgatagcaaacacacgcgctggtgcagatttagcttctggcttgggttcctctttcttcaattggggacaatcttttttgaggtgcccaactgatccacactaaaataagccctttagctacaggtcctggggtgatgtttcttgcaacgcgggcactcaggataggaatatgtttgacgtccccctttaccctagcttccacgaaacctcttgttttgctctgaactctctataggtgggaaagttctcttcttttgctcaatagtggaataaccactctcttttccaggaccagacttagggagagtagtggtctctccagcacaaggaatctctcgggtttcttgcagacactttactgctccttcagcttgaagagccttgtcaaccatttcagcataggttgtggtgtcattggtggtaataactaaatcgtgcttaatcttagcattcaatcccaccaagtattttcttttttactgaagtctgttggcataatcccagaggctagcttggacaagcgatcaaacttggtcgtatactcagtcactgacatattctcagcatgtaccagctcaacaaactcttttcgctttgcactgtagatgcctcattgtaatattatgttgggctttgtgccctaaataaaactctatttcaatgtaatctttatcattcaattatcaataaaga

SEQ ID NO: 246046 - DNA, 3250 bp, Cannabis indica
cccagaaatcaattagatgcgaatcggtatgtaatctttgtttcttagtgtatgattcatttttcttgtcaacgtaccaagtcgctctagttttatttttatcattgtctatgattcaaccttgaataccaaaaaataacgaatatagaaataaaatatcaaaatcatgcattgtttctagttggatatggtaaagaaattataactcaccagacttaaaaatgagaaatgagaataaatagaccatatttatgatgaagtaaaatcatattggattgttaggaactcttaggaacctaagtgggaaagaaatggttttggacggattgcaagtgatttacccattacgacatggaatgtagaactggagggtgaatagcatctttcttgtttgattatatcgcaatggttctagttttattttatatcactattaattttgtatattacccgaatgaattggtgcttctttaaaagtggtaatactgattttttttttactatggtctatagtatacatacattttatttaagcaaacaaagtaagaatataaatgtactttttattctaatataaatatatatttttttatttatgtgaaaaattaaacacgtatttataaatatgaaaaactttgtataatatataatcttataaactaatatactagtttatattgattcaaaaaaaaaatataccagtttatatttgtcgtacataaatgatttgtacatgcacttagagtagatagtgaattaatttagaacccaaaagtcaataaatatgaaataaaatatcaaaatcatgcattactcttagttagatatggtaacgaaattataactcatcagactagagaatgagaaacgagatatttgtagaccacatttataatggagtaaaaccatattggattgttaggaactcttaggaatttgagtgcaaaaaagatagttttgaacggattacgagagatacacctattacagcatggagtgtacaactggaaggtgaataacgtctttatcttttgattgtaccacgttggttttggatggtttgtttaataaaaataaaatttttgtaaaaagtgtcaccttatccccgattctcatagccagatcatggacatgtgctgctttgtccaattctcttttttttatactcactcgaatttatgttctaatccaatatttttaccgagcaatactatccgttggcttattcaagcccttacactgctccaaaaagcttgaacacttcttgatcaccactatttctcctcagtatttcctaaatcaagtatttctccttgtatacatagaaaatgaatattaaattagaaattctttcttatttttatttcgcaaataaaagtttgtcgtctaagcatatttgaaggtttgaatgcgtaatgaaactatattattcttgtgagaaaattaatttagaacgatgcatgtagcatgtagaagactaacatatatgttaataatattgtatactattttgaaattaggtaagttttgagataatactatataaattttcattattttaataatattagcaataataaaaataaaaaaaaatgttattttctttttgcaattttttataatttattgaaaaatattaaaatttaattcaatggattttaatccaccgattcaaatcaaaattcattgaactattacttcttcgattcctccattattcccatactacatttcttatacttcttctacactaccaaaagaaatgaaatatttttgggagaaagattctcattctgggttcttttcatcgaacgagacacatttatatagatatatgaattttttataggagaattactgcaagtttcgatgcgttctttctaatcaaacctataaactcgagtttacgctctaagaatcttgaacgaccacttctcgatcaggtatctctagtttttacttggtaaatgaatatatatttatagtctaataagcatatatatctgaatgtttgaatggtcggtgatgaatctttcacatgccaatagcgatcagcccatactcatcaaattttaaaatcttgaaccactagttctccattacttctcaaagagtattagatatttcttcctgctacgttacttagattggaaaccctcttcttatttttaatataaatgaaggtttggtatgggtgataaaaataaattatctcaaggacgaacctatatatgtgtgggtagatgtatatttgttattatttcaaccatattaattattagctttaataacaaaagaaaaaatctattacttatttttaaggaaggatttttttttaaatcaatttatattttttttttgtatatttaagtaaattacataattaatttcattaaatattattgattctattaaatatgtattacttgaataatatggttattaatagtggataaaatagaattttattggagacccaaaagcattttgcctccaacaagataccaagaccatttaatttaagtaattacttttcttttcaactaaattatattattttttataagaacataaatggtaattaaaaaagcatcttcattctttggttggaataaaaaattaatagtataccagttttggaatagaaaatatgaaaaaatttgtataatatataattttatataaattttataaactaaaatattagtttatgttcgccaaaagcttataaggttgctcatgaattagttgtgcatgcacttagggtggaattatccattttttctaattgacatgtattaacctttcattcttgttaataagagtgtaatttttttaaaaaaaaaaaaaaacttaattaatatttatataaaataaagggaataattaaattcggtgtcaaataaatacaactattttcagagacaataccttgcctaccgtttctacaaaaaaataaaaagttgaataccctctgtctaacccaagcaatcgaattgctgcaaattgtatgaatcttttgtttcttattgtataatttatctttctctttcaattgtaccaagtcagttctagttttgttctttattattgttttatgaaccaaccttaaatataaaaaataacaaatatgaaataaaatgtcaaaattatgcattacttctggttggatacggtaaggaaattataactcatcaaacttgaaaaaaatgagaaatgagaatagatagaccacatttatgatgaagta

SEQ ID NO: 246047 - DNA, 770 bp, Cannabis indica
atccgagggtattatccagctgactaccgattagtacactgcaatttaagaccagctacgtgctctgcaggccgaggttgagggacgaaacaggactcaacgtcctccccgagtactcgctgcttgcacaaacaaccctcaggtaactaattctagacgtcgtagtaaccgtactcgcagggaacggagggccaatcaggagggactcgatttgtaccagccaacgtcgagggatcaatccgtgagaaacctcaatcaggaggcgtagacggaggaggatgttgaacgacgtaatcctcgcagcagaccccagtcgcgagacaatgacatgaatccgcctcctcattctcacatggctgcacgcccagcaggtacaccagattaggctcggtggatacactgcaaggagggcgatatcaggttcacaggggcgatctctgcgatcaccttaacgttgtttacccggcgcactcccagacgcctcgggatgtcgaagagcctcgtgatccccgcatgggcgatcagggcgtaaacaatcgtataaacccgcctaccgcaccagctgcaactattggagttaatatcccagcgaacatcgccgcagtagtaacgatgcctacggaaacacaagtcaatactcccttaaccgggagtatcgatcaaggtattcttctacaggcattaaaaatgctcgagcagtagagaaagcccatatacaagctgcatgggacttctcctttcactgctgaagtgcgacaagctcgattgcc

SEQ ID NO: 246048 - DNA, 652 bp, Cannabis indica
tggtggaaagagcattccattggaatgtcattccaatactttaaaatgcaaccaaacaaaagaatagaatgaaaattgttttctttcaattccattccatttcattacttccaaccaaacgccacctaagagtttgatcaatagacaagtcaaagaaagcaagcttattttcaagtgattattttttagataattacataaaatattaattttttttaagtaattttttttacagtattttataaaaatacaaaaaataataaaaaaatcacatgaaaataacacaaaaataatctcaaaacaacataaaaataatatacaaataacgaaaaattaacaagcaaaataataatagtacaaaataacaacgaaatattcgttaggaaggttttattgctaattagtaattagtacaaagtttggtgttaaaaccatatgtgtgtgatgtcaaaaaaaaaattgttatatttttgaaatttttacaccataaatacaaaatgcattctttattattgaaataccctcacacggttactgttacttttttactcatcaagtttattttattacacttttaccactttgcacacacattttcatgcatcacacttgttgcttacacgttaggggtctaggattgacttctatcaat

SEQ ID NO: 246049 - DNA, 979 bp, Cannabis indica
tactaatcttacctcaattccgaattcaggtgtgcctgccaacctgagtggaacaactgttcggcgaattacaggctcctaaatcacatcaatcataacataggtaagtgacacgctaaataactttcagaagacttaaaattgaaacgaagagtttccatatcgataaaaaacatgtcaataccctaaacatcacgaaaatgggaaaaactatggttcccaaaattgcccgaaccggtagatcggttcccaaccagaattcaggttctgtggggtttcacggggaccaaccgaaattccagttcctacaggtccctctgaactcgaatttcggttcagtgcaggaatccaacaaaaattcataatgcactccaaacaaccccaattcaaaccaaactttccagacctgctttatacaacctaaagaacattttcaaggcaataaaacactactacaagctaagaaacaagtttcaccattcaagctccaagtttgagttctaaaactcaaaacttggttaaatcttctatcagccactaaaacatgttcaaattaacattaaacaacatatttaacccctagaaagcaactacaacaacaaaaatcacaacaccatgcatatccattttcttaaaattcaggaaactcaagaggataaagtcaaaagcttacctagagcttaagcactcctaaatcttgcagaaaattgcttgaattgggagaaaaaggaagcaagccctagctggtctaggggttcaaaaatgagagagagagagagagagagagttgagagtgaaatgtaatttttggcttaacttgatatttagtaaaattaaatgagataatgttgtgtttattcaaataatattatcctaaaacattaaatcaaatcaaatttaacataaaactccattaccacaaaagacaaaaaaagattggcaaaatgacaattttgcccttccatactaataaccacta

SEQ ID NO: 246050 - DNA, 941 bp, Cannabis indica
cttcgtcccggacgaacttcgctcgtcagtgttttctcttcgcttgaagtgtgcctctaactgttataattatgttccataatagttatacttattaattagttgttattagcaaataatataataatataagacttatgcatgttggccaatacaatatgtgaaaaatataattattttaattattaaaaaaataattatactaagattttaaatactttttattagaccacaatacatcaaacacttactcttttattttatcactagatacttttactacacacttgtgtataactcaaacttttagaacactttatctttagacacttattaagaactcacacacttgtgtatagacaacttagcacacactaagacttcacttatttttttgtgcactcacatccataagaccaagagtcactacaaaaaatagctactttcagtaacaatttttagtcacaacataaattttagtgactaaatgtgacttttagtcacaataaaatgttacttgtgactaaaacatagcatttagttacaagtggtccctaatttagttttagtcacaacaagtattgtgactaaaaacacatttagttacaaaaaattgtaattttattgattaatacctttagccagagaccttttagtcgcaacataagaatgatattttataaacgtcacaaatttttttattttgttgtgactaaaagtaagattttttttgtagtgggtctatttatagtgcctcatggttggttgatgaagccacttcaatttgctaaactagaaaagtagatatatctagtgactattgtttctaaaaatttctagaaaattattttccaagttgtttcttacatttatctaacttttctactaactgttaactcaaacttttaggtctccttattttgatgattaacaaatatttg

SEQ ID NO: 246051 - DNA, 645 bp, Cannabis indica
aaaattattaaaatggagtgtctatagaaatttttagagtgtaaataaaatttccctaaatttgtccaaatttatctatattaattacatttttgtcccttaattaataaaatctatgtaagacaagaacaacatctcactttgacaatttttcctgaaagtatattttttttgttttatctttgtaaaactttcattacagctattataatcttcaaaatatatagggctcaatcatatatggctcgtaaatagcatttagaatactgtatgtcattttttttattaaggaacaaaaaataaaaatcacatttattttgctgctaaaaaatacataaataaataaaatattaatttattattataattatatgaataataatggtgataacacacaccaaaaaatatgttaaacatctctaaattataatatttatttactataaacaaataaaatatatatagtttatatacatataatagtagtttaactactttcatttggaaaataaaattgtatatacatatatatatatatattttgaatgaaaataatctttattagacaaaaatatctgctaatacaaaggactgaagagcaaggagaatatagataccgaattaagaatagcttgaataactaaa

SEQ ID NO: 246052 - DNA, 1160 bp, Cannabis indica
caataaccattgctgatttgatattttacagcagtaaattgttgcagctgctgcacttgcttgatcttgttctttatttccaccattttcctccaataccagatgctggttgtgggagcattgtactcccaccaatcttgttgtttgatgtacacacaatgcaccaatttaacccataaattgtcttttttattggctacagcccaaacatgcttagacatggctgctatgttccatgaggcaatattcattatgccgagacccccctctttcttaggagtgcagatcttctcccaagaaatgcttccagcccctgccatcatatctttcccagtccacaagaaacttctacatatggcttctatctcttttattactttccttggaagtatcatcatttgactccagtaaatatgaattcaaataaggactgagtttacaagaactaatctgccagcaaaagataagtttcgggttcctcataccttgattcaggcagccattttctgagctagacaactgcaatcggatgcattgatctttcttgcacatatgggaaccccaagatatttgaacatgtcattttgtctagtaaaaccagacatatccaatattctttggatctctccatctgtcatacccgagcaataaatagctgatttctccttattaacattcaagcctgaagtaagagagaagagcaaaaggccttgcaataagaaatacatactcttgaagtcacctttgcaaaataagagaatatcatccgcgaagctaaggtgattaagccttaattcaccacatctttcatggaagttaaaatcctctttcttccccaccttgatcaggattctacttaggtactccatacctaacacaaaaagtaagggagacattgggtccccttgcctcaaaccccttttagcttcaaaaaaaccatgaagagatccattgaacatcaatgagtatctaggactcttcacacatgtcataatcaagcttataaattttgatgggaacttcagctctctcaacatttcctcaaggaaatcccaatccaatgtgtcataagccttttgcaagtcaattttgaacatgcaattaggcttagctcccttttttgcataactcctgatcaagtcctgacatatcatgatgtt

SEQ ID NO: 246053 - DNA, 1326 bp, Cannabis indica
acatataacaaatttcccatccaaattcccccaaactaaagattcacttatgaaataagtaatttttttttggatattcatgggtttatcttgtttaggctcaaaatgtgtagaaacaaagaataggttaaggctcaaaaagggtaactaggataaaattacagggataacttgaatggcacaattgatccaaaaaaatgcctaaattacttttgtagtcattcataatttattatttcgcctcaaatagcaagcaagaaaattctagaattttcaaacaactttccatatttcacaattagcatacataaactaattcaattgctagggatttacttattataattccatgttcttttaaagcacaaaattaaaattattcaagagtgtaatatcaccaagcatacagatttttcgaaataattgaaattttcaaatcatgctatctgcctactttcaaattgactcacattaagcaaattgactcaaaataaagaaactaaaaactaaaaactaaaaacttatagacttaaaattttaaaaacaaaggactaaaaataaaaatttaagttcacccccaaacttaattgacacattctccccaatgtgacattaaagagagagaaaagggaacttatctaagcgccacatcattatggcggtggtggtggtggtggctgcaaaattcaactgggatacagtccacctcttgcctccataagggcccttgtaccaaatgaagagaactgtcctccaacgttgctaattttgaacctatccataagatgagattcaccttcacaatttccacacatcagtcttttcatacgtcgtcgaaaagtttgaaagcgttctttggactttcctttcttcttgttggtagttacttctcgaatatgctttactacttccactcgacaacatgaaagaattttagttgcggcaaagacattgaaagtctcttcttccttttgaacatgcaactttaactcccctttttgcacatcaattaacgctctccctgtggataagaatggtcatcccaaaatgatgggaatattctcatcttcctccatgtcaagtattaaaaaaatcagcatggaagataaacttaccaaccttcaccaaaatatctgcaattatacactgaggatgagtcaaagaacgatctgccatttgtagagtcactgttctgggcttgactgatcctaatcttagtcttttaaacacagataagggcattaagttaatactcgctcccaaatcacatagagcttttgtttctatcaaaccccctattgagcatggaatattgaaactacccgg

SEQ ID NO: 246054 - DNA, 709 bp, Cannabis indica
actaaggataaaccgaaaccaggaaatactcagcagcaggttactgaagtggtttctgtttctgtttctgagcctgagaataggttggatgagtccacacaggtgcaagcaacaaccgaagtaattggtcaaggggtttggcataaacccaaaaagactatccagggaaacattaagaaaaatcttagtgttagtgatgaattacagcagcagcaggtagttatgaattcttttagtgctttacaacaaggcagtagggaggaagctattctagatcatgagcaagaagggcacaagatttctactcaattaccccatggatagttgcaagatagcttgttggaatgttaggggtattaacaataaggagaagcaagatgttgttgctgaattttgtaaagttaataaagtaggagttggtgcttttttagagaccaaactcaaagagaataaaattaaagagatgatggataataggtttatcaattgggattactacacaagtgccaccatagaaggtagacttttgattgtttggagaaaaggctatgttcgaacattagttattgctgaatctcctcaattggttcactgtttcattcaaatgtcaggatgtgaagaagctttttgtgctacgttcatctatggatacaacacttctgaggaaaggaagtctctgtgggcggatctgaccaaattaaaatttcct

SEQ ID NO: 246055 - DNA, 630 bp, Cannabis indica
atctttatcgagcttctatgaaaaagcttaagaaagaaaaagggtgacaagtttggaccatgcttcatcacagctatgccagggagtttctatgaaaggctttttccagacaattctatacatattgttcactcttcttacagcttgcagtggttgtctaaggttagtttattttaaatttaatcaaatttattatttttattatattatagagtcggtcttaaacataagtggggtcggttatgagttaaggtaggacacgtttgtgcctaaagtccacccagtccaaaagtaaaagaaatatcttttaaaaaaatacacaattttatttgttaataattttttaaaaaaaaactcctcatatcctctgaacggaagtctattacttacttattttcctgaggttcaattactctcagtgtcggccttactttcaattttatgaaaatgctatttttcttttgagaaatgctaaagggcactatttgtgcctaacattttcctacgtgtcaatatcgctattagtgcaattaagtaggggtgggcatcatccaatccaatccaattgaactgaaccgatccaatccaatccaattataaaaacgttagatatccaattacaattggatt

SEQ ID NO: 246056 - DNA, 1110 bp, Cannabis indica
atatgggggatttcattgatcagtgcaaccttcctataatccttttgggtgatcttaatggaactctaagagatagggaatgcctgaactatgcaaattcatctagcccaacacgctactcttttgatttgagacgaatggttcatcacattggattaattgatttgggttatcttggggtcaaatacacttggttcaagaaaagtgttgatcctttggggggatcttctctcaagagagcgcgtctcgatcgtgcactagcttctacggattggagaatagcgtggtcgaatgcagttttatctcaccttacagcctcctcttcagaccataatcccattcttttggataccttaagaggaaaacactgcactaagcccctgttcaaatacgaaatgatgtgggaaagagaccaacgtctattctgggtggttaaaagagcatggcttgagacatctcatgaccacccgatggttaacttgtaccgcaaaatcaaacataccaaggctcatttaaccaaatggaacaagacccacttcaggaagctatcaacgcagataaatgaggcccgattagctctcagttcgatcgaagaagcgcataatgttgacgagaaggcacactctgaagctagagaaaaactggcggaggggttaagaagagaataaattttttggcgccaaaagtcgagagttgcctggctaaaagatggagatcgatcgacaaaatttttcatggccagcactataacaaggagaagacgcaattacattcaatttctaaagaatgagcagggggcaacaattgaagaagtgaatgacatagcccaattattcatagagaaatttacaagcattttctccaagaatggcgctcgaataatgttcaattttctccaagatctcatggaagtgccaaatgaggaggaaatcgtgagaactctatctaccatgggaatcgacaaagcacctgggccggatgggattccagtagcatttttccgaacccattgggacaccattaaagaagatttcatcaaattcatcaaacacttttttcacacggcagaattacctcattacatcaatgacacaaatatagttctggtac

SEQ ID NO: 246057 - DNA, 760 bp, Cannabis indica
atatatttacaacacttttattaaaaaaatatattaatcggtttaattcgatttattaaggttaattgagcagtgtagaataatttgtaaaccacccaatatattcattgggcaatttggatttttattatattattttgggatgtactttttgtcagtttattcggtttggtttgggcagtttattcaggttagacagtttgtaaattttgttgaacactcctaattgttagggtttatgccttggaaggcctgtaaagatatttttgatttattaataagagttgaacacttttatatatatatgagaatgttaaattattaatatttattattgaataatttattcataaaaataaaaaaaatttcttattcatacatgaggctgtgacttatagttgtacagggaattaagatcacttagccatgaataaaacagccagcaacatattaaagttttggaatccttaataaatagctactagtgcggttcactgatgccagttattcagtgtaagtagctcgattcaaattatctgatgtagctgtcatctaagtgaaagtagggctgtacaaaatttttcataaaccgcccaacccgaataacccgactaaaccaaaccgacaaaaccgataaaaaatacaaaccgacataacttgataaaattctaaactgcccaatctgtaaattgggcgggttgaattttgacccaaaccgcccaaaccgatgttgggttttatgccctaaataaaactcttt

SEQ ID NO: 246058 - DNA, 1159 bp, Cannabis indica
cgatgcctacccgctcccacacctttttaaccactctacaggttagaaggatgtgtgtgattgtctcgtccatctcctcacacaaaggacatctagtgttgactggaacatgcttagaagcaagctgagagagggttggaagacaattagaaccggctctccacatcaggttcttgatctttggtggcagcttcaatgaccataacgtcttccaaaactcagaggcagcaatctcattaccaagtcctttcagtttttgttgtaaagtgtaagcacttctgaccgaatacatgccattggactcattagaccagcaaagaacatccgaaacctggtttgtgcttaaggaaatttactttatcaatctctgatcacgctcctcaaacaagtcttttaggatatcatcatcccaggaggacatgtcaatggacattaagttgcacactttagcatgttgaagggctggatgagaagaaatcactagaggttgctggtgatcaggcagccatggttcattcagcacgttaatagaagagccattcccaacactccaacgaactcccgcacgaacaagagattgagcttcccaaacacttcgccacacaaaacttggattgttacctataggagtcgagaggtatgttccattaggaaagtatctagccttgaaaatacgagaaactagagactcagttcttgttaggaagcaccaaccttgttttcccaaaagagccaaattaaaatcatggaggtttcgaaaaccaagacccccattgtttttgctattacacatacgatcccatgacatccaaggaatacctttgttttccttcgacgaactcttccaccaaaatctcgccatggtactttcaatatctctgctaatctccaaaggaagcaaaaacacattcatagcatagctagggagagcttgtgcaaccgacttaattaacacttctttaccagcgcgagaaagaacttttgaatcctagccttgaagctttttcctcactctatctttcaagaaacccaacacagccgacttattccttcccatagtacttgggaggcccaggtacatactcctttcatctgcttgtggcatttgtaacaaagagttaatatcctccctcacatgattcacagtattagtactata

SEQ ID NO: 246059 - DNA, 1265 bp, Cannabis indica
taggatgttaatgaaacatacatggtagtaaatctagatcctggtaaaatatttccaacaagtaccacctatgccgatatggtggtaaaggcactgggagctgagggcgtagttgagtgcatccaggagtttcgagggactcaggttgttggtggaacaaccactcctcctacctctggttatggtaggggtggtagtgactcgaccattgactagaagagaaaggcatcgtctgcacctggtggctcaaatcataacaagaggttctgagggaaccaaggtcgaggtaaccgtcagggtggttctgaaacctgatacacttatccagaatgtcgcagttgtaagaagcatcatcaaggtgagtgtagagggcgaaaatatttctagtgtggtttacctgtacactataagaaagattgtctgcaactcaagaagctagcccctcagttgttacaggtcagctctcgatcaacaactcttacttctccttattgtttgactctagggccactcattcctatgtggcgaccataatttttgataagttgggtagattgtatgatagctatgacaaagggtttaaaagcttactgcctggcggagaattagttatctctaaggtgggttaggtctacgccgatcagaattgaggatatagagttgagtgctgatttagtggaattggatttagcggattttgacatcatacttagaatggatttcttgtccaagtacttagctagtattgattgtaaatgaaagatggtgattttccaacccgagggttagggaccatttatttttatgggatcggttcagggatcccaaaattttagtgatctctgtactaaaagctagagatttcttacaagatggatgcttagggtttctggaagttgtattggataccaccgaacctgaatcaattaattctgaatcaattcgcccagaagacatcaaggtggttcaggaatttctagatgttgttcttggtgaacttctaggtttaccaccgcagcgagaaatagattttgttatcgatttagcacctggagcagaaccattttcaaaggtaccttacaaaatggctccagcaaaacttaaagaattgaggattcagctccaagggatgcttgatatggggttttcacgacctagtgtgtcacccttgggggctcccatgttattttttaagaagaaagacagatctttatacatgtgcattgactgccgagaactaaataacctaggatcgatgacttgtt

SEQ ID NO: 246060 - DNA, 1289 bp, Cannabis indica
ctagaatacttcccccaacatgaattcctacgagtccatcacaacatcccaccagtaaaccaagtagcccttgcaacactaaccctgaagctaacatcatttgatagtagctcacccgccaatgtccaatgcatactccttttgacaaggactaagtatggtgcacccctcagggtgaggttcgcaaaccaacagtatccaacgacacctacagaacacacttccactgaagccaagtccctctagaaaagtccctctagacaagtccctctgaaaatttcacacgccaactccattgcacaccatcctcttgatggcaatcgagcaagacattctcatcgcaggataaaatttagtgcgtcccacctggacgaggctcgcaagccagctgcacccaatgcagcaccaagggcactcttgcacaagatttctttgtgaagttcacaacattggccctccggccctatgtcacacccaaagcttcatgcaataggtcccactgacccactgcatattttccccttctgagctactttcacgcggttaatgatctaacaatcacccaaaaccatgaactttccctctagctcctgcttgtgggggctctctaacactgtgtcacaagtttactcctaaaatcaaccctgcatcctctgatgacttgctaacttttgacaaacttgataacacccagtcttactcttaagacttgaagttatccaaatccgctatctcccatcggcatatgctctttgaatcattcggcacagtgtctcatacaacaccaatgtccccataaacacaaagcatgcccataacatgccgcaaactagctcaatatatatctcggcctacgcccctacatattgtctatttgcagcttgcaacaatcatgcaagtctttgcactgaacaacccatctgttgtagtgtttccctctggattcacacactgaaactaaacaagtatcctgattcttcaaacacatgaattagtgggctcccccactttaacttgggaagaacttctctcttagaggaatacccctcaagatatagctcgcaagctaactgcatactcacatacggtccctccattccaaacgtcactttgatgaagatgttgaactaatgtctcggccattctgactcttcacccctcgacatttcaatgttgccttagtaccttagtcctgccaactttcacctaaggccaacattccgatggtattatcttagtacctgagtcctccggactttcactctcgataactggcactacctgtgtcc

SEQ ID NO: 246061 - DNA, 858 bp, Cannabis indica
ttttttaagaatataaattacaaaaaaaaaaaataatacaattaaaaatacatattttttttaattgagataaaatgctattatattaaaatatggaagttataatacaataggcatcagtgtagaggtatctcgtcaaaccatgaacaattagtatccaccgagagtgcaaattttgccaacaaatgagcggcattattagcagacctaaactcatgagagatctgagcaccaggaaagttggatactaaaagggaaatattatctaagatacaatgaaaatcaaaaactgacatttgggcagtttgcaatccttgaaccaccaaaagagaatccgtttcaattaaatgaactagtagttttagctcccaaagccatttcagactgtgcattaaagccatagcttccattatttcaggtttaaagcacctttaaatgggacagccatagcagcgactatatcgccagagctatttctaaagacagcaccaaagcctgtaacttgcttcattctgtctactgcaacatttgtgttaagtttcagatggccacagggggagcaattatgaagcatctcgtgacactgatcttgcattggagtggttgtttgctgcaactcgatttgaaccttccctagctttatgataatcttccgagaaagagagggcaaaataaaaaatagtatcaacattttttggcacagaaccatgcatttctttgtttcgttcactccatatacttcaaagaatagttgcaaactattctaaatgtaatgaagtccatgatacagaaaaatgcatcaatatttctgtaaagcccgcttagttaatttggaaattagcagttatttatgttaat

SEQ ID NO: 246062 - DNA, 520 bp, Cannabis indica
tggaaataactggtgttttcatcaccaagttttaaccaacaagctttggaattctggcgtaaataactgaaatattgctcacgggtagactggaattgagcaaaggcagccctttccttgctagcagctgtggaattcttcgggtttgaggccaaaaaatcttgagcttccatgaatttctcccgggcttccttgtacatcccagtaatactctcattattgttcacatagcagttttttagaagatgtttgattctaaagagctgctgatgtaaactttttagatctgagaccaagtgcgacttccaagccgagagaaccaactccttatacccctccttaagcatccagaaattgcaaaaccgaaacggtttgataccacacttactaacctttagaagctttacaagacagtaactgtgatctgagatagcaccccatctaaagcttgcctctgtgtttgggtaacaatctagccaaccctcattggtgaacactctatccaacttagaataaactc

SEQ ID NO: 246063 - DNA, 654 bp, Cannabis indica
tttatggatggctctattacattcatgagttttgaaagggtacttcaatctcagagtaatatcgattagatattctctcaagtttgtgttgtttgtatgtttacataagatgagctcattgtataatcaagaaaatactagttagagaaattaaatttaggtctatttaatgattcaggttatattacgcttgtttattcgtacttttcctatgtagtttggcttgtgttgataatagcattaatttattttctaacttgcaggcaataataagaacattgagattaaacatcctggaaatattagttttggaactacagaggtagtatatagtggtgagctatttgaattcgaccatcaccttaaatttaaatctatttgctgatgttccattatgacttgagaaactattagggccttatttatgaattcagttaaaaagggtttgttgttgcagttaaatgttttaagttgtagagttcccaaaaccatagggcagaaaaagtattttagagatttatagaacattcccaaaccctgaagctctccctctctccttctctgccatctccaacccatctctgacgcccatttcttgtcgtcgatggcacaggcggaccatagattcagtttagtactctatggaattcaatg

SEQ ID NO: 246064 - DNA, 1047 bp, Cannabis indica
aaaaaaaacttattatcatttagtgtcggttattaattgtcaattattttttttcgagggtttaaaaccgacgcaaaatttttgaggaatataaacaaatataaatttaataaatttcctaaaacacaaacacacaccaccactgttcatacacatccaaaaccccctcttcgaatgctctggcgaaaccaccctcgtcccttccgattgtccccttcgaatctggccaatgttctccgaaaactaacctcgatcctctcggtcgtcttctccaaaatcggcctctcgtccccttcgaaatcggccactcgaaccccttctgattgtcctctccaaacagagattcgaaaggtaagaatatatgtatatggttgtttgatttttttattttcttttttgtacagtacttttatgatttttgtagtgtgagtgactgtatatgtatgtgtgtgtgtgtgtgtgtgtgtgattgtatatatatatgtggctttttgaattttttctgggtttatgatgtttgaataagtgtgtttggttcctgggaaaatgcaagaaaatattactaaacaaaacagtcaggatctttgactgcttgttcttgtggaatgtaacagattgtgaaagtatgggtcaaaactgttagtcgggctaagggtttgaatgagcaactggtgcaaaaagccaatgcaaagattttcactttcggctcctatcgacttggggtaggccttctcttttcacacatttgaatactattatattatttatgactactctgtttgtggattcaatttgcttctttaggatacctatataaaaataataaggtcactagttcttaactttatgtcaaagctattatttgagtttgaaatattcgaccaacaatgtaaagcccgcttagttaatttggaaattagcagttgtttatgattaattatggaattatttatagctatttaaataatttattatactgttatttatgttattcagtagcttgcatagtttgcatttccggtgtccggtattttggaactcggcgtt

SEQ ID NO: 246065 - DNA, 2194 bp, Cannabis indica
gttaccattttgggcttttgtgttttagacaattacatttttgtaccccgtgttttacaatttagatcccgtgttttgcaaaatggatcaaaatagtaccctaaacccgattttgttcaaaataatttcaaataaatctttctactcctcagccacctattctctcatgcgaactcattgcatcattgatgacctaacacttgatcttatattgtaaattatttcgattgaagtcaagttcaagtactattttgatctaagatcaaaatgtaatttaacaaaacatagagtccaaactagtaataatgcaaatcataggagctaaaagcatgaaacttttaacacattatttcatttcttgatacataccctggagcatattctggcagaactattctgtatccaaaagctttaaaggtgaatccaacaggtgctgctgcagtggccattactgaagaggatgaactatctgaaagaaactgaaatccaagagaggaacaaatagcaggctgctttgccccaatagagacgagtgtgaatattgcagctatgcccagtgcaatggctatcttagccataaatgaaaactcgaaatcagtactagcatctttcatgtttccaaggacctcatcagaaagtatatcatgtatgtctgcattctcttttgagagactttagccgggtagttttcggcatcatcctgttgatgacttcttaatctgagttttcaaaatgaaagttgtatcaaaatttttgagttatgaaatgaatgagcagctgatagttgcagttctctaaatgatacaaaataagtttcatatgaaatttgttcaatatgttacagtgttctgttcattcaaagcattgtggtgttctgtcccactaatttatgatcacaagaaagagagctaaaatggtggaaaccattgagaaaaactataaaacttatgttttcataagaagattagagttaacccaataaaactcttttggtcgaaaagtgattgaccgaccctgctaagcttatgtctttgtttcaaatatagcttatttattttttctatttggattttttttgagaaggcaaaatcagcaatcggtgcatgaacctcttcaaatcagcataatcattgtttatcctaaaaatatacttggtcaaaccatgagtctcaatataactattgccggacacatgagataaaactgtccagggaaatctagacaacaaagttatgatatccaaaaacagcacacctatctcatcattagcatactcatttccattataaaaatttggaaaagcttcaagtacttattattttgtatacaaacacttctaaaaacaatctttatacatgcttaaagaggcttagagccattgtatggattcttatttgttaataacaaaaataacattaaacaatctaaaacaccagaatacatcaaagactaacaactaatctaaaacaaagttacctgaaagtagtttgtggtctaaaagattgaagagatagcttactacatccatgttctcttgtaaacaatctaagtcggacaagggaacaagttgagtggctaacagttgatcgattagagaagatgggagtcaccataggtcggaatatcgatgacccatgtgtgaaaaccaccattggagacatattcaagctctgcattggagaatgagaatgagtgaataatggtagggaggaggagtattaggcttgggttgttccatgtggttgggtttagttaatgtgagaatggccaatgggttagggccgcatcgcatggatatacttttttatgccaatgaaatcaacttcttcaacgcaaaagagttttgtcgtttagggaacttccattttggctaatttaaaatttatcttttttaaaaaatttcaggtcattaaaattttttctcgaattgagataattgaatttaagaatattcgtctaattttactaaataatgtctcaccttgatggaaatttagaaggcataattttatacatttaaaaatttaggggcatgagttagtagatgtgaatgttcgggaggcagaatttagtacatagacaatcgtcatattagtaaaattgaattaaatttgataaaaatctttaaatctaacaattttaatagcttagggaaaaattttaaggtcttgaaaagtttataaaacatgatttg

SEQ ID NO: 246066 - DNA, 611 bp, Cannabis indica
ttcagttaagagctctgaagctaccgttacacaaccattaagagataaatgtgtagctatatcagcaggaatccaaagagaagaaacaaagcaagatgtacaagctcaaagccttgactcagcctcagtctccaaagttctgaaagaagaacaagcagcaacaatgatacagtcagcatttagaggctttatggttactacaccctgtcaataacactgattttaattagtacatattgaagaaaccccatatttctattgcattaaatgttttaactgaactttctaaattgttatcactttggggtgctttaactacactttggaattctggctatgttgaagtcattcagagtacttgaatttatttcaggctaggtgtccaagggagggaacagagttaaggggtggtgataaggaggacaaagttggaaatggaagcccagatttggagtctcttggtacctcaattgaagctcaaacaggaaattcaacagaaactttctctgctcaaggagatcgaaatgttgttcctcagatgcaacagaaactcagaaaccaagtgataaaggtaaacattacaatttctgcttggtaaatcaaaaactagt

SEQ ID NO: 246067 - DNA, 1245 bp, Cannabis indica
aaatagagttttatttatggcacaaagcctaacagtatacatctgatggaaccgatattgaacttggataacatatcataaacttactgtaatatctatctaatttaatatcgcttagttaatcttagatcaaatgatctcaatcctgagatggttaggttctagttcagttgtattatttaagttcttcaatttattcgttaaagttgaccaattagatcttctcgtgacatacagattaaggacatgatagttcagttgagttggagcgctaatcatagatactgaatctatagcctttacaaatgcatagaagtaaaataataatttccttcgagcttggcctaatagagttaaattgcggagtactcatttcagtaattatattagtttactaaaatatcatttataggtagctaagtattttaagaataaattacatggtagggtcgaacgctaaatttgttcctactcgatgtagatcatctatagtggatcattgattattaagattataacaatggataattcatagcctatctatatcgtggaacatatagagcgttctatataattaagagtgtaatttggagtctatagtcgcgcaaggaggaattgataagttagagaatttacttagtgaattctagaactacttattataagcttgattatataggcccatagtcccctcactagttgagatgatacttcttatgcactcagttaattggttttaattaatcaattataattctaaaattagaccatgtcttatttatgaattttcactaagcaatgagttaattgtgaagaaaagagattttaaagtttatttgctaattaagagactttgtaaggtctaaataataaataagataaatgataattttatttgataataaattataatcattaaataaatagttttggcatttataatattaaaattagaaaatatgacattagtgaaataaaagataaatggttataaaaatagcaaaattataactagtggggccaatctctatggtcggccactatgtgtttattttactattattttatcattttttattccatataatttaaatcctaaccataggtgaaatagtataaaaggaataggatgctctcattatcatccaatgcatttaacctaaatttcattctgtcagataactagagtttttgagagcctcctttccttcacaaaattttgaaatcctctctccctcttcatat

SEQ ID NO: 246068 - DNA, 660 bp, Cannabis indica
cacctccatgtcgcgatggtaatcgcgctacatctacttttatttttattgattagatccaacacacaagagttatgttctcaagagtgtctggataaaaatacagcaacagatttctaggtgaaatcttaatcaagattcataaatatcagattcatgggagacttgatattcataaatctgatttaaattagtgattgtaaagttcttgggaacaataaaccaataaagtgtaaggaaaagtgtgtatcaatggtgttttgaggactgatgtcgattgagtatggtagacttaatggagaagatgaaggaataaggaataagggtctgtttggcacagcttttggaaaagctaaaagttacttttcaaaaatgttgtgacaaaaaggtgtttggtaagctattaaaattagcttattgaagaattatgaaaaagctacacctaaaagctaaagctggtacaacctaacttttaaaaaaaaactgttttgattaaaagactctataataagttattttttacgaaaaaaatttatttaattatttattatatattaaaaaaatatttttttttgaaggaaaaaatgtttaaaataaatattatttaaatttctaactttttattttgtttttaaaaagatattttatatttttattatt

SEQ ID NO: 246069 - DNA, 1231 bp, Cannabis indica
tgaagggatgttatagttgattgtggctatagttttttacaacggcacgagttttcgaaacttgcacctaatatggaattggagacagaggttatatgttgtttcattcttttttacattaacaatgtgaatgtgtttgtgcttttttttgatattttttttaaatacagattgttactatggtttcatcattgttaactgaagacgagaggttcaaaaatgagaaagagtgtaaaatttggtatttaccagtgagaatattggtgagatttttaattgtatattttttggtccacttgtaatacatgtttagtgattaagttttgtttctcttttgtatataatatgtagaacgacttattgtcgtatcctaatttacctttacatgaaagttggaggaagatgcattactacgaaagatttatgggctcccttaaacactgtaatgaagtatgtttcgaatactacatgtaaaaacaatttttttttattatttgtttataatgctttaatctaacctcagtttattgttatagatttatattcctcttttgatccttaaacactacttacttgctcgagtgataataaaagagaaaaaagttgaagtttgggactcccttgctcatgagaactctcctatattacaatcttctaagattgtggatattgtaaggatttattagttgatttttaaatagttttaaaatttaaagtttatttattcttaaattttactgtaattttagttacgcaatctagatttttagttaaaacattcaacaagtagctcaatttaaggaatctctcctacttgattggcccattagcaatcttctctttaaccaaacctgatgaatttgggatggtgtctgaagaagttgtctaaagcaaccttttaaattaaagtttaaaatttaccatttaaatttgcgatggtgattgaaagaacatactgattaggtccatccaaggatctctggaagggtaaaatctgccatttaaaagactaacaaatctataagagaaaaccattcaaaagaccaaaactcatccaaataataaaataaacttttttgaatgaacataattttgaagagaaaactcatgcaaataatcaaataatctataagagagaaaaaaaaaatacctgcttggtggggaaaaaatctactgagcacaaggacgaaactcaaaatcaacccatggcttccggacccgtttctcctcc

SEQ ID NO: 246070 - DNA, 1162 bp, Cannabis indica
gatgtcagctgaggcagcaaggtgttgttgttgctggtaccgatttcatctgaagtttggaattggttggcagccgcctctttggattttccattcttgttgtacccgggagggtacccatgtatcttgtagcacttgtcgattgtgtgtccatgcatattgcaatttgtacaaaagggcctgccacatttttgtccttgattcttggatggttctagttttcccggactcttttctccttgaaaagcaaaagccatgttggagtttggattcatggtgacactttgtcctcctctttgattttcttcttgtgtaactaattgaaacaccctattaatctcaggtaagggatccataacaagtatattacctctcacttgtgaatacacatcggatagacccatgagaaatgacatgatgtattccatgttgtggtgttcttgcaatttcttcactcccccacatgtgcatccattacatgtgcaacatggcctgaaattagatagttgttcccacacagttttgagtttggtgaagtacatacttacagtttgagcttcttgcttgagattcatcaagatttttctgaggttgtaaatatgagcaccatttctttgctggaatctaacacgaagatcgttccaaattgctgctgcagactcgtcgtacaagatgctaggggagatctcctttgaaaccgaattgatgatccaagagctgactatgttattgttgcgaacccaggcattgtggagaatgttatcagaaataggaggtttaggtatggtgccattcaagaaacctaatttgttttgacagagattgccaattccattgcacggctccaagcaatgtaattttcctgtcctgtgagtaattgggaaacaagaacattcccagggttgtccccatgatgtcaaatagtagggatcggacgggtcttcaataggatttctcgatctcattatctgtccattaattccgatttcaggagcttgaacttggttatcgccatggttgaactgagtaggggcatcatctcttgctgcgtttcttgattgttagacatggagctatcggaatgaatggtaaacagggatttaacagagccttagaaggaagaaagtagaaggggaagtagagggtgtcgattgaagagatg

SEQ ID NO: 246071 - DNA, 893 bp, Cannabis indica
taaaataatttccaacacatcaaacattaaaactaataaacccagcccaccatcaccctaacatactaaaaaaagtacttgatcagaaatcagattaatcttccaaagaattataaataagacaccccatgcatcaacattccacacatatagtaaacatgtaatgttgcaataacagtagacaatgcctgaagtaatgggcaataaacagaagatatcaataacccaagaactaaatattcgacttataccgagaaatatctaacacaacatcaagagcttccaacaaaataaagtgaatgaattcatgaaaccaacttccttacaaatgaatcaaaatacatctaattacatatatacctgaaatatcccaaagagcataattgttaagcttagtacaatctgcaattttcaaagaactcaaacacttaaaagctccaagtcattcattctccatcaatattgtaaagtccttttttgacaatttaaatgccaaaatattttttattttatggtgagatttctttgcattcataaccgattttctcaccttatttatttgtatttattgctctttcctatcttaggaaagaatcatttttcagttggactttttcttgtatggaaacttctcttatggaaagtttgtttttaaaggaaactttgactattattattttccttaatgagtttgattgtgtcttgataagatcagatcaaacacactgtttatgggaggtgttatcctaatttttgcaccctgacatggcatcacacgatggtgacacatggaatcaactttatatacatgctcgcaagagatatgccgaacagagcaccatgtatattcgcacggacgaagccttctaatcgggcagtgagcagtctgaaca

SEQ ID NO: 246072 - DNA, 537 bp, Cannabis indica
ctcctcctcttcagaatctcttcatcatgaatatccctctcggaatcccttcctaatggaccctttcctttgtttggtatgctatgagtttgagttccttggggttctttccctgggtgatcatctcctcttcccttattgctcttccagttgagtgttttctattttgaggaagttttggttttcctggggagatgcattttttcagttttaattttaatcaaaatctctcaatgaaagcaccaaattgttagaatagaatttcgttaacaataatgaaacattttgaataaaattaaaactaactattaataatagagataaataagacagatgaatttttacatggttttgtagttaaatctacatagtccatgagtccatattatttccgagtttttgattcatttttattacaagatattcgctacaaagtaataatctttgggtttttctacacataatttctcaaggtttttcctcccaaaatttctcgtccttcacatcgtaggttctgtccctatttataggattttt

SEQ ID NO: 246073 - DNA, 613 bp, Cannabis indica
agaaaatcaatccccaactccccttcatcctctccctcaagttaaatattcgcatattgttcttccacctcctaatacaatgtactactagaagccatgacacttcatatgtgcctgccccgaccctctaataaccacaccaacaaaacaagccccacccaatgaatctgccttccacaacccagctcgcaccacacccaatagagcccttacccacctgacttcaaccggaccccgggaacacaagaaaacacccagtcacaccccaaccaaacaccacagacccctgaaacacaagaaaacacccagtcacaccccaacctaacaccacagacccactaacaacccagaaacccaaccgcaccccaagcaaacccgaatcaaactcacaccgaagcaaactagattcaagccccaagaaaacgcaccagaaacccagcaaccccaagagaacaaacgcaccagaaacaacccaaatcttgcagaaaatagacacaaaaatcaacccagaaaaacaacttcaaacacaaaacaaagacacacacaccatgtcacaatggacaagacatacacccgagaagacaacgtcagtcgacgagagaccacaacggag

SEQ ID NO: 246074 - DNA, 1021 bp, Cannabis indica
gaacccattattcaaaattccatttctagtttccttgtccacaaattgcactataaaacacaccatggaaattagtcctaccttatccactttttctttccaaactcataggagggttagccccaatttaacacaccaaagcagagctctagaatctaatctcatcaacaataccctctcttattcaagttcttaaacctataatcatattttgtataatttttccaaatctcaaaatggggggaagaatagtgtattccttcctcacaacgagcagaagcttttaggaagtgagagaaatcttttctaatctcttcttcatgttgaatctatcggagagaagagggtggagtgagcaccatctcatcgtgtttataattttcttcagtttccaaatttggttcagagattgcaagcgaagccacaccgaagagctctgccacggacttcgttttctttacagtgtccaacggcatcggacctcacttcttggcagtcggagccatcgctttcttcagctgccctttcttcttccaccctgcgccatagcccagcaaattgtcgctgagagagacagagaggaaagagaaaaccgtccataataataaattataaaaatatatgcattcttaaagttaattaatatttatatatttagtggtaataaatttaaatttaaataatttaaaattgttaaatatacatgtcatttagcaacttgtttgaaaatatgagtggaatgcggatagaaaacaattaggatttttccccgaattttgacatgtactaaatcatgcgctttgaatttttttagccgttaaaattccctgaactattgagattgttagatttaaggacttttgtctaatttcattcaattttacagtttcagtgattgtttatgtattaaatcatgccctcagattttgatatctaccaaatcacgcccctcaaactttgatacgtactaaatcttgtctcctgaactttcatccatgctagaaattttttactaaaatta

SEQ ID NO: 246075 - DNA, 745 bp, Cannabis indica
atatatttaccaagttcttgatttgttttagacactaaacttgtctaaccttcaaatggtataatctgattgtaacattgaaatctagtttactctatttatagtattataatgattgtaaaataggaaaaaaagaaaagaataaaaacccttcaaattttcctttttactttgagcaaatacaactaatttccaagtaattaacaaacatagttctattagactacaagttgattacattgaaattgcacatcccagaaaattattatgtccatctttggcacaatgcatcataaacttctaatagaccatttaaccgattattatagtttgttatactcattttactaatatgtatgcatcaatagcaggagcactaatggaagggctcaaaacattccactcaatagcataaaatttctacactatgtactaggggtgttcatccgatccaattcgcactttttttgtcaaacaacatccaatccgcactaagtgcggatttcatattttaaatccaatccaatccaatccacaatagtgcggattggatcagttatttttttcaatgataaattatttaatatttcattagaaaaaaattaaaaaaacaataatttttaattttcaataataatctatttccactttcatttatatacaaatcaaactaatatacatatatatcaatatatatatactcatctttagatttataataaaatatatatgtatccattactaa

SEQ ID NO: 246076 - DNA, 1292 bp, Cannabis indica
ctggtgtgtccaattcatgtcctagtgaaaaatcaacccatttttactaagacaatcctaaaaataaacccctaggtgcctaggttaatttctgagatgttgttttgtgtattttcagctctcggggcttggacttggatgtttcatgtcttttgttggaatcttatgccctaaataaaatctatttcaatataatcttatccactattaatagaagattagaattcatttaagtttacatgttatttttatgattatggtttaatatacaatttctaagaacatatagttattcacaattacagtgatgccatcacagtagaaagtaattttgactatattcttcaaagtttagtcccatgatttatcggtgcattagatttataatgatgtgataatcagtgataaagttacttacacttagaataagtggtatgacatttttagagcattggtaaagtatgctagtatcagatgtatggactatacatcggactggaccgatattgaacttggaaaagatatcataaacaaactgttatatctttctaagtcaacatcacttagttgatcttagatcaatacatattaattctaagatgattaggttatggcttaactgtattatttatgttctttgacttgttcgttaaagctgaccaaacggatcgacataatacttacatcttgggagcatgatagtaaagttgagtgggagcgccctccggcaacaattgcaagtttgccaccaataacgctcagctccaattgctccatcaatagaggcactattgaaaaagaaattcaataaaagaaaacataagggccaacacttattaactaaaatagactctagctagctgctcttaagaattgtttatgtattttttaattattttatattaatagtgtcatttctctttttttagagtttttacttattgagtggcagtacttttatacactatgaaaaaaattagggtacacaatagtatatattagttagttcaaaagttaaaatagtctctatactataaaaacaaaataagtatgcttatcatagaattattctatatatatatatgtatgggtgcaatcttaatgggtattacccattaagagtaaaattagaaaattttgagtttttaagcttaatttttttatctaattaaaaaaatctctcatttttatatcatatggactgagattgttccatcggtaaaaaaaaatatataaaaaaaagttttttagcaagaaaaataagaaaagaaaaatttgagtttgagttaaat

SEQ ID NO: 246077 - DNA, 638 bp, Cannabis indica
tattaaggggtaattaaccctaaatttatgtatgtgtatccatatttcttaaatataggtcaacttttttatgtttcccaaaatgtcctccttattttaaaactctccactatttcactttcatctttccctcttttggtctctttctcttttttgaattgaaattgcaccctcccgaatttcatcccgagtcttggactgccaccctagtagcccaaacacctcgcgccactatcgaacttccccaaccacctgagcaccaccaacatagttccccaaccacccaatgaaccgaaaagtggatccctacctattgtcgaatgtaagtttttttttttaaaaaaaaatatatattcattttgttataaatgttatttggaattattcggtttaattaaattggatgttatcgcccctaagtaacaccactttgtcttaatccttgcaatttaataacaggtgaaataaaaaaaaatggcaaaaccacaacgttgtaatattatatatatatatatagtactacattttttagtctaataattactctaagaaaatacactataatatattagtatataatatatattgaatgaatgaatgtggcttaattaatttgaataataaaatatcccaagacg

SEQ ID NO: 246078 - DNA, 654 bp, Cannabis indica
atttaacaaaatagagagtctaatatgtaacttttataaaacacaaagtccaaaatagtatttacccaaaaaaaaattattaatatacttaattccatgctcatttatataaactatcaaatttagggttgtatataaatcaatccaattaaatgataatcaatcaatttaattacaactgatcgtcaaatattggatatccaattgtgatcagatcggattggatattatttttaaataatcaatataaatcttgactttatatgcatatagtaagttaaaattaataactaaaacttaagctacccaatattggtggaataggctaatttttatgtacaccctaaaatacttccctcacttcaaaactctctaacttctctctaattcttccttgctctttccctctcacttgttctcactaaaaaccccactacaggatccaagatcgcgaccatcgccaccatatgatcgaaacaacgccaatccgacccactgagaggactctgaaagtactacttgttgattttaatgattcagattaccgagttgattatcattgagtagattgatttcaacatttgaagtttagacttgaattgagaataaagcagtaaagcacacaaagatttacaagcttcatctgcactgaga

SEQ ID NO: 246079 - DNA, 536 bp, Cannabis indica
aacaagtactgtgactaaaaacgcatttagtcacaacaaattgtaattattgtgactaatacttttagccacggatattttagtgacaccatagcaaatatgatgtataattagtcacatatttttttattttaaatcacaagttttgttgtgactaaaagtaagattttttgtaaggaaaatagaccgggtatgtaatggccgcataaataaattatgtgaattaacaaagaattaagggattttaattatattttatgagtacgtgtttcctattagaaagttatggcttattattagaaacaggccttaggaaaatatttttttcaattacaaagatatatttgaatcttagaggtaatatacatactacatatgaaatttcatgtttttcatgttttatgcccggtaataatagaatgtgacgatttgactattagtatcacttggatacggtaaagtatcttaaaattagcggggtaagatgagtagacatttagtatgttgtgaattactggagttatgattttggacca

SEQ ID NO: 246080 - DNA, 873 bp, Cannabis indica
ttgtgactaaaagtaagaatttttgtaatgaaaatagaccaggtatgtaatgaccgcataaataaattatgtgaattaacaaaagaattaagggattttaattatattttatgagtacgtgtttcctagtagaaagttatggcttattattagaaacaggccttaggaaaatattttttttcaattacaaagataaatttgaattctagaggtaatatacatactatatatgaaattttatgttttccatgttttatgcccggtaataatagaatgtgacgatttggctattcgtatcacttggatacggtaaagtatcttagaattagtggggtaagatgagtagacatttagtatgttgtgaatcactggagttatgattttggaccaaattaccactaggattataagcttaccacatgaggaggaaaagggtaaaattgtcattttgttataagttgataatggttatctttagtgggatttttagcttattcctaaggctttaatgctaaatattgtatttaattaaagataatttggtattatctcaaaggttagaaaattggaaacaaacccttatctttctctctcccaaggttcggcccttaggaaactcaaaagaaatcaaattttctctctttattcaaaccaaattttatagtgattgcagcaaggatacaagtattaaggaataacctaaggtaaactaaaagcgaagggcgctttggggctactgtccttgtggagtaattaagataattcttgatctaactcccttttcattcgaagcaccgtaaacataaaccttccaaagtggcaattctgagactggctcgtccagtaggtcattcatgttggaattattttacc

SEQ ID NO: 246081 - DNA, 811 bp, Cannabis indica
tgttgaataaaatggattacattgaactgaagttttatttagggcataaaacccaacaaacaagaggtgcgagtatcataacgacattgggcacaacaccaatgaatgcaaaaatctcaaaatgagatcgaaaacctaatctgattgggaaacctctacgagaggatcaagaatcggttgcctcatctcaacccaggtccggtgactggggctttgccacagggaacaccagggggtgcgacaggagtattggctccagtcgctcccaccggagatgccaagcatatccccggtctgccacccagacctaatgggagagtggccatgatctcgggaggaccccatatcggaggaacaacccgcaatgaactaaagcggtacgcggggctcgtgaagcacaacgaggtttgggaggttactcagctcccagctcaaaggccccggctgatggatcaacccatcacgttcacggaagaagatgccaagacggtgcgttttcccccaccatgactcgttggtcatagagacccccattgctaataaagtggtggccagagtcttgatcgacaacggaagttccgtgaatctacttttcaaagagaccttcactgcaataggcctgacggaccgagacctctcaccaagtggttcccaactcacagggtttaacggaaagacacttatcccaatggggaaagtgagacttcctgtcaccttgtgcccgtacagccccagagtacattcaagtactgcacttactgttgggttttatgcccaaaataaaactcatttcaatataatcagattatta

SEQ ID NO: 246082 - DNA, 1289 bp, Cannabis indica
tgggaaccaagacccacctttgataagttttttggcccaacaccaatatcctcttccttatccatcatcatacactcatcagatgccacttcatcattctcaccacaatccccaccctccatacgcctccttttagaatcaaggataattttggaaaccatatccccatcatttaattggtcaacaatcttcaaaggactctctttcccatttcgtgcaccagatacagaaacactattgatattcaaaatcttaccttttttagcaccatcagaatgaatctgattgccttggcaagtgggatctaattccactatttttgccaccattccagccccatcctccccatccaaagactgatcagccccaccctccaccgcctggttttgttccatgccggaccgtaaccactgagctccaatctggtgatgtcgtcgtctcaactgcgccttcattccaatgccataaggtttgacaatttgatctatatcctgatcaaatcttttagcacaaaaacgttcggaatgtcctataatgccacaaataaaacaaaatgttgggagatgttcatattgaaacatagcccaaatccattctccattctctttgcacagcttcatacgtcgtttaagaggtttctcaatgtccaccgtcacacgaacacgcaaatagtccctccaaacaccaataaagttcttcggatccgatttaacataagtaccaatataaccacccgcactacgtaccactttatccatcataaatcctgttttaagattgtgtatttgcacccacatatcaagcttatggagacgaatcattctaggattttcaccacttttcaatcggtgaaagatcagaggaaatcgattaaaagtccatgggcttccatctataaccatttgtatatcaatctcatgatagaattggaaaagaaataggttggcttccaactctttgatgtacactcctttccctggctgccataaggatgccatcaagtgtctcatggcgtcaaagtcaatggatctgcccgtgagaaatcttcctacaaggcaccatcgatcgtcgaagacttgttcatcaccatcagcatctccttcaataagaacaccctcttcctcatcatcaatctgaaaattctcgtactgctcggcaagatcaccaacggcattactactcgaggccataaccaataagactgatctcaataaaaaactagcacaccaaaaaacaaacttagaacatatcaagagacaaccttaaacatgtcagaggacaagactttt

SEQ ID NO: 246083 - DNA, 734 bp, Cannabis indica
atacttggaatctcttaaggtccctattcaataagttcaagggatccgtggtgtgttgtaggagatttaaacaatgtactaagccaaagtgacaaacgtggaggacaaccttatcccaattggctcatctccggattcgaacaagctattatggagtgcgacttagttgatatggaattggttgggtatccttacacttgggaaaaagggaggggaacaactcgttggattgaagtccgtttggatagagcacttgtttcttcttcgtggattcaaatctttacacaagctcgacttttaaaccttgaagtttctccttcggatcactcgccaatttatttagagttctttactccggatagtttcattcctaataggcgttttcgttttgaaaatgcttggttaaaggagccaatgtgtttggagattgtgaaggattgttggaatgcctctagtgttgtttcggtagcagagaagatttcttgctgtgcggataagttggccatttggggaaaaaatgtaactggtaactttaaactccgaatcaagaactgtcgtgatgaactgaagagcttgaagaacaagagagatcaactctcggtacagaggtataatgagaaaaaaaaggagttgtttttggtgttggatcaaaaggaagctttttggaaacagagggcgaagcaattctggttgaaggaaggcgatcagaacagtaaatacttccatagagcggc

SEQ ID NO: 246084 - DNA, 525 bp, Cannabis indica
tttaaaacattatatgggtagcaagagttctagatctataaagattgatgaaagatgtatggagatgggtcctcgacttagtatggagcttcaattgaacttaataaagaagttttctaaggaggatgtccggagagcaatctttagtattgctagcactaaaagtccgggtgcaaatgggtataattttgagttcttcaaagccatgtggaagttaattggggatgagatagcggaggttgtgcatgattttttttgacacatggaggatgcctgaagagttaaacgaggttgttattgcccttattccaaaagttgagttgcctagtaaagcagtggattataggtcgattgcctgctgcactactctatacaaatgtatctctaaaatgatctgcagtagattatctgaggtactatctctgttgattggacaaaaccagggagcttttgttaaaggtagatctctggctcataatatacttatttttcaggatctaaaaaagaattatagtaggaaaaatg

SEQ ID NO: 246085 - DNA, 801 bp, Cannabis indica
aaaagaaaaatggtgagagagaactcccatcttcagcgggccaatgggccatatctgaatttgagcccattgatccttccatgggccttaaacccaattttagcccaaaaactcctctcttcccttttccaccgcactaccagagtcgacacgcccgagtcaagcgagttcccgacgaaagccatcacttttcctcatttcgttttcaatctctctctctctctagaactggaaattgttcagaattcactctatctctagaaccaaatcaattcattcagatccccaaaatccctaaaaatcaaaaatttcgaaaccctagaaaaaccaattcatatcagattcagatcccaaacctttgatctgaatttgaaagctctcaatgtcgtgcttagccctctctcttcaacccgccaatggctccgacatccttctccagacccgagagtggtttcctccggcacgagccctagtcgcactctccgcctttcgccagactcgtctcgctttcggctccagcaagaacaacagcagcaacaaccagtctcagttcaccgattccgatccctccgttgattccattggcgacgatccactcgcagcttccaatggccagctcatcgtcggagtcgagagtcggtaccgagtcgtgtacagactcgtcaacagcatctatgttctcggaatcactacggccgatcacgacaacgcaatcaacgtcttcgaatgcatccacgtggtgaaccaagccgtgagcgtgatcgtcaccgcctgccgaggcgtcgacgtaacgcctgagaa

SEQ ID NO: 246086 - DNA, 1506 bp, Cannabis indica
aatatcatcaaagaaaactatgacaaagcggcgtaaataaggctgaaaaacctggttcattgctgcctgaaaagttgccggagcattagtgagcccaaagggcatcacaagaaactcataatgcccttcgtgtgttcgaaaagcggtcttgtggacatcccgaccatccatccgaatttgatggtaccccgctcgtaaatccagttttgaaaaaaccttagcggcccccagctcatccaataattcgtcaatggtgggaataggaaagcgatctttaaccgtaatgccattgagagcacggtaatccacgcaaaagcgccaagagccatctttcttcttgacgagaagaaccggtgaggaataaggacttgtactatggcgaataaaaccggcatccttcatttcaagaaccaacttctcaataatatccttctggaaataaggataacgatacggccgtacgttaaccgggcttgaacctggctgtaaaaaaatacgatgatcaactgtgcggaatggtggcaactgtgtcggagtagcaaataccgaagagaactgcccaatcaacttgctagcagcggcactccaaggcggagagagatcgggcaaggccaactcgttaaccaacgttgtagacggtaaaggagatttctctcgagcgggcgaaacatgagtcatacacccgagccaactgacttgaccctcatgcaacagtgaagtgagttgggtaaaagaaatctgtgtcgcagaccaagtgggatttccatcgagtttcactgtttgtcccttccattgaaattccatcgtcaaggcacggtggtcatgaatacatggccccagcgtttgcaaccattgcataccgaggacaacatcaagtccccaaatcggaaggacgtagagatcaacgctgaacgagtgtccctgcaaaataagttccactgcacggcatatcttagaacaagtcaaaaattgcccgttacccatgtaaaccttgaaggtgcgagtggtttcgtaaggcagctgtaaggaatcagcgagggactcttggatgaaattgttgttactgccagtatcgattaacacctcgagagacttggagccatgctgagcacgcaagcgaaagatgtgcgggttcgctgaattagacagtgcgtggaggctaacttcctcatccagttcgtcatccgcggtaggtaaatcagcaacatgggtttcgtcctcaccttcatgaccacacaacaacaagacccgattcttacacttatgcccaggatgaaatttctcatcacaggaaaagcacagtcccttatcacggcgatctttcagttccagcggagagagacgcttgacaggtaggtgttgatacgaactaggaggttgaaccgaaggagccccactaggatgagaaagtgcgctcggagtagcagaccgagaacttcccacagaatcgaccccagaaaaacgacgacccaccgagcccaatggcaccgaagcagaacgaaaacg

SEQ ID NO: 246087 - DNA, 800 bp, Cannabis indica
ttgttttcagttttctaagttggagtcagctattgtttgtatacaagaagactagaagaagattttattgagtattagaaatttgaaagatgactttagtattaaatttgatgaagtgattgagttgttgaagagtaagagtgggtcgtctgtgcccaaagatgtcaaggataaggttgaggattcttgttctaagaatctcattttggtggcaatgatgatgagttacccgatccattgtcaccggaggtattttttctttatcttgttgctgttctttttttattctttctcttttcagaaactggttatgactatgctttttgttatttttttgtaggtagtttcaaaatctaatcttcctgattatgatgatgagtgtggtgggttgcaattgtcagttgttcagtaagataaggttgtttgtttgttcttgttattagttatgtctttattgtaacttgttatttttagctttgatgtttttttagttcatgtttttttcaaggttcattcttgtttaggtgaggggaaggatgaggcctttgtgttttcttatgaacacattcaagtcgaccaatccattttgggtttggttgacagcctcacttaggcatatgcctcgccaattaatgtaacaaatgattaatgggatttggtatcaattcctgattttgcatcccctagggttgctgtaaggagacaagcaaaacctggattgcattgaagatctccttttgtcaatgagtttggttgttctgaaccaaaagttcaaaagaagaatgtgttgggttttatgc

SEQ ID NO: 246088 - DNA, 562 bp, Cannabis indica
ttaaaaaaaaatattattttaacgttgttgttacaagtaagtaccatgatttatttttataactatacaaaatattatttttccattatttcaaatgacatagccgctacaggaaagtaacattttttattgaaaaaataagtgaaaacttttaaacaaaaatctaaaaaatttaaataaaaaagagaggttcctaaaaatataaaataaatctgtaaaattgtaaaaaaatatatatatatatatatatattttagtgtattatgtaaatttttttaaaatttataattttatacggtcaatatatatatttatattatatttttaccaaaaaaaatatttgtacagttttctatttggttttagttacaattttatggagccttacaataataacatgaaaacaataagaaaataacataaagacaacatgtaaataatataaaaacaataagaaaacacaacaacatacttagagatgaaatttcaatccgtgaggatgggtacttgttgatactcgccctgaatgtggcacgaaatacccgctttgatgggttatgga

SEQ ID NO: 246089 - DNA, 1194 bp, Cannabis indica
cgatatgaactcgttaacaaaataacaagaactgcaaatggtattttaagttcttaatagaagaatacttaaagtcaatatcttacaaccttcagtctctaggaaaatcactgtttcattcagattttgctccaaaaaaaagttcccttacaatgaattcaagggctctatttatagtgaaccctttacactttacaacctcacagatctccaaaatcataggaggtcaagtcactttcacacctaataatatagtatctcaggttgtatggtgtttcaaacaccctaagttacactaaaattgcctcttttacttgtaccttagatgaaatgaaccatatctcctatactaatatttgttatgtagtcactatctcgtctgtgattcttgagttaaacatctttagccttgatatcttctccttgcttctatttgtatgagtggaccagatacatgggaaccggaggctgcgggtggctatgtggagctccccttagtgagaagaggagctagtgtggggagatccccttggtgcgtggagctccacttggtaagaggaggagctggtgcgtggagctccctttagtgggaggaggagctgatgcgtggagctcccctttgtgagagaaggatctggtgcgtggagctccccttggcatgcgaggagcaccccatgggtggagctcaccttggtgtgtggaggagctccccttgatgtgtggatctccccttggaaaactttcgggcataacactaatgatttcaaatatacacttagtaatttttgggggtcaacacttgcaccctagtctataagaattctttcaagtgttcttgtagactaagtttgctgagcttcatctttacgacttaatttttcttctcttctcctctttgttgccctttgcgaggagcataggctttatgatttatctcggccctttttgaggtttgtgtccttcgcaatgagggagtgttagctcgctgagctttctcaacctcttaagggttactcactgtgtataagggagcttatggctcataaggccacactcaaccttttcataaatttaagaccatcttggggtaaattgtggccatttaggcagcgctcaaccccttacattgtatctatagtacttagagcacattttgggtgctataaaatcagtactccttttagagaggcgtcc

SEQ ID NO: 246090 - DNA, 506 bp, Cannabis indica
atgaagatgacaatgagagcaacactaaaattgataattcagaagaaatttataatgatgatgattattatagtgatgaataagtggtaatctattacatatatattgttaattagtactttattatattatgatattaaaattattataatgtttctaatatttatatttctcagatatgacagatattgctcgttctcacgggggtgatggaggaagtgatcctcctcttggtccgacaaatattggagctgactgtgtgcgaggttatataatttaaaacatttaagttatgttattaatatttatgggaatatactaacttatgaatatttaaacatgacaacagctcctccaaagaaacgtggacaccataagggattaagcacacgagaaaagcgagaaaacctcaaacgtccactgcctattgaatgggacatcaaaggaaagacatacaaggagatgggtccgtattgttcagacttttcaagggagttaggattgct

SEQ ID NO: 246091 - DNA, 702 bp, Cannabis indica
agtttgctattttgtcaagcaaccgaagactcatgccaagcactcaacatggccttagatctttatcatagagcgtcaggacaacttctcaacactgaaaaccgtcatgtctttctcaccaaatgttacttcagtcatccaagatcgatccaatagtgtactgggtatgcctatttgtgctctgcatgaaaaatatcttagtcttccctcgtatgctggaaaagacaagaaggaactttttagtagaatcaaagatcgtatttggaagcttatgaatcaatggcatgcgaaacttttttcaattggtggtagggaagtacttttaaaagtagtggttcaatcaattccaacatatgccatgagctgtttcagccttccaaagaaatattgtaaccaactggaatctatgatggctaatttttggtggggatctaatacgaacaactctaagatccattggaagaaatggaaattcatgtgttcttcgaaagctgatggcagtatgggatttcgttctttcatccactttaatcaggctcttttggcgaagcaagcatggaggatattggagaatccttcttctttactggcaagagttctcaaagcctgctacttcaagaatggtgacttcctttcggctcaaaaaggcattttacctgccctcacttggcaaaggatctgtgatggtaaagatctattgat

SEQ ID NO: 246092 - DNA, 621 bp, Cannabis indica
tttttttaaaaaaaaaagaaattaaataaaatagtaataatttaactttacaattaaaaaaaaagttgcaaaccttaaggttatacatagtttccattacaatattacaaaacataaaacataaaatatatgtaaaatggtcaagtgatcatcctacaataaaataatatgttttgacaaaaaaaaagtatatattaatatatgtaatattatatttgcaatgaggaacagtttttttttataagatgtagcatttgtgaacaaacttaataaaatcaagattacacatgctataatgacatgtaatataatatttatattaacatattagattaatattaatcaactgccttcaagttgatcaatataatataaaaccattccaaaaaagaaaaaagaaaaaaaaaaaaggagaccaaactcatcccaagaaaaaacaacaacaagaagaagtaaacaaataattttcctacaccaagaaaattcctttaatcctataccaatgtaagaattttagttaattataatttataatcatggataaccccactccaccattccaaaatcttccttggagtgagtgtttatatattctttcattggggttggaattgatgcttc

SEQ ID NO: 246093 - DNA, 1064 bp, Cannabis indica
agtaattaagtacgaatgaaacataatacatagatacgggaaaataaatcatattaaaactataaagcaatgtcaaacaatatccatctaaaccctaattaagtgtttatctacgcatgttcattgtagcaaaatcacacatattaacttaatgaaagagaagaagatagagaagaaaataatgctggccagttttgacttcggtctctgaaattcgtactccgtttttcttctgaattgcttaactgaaatcaactgcagttcactctttatatatgcattgagggactaaaagatattaaaatgcatatgtttaaattcttattcggatttgaattgggaaaccacaagacccacgtgagaaaaatgacattttgctactagagaaggggcgggccgcgacgccactttgtttgggccacgacccgtatggctggtggttgttgggattttggttcttttacataggcgtgccgcgacgcccattgtgttgggtcgcggcccgtgtgctccaggtgcctccgttttccacgcgaaatatctttttctaggcaggattccgatttttctctacattgatgtttttatgcgaacttttatctttttctgttgatatttttcaaatctttatctattttaaatctacaaaagaaaaagataacaagcgtaaaaatgctccaaacacgagtaaaattaaattaaaaatatactaaacttaatctataattaatactaaaaataacctaacaaatttccccaaaatagacttttactcgtccttgagtaaaacattaaataagtcaatatccaaatcatgagtaattttcaagtagcttcaataacatgattatgaaaaatttcacttatacatataatctagaatttcagatcaattacacccttgaaaaaacttcaactttttttcattcagctcaagaaaccatagaatgtaattaattaataattagaccactttgtgcatgccaattacaatcatcaatccactaacccaaaatttcatatgcttgcaatactttctattctccactaatatagattaatcc

SEQ ID NO: 246094 - DNA, 754 bp, Cannabis indica
tggaattaaaaaaaattagtgttgaaatagtagttttttggtgttgatttaacaccaactttaagttttaccattggagatggcctaagcaactctaaaagttaccactataatcccacatactattatttaatatattatttattttaattataaaaaactatcacaataattctttaacttttatttattttttatttttatttttaaaaaataagcataaacattacgaataaccttcgcctactctccatcagtggatcgctcaactgatggttgatccctggccttttctatttgttctatcgaaatgaaagaatagtatagttggtgtattttaagatagtctgtattttctaatatcaatcagttaatatttggttattttgagctaccctaaatttgactattttgctctaagcaagtggcttatcgtgagactttagctcgatgccttttaacagaagtgaagttagtcacaggtcacactaaagtatcttaacttaagtagcctctaatgagtttttttattctctccgtctgaactttcaaagatataccaaccataggtatcttactattagatacagacagtcgtcttgatagctcactcttagttaaccgttttgttggggcttccactgaaagagggtagatgattatgtctttatttatacacctaaaaactgtcgtattctatctttttattttttttccttcgtccacctaggtttgcaaaacttatgttgcaagt

SEQ ID NO: 246095 - DNA, 1272 bp, Cannabis indica
tcagcaatgcattcttcatgcctgaccaccagaacatggctttcaggtcttgatacatctttgttgaccctagatgaactgaataaggagtcgtatgagactcatccatgatctctttcttgatgttctcatccatgggcacacaaactcaattcccaaaactgaacattcccgttccatccactgagaaatcactagccttcccagctgaaaccctagctcgtgtttttatcaattctgaatcttgcttttgtgcttctttaattctctctagaagagtggattgcagagtaatatcatccaacatgcatcaatacccataatttaccctaaaattcaaattgtttaatcatctcataatcatgcttcaattcacaactcatcaagctcataaacatgaacctcaacctattccaacctataatttccagctgcaaactcaaccaataaacacataatttctgacctagaaaatacttaatacacttaaccaataatcaacaataacctcacaacaatatcttgaaattcacaataaaaaacaacaaggtcaagcaccaattcctcttatcatgcaaatccaagaacaacaccacttttcatgtttttcaacaactaaaaaccatctagattctcaattaaattcaatgaaggagagttacctcaagccttaagcaagaattaagcaaaagcacaccaaagtccaagttcaacttcaagcaattcctccaaatcaagaaattgaaccaaagagggtttaagtgagagagaggggttcgggtgagatagggaaaaaccagaatattacatttcatttcttcaaaattcatttcctttactaattatcaaataaaggtcaaaatgaccattttgcccctagggcttaaatacacacactcacccacacaagggtaattttgccatttcatgcataaataactcacaaataatttcagattatcacatatcaaataaaatgccaagtaaatcaatcccatttgcatttcaggcccgaacccggttcggcccaaaattcccagttgtgactataccgcgccaactttttagaaaatacctgaaaagacaacacatgcatactatataataatatagttctattaagcacgtaattaaattaatttcatccttttacccttctcaggtcataattaccaaaatgcccctggctcaccaacggggtcttaacatattaaaattcatattaattcacatataatgaactatataataatataattcctcaattattca

SEQ ID NO: 246096 - DNA, 2029 bp, Cannabis indica
tcaaacacaagacactttactcatcattgttacaattttaaacaagtaccgaccagtacacatgtcccaaaagcaaatgatcactgaagaactcacaaagtttttacccaaattgtgggtcaccaactatgaaaagtttcataagccacatcttgtggttcaaaccacaactgagccttcctaccacacaaaataagatggatctgttgaaattgtttttgatagaagccaaacaaaaccacctagttgttttcacacccaatttgtcatcacacccatccaaccaacaaatgcagaaatcttgtactttgattctcagggaaagccaatttatgcttttgaatcctcagacgggcataaatattaaaatgtttgtaactgcaaaagttgtctgaaaaatgatgtgccctcacgacgtcccactccaagaaagcaactcaagcaaaagctagaaaagggtaacaaaaacatcggtctattaggccaaccatccaaaaaaaattcaactatatagtcaaatactatgcaccaaagagctacaatcagcctataccagaacctactagatgtgattcagatgattcttcaaaagcttcacacacagattgtcttgccttgttacaaaagacaagcgaaatggatgaagaagcatggagaaaaatttccagcaccagctgtttaaccatcagttcaattacttcctgacgcaaacatgatcacccccagtccttccattgattatgatgtacatttccctcctctcaagaggttcgaaaatattaaagagcacggtgccacttcccaccatccaaaaaatacaaaatctcacaactaggaatgctaagggaactctacaaaaggtcttggcagtcgaagaagaattgaattggcaaatagaaaatatgattgcccaaaatcatgtcttaaaatgggtaaaaaaacaaatcacccgcacagagacatggtcaaacaacaatcacaagttacgatcattgaaaagttgacaaacaagattaaccagactcatgacgaactcatggccatcataaaattaaattctgttccaatgtcattattcttggcaaaagaagctgaaatgaaagctcttaaaaccccagtatgaatctctaaaaaaacaattttttcaaagagaatcatattctacagggtctcaatcaacgcttttttgaaggaaatacaaccctttttggagcaaatacaccatcagtaccatggcagttcctaacaatgccaaagacttctccgacatcacctttctcggtctcttcacaagaagactcacttctttgacttaaatgaatgcttgacaaatataaacaacaacaaaaaaccaaaaagggaaagagaaaataaagcctagataattctcctccacgagcatcctccctatcggaaaaagagccaaagcaattcatggcccaacgaattgtgaataatcctatttctaccgtgatccatcaaacatatgaagaatttgacaatcagtcttcttcctctgaccaagaagacacttctaaaacttagtctcaagattcagattctagtaacaagtttcaagattcagatactagtgacaagtctcaagattcagatactagtgaagatgacgtacccccacattttatggctcaatctgtagaagaagcatactctcaaactgagcctattgtcaaaagtgaggatgaaagtgaagaagaagaagcagctacaataaaaccagaatccaatcatcatcaaaagagtaaatattctaagtttcaaacttttactcttgatgacattcccccatctaaatggcgagaaagattacaagaattccaagcttggcttagcatggaagcacaaaaattatagtcacagacgaggacgatcctcttgagttttgtctgaagattcactagaattttacaagattggtggacaagcttagatgaataaagacagatgactttcttgcaactcccatctgtcgcaaatgccctaagccatctctatgtcgagttttgtg

SEQ ID NO: 246097 - DNA, 747 bp, Cannabis indica
ttgttgtaggtgtatccatattgattgtccagtaagtctagttcttttggaatagggatgcttagttctttgaagaactgagcaattagtaagtttgccttggttgtcaaggcacagttgggtagttgatcgagtgcgtcggctgttgtgtcgcctttgggggcttaccttttagtaaatcctttgagctgacttaacaactcaggtaggccatcttcttcttgtattgagttgtatattcacctaggacatagcctacgactagttgagagtcgtgatgcatgtctagttggttagctagcactttgtgtgctagcctaaggctagcattcggagcttcatgttcagcatcattgtcagaagttttgaaactgatcttgttacctcgtgcatcattttcccacagatgccctgggggtcatgcttgcatcgggcaggtggttaatgtacctcttgggttcttgctctcgcttcttctctggctcctttttttctcccaaactttgagagatatccttctatgattagccatgaagatgatgagagcttggcctttgctagccatgcttggttgagaggtggccttatattggcctgatgcttcaggtctctgtagaacctaccgcaactattgatcagtgtacacctttatagggtgtatttggaagtatgtccttagctttctagaagccaagagcaagctatgggtcagcttctccatgagtgggtatcgactttcagtgtcga

SEQ ID NO: 246098 - DNA, 866 bp, Cannabis indica
ttcagatgtgcattcagattcatggtctggatcttaataaaaacaaatgcacagtgtttaattaaacctaattattatacatatataggaaagaaaaatgtaggaatggacttaggagcaaacttagatctaaattgacttagagtggaagcatatgctagacatccaaaaaaacttgtaagtgctcataggtttggtgtaggtattctattaatgagataggctgcatagcaacacaatctccccaatacaccagtggtatatgtgattgaaatagcaaagctctcgcaacattgagtagatgttggtgttttctctcaacaacataattttgttgaagtctttggacacaaaagtggtaatggataatcccaaggtcactaaacagttctttaaatggtaattccttggcattatcagacctgacaactttagtggttttgaacaagttttatgaattgaggaatagcattttgtgcatcagatttttgtttgatcagattgatctaattgtacctggaacaatcatcaacaatggtgataaaatacttgtatccctcagttgtcatggcgttgtattgtccccaaatgtcaacatgaataagatcaaaacaacttttaacaatattgtgattagatgtgaatgacaattttctttgcttagcataatgacaaatggaacaatgaaataaagaatttgaattggcatgaaacttcaaatctttatttaaaggatgagtctttacacaagagggatgacccaatctataatgccatacaatatcatttcactacaagaaatgtcacttttaccaacacattctggtactgcgctggtaaaagtcacttttacccgcgcatttcgc

SEQ ID NO: 246099 - DNA, 929 bp, Cannabis indica
aggtggcatactataaataggtagtgatggcttccggaaaaaaaggatgcatcttattctttcagagaaaacatgagtgccttctaccttaaacctagccgccactcttcctctctcttcttcactattgaaactgaaacccttgagtgatagagtgagtgcccacacacatcaagtggtacctcaatcatagtgtggaagatcgtgaagaatccagattcaatagaaggacattcgggctcagatcttagtgatactctgcgacagaaaggatacaagggttagagatctgagtggaaggagacatcatatttcgctgcaaccactgtaaggtttctcatactttatatgtgtttatttaatatcgttttagaatttcatatttaggatgttaaacaacatacttgttagtaaatctaagaccctggtaaaatatttccaacatagagaaccttgctttttatactaccattaaaagtgcttggaataggatttcccatgaggggtctaatttaggtgtttacactaggttcatttctgctcagcttgcatttcttctcttaagtcctggggtaagtctactagacatatctttaagtctaggattcttactcttcaacaggaagttgacagactttaatccactctttctcgagataacaatgttatctcacaagtcaaatatctttagtcccaactagatgccctcttgtatacagaggaagtttattggagacaaagggctagggttcactggttaaaggatggggatagaaacactattttttttttcatcgttttgcctcacaaaggaaacgaaataagactattaaattcctttgggatgatcatggtagtgtctttagcagggccgaccctgagggtaggcaggctaggcgtgcgccttgaggccccgaacgcttagggcc

SEQ ID NO: 246100 - DNA, 701 bp, Cannabis indica
ggtttcatagtcagttctcgaggaattgaggtgaacctagagaaaatcaaagctcttctagacatgcctttgcccagattacatagagatgtttaaaagttaacgggaagaataaaaacacttagcaaatttgtctccaaatccatagataagtgcatatcgttcttcaacgtactacgaggaaataacaaatttgagtggatagtagaatgtgaagcaaccttccagcaactaaaagaacatctagtgaaggctccaataccgtccaaaccaattgatggagagacatttttcttgtacctggcagtgtcagatcattccataagcgctgccttagagtgagaagaaggaaaggcacaacttctagtatattatgtaagcaaaacactactcggtgtatactctagatattctatgatcgataagctttccttttgcttactgacaaggaccgggagcggggggaaacacccaaaatgatgatttgcaaagtgaaacttatcacttcaaacgcctagatccaccaaactctagcaattggtgcagtcaacctcttttcagcacacaaacaatgtcagtcaatcgaggagctatgggtggcaagaccctgccttctacaggtctcgccagccagggaagcattgcgcacaccagccttgccctttgcaagtcttactgcccatggaggaatcacggggcag

SEQ ID NO: 246101 - DNA, 753 bp, Cannabis indica
tatcttcctccaagaatataatcgaaggttcttctattttggcttttttagtggttctagagcaaacaccgattgctcattttttatttcattgacatatcttttttgggcattattactttctctagcgagatgtggccctcccgagataaccaatatattgtcgcccttaacagggggaggttgcaatctttggttatctgggttgttggactagtttggctcgttcccttgacgcctcacatactgtctgaaatatccatgtgagattaggctctctatctcgtccttcagttttcaacattctttgattgtatgccctatgtctttgtgaaatcaaattttttttgttgaatctcgtttatgtctcgcatgtctcattggttcaggcttgcaaaaggcaacattgtgttcatttgggagaatgatgttttcatgagtttcattcaactcggtgtacacaatgtaaatcgaaacatatttgtcatgctttttctatttcttcttattttgagatgaatctctcgagtcatcttttcttttagtgtttgaaccacttggattgtcagcttttgtcgagatggtacttgttgtggtagtacttgtgctgggtttgtttcccgagccagtcttcagcaacttcatctcattcattgcttcttctttacacacgaagacttgtgctctttcattgaattcattaatgtttcttatggggcgaccatgtaatctacaagaattaatagcatcacc

SEQ ID NO: 246102 - DNA, 538 bp, Cannabis indica
gtgtcttcactactttgatctatcattcaaatgactattgttaatgaaactgattgcaagtaataataataatgttatgatattgaaaaataatgtataaagttttgatgattgttcaaaaaatatagcatgtgctcaagcatgctatatttacactcaaagagttacaagaaagtaattgtactaatagcctcatagcgaatgaataattttctgcaagattgaaatttttgaatttcaagcagatctctaaatcagacaaagcagccactctgccttctccactgatatccaagtttgtataagttttacaagagcatgtggtcaaacatttagccttgcattcctcaagattcataatcttactcatccaagtatattgagtattaaggcaatttcaagctagaaaatttaatgaatccatctttcttccttgcatcatctcaacagctcaaagaactctatctcacacaccatttttacaaacaccttgcattctaattttctttaatctttggctcaaagcctaataaacaat

SEQ ID NO: 246103 - DNA, 1537 bp, Cannabis indica
agaggcatcaacaaaaccttgggcttgttccatgtacacgtcttcttgtaactcgccattaagaaacgcattattcacatcaagctgtctaatgtcccagtttttagcaacagcaatggtaagaatgattcttaccgtcgatgccttcacaatagggctgtaggtctcaccaaagtcaatacagggcctttgattgaacccttttgcgactaatctcgccttgtacctttgaaatgtactatcagcattcaatttaactttatacacccacttattaccaataatattcattccttcagactttggaaccaatatccaagttccattcctcttgagtgcaatcatctcggttgacatagctttattccaacctttatgtctaagagcttcttcaacactagtaggttcttcataatcactgttccactgagagtgtcccatataaactttaggcttaaaaatccctgccttagctctagtaatcatcgggtgagaaggagctataggcacgatttcttgagaaggatcaagagaaccagcattgacatgaccaggtgagtgtccagagtaaacaacatcactcagattaccagtagaaacacctggactatgtgcatctgcaggtaactcatcaaaaaaaccagatgaagtagcaggagaactaacccgagttacctggttttcatcattaagatttgtctgaactgtaacgtcttctccagggacttgagacattgtatcagatgagttgcccttctctgaactgctggacacagactggtttagagactgaaacagaacagaccaagaaggcacactaacacacacagactgttcaggtctgtaattatttagaaagccggttttgaatggaaaatcctcctcattgaatataacattcctggatatatagattcttcccgtggaactaaggcatttgtaccctttatgagcatcactatatcctagatttacgcacttgacagaatggaattggaatttatgtgtttgatagggacgaatgcacggataacatgcgactccaaagactttaagaaacttgtaatctggtttcttaccatggacaatctcataaggggattgatttttcaaaactggtgtgggtaatctatttattagatacacagcagtttgaaaagagtcccaccagaatttcaagggcatgtgagcttgtgccaagagtgtcaaccccatctcgacatatgtcgatgttttctctcggctcgcccattttgagctgaggtatgtggacatgaatgttgaaaatctattccattttgaacaacacactcagcaaatgactgaaattcaccccccaatcggttttgagtgatttaatttttctctcaaactggttttcaaccagcgttttgaattgaataaaggctgagagagcctcgtttttggttttgaggggatatatccaggtgtaccgtgtgtggtcatcaacaaagtgtatgtagaacttaaagtttgtgttggaaacaataggtgcaggaccccacaggtctgtatg

SEQ ID NO: 246104 - DNA, 558 bp, Cannabis indica
aaaaaaataaaattatcaaaaataaactcagattcatatttttactattttgtaaaatataagtacattttatcattttaatagaataaaaattagtaagttttacaaaaggtgcagaatgatatttagagtaatcaaaattataagtagactctcctatattaaaaaaaattaacttaaaataattttaaaaaatcattcattttttcaaattattttttattaatgctaataattttctattattattattatttgaaggagcatgtagtttttctaatttttctgacaaaaccataattgtatttactcataccaaaaaccttaaaattaaaaataaataaaacagtaatatatagtttctttataaaaatagaaggggaatttgtcaaaaatcgaaataatataaattaaattatttaagagggatgacttacccgaatatattgatcaacaattttataaacgacatcatggctattgaaacgacgatgcatggcctctgcgactatatgaaagttgtcagggtgaaccgttagtataacgtcttcaaacaag

SEQ ID NO: 246105 - DNA, 1751 bp, Cannabis indica
ctcattcatctcattctttggagcagattcacactgaaaggagatgttgagctctagttcaaattgggaaacaaggctgtcgttttggaattgaaaagttttccctaataaccggtttggattgtaagaaatcctatgatgttgatcagttcaaatcaaagaagttacttggttacaaggaggatagtttttgtatgcatgggcttactgagatggttactgtgagggaagttgctagtgttttctttagcggtgcattgaaagatgatgaagattatgtgaagatagctcttgtatacttgtttgctgggtatttgtatggttatccccaaggcaaaaagattgacaactttatatttgctatggttaatggggatgattttattgaagtgtttaatcggtttggatggggaaagttattgtgggaaaagactttttatcaccaaaagattgcattgaaggatggaaacgatacctttgaacagcttgctaaaaaaaggatgattgagaagggttacaagcttaaaagatttcctatgacatttcttatttggctgtacgagatcattccgtctttatcacctcgtttttgcaaaagaatcggcaacaagagtcctcgtgttctgaattgggagaatagccctacatcggaatttaacaagttgatttaggatgtgtttaacaatcctaaggtaattttttaattcaaatttcattgttttgattattgtttgttttatttttttttggttttttgtttttaaattgtttagtttttttatctttctagattgttataaaggattttgttgctttgagtggtgaaaagtctcaaagtcttttttctaaatttaagtttgatccccaatacattcctaagagggttggtgatgctgtgtgttctgatgaagttaatgatgaggtcaaggtattaaaacccgatttcttaatttattttgtttgtatattttggtaattatatgtatatcattacttactttcatgtttttttttttgtcaattattcaggtttctcatgaaaagttggaccagatttttgttgaactgaattctatcaaagagtgccagcaaaaaattaaggatcgtatttctagtttgaggattgagtttttgggtgagtttgctaaattaggagaaattctcaatggattgaagaagaagagtgatggcagttctaaggattctgaatttttttcatcccctataagagaggtaattagtttctttgtttagtgttatttgattataggtttgttggttttggtgttattatagttttttatcaatttgttgaaactagtttctgtattggatgtgtgattgtttgatttttgatagttagttgaaattggtttctgtattgggttgggttgagatacgttttttttcaatttcttgaaactggtttctggtttgggttttaggtatttgttgctgtgttattttctgtaggaaaccaatttctatatttatgtttaaaaactggttttcaattaatttattgttcaggaatactatcaggatatatgggatgatggtggtgggttacagttgtccgttcatactggtcaagctgaggtacaagatttttacatttatttttcgcttgttcgaattttattgtttgttctaactattttccttcaattttttaggtaggaaaggacacttcgaattttgaaaatatgttattgatccgattttcttaagggtgtggttgatagcactgt

SEQ ID NO: 246106 - DNA, 791 bp, Cannabis indica
taaataattcaactccatcaatgtgaaatgtaatatactatcatagtttctttttttcagtactttttttgtacataaatcatccacaaaaatgaactggtagacaatgctttacattagcattgcatttacagttaatagtaaaaaataaaaacaaaacaaaacatcggaacaagacattactaaactaactggacattttttatgagtcttgaaagggaatctagatcagatagatgttttagatcacgtgtaatatagttagttaggattgttttctgggttgttaatcttgattagctggctaacaaactctgttaacagttggttatgtcaccaactgattttccttgtttcaaccgagctatttaagctcttctcattgtcgtaaaccagtacagaaaataataaagacatttactctggtttcctctgtctttttctctcttatttctcatatgatatcagacggcatattgcccaacgcttccatggccaggccttcaacccgatcccaggatggtgctcctccatcgtcgatcgacaaccaagctgcagaggtcacgtccgatcctgtaccagctccaaatcctcaagctaattccacccgtaatccacaacttagggttccatctcagattgcagagccttttccccaaactcattccaccattgcagatgacaacaccaaccaatgcctcacctctcgatctattgccgatgatcactcaagccctttctaccttagcaatggcgatcatcctggcctggtgctcgtttccacagttctc

SEQ ID NO: 246107 - DNA, 1698 bp, Cannabis indica
agctaagtaccaatggcggtgtctctgtacggtgtggagaaaagcagtgggatcgaatgattagagttggcaataggtgggtttccagggccagttgatgagatcccgaccgttagatttattgtcagagatgcaatttcagtccttgaaaatctctttacgcgtatggtcgtaccttggggatgtcccaaccgggtcacgaatctaattttgatccgagtagtcacaggattcaggtgaagctgggttggataagccatttgttttggagaattaaattgatcgatgatgagaatgcaaaggaattgaaatagtgtttcttatggaagagagaaggagaaagatgaagacaaagcagataataaaaacaaaggggagtagaggaaccttcttatggtagagattgaatattataatatctgccatagacatcgtcacagcgtcaaaagtaagaactaagaaaattttctaaaacatgcaacaattagcagatttattgaataaatttcaaaattcaaagcattttttggaaagaaaagaaaaatgtgcaatagtatagaatatcttaggatgcttacttcttccactgtaattctaaaaaactaaggactttctcttcctctaattcccattatatcactctagaattgctactaatattatcaagtataaaacttttcaattcaataagatacccatacaattttcagtagcaaaatattatcaaatttaacatcacaatatagctaatataagatctttttggttcaaccacacccatttttatattaaaatgtcagaattttcgggctcagttcaccaaatataagaaaaattttagttttaaatacatgacataaattaaaaagacaaaagaggcatagaaaataccatatcttgcccataattgaggttcaactcctttgcattccaagatcaagaatggaagcctccgcttcaatgctttcaaatcttggtagtttttctctacaaatgttctgccaaataaaagagcacaaatcatttttgtaagtcattaacaaaagtctttattttgagttaattatgtgttattatttgttaatcttatttttttaataaaaataatcagtttcattatcttatatttttgagttatttgtgtgatataatttgttatggaaccggttctgtatatatttatgctttagtatttttggaattgatccccaacgtttcttaagaaaaacattataagcaattttatgaggtattatatttattttgttcatttgttgtggaactcttttttttttaaattatattttagtttcttctttttcttttaattataaccagtttgaattattctgtgttatttatttttattcattatgttatagaaccggttctattttaattataaccggtttgagttatttggtgttatttgttttcatttattataagactgttataaaaccagttctattttaattataaccggtttaagttattcattgctatttgtttttatttattataagattgttatagaacccgttctattttaattataattggtttgagttattttgtgttatttgtttttattgtttatgctataaaaccggttctatttgaattataaccggtttgagttatttagtgttattttttttatttattataagattgttatagaaccagttctatttt

SEQ ID NO: 246108 - DNA, 875 bp, Cannabis indica
gttttattaattgcttctactttcccgtttgcctgaggccgtgacactgacgagaagcttttgataatcttgttcctctcgtagaactcagtgaataattcaccatcgaactgagttccattatcagatactatcttaatggctattccaaacctacaaattatgttcttgactacaaagtcaagaacctttctccatgttatagaaaccagaggtccagcctctatccactttgtaaagaagtcgacagccaccactgcatactttgctcctctttgccctgtggggaatgccccaatcaaatcgatcccccatattgcaaatgggtaaggcaaggtcatcattcttagttccattggtgtacgcgaggtatatgtgagaatctctgacatttatcacatttcttgacaaattcgtgggtgtccttatttatagttggccagtaatatccttgtcgaatattcttttttgacaagctttgccaacctgcatggtccctacaaaagccttcatggatttctctgatgatgttgtttgcttctacgggaagaacacatcgtaggagaggcattaaatagcctcttctatataatttgccttctactattgtatagcaaggcaccaaatataggagtttttgttcctcatttttgtcagctagaagttgcccgttgagaagaaagttaactctaggtgtcatccaggtatgcgagctaactatcatctcggcttcttctttctcacatatgcttggctcgtttaacatctccactagaactaagttcaattcatctagttcattgtgtgaggccagttttgccaaggcatcgacattagagttttgttctcttaggatttgttcaattttaaaataa

SEQ ID NO: 246109 - DNA, 801 bp, Cannabis indica
ttcttgattaaaaaaaaaaaaaagtcactcccaaaattttttaaacagattcttttttcttattcaatattttagactctcaccagacctagacctggacactgtggcgaactcagaatttaaagtgagggggggcataatttttttttctgtaaaatcagggagggcaaaaataaatttaaaaagaaaaaataaagtctagttagtgggatttgaacttttactctctaacatatttgtaatctaccttaaccattacaccaagcttactattatgtctataaatatcatcttttaatacaaatatatgttttaactaactaaaatacatatacagttctcctcaaaaataaaagaatacatatatagcttttctcgattttctttttcagggcgactgccctacctcacctcaatgtgggtccgcccttactaacagtcgcacaaaaaattctagggtttcaaaaatatttcaagcttcttctttttctggcaggatttagtgttctagagggttcttctaatcttcttcttttcctcttcttctactgaacacgggtaggttaggatttctatggttgtgttatttctcttttcatcatagccacgggttcaaggttctatgggttatggttcttagattctatggttctactcttctctaaacctagaaaaactatggcactcaaacctgaaaccaaagctccaagctccaaattctaaaactgaaacccagggccgcctttgaaatttagtaggccataaaaaaaattattattttgggctcttaattagaaaaaa

SEQ ID NO: 246110 - DNA, 947 bp, Cannabis indica
tttttgtcccaatacaaggaagcacagctcaaaagaattgacatggttacaacccatcaggcaaatgttccaacttcagccaaccaagttaaagaaggatcctaccaattgtatacagacgcagctattcaagctagaaatggtaagattgggttgggtgcagtagtcaaagattggaatggacaggttattgctgggttgtccgtgcctatgacagccaacattcaacctgctttggcagaggcgtgggcacttcgactggctttagactggtgcagcagtgtcaagcttcccctctccaccattttctcagattgccagcaactggttggaaaagtttccagccgaaagaaggacctctcggctatggcagatgttgtgtgggacatcaggaattccttatcacatttccctaatgcctcagttacttacactccaaggaacaataacattcatgctcaccaaatggcaaaaggtgctttagggcttgatgaggaattggtttggaaaaacaatagtccaagctttctctttgtaacttgagcttgttgtttctttcccctcaatgttacaaacgtaaaaaaaaaagtattgttaacgttttttaataggtgggcatgttttaatacctgactaaatattattgccggtcatttttttccttctcttttaagccttgattccctatttcttcattatattctatcttttctatttctcatttttttttttttactttttaaaaatattgtatggccccaaatattattgtgatctattctttaatgtgaacattttaagatatatatgagaaggatatatttttttttgctatttctaaaaattaaactatttggttactaatatagtgattagcactactacaagaaaagaccttttatcccaatttttaagatttttttctcccggttttcgctaaaatgaaa

SEQ ID NO: 246111 - DNA, 1216 bp, Cannabis indica
cctttcagtggattgaacatactcaaaaaccaaatccttttcagaccgagccagtgcatacaaccaagagtaaactttttcctcttcctccgtccttgacccgccatcaattttatctacaaaattcaatgaacacaacaacaatccgtctcaatgaaagctggcagatgcccaaatatcatttcttcatgaagagtaaccaaaaaagaaagctaaagaatctgacgtacttcggcaaaatagcctccaaaagaaggcaatgatcgaattaggaaatccatctctctgggtttctgggttgtgaacaagattttctttaatgggtttggaatagggaagctgaagtatatttctactaaaaatggtggggaatttgaatcttcccatggcagaaagttgaagagcaaagataatagtatgtgaggagaagataaagttattgggcacattataagtgaaacagagagattttagagaaaagaaaaataagtgggagctttgaacagaaggtagaagaattaccggaacaagaatggaaggtagtactggtagagttggagtagtgaataagatacttgctgttgacttttagtgggtttctccactttttttcttttttttaactaccaaactttcaaaatgaccgttaggtggttaacaatgataatgaaagaagaagagcaaaagaaaaaaaaaataagtggggattctcctgggttagttagtcaatgtggtgggaccaagttagatttagaaattggaatgtgcaatactttattatttcacatgactcttttcttagatattgatacacaagaaaactattaacatgggagaaaaggcacaagaaaacccaacaaatgaaacaatatagcaatatcattaatgacttaagatccttatgttcaagtagaagaagataagttgtcaaaagaaaaggtatagaagaagagataacaataaaaataaataatatttactttcgtaagaaaaatattattctttttgaaaacaaaaccgatcagtaaaagaaatatttatatgaaatgaaatcatcaatatgctgtcattcatgatcaaatgcaatgtacaaaaatgtcattgtgttaagggacctaaggctactaacagttagtcagttatttctgttactgcggtttagttttggttgtaacaatttttctgttacttttcttgtttgcacgtggttcattcc

SEQ ID NO: 246112 - DNA, 557 bp, Cannabis indica
tgtataaatgtttaatgggccggcccatagtatttttgtaattttttttcctttttgtatttttctttttttcccattaatttattttttaatttaaatttctaattgattgttaaaatattctgacaattaattgtgttaggtactttgatggaatgtctcacctatataaatatagggtctcattccccgagctcactactcattctgtaaaacacagtaaatccatataaagagagtagagagaacttgaaagccgaattacccacaccaaataagttttttttttttacttttgcagatccaaagctagtgtgggattgaaactcaaagaatcaatgactggatgtattttgatcttattattatattgtgtatatctttatttaattctgcatttcatatacacatatattttagtttatttacataaatttctaatagttagtatcataacaattttatctctgccttaatttatattttgagttttttatgtatgtatatctattctatataaagtgtgcctatataactgaattcttggtttatgagaa

SEQ ID NO: 246113 - DNA, 983 bp, Cannabis indica
tccttttttgactgatgtgattcctcacagactagccatcactagactttattgatcatatcctagtaggtacagattgggggttgagccgtcagactttattgcgtatggcagtttcaatacgcttcctcccatgcaacattaaatgcgagatgactgttcagataggatctgacaccacccgtagatgctttgttgcaatttagctctccgggagcctacgtgatttacatgccttctccgggaggcatgtctgaggtaatcctgctcttaaggagacttacctgatttattcaaatgttaaaccctttccatccacgtgtcaacattcggttggtccacgtattttgggaaaaatcaggggcaacatttaccccccaagccttgtttagttacgaagtgaataaggcttgcttagatgcctccggttgccttattagcttccaggaacgtgcttcgggcgcgtggtggtgtattaatgaccattattactgcagttattcgctttctgcaggcgtcgattcgtttcttgtccatttattgatacagcgcattaaatgggtgtcagacgggtactcaagcgtttccaccgtcttgatgacgatttaatgcaaccgttggatctatagaattcgaatcgattgctatcccagccgttcgatagtggctgatcacagctgtcccacatatgctctggcctataaaagccaaccttcttaattcatttttggttacttttagcatttttgccaaaattttctcagagtttcatagagaaaagaaacctcaaacaccatagatttcttgctcttgctccttcaccgttgccagtcaacattttaccgtcgatcaacaccaacgtccagcttccaaactttatgtaagtccttcgcatcttgtacaccagttcactgtttgtttacatagcatgctttactgttcatttgctttttcttggttggatgttgaatttctgggaattt

SEQ ID NO: 246114 - DNA, 594 bp, Cannabis indica
ctagcacgtggttttccattcaagtcaaccagtacacttaaatttagaaacacggtaagactagcatataatatatatatgtgtgtatctgtatttaatttaatttatatgctaccaacactagtacagtagaagtattaactgtatcggtacaacatatgatatttcaaagggtacgatttggcgttaccaacactagtatggttaagtgcgtagtgcatatggtacaatactcaatagtacgattcagccctacgaacactagtacgggataagtaattagtgcatgtggtatagatgtcgtacttttattaagaatgttcttgattatctgttaagccttatggatagttgtatgggtgcttaaatacaagtcggtaatatattatgtcttttatacttttcttactgagtttgtggactcacatatatattgcttgtatatgtaggtaaaggaaaggctaagtctgaccaactgtgaattcagagctcagggatgattgtacatgtcaacgtgattcgacctgagagtttagtctcgagacgacttgtgctttattttgtagtcgcatgcgacatgtttataaaatgtat

SEQ ID NO: 246115 - DNA, 1431 bp, Cannabis indica
gtactaccatgttcctaagatgtgagtattgtgccaatccttttggtcagctgtaacaaataggtcaaagaacacatgtaacacatttaagctagaacctaacaatctcaggattatgatctttgatctaagatcaagtgatatttacttagaaaagatattatggtaagcttttgatatctcttctactgtaaatatcagtccactctgatgcatagccaatacatcatatcttagctttactctactaatacgttagaaaaggtattccacttatccaagtgtaagtaaactatatcgcttattatcacgtcagtgtaaatcttgtgccctcataaatcatgggtcttaatgtttgaagcctatgatcatgattattttccattctgtagacaacacaataatcatgattatcttaagttttggatttaatagaatttatatattaaaacaataattatgaaataatcatgtgaaccaagtaatataaaatttgacttctatatcattctttaatagtcaataagattactttgagatgagttttatttatgacataaaatcttaacaacatgtgggtattgtttgtacaatttatgtaataaacatatttttgggtccgtcaaccatggaaacttgatggtttggccaaagatatcacaacggtaatagtttgagaattagttatactgggaagttgtaattggtatatagctttcctcggggtgtttttgaggtaattatttatgaccattttacccctatccttagagattatttagaaattaagttaatgggcattttagtccttatcacctttgttttctttcctttttgtccttactgaattagacattaagttttatgcaaaatattaattgaggataaacattaaaaagtttagaagtatacctctctctctttctctctctacttacggccaagaagaaacccaaggagaacccaattaattttagagtttttcttcctaattcaacatggattttagttgtttgattcaagtgggatttgaggaattcaaggtgagtttagttatgttgatcttctttgaatgtttaagaaatattgattttataggttggattctatatagatagttttgagttagaatctatttctatgtttaattttatgttatttaggtttgatttgggtgattattattgatgttgggtgagagcttcaaggttgagttcttaaaagtcaagcttaaagctgtaattgtgtttttttttttattattttaatgtaatttttgattatgagttcatatagggctcgtttggaacgccgtattaggtcgtattgtattgtattatattgaattagattatatacaatatttttatataatactatgttaaattttaatttatactaaaatattatatatttaggtgtccataaaag

SEQ ID NO: 246116 - DNA, 590 bp, Cannabis indica
tatggtcgcacaggactaccaagaagacatggaacaccctaactaattaggaattttaatgtgattttaaacgtagtgtgcagctcgttgctaataaacaagattattgaaaaacgttattaattaaagattttcttatttaattaataaacttaaataatatgtatatatataaaattttggaattccgttacaaaatacaattacaaaagtttgctatttatatattaaagttttgtcgccaagcgactcattagcaaaagccttgatgtcccaaagattgtacgctccagacctaaccgccccaacatacaatcttcacctactcactctcacgactccccagctttagccttgcccttacctacacatgaaaatagcactgtgagtcgacatactcagtaaaaaaagcataacataaaacatactaatatcttgggttataagctagcgcccatacacccgatcacaaccctatccccgtgtcccacacggtactgagtctataacgttcattcgacaatactatcgaccataatgtctgcctatactcaatatgctagtcatactctagccatattgatgtgaca

SEQ ID NO: 246117 - DNA, 1396 bp, Cannabis indica
ttttttcaaaaatactatatttttttcaaaaatattgtactgggtactgtattaagttttcatggttgtttctcagttgttccactattgtgtttaattgttctgttttgtgttttacaattgttttattaaaagatagtatttttgtaaataatttcgtgtaacagtaaaattgtaaatttttgcctaaaatctaatatttttgtaaaaactactatattttaagaatctagagcaatctacagccgtgttcttattgctcatgtgaatgatatgctcatcatgagcaaagataaatctgtgatcaaaagtatcaaagccaagttcaaaagagaatttgagatgaaagagcttggacctattcaaaacatacttggtatcaaagtctcacgaaactggaaggaagggactattagcttaaagtaggtcgggtacatcaaaaaaattattcagaagttcaacatggagaatgcaaagagtacatctgttccgttatgggcttggtttgttttgtcaaaagaacaatgtcctaacagtatgaaagagaaagaagagatgaatgatgtaccatatgcagtagttcttggatgcttaatgtacgtgatggtgagcataagacctgacatagctcacgctctaagtatcctaagcaggttcatgtccaattcgggcattgaacattagaaggcccttaaatggttattgagatatttgaagggcacttgagattatggtctgacctatgagaaacaaaaaggagaattagagttgaaagggttcgtggattttgacttcgccttgaatagagatactaaaaaataccgcttcttatgttttcttgacaaactggaactgtataagctagaaggcccagttacagtctatggttgctctttcgaccatggaagcagaatttatggcgactacgaaagcattcaaggaagctttatggcttcagggaattctttatgagttgaaacaaaccaaagggggagtaactgtgtattcagatagccagtcatccatccatctttgtaagaacctaatttatcataaaaagagcaagcatatagatataatactctactagattagagagaagatagaagaaggattgtttgatttagagaaggtcagtactaaagataatcctgatgatgttgggactaaggtcttaaccttaaccaagttcaagcattgcttgaacttgatcaatctcataagttagtatactgagattcttagaataccaaccaatgatggctgcattctttcttcatcatcgtcattcctttaatttaaagtaaataggtggaatttatggtatagttcctccaaataaaaaggtctccacaaatgtcattcctgaaaagttgttcactcacggatgccagtc

SEQ ID NO: 246118 - DNA, 607 bp, Cannabis indica
aaaaataacgttattttccaacttaaaaacaattcatactgcaaatatataaaaaaaaaatcctaccaaaaaagtacaagtttagatactctgttaaatttttaccaaaaaagtacaagtttagatactctgttaaatttttccttatttttcttttctactgacttctcttttgggcttttgacttccaatgaagttgtccaactcctctactcccactagaaggaggaaggaggaggtcatttgcatctttcagtttcttacaaattaactttatatattagtttttaatattttatttaatgttccataaattaaatatatatatttttggtaaataaaaaatatttatttcacctcataaacttttatggataccaatctttgcttaaaagagaaaaataaaaccagacaactaaaaagaaattatacatgaagagttgtgaaccaatcattatctatacgattcctaattgtgtttgaatatcgtgtgatattatgaataatatcatatttgattctatttactatacaagtaatgactttacattgatcgcaaatagcctcattttcaactcttcaaatgtgataaactgctgcaagagta

SEQ ID NO: 246119 - DNA, 798 bp, Cannabis indica
ggtaaaataattcccaatattaacttttttctaagccaacctattttttcattaatgggttgggttataaccgattaaccctatgtcatataaaaaaaaaatatttagatttcaatatcaccaaattctgaaaaatgttcacacataaatctaaacgtatattgttatataatattaagcaagtatacaatatatacatagaaaagatttacaaccacagagatgtcagagatgtcaaacaaaattcctaatttctaaactttcatatatcaaaatctttaattgattaacaaatatcacaagattaaaaccacagattcacaaagagatgtccaccaattggattacgacatgagaactccataggtgacctgaaatttccaagaaaaagaaaaaataatgagatctatccagagaaaaagaaatttctactaactttatgaaataatcttttctaattcctacaaaattttacttccatccagcaaagagaaaaaattaaagaaatttcttacaagttgaagttagtaagtgcggctgctgtgtttggagagttggacggtggtggctggctggcgcggctgagagctcaacagtggtgcctagtgcagcaggctggcgcgacgcgggtggaagaagactactagatgggaggcacaacgacgggcagggcaagggggcacggctaactggctaagaagagtgatcttctattcctcctcctaactgagctgggagtgagagcactgagagagtttttctttttcaaaacaaaaagagtggttgttagggtttgga

SEQ ID NO: 246120 - DNA, 782 bp, Cannabis indica
tggattgtctcatcggatcgctccctttcgttatacatgagaccataaagaaacatggggatggttactatgacatctagtagtgttatttacctggttatccctgcgtcattggctaggaggaactcgcggtggacgaccaacttggtttcgattccttcctgcaattttagcattgcatgtgttcctacatcgttgcatactgggataggccttattggtgaaagttgcaaacaatgactactggcgtcgaggcttctccagccaggcctaaaaattgcgagaaaagattcaagggagtcgtagtggtatgccccactcctctaaatgtgaccttagcaggggcagttctactgttgacgatcggagtaccagacatgcctccactgttggtcccattgttctcatttgtgttcatatggtttgtagtcattgcgattctcctccaaaatctcaggtatatcagaaagtgtttcccacaaacaatgccaaatgttgtcagagaaaattagacaacactaaaaatagcgagtattccaacagagtaagaacacacactagcagatacacgagtattcacctagagtggcgaatacttaaagaattgactatgaaatagacaaacaaagacagtaaacagtaaataagacaaagatgtataatggttcaatcagagctcggtttacttagtctacttttgcaaatagtttcaaattcgtttatttgatttgaatcacccctttaaatagaaagcaagtttcatttgatcttacataactggt

SEQ ID NO: 246121 - DNA, 1143 bp, Cannabis indica
ttgtggttttgcttttgaccatcctaattttctcattttattagagcatcgtttttttactctatttttaaaatatattcttaaaattttattttttaattttacaaaatatttttatattacatcatatattatatttttaaaaaatttattatattttatttatttctaatattaatgtatatacatatctttatataaaaattattattaaaactcaaaacaattaataaaatatatttagagcaataaataatattttataaatatatagcatgatatactaaattttaaaaaaaaaactttaaaatagaaaaatgggtttaaaacatctgttgtaacatatttttagtactatttttattattttttaaaagtcttatttaatttaaagaagtttgttgtgagtactcaatgtaatgcatcatatggttatcaaaagtacataattttaatttttattttattttctcttatccacttataatcttgcatacttttttacagaaaatactctaatagttgataattctaaagttcgcttttcatgatcccacatcaagtaaattaatgattttttttttgtctaaaaagtaaccttttttttttcagaaagaatatatataaataaatagaaagaaagaaagaaaatgtcatgtcaccatgtttaatattgagcaatactttagagcatctctaatggagattgtccattaaagtgatcttatcacatatgtaatgtagtctaatttttaagaccaattatgtaaaatattgctcaatatagaccatagccacataatattttctttctttatatttttttttgttgagaaaaaattaattttttaaccaaaaaaaaaattattaatttaatgtgaagtaagactatggtgaacaacttttacaattgtaactattagagtattttttattggaaaatgtaccgaatcttatctggatgagagagaaaataaaaaaaataatattttaagatgatgtatgtacttttgacaactatagatattgccccaattggagatactgttacataaaataatcttgaaaattggaccgctgctcttatctctcaatagctatatctataaatagttttttttttttttttagtaggtattttta

SEQ ID NO: 246122 - DNA, 999 bp, Cannabis indica
tattaaaatataatttatttttccttagtgttgcattggagcacaattgtaaaattttggccaaatattaaactcattttttgagctaaatttagcataaaatttataccatcattagagatatcttaaaattcaaatttaaactcattatacatatatctctctttactactacaaaattagatttttctctattgttttaaacaatctggtaaagtattttcgtgagtctctaagactaacgcttattcgaccattgctaaacttactaaattaggcgacggtgaaaaaatatcgggaaatttttttcccaactatacaaaatcgtcatcaatactgagcaatataggcgactgttagtatatgcgatggttttaaaccatcgcttacagtatatgcgattgtttttaatagtcgcctatacctttaaaaaattacagatttggaaccatatctcaccaccagaaccatatctacactaccaaaactagatctcaccacatttcggtttaatacttatatatattcattacaaatatattaacttttgcacatatcccttgaaagtgaaggaaaatctcgataattgttctatgaagtactctaccatatcattcttcagttatggatttttaagagattagtgggattttcataatagaaatactaatgcaaaatgaaaagatatattaaactctcacttttggttcaccgtgaacgagatgaggaggagaaagagagagtgaggtggagttgagtggcggtggtggtggtggtacgattgggtcgtcagctcgaaggtgggcggtggtggtggtgcgattgggaccgaaaacgagaagaggtgagtaggagagagagagagagagagagagagaggtggagcgagagaaggaggctcggtagaggaggtgtggcggtggcggtggcggtggttgtggttgttgctcgttgttggaactagaggagggtacgcggttaagagagagagagagagag

SEQ ID NO: 246123 - DNA, 799 bp, Cannabis indica
gagcctcatagtgtgcaccaaatggtttggccatagtggaagctggattgggatcattcttaaatcagattgtttaagggtaataggtgatattcaaagtaataaaaatatggcttcttcttatggccatattattttagaatgtaaggcgttgtttgctgaggttggtaatatctctttaagttttgtgaagcgatctgctaatagggttgcgcgttgtttggcgtgatcctctcttgttgaggttgatcgtgtttttaatagtctttatttacctattgtaatttcatccttggttttggatgatttgaattaatgaagttaccattattatttaaaaaagtaataataataatgaatcgtgattcgtgagtgatagtcacctttcaaattgagagcgatcatgaccatgtacgaaaaagaactagtctaggaggaaagcttcaactttggttggtattgctcattattgctttcctattccaccattatatatatttagaatcacagaagtagatagagtaaaaacatagataaaatcaaaatgggagaaagttgcgcacttaccatagctcttctgaaaatcaacaactggagtgtttactgtgtaataataataggttattaaagagtgttcaaattaatcaaaacaacaattataaattaatatattttttaattgttttatattaaagaaatacaaacaatgaaatttgaaaactaagataactgtcatgtcatcaggtaatagataaaaacaaaaaatattaattttaaaaaaattattaataactataaa

SEQ ID NO: 246124 - DNA, 621 bp, Cannabis indica
ttttcttttatggaaacatgtttttattgcattctatctattgtgtttcctttattcttggagttttttgttttttggtgttttaggaaatttgttcttaataattatttattttgtggtttcttttttggtggcaatttcggttttggttgggcttttaattcttagattttgtggggatatgttgtttcttttttccatttgaggtaaccttaaccaatttttgaaaaatctttttggtttccttcttttctctccccacgtggtgtctaaggtaaggaagttactttcctttttcatttttttgttctgattattgggtaattaaatttgaaatgctatatatgttcaacttcccacgcccaagctatgggcaagaagggcaactgcccaaggcccatgaatgaaaaaggcccttcttttttacctatatgctcatattatataaatatatatttactttgctattttcaaactaaaaagaacaaatcaaatcataataatgagatagtacacggttgaggcactactacaagtaacctctaattttcattttttttattatcttttaatacttaaatagtagtacctattttgcggagaaaataaaatctgattaca

SEQ ID NO: 246125 - DNA, 681 bp, Cannabis indica
tttttttttgttaatggtgtagatatggctaactcaggtttaggatcagattcagacccataagcagagtgccctaggccgatacctacacgaggagctactcagatgaatgaaacattcaagctgatggactaaggaaaaagtgtggcactcgaagtgaatgacaaaggataatactgtggcaaaaactactccaagatggtatcgactttaggagttagatgtcgtcagacgataggattgctctataaaaattggaaagacgtcaaccctacacaaaaataaagtttagaaagatatacaggtaagcggttatttgtgagaattttgatttatttttgattaattcagatgttaactctaatcgtgtttgttttccttcaaactagacgagttttatagtgccggatgatttcaaacatgattgtatgatccttgctagaaagttaatgaaagacttcaagattagaatgacaaaagatgttataatgcccgcattagaagaaaaggatgtacaacgactagcacaagtccctgaaaagcattcggaaattgaccttactgattgattggaatttgttgaaagtcgactaagtcctaaatttcaggtacactaattatatttgtagtaagataaattcttaaatacaagtacatatatctaatgtatttttttggcat

SEQ ID NO: 246126 - DNA, 1122 bp, Cannabis indica
gggcgttacaacatggtattagagcaacaaaggttaaaaaatcctgaagactggtttgacatgtacattggctgcaatgactcatttgattcatagtttactaaattttaattgttagttgattaatagaatatttgttaactgtttgaactgcctgcttatttgcaatgtgtaagcttttagaaaagcatgataagttttgataactattgttaaatatgtataggcatgtgtggtaatgcttatatcattaattctggtttgagagattttcaaggatggaaaggtatggctgcaagtgtactagaatatgtacctgaggcgatctaataggggtaattgcgagcttaccagggtcaaagttggcggtgttaatgtgaatcctccaccaccacaagattgggaacaaatgtatgctatgatgcaagagaccatccaagttgtaaagatagaggaatttacatggttaacctagggcagcacggtaatagactatgacaccaaattggatccattggcaaagtttacctttgatgaagtggccactaaggccgttaggaaagctaaattcattttgcggttggaagagcatatcgctcgtgatatggttatagttgccaaacaaacacaggtcattcaaacatatgttcaagggattgagttagcccttactactaggggtacgaggaccaaaatctagaagataaatagtaggaggagagattcatgggaacaaacgtctaatgttagttctaataagggtgctagccttaatgatcccaagaaaaagggctaatgacacaccagttacgggtcctactacaagaatttatggcaacaaaagtttttgacgtggtgggaacaaaaatttgaaaaactatccagaggaccgaggtgcaagagatgccatcagggtgaatgctaaactagagcctacttccagtgtgggggtagtaggccatctaataagaaattgcccacagttgcaacaatcagaatagaaggatgatgagacttcagttcttgctcaggtgtttgctttgccctagctagaggctaatgttggtctttctaccgtgacaagttagatttccattggtggtactttgttgactattttaa

SEQ ID NO: 246127 - DNA, 1068 bp, Cannabis indica
ctgttatgcggatcggattggatccaaaatatgaaatccacacttagtgcggattggatgttgtttgaccaaaaaagtacggattggatcagatgaacacccctatgttcttgtttttctctcaacacatgagcaaaaactctgagtgaataatgatgtaaagcttaactttttttaggtttcctaaattatacgtatatatagatttaagatataatagtatattaattcaaaccaataaaataataataaaggtttaattaaataatatatttattattttaaatattaaaataataatacttaaatatttgtaagcgattctattatagatatttattttaaatttaaatatttagtttaaattaaatatctaatagctgattaagagaatctcccaaccacttgagagaatctcttaactactttgaaagaatatctcaaccatcataaatatctgtaaccactttttaaatttaaattataaaattaattaatttaattaatctaaaaataaatttagtggggcccatcttattaatattataggcgcctatcattgtgtccttacacagtgactgacgctaccattttcttaaccaaataatggtgatgtctttgtcctgaaatcactttatctttttcccaattcatttcaataataaatttaaaacaaaatatttattacaaaataaataattacttttttgctaatttaaaataagatttttctgaacatcaatatataactttatctatacccttgatagtgttgcaaagtggtaattcgtggaccatggacctataatactaagctttaataaattaaattattaattgaatctcatcaaccaaataattttatttattactatgattactccactataaatatggaattgatctcttagtaattacataattatatttattgagtttattacagtgtccattattaaaatcaattctagtgattatccctccttgtgtcagttcgtaattatttttgttcaaattaccattttacccttttagcttacttctttatcctttagtacggttatttac

SEQ ID NO: 246128 - DNA, 900 bp, Cannabis indica
ctgttgcctctgttgacattgaaattacctctcccaaggatacttgtattaggactggagttgaatctgacattaggatttttattgtacaggagttgattgctgaactgtgaatttccacgattgaagggcctgaatcttcgaaaagctaggttagcttcagcaatggactccaaatcgttcgtaaccagattggcactcagatccacttccttattggatttttcaatcctagcttcagaggcaagaagcaaggcttcgatttctctgactgtgtaattttcgatccttgtattggatgatattacaaacgtatcgtactcactcggcagtcccttgaatatggcagccacatgatctcgatcgcttagaacttcaccaactgaagccaacagatccacagtctgcttaaccttgagaaggtattcattgagactcatggatcctttctttagattctaaagcttagtcctaaactccagaattttagacgaaacctgcaacgtgaagtgcttttccagagaattccagatctgaagagaagaattacatccaaccattcttgttaggaggctttcagtcatggaagaaagaagccaagaaacaagaagttgatcttgaacttcccattcggagaacacaggattgacacgattgttttcttgatctgcaatgctcaagaactcagctggtggtggttctttaatgtacttcagcaatctgtttcctcttattgcagctaaaacttgctgcttccataaaagaaaattatggtcattcaggcgaatcgagatgttgtggttgaagatcactggttcttgatgatttcgtgttcgcgcagggactccattaacaccagctggaccaggttgattaccattaccagagtttgttgcagca

SEQ ID NO: 246129 - DNA, 1500 bp, Cannabis indica
atttttattataaaatattattttttttataaaacatttgtaaaacaacaaaaccgaataattaaaaataacaatagaataatttaaaaaacaaccgtggaataacagtgaaaacttatcacaatacacagtataaaaaaatacagtattttttagaaaaacacaatattaaaaaaaaaattctactctacagtaaaaacaaaaaaaaaatttgagtatgtagtgtgaaaattcttttttcttactataggcatgatatttaatttagttagggcccaaacccagcttagtgttctttcttatataattcatattaaaagtttgcagaaatactactttatgtagggcttaattggatggaggtgcaattttcaaatatgtcatgccattcatgatgagctaattgcatatttgacattttggaagggtatgcttactcaaaattacaagcatggatattggcaccttaaagtaatcaacattatatggatatggcacctaataagttattagcaatttttcatattcatattaaaatttgtatgatccaataataaaatacacgaataataatatatcaccttttatagtgtttgatgccttaaggtgtccacattcttccttcaaaattattgatagaatttacataagagtgctagattctatcgaaaaatattgtcgactagaagagataggtgtggtagaagaaatgattgacggtcaacagaattgaaggaggcgaaaattactcttgttggaacttgatcctttgttgtagactagtttaaccattaaaacaaggttaatattttgttaataaatatgtattgtaagtaactaaattatatgtatccttcatgatgttttgtttcaaggggtgacaaattctttacttttatgtaagtccggccatatttattactttctttttcttttattacattaaatttgattttttttactaataatttatatatatagggatatgattttatcccgttattgtactttcacggattgtaatccgtgatgtacgacaaccgtcagagtgagggagttctttgatctgacggttgagattgatctaggggtaattagggttaaaaaaaacgaacgtaccctgacactcatttaatcgtaccctgagacccatctaatatatcacagaatatattccgtgaaagtacattacaagacaaaatcatatccctatatatattgatactaagagaaggagaatttaaatttgaaatctttttcttgtaaagaaaaaaaagggtgaaaaatattagactatattattattattattagaatacctatataaattcttaattaagttactatgtgatgtcaattgattaagaaaacgtcaaaacttatttttatttgcattgtcatgaaatatttgaaaacttttattcattcccaacgtaaatattcttcttcttttcatttccttttagtattataacaaccatgaggactggtgcattgact

SEQ ID NO: 246130 - DNA, 670 bp, Cannabis indica
tttcattcccaaaaaaagttcacttagaatgaattcaagggctctatttatagtgagccatggacactttacaaccttaccagatcccaaaaccatagattgttaagtcactttcacatctgataacatagtagcttaggtggtctgatgtgtttgacatcttaagttacactaaaattgtctcttttatttgtatcttggatgaaataaactttatttccattttccatactcattgtgctattgctatctcgtctgcaatttcagtgcttagacaatttgtgtgaggagggaaaaggaggtcgaagggagttaggtggctggacacacagagagctgtgggcgcggggagctggcgggcgcaaggagcatgcgtgcgcgtggagttggcgggcgcagggagttgcgtgcgcggggagctggcgggtgcggggagctgctgggcgcatggagcttcacaaggggaaaagaccgatgtgacgaggaagattaggacaaaggaggcaggggccatcctttgtccccttttgcttgtcttgagaatcttgaattgttcatccccttatttgttgtctataggaatacttacttattagactttcgctgttaacaataactataaagaaaaaatagataatttcataaatacaataaaataacaaaaaaaaaa

SEQ ID NO: 246131 - DNA, 589 bp, Cannabis indica
tttctactgcatcgcagttccattccattcttttgtaaagtgattttttacatattatgacatcactccttccaactcacccccgacagctataaaatcatccttgagttttatgcgatgtacatggagttcacgcaacggggaacccacaatcaaggatttgtgctatttttacaattattaagaatgttggccatgataattattaagatttacagtttgtaccgttgatatagttataaggtgttaggtgttatagtttatttttttgttattgttgtcacatgttgagtcctattattgaggataaagtcggttggtttacacctaactccaactatttttctagcttgatcttttgcccatatctatatatagggctttatttagtactatgtatcaattcatttactttccataaaacaattcattcattttcttccgcaacatggtattagagcaggaaagtaatgttttcctctgatcctcagtcatcttcaaccttcaccatcactgtatcgtcttctccggcgataactacatctacagtgaagatcgattatctgcatcgacatcttagctatcccct

SEQ ID NO: 246132 - DNA, 1169 bp, Cannabis indica
aaacccttaagccgacacaacaactgccaagaatcaattctagaacttgccttaggattcccataaaaacctgtaaaccgccatacattcaaccccgggcacttcaccaaagcatcaatatgaccaaccgaaaaagacttaacagacacctcccaatcatcattccacaataataacaacccaccactcttccccacacaatcaacatgaaaactattagaaaaactaatctgacggcgtatgccttccgcccacccaccataaagtttagtttccgaaagaaaaactaaacttggggaatacttacgaaccaccgttcgtaaagcagtcaacgcaccaggattccccagtcctcgtgcgttccagcatagcagactcatggcgcctggcgagcctgctccgcaggcttcgccaatacactaccatcattctcagggaccaccttagactgctcctccaatcgccccttcttcacattctcatagtgaacatcaacaaccattttccttttacctccacctcccactttcggactcactttatttatagcattagcaactaacacatgtgataattttgggctaatgggaatagaactcggcttacctttagacccacggccacgagctgaatttagacgtttccaagtcttggccttttgtgcttgaataagtggttcaaaagtttcttgtagagcttgggtaaatgaaacttcaacttgagacgaaatgtccattacacccttacccttatcaacactattcaatccaagcatattattattttccactatccccacatcactctcggtcccttgtccaaaaactccctcactaaccacatccatagaacactccccctccatcacaatcttaccattaccacaatcggttacaacatgcatcaaaggacactcaccaccttcaccattattcttaccctcaccattattcttatccgccaatgccccatttatccctcccaattcacatgttgacatcatcctctccaccacactattagtcttactaaccccctccactcgtgtaccaaccaaggcagattgtgcatccaaaggctcggcttgcacacgagccgatattgacccaatatgagccgtggcatcaactcccttcattacttcagcctcacgttcacgggcttctaac

SEQ ID NO: 246133 - DNA, 548 bp, Cannabis indica
ccctataatgttatttatttatgtcataaaaaaaataaatcatacccttaattctcatatttactagtaggacaaaatgttttttgccccctcaactattacgtgtgtagactcatacccttgaatttttttgtttggcaaaaatccccccgatctatgataaacaatgagaagtcctccttccgtctcgttctgtctaaaatattaacgatttcaattatgtaggtgagaaaactgatggttgttgaaattattaatacccttgacatataagtggtgccttttcatcatcttaattcttcatgctccaaatcctaatttctttctattattctgcaacttatttattttttaaaaaaaattactttctttgtgtcgttcatttgtccctaaatattagtgagcatcatgtctttattttcttcttcaagcaaatcagtatcaaatagaaaatatgaagatcaactttcgaataataaatcctatctgtgattgtgggtgtgtgacagttatacatacatctcaaactaaagataatccaggtagaa

SEQ ID NO: 246134 - DNA, 903 bp, Cannabis indica
tacttttaagtagataaattttaagtgtgatttataaccattaaaatttgaaagcataataattatttaaataaaaataaaaattactattatactttataatagtaattaaaaaaaattattattcgtcttaaatttattttcgaaaagaatgaaaatgttaagctattaaaatattcaaatttaatttaaaatttaactaattctaaatatcaaaatttgaaaataaattttagataaaaaaataaacaaatttattattaattatatttagctttaactaactacaccaacatctaataatttgttatttttttatatttttaaaaaatcatccaatacattaaaaaaaatcatccaataatttctcatatcataaactaagaattctattatatagccccagaatagataatataaaccgtcacatataattaaatagttcatattagggaagaaaagaattcatcaaatgaccaagtaaaggatccatacatatctttcaagaaaaaaaaaatatctaaacatatttttccaaaaaaacaagaaataataaaaaaaaaaaaatccctacataccttaaaaaaaaagaaatctaaacatattttctcaaaaaaacaagaaataaaaaaaggaaatctatacatgtatgcaaacacgaatgaatattgcttaattattatggctatctcaccatatttccattcgtctttcaactatgttcaaactaattaccagcagttggtgagtttatagacatcccagcaacaatataaaatatataagtaattatatatggcataatataagggaaattcattatatatactataaaatatattcgttattaattttagacatttaacaaatttatattaaataatacttagtttaacttgtttt

SEQ ID NO: 246135 - DNA, 836 bp, Cannabis indica
tttttttttgtttccgttatttttttttttcaattcaggtaggagaagcctacgtgtcacgttattagggtacatttttttaattaaggttatttctgttaattgattatattataggtataatactaaaattttccccttaaggtaagggtttattgtttttcttccatgaaagctctgaatttgaaggttgattttgcatactgtagttgttgtaggtttggtaacactttggtttttattctgggttggtttagaagcagttttgatgctcacttgtgtgttttgcttgctgtgggctgaggagagtcaaatttgagttttaagctcaaagcttgagctctcatggcgaattttgatttagggcatggttttgatttatgttacgtagagaatgttatattgatgccataaaactattctgtgaagttttgaaataattgcttaagcttggagcaagttttggaactttgaaaacttgaaattttgagtccctactgttgtgaaccggaattcctgatgatacagggttgtcccaaccaaaattttgttttgcagttaccgagaaatgtcgattttcatattttggccataacttttcactcaagtatccattttagatgttctatatatcgttttgaagcttgcgacgagctctacaatataatgtatgttttagagcaaaaatataagttttattttagtgtatttatatcgtagagtttggtaggaaatcctaggttgacccttgcaaatattatgtagtgttttaggataaacaattatggtttatcatggtcgtgatatagggttgagatcattggggatgtttctct

SEQ ID NO: 246136 - DNA, 979 bp, Cannabis indica
aagtaagtgaacttgtacacttgttgacgtacgcacttaaaaattgtttactatcctcttcaggcaaccaaaataccacttgttttgggtgtttacgatttttacatcctgatcctcgactaagaatttaacaccattaacaatacatccaagatatcaataacatgttgggttagagggatttgcgatggcgtacaactcatctgatacttctataggattatctgctcggagttgattgatctatcattgagaaaaaaatttaatcattgatactatattaatacaccgtattttaataacaaaattagtagaaagtaatacttactcgagacttgaaccaactaggaaactcattctcttgaattgtgtcaagattttgatgacccctaagttgtagcttgtttctatgctcactacacgaaaaatggggaaaatgttagataatgtcgtcactaaagagaactaaatcgaatatggaaaaaagtatcttacgtgatatacgtctccacttcattacaattgctgataatgtaccactctgccttcaatttatcttgcattggtaaagcaacaatggtcctctgaccaattggtcgcccaacatgcttaaatacaaagaattccctttcaggcttattttggaggacatcactatttcgatcttgacgattaaatcgagtttcaacttcccggaagtatattgaacaaaaggttaagatttcgttaactgcataagcttcacaaatagatcctttcggtcgagaacgatttttgacatattgtttgtacacagacatggctcgttcaattagatacatctaactgaagtgcactggtcccccaagtattgcttctttaggtaaatgcatcaccaagtgaaccattatgtcaaaaaatgctagtgggaaaatggtttccaatttgcaaagaatgtccagaatactttttttgcttgatctgcaagtctgtaacattc

SEQ ID NO: 246137 - DNA, 668 bp, Cannabis indica
gttaaacctctgtgatttgtgagttttgcttagatttagggtgggatcggtcggttttaggtttttttagatctgaggttgaagacatcggacctcctattggtccgatggtccgatgggttacatggggtaaggtttgatggtcgtctcgtgcggttaaaatttgaggttgaaggcatcgggcctcctattggcttgatgtcgtccgatggagtccgatggtcatctcgtggggttaaaatttgaggttgaaggcatcgggcctcctattggcccgatgccgtccgatgggtctgatgggttatgtgggttggggtccgatggtgttgtgggttaaagtttgaggttgaaggcattgggcctcctattggcccgatgccgtccaatgggcccgatggttcaaggggttagggtccgatggatggcattttttagtgtaaaatgatgttttttaggtttattttttattgttttatttattatttttttatttttttattgttttatttagtattgttttactttttattgttttatttattattgttttattttttattgttttatttagtgttgttttatttttattgttttattaattattaattgttttattaattattattttattttttgttgttttatttattattgttttattttttgtt

SEQ ID NO: 246138 - DNA, 1752 bp, Cannabis indica
tgtgtgagcttactacttgattacgtacacttgcgtattatttacgaaattcgtaacaagtttttgacgtcgttgccgtggaattgttaaaagattgatattacataagattagattaaattctactttggtttatttttcttgctaattgctaatctgtttccttcaatattgtctttgcctatttcaggaattttaggtgtatgcgccgtcaaggacaaggagctatattacctgttgatcctaaaatcgagaagacttgtaggagaaacagaaggaacaagaggcaagaaagagtttcagcaacggctgaaacaccagaaatcattgctgataacggtaatgctgctaataatggaggtaacaagggtaataatggaggtgccattgaagatcaagcaaatggccacagtttgagagattacattctcccaactcttacgggggttcagtcttgcatcatgcctcccgccgttgatgctaataactttgaaattaagcctgcaatactccaaatggtgcagtcttcagtccagtttggtggactcccttttgaagatcccaatctgcacttgtcaaacttcatggagttatgtcagactttcaaggtcaaccgtgttagtgatgatgccatccgtttgagactttttccattctcgctgagagagcgagccaaaagttggttgaattcattgcccccaaattctatagcaacatggacagacttagcaacaaagtttctgtctaaattctttcctccagcaaagtctgcttaactgcgaggagaaatcaacaacttttgtcagttagataatgaatctctccatgagtcttgggagaggttcaaggacctcatcagaaagtgtcctcatcacggcattgagaagtggatgttggttcataatttttacaatgggttggttggtaacaccagaacactcatagatgctgcatctggtggagcattcatgaggaagagtgcaaatgaagcttacaatttgttagaggagatggccctaaataatcaacagtgccaactgagagaagccaaacaaagaaggtggctggtatacttgaggtagatgcaattactaagttgacagctcaggtagaggccctaagtaaattgatagttgtgcaagcaaaacaagctcaggtggtttgtgagttatgtggaggtcctcatccctatgcaaaatgcacagaagatgtgaatagtttgccaatggatacagttaaagccattgggaattactctcagaacaacaactatgggttcaatcaaggggggaatcgaaggaattctgggttttatcagcagagtaatcagaatcaaacgtagaaccaacaacaaccacagcaccaagggtctagtgggagttctggtcttcagacagacttattgcaacaatttatgactgagacaagatcatccattaaggacctacagactaagatggggcaattggcaactcagattacaacccgtcctcagggaaattttcctagtacaactgaggttaattctaaagaagattgcaaggcaattaccctaagaagtgggaagaagtatgaagggcctgatgggggacaaccagtggaagaagagattaaggatcaaccggtaccaacatcaacagaaaagaagactacaaagagtcctgcaccaaaacaagagtctccaccaatcagtatagatcatcatgtgaaaatacaatacccacagagactccgaaagaccaatctagacaa

SEQ ID NO: 246139 - DNA, 1006 bp, Cannabis indica
taagaggagtaaaaagaataaaaataagaacaagaaggagaaaaggagactaacctgatgcataagttcataactccttttagatagagtaaggaagtgacgccaaccttttgtagcgtgcaacgagtagatttgcaaaccttcagtcccggcctcaagaggtagggaataggagggctcgagaagaaccatctctggaaaagaactagagaacttcacttggttaactgacccagtggattattcattggcacttggctgacttgatggtgagttggcctgatgatttcttcttgttggctatggatttggtccttttgggttccttggtagaacccgggcatcactagcttgggcagccctcttctcggacttcttgtcgagcggtggaggattgctgaacatattctccaaattaagatccatatttgtgaggcgatgggaatacatcagtaattgagaaaaaataaataaaggaagatggggaatgaactcccacttaaagaaagttaccatatttatcataagggaatgaagaaggactataataataaccaaactccctagcccatgtgatctcataaatatcataaggatttagtggagatagatcccaacttgaatctagatggctcgccctatcaaggttggtcccatatttctcggctattccatagtatgaactactgcagctaagttggaggtgaaacctagggtaccaactatcgaatctatgtgctatctgatctatgagaaagggttccaagtgtaaacattatcttgattatcttagaatgatactaccatgttacgcttgaccctaaggacagagggtgaaaatccaaaattattaccttgggatgctccttcttcaacttcccgaggggcaactctatggagataatgtgcgcgagccacataatctttgctttcttcgtctgctgggacatgtaccttttgccatgaagaatacttaggtattttatagtcaccaataagttcgtct

SEQ ID NO: 246140 - DNA, 708 bp, Cannabis indica
aaagtgtatgagtctcttggttccagtcctttcattgttaagtgctacggtcaattagataattataataaaggggaggtaaatatggcgatggagtatgcatcaggtgggtccttggctagtgcgatcgagagtaagaataatggagatggattgagtgagtgggaagtgaaggcacacacttgctccattcttaaagggcttgagtttattcatggaaagggttttgtgcattgtgatttgaaacccgcaaacattctactggtggctgatgatgatgataatagtccttatagcgtcgatggttttgtggcgaagattgctgattttggtctggctaagactagtagtgttaggagtaataatggtgatgatgagtgcatgaggaggtcaaaggttggaggaactctgtattatctttctcccgaagctttattagaaaatactcaagaagaggcgagtgatatttgggcagttgggtgtgtggttttgcaaatgttgactggactagtgctgccgtggtatgataaccccaccgaaaatcagctttccagtataattagtatagacactccgtgtagtggtttaccttcggattggctttccaagaatgcttgggatttcttgttcaagtgctttactaggaaccctaataatagaccttctgctcacatgttactaaaccatccctttcttctctcagaagat

SEQ ID NO: 246141 - DNA, 635 bp, Cannabis indica
cctgctcctttccaagatcaagttttctggaagcagactcagaatggtttttttacagtgaaggcagcttacaacgtagaacaatcatggaggtttgacccgacaaaagaaatatggaagtggatatgggcttctggtattcacccaaggagttctgtcttcctttggagagttcttaatgatgctgtcccaacaaagagcagacttcactttctctctgacagagagtgtgtattgtgtgatactggtattgagtcccctttgcatttgttctgcagatgtagttttgctaaatctatttggtttgggggaagcaatcccattaggattagtgaagtgattgatgattcaatatctggtgtaatggaaaatctggtgcggcaattttccaactctccttatgggggaaacagagcagagttcctaaattacataggatgttgtctctctgcaatctggtaccagcgaaatgccttcatcatcaacaatgttcctgtcaatcctattctgctttggcgagagctgaagaggagttcatggagttgcatgaagcggttcagttcagagggggaaatcaactcagtaatgaccaagtttcagagggacaggcagctggctttcaaggttttccctcg

SEQ ID NO: 246142 - DNA, 768 bp, Cannabis indica
gaggcgattgacactcacagcggacctttccagtccttggccaccaaatctgtgtctatgatccacaattatagtagcgatctcgagaggagttcggatctgagttgaagaaggagacctctgtcttctgttaagtgatctcatgcgccggacctccctaattcgcttgaagtagacgcctttgtcgctttggagtcgctcaaatcggttgatcgtataatcaatgacaataagttttctatccttttaatctctctttgattttcaacttttatcccttcactagcaatgctatttttatttgcatggttttgttttcttattattaatcaagtttatatatgtatttacaatacttatgtgtgaaatctaaagaggttagtgattctcaattttatatttacttatgtcgaacacttttattcgtgactggaagcaattctaaatattttatctataaaacgaaagtggcagcaacacaaattggctattgttcttggtggctcactttaggcggaggcgtggagatgacattccattatgataataatcggaaaagtaattgtatatttgtttcatttttatatttgacttttttatataaatagaatttattgctttttatattaaatttcattgatattaattgtaacacgttttttcaactttttcaaaatgtaattggttaaatttcaaaatgcaattttattaaaattaaattaattactttttggttttttccttaaaaagatttattttattagctgt

SEQ ID NO: 246143 - DNA, 723 bp, Cannabis indica
tctaattgaaactttcgtctgatgcaaccttcggccaaccacccagcaaccttcgtctgattgaaatcttcgtctaatgcaaccttcagccaaccacccaacaaccttcctctgattgaaacttcatttaatgcaacattcggccaaccacccaacaaccatagtctaattgtgtaagtgatagtgtaagaggtattttggtaattaaaaacacataaaaggtataaatgttgtccacaccttatggaggtttttttgtaaataaagcattaagttgtattttccatgtaataattccaaaaaaaaaatatattattcatcggatttgaaaggactatacacttcatttcgtgtagctaaggaatagtggatttgagaggattctctactttcattttcctcatcctcttttccttatcatcgttggggactttgtgagtgttttgtcgatgactggtatttacaatagacgagctatgttgtaggtaactattattgattagatattgagctttctttttatgctctcaatgaaagtactaaaatatatacctaattcttttggtaattaggaaaataagagaggttgaagatggaaaacaataaataacaagaaatgaagtacatgtactcaaatttcgtctaagatcttatagaagcacctgatgacagttattggatacaattggatttacaggaagaaacaagaccttgatggtaaag

SEQ ID NO: 246144 - DNA, 1374 bp, Cannabis indica
ccaattctaacttgatttttcaagaaactaaagaggagaagagtaagagctatacctagagcttgaattgcacacaaaaatctgcttgaaaaccaaagaaacaccaagattgttgctgctcaaagaggggccgaaatagagagggcttgagagaaaaaggattttgctttcttttctaattttctaatttttgaataaatgagttataaaattcactttttccttatttgtttcagccaaaactaagaagtcaaagtcaacaataaatcaattaattgatccacataaagacaaaacactaaaaggcaaaaagaccaaaatgcccttgcccacacaaaactaattaaaaggtttctaaggggtattttgggaaaactctaaattcccgactaatcccgacattcccaatgtctaaataaaccgtcccactatactgaaatactaatttgtgattctactgagccatacaccgagttccatgttgccggacaccgaaaatgcaaaattatgaaatttcactatatgacataaaaatgcattctgaattcaaaaataacagcataaataattatttaaatatctataaataattttccataattaaacataattaactgctaatttccaaattaaactaagcggtctttacattgaagctactaaaaggaggcaaaagataagccggggcatccaaaaactcaggaggaatacaagaaacttctggaggaatccaaaaaactgcaagaggaacttaacgtagccaaggtgacgctcgatggcaaagaatctgaaaccattgagcgatgcaatgttgttggactacgttctatctaccaagcctggatggaaaatcaagggatgagtacgagtttcttgggaaagtccgaaggggaagtcctcgcctattgcgagaaggataagaaggaagatgaggaagtcgaggccagtagaagaagaagaataagaagaactgtccaagtctcctactatgtaggctgggtttttatttatttttgttttatctaggcaaatggccttaaggcggagacaatagtttgcgccttgtggcacttttgtaaagacaaattttcaaggatggatggccaactttgcttttattttatcttttattgaatgcttcgtacttttacatttgagcttaatatatctgtttttttgcattttcattcacaacttaaaccattatgctttaatcaaatttaaaatactttaggcatttccattgctcgtatttcatttgatattatttagggtaaataccattttggaccctgtgttttgaaaaagttacagattggaccctgtgttttgttaaatgacaaaatggaccctgtattttctaaaatagtaaaa

SEQ ID NO: 246145 - DNA, 768 bp, Cannabis indica
agattgtaaagggttttatttagggtacaaaacccaacagtttaggctataggtccaaatactttgcgcttagcaagtgaattcaattgtaattgaattgttgctttccattttggccaatcttttctattttgacattctttggcagtttttcgttagcaagtgagcatttgttaggattttatgccctaaataaaatccatttcaatataattagatttgctaatcaataaaagattggaaattattttatgttgcatggtttacatgattaatttcataattatatgtttaatgtataaattctattaaatcatgaacatatagttattcacaattacagtgatgacatcacagtagaaagtaattgtgataatatgttttgaagtctttagtccattgatttatcagtgcactaaatttacactgacgtgataatcagcgataaagtttacttacacttgtaagtggtatgtcattttcagggcattagttaagtatactagtattgaatgttagagtataaattagactggactgatattgagagtagaatagatatcataaacttatcgttatatatttctatgttaatatcaattagttgatcttagatcaatagatcttaatattgagatggttagcttctagcttaactatattatttgtgttctttgacttgttcattaaagttgacaaaatggatcttcccaatacttatatcttaggaacatggtagtacaattgagtgagagcgctaatcataga

SEQ ID NO: 246146 - DNA, 1559 bp, Cannabis indica
aacttcatgccaaaattgaaagagaaactggaagaaagttgaagtgtgttcgagtagataatggtggtgagtacagggatccatttgaatactattgtagactccatggaatcaagcttgagaagtcagttccaaaaactcctcaacataatggtgtgccagaaagaatgaacaaaacaattgaagaaatgattaggtgtatgatttcccatgccaagctacttaagtccttttggggggcggctatgggaactgcagttgatttgattaacctttctccctcagttcctgggaacggtgatgtgtctgagagagtatggagagggaaagatgtctcatatggtcatttgagagtctttgggtgcggagcatttgttcatactccaaaagatgagagatccaagcatgatgataaggcaaaactatgtattttcttggggtacggtcatgaagaatttcggtacagattatgggatccagtgaatagaagcagggatgtggtgtttcttgaagatcaaatgtttgaaaacaatgacaaagttcaaaagtaaaagagaagtaaaagtcccatgttaatgttcctgtgagtactagctcagttccttcacccatagtgcatgatgatcatgggggagatgaacaggaaaaccatgaagagcatgtcaataaagaatcatatgaataagaagatcgtggtgagaatattcattatgatgttcctaaaatgaatgatgatggtgagcaactgaacaggatcaagaagcacctccaccaccaccagttgagactccagtaaatagatccacaagagagtgtaaaccagcttcaagatacaatcctcatgagtatgtaatgctcacttatggggagagccaaaaacttacctggaagccattctacatgagcataagaatgagtggatggagccatgcaagaagagattggatccctacatgagaatcacacatatgacttggtgaagttacctaaagggaagaaagatctcaagaacaagtgggtttacaggcataagacttaaaataatggctcacaacggtacaagacacgattggttgttaaagggtttggtcagaagaaaagtattgactttgaagaaatattttctcctgttgtgaaaatgtcctctattagagttgttcttggtttagctgctcgcttgaatttagaagtagaacaacttgatgtgaaaacttcatttcttcatggtgacttggaagaagaaatttacatggagcagccagagggtttcaaagtcaagggaaaagagaatcttgtgtgcaagcttagaaaaagcttatatggactcaaacaggcacctagacagtggtacaagaagtttgattccttcatgtcgagccatggatataccagaactacttctgatcattgtgtgtttacaaagaagttttctgatgatgatttcattattctcttgctgtatgttgatgatatgttgattgttggccatgatgtcagaaagattgaaaagctaaaggagagttgagcaagtcttttgctatgaaagacttaggatcggc

SEQ ID NO: 246147 - DNA, 581 bp, Cannabis indica
ttggtagatatcaaaattcgagagcataatttagtagaattggacacatttttttaaatccaataatctcgatagcttgagggatttttaacggcctaaaaaggttgtaacatgatttgatacatattaaaatttaaatagaatttttttttaattagtctttatcattattattaaatctaagtaagaatttgtgtttcccgaacatgtcattgagattgttggttcaataatttttctttaaattctgcttctactagtatcgtttgtggcctaattatacttcgtgtattggaaatatcagaaatattattatggctaatgtcatttgattaatgaaatatttcctcgactcttccttaaaattttgttttcttggggagattgtgttttttagaggctatttatctaaaaaataatgtatcattttaaaattaattataaaattaatatatcaaaaatctcaataggttccatttttccaatttacttgaaattcatctttcaacattaatgaactataaccacatgttgtgtggtataatggtaaacattgtctttactgacatccttctttattt

SEQ ID NO: 246148 - DNA, 606 bp, Cannabis indica
caatctttgtgaaaattttctatatttttatgacaaagtttaatcacaaagaaagcattaaacaaagcaactcatgaaatcatacaaataatcttgtacttttgtccttaatcaatttgcatccaaaacaatcaaagcatattcaaatctcaccttttaggattttgatttgaattcatagataacaattataggtgatcagtcgataattgcaaaattaaataagattacatggaattgaaataagagaagaaaaagaaattaaataattacattaatccataaaagaaattcaagcagttcacataataatccttaaaaagtaaattagctcataacagtcattctaaaacataaaaattcaattaaaaacataaaagatagagatagatgagaaagaacactaattggagtcctctaatagtgtcttctgcttccatccgtcctcttatgctcaaaagtggtcttgagaaagtttccacatccttttatagaccaaaaccgagaaagtttcccaaaaattgcaaatgccgcgacatagtcttgaatgtcgcagcactcctcttgtttcccaaaatcatgactttttttccttttttttatttt

SEQ ID NO: 246149 - DNA, 571 bp, Cannabis indica
tagtatgatttaagaaaatcctaataagaagcatgttagtagcctgatagctgaataggcgcatgttctaaatttccaaaataagtggcaattagttagttttacttgatcacgatctgaccagactagctcttggttacgcaggttgttctaatagtatggacgccagacaaaacaccaggagtcaaggtactcggtcggacccagtggttgtgagggagttcagattcccccaaatgtttgtggttgagatagagatcctagaggcagggcacacggtcaaggtgatgttaacctgccacaggctaaccaagctgccgaagaatgggaaaataggtttgcagaaatgaaagctagaattaatgagcaagatgaggaagtcagacgcctgagacagtagggtgctcctactatccctgctccagagatgcaagtagctcctacccctgctgtgcaggcaatatcagtcactgcagtgaaccgaatggaaccgctgtatgaaaggttccgcaagcaggcacctctagtatttttgggaagacttgacgctatgaaagctaagcagtggcta

SEQ ID NO: 246150 - DNA, 488 bp, Cannabis indica
atgaaattgttttttttttttttgaacaagaagatcaaagactaaagaacaccaaagctgagactaagatcttcaatgagaggaacatgagtggttccaaattatctctttgtccgttccaagggctgctcgagcaaggccgtgggctgttgtgtttgatgtccgagggatgtaatgaaccgaggcacctggaaaagaagacaaagaggagacaatcatggcaatgtagcctgaaagagcagaacgatccgtggagaactttgaattcgatgaaccgaattttgacagtcggaagcaataacagcaaggggaaaatgaactgcacgacaccaaagcaacgcctgaatgagagcttcagcttcagcgaaaattggaggcaggcctgaagttgaaggggtcgaaagagtggcaactagtgagccctgacaatcagtgactacagctccatacccatgtctattggatgagggagagagggctgcatccac

SEQ ID NO: 246151 - DNA, 673 bp, Cannabis indica
ttgaaaagtttaaatatattacaagtttattttcagtctgcttaatataaaagtttaaattctgcgctatttttaattagtaatcccggttaggggattagggtttcataatcatttttgggtagcgtgcctaattatttagggcgttacaattgtactctattgctaattgtaaatcttgatataaaatttaatatgttatttaatacttaataatttattaaaaaatattaaataataataatgcaagtcatttaatgcaaatgagcatgttaattaaaatttaataataaaatattaaaactaacataatggtaaatataaaaatatattatttattgtgatgtaaattttatatgattttatattgcgatccaaatttagatcactttttgttatgtgatatatttgcatcacaatttggcatactattaaaatagaattttaacaaaatgagttatattttgcatttatatcacttaatggagatgctctaacattgagttattgttcatgagaatctgaataattctgtgggtttatgttctggtctcattgttcatacatacatttatgattaataaatattttgatttgaaataaaatggaaaacttacaaaaatactggaatttgggttacaaaatactgtcacacgattttttttttcaaaaa

SEQ ID NO: 246152 - DNA, 1529 bp, Cannabis indica
tataaatatgtactattctatgaaatacacatataattcgattcactattttctacaataaccaaatggctgcctttcgaactacactggatagatgttttctgcaagactttccttttgatggtgatgaattcacatgggctaaaaataggaaaaatccttcagctttaaaagaaagattggattggtgccttattaatcagaaatggaccgatggtttaatgatcccaaagctcactcatcttgattattttggctctgatcaccgtgctctcttggtcaatattttttcaccagccactactgattctatcacaccaagaaggtctcgttttcgctttgaaaaactctggttatctgatgctgaatgtgctgagattatttccaatacctggctgcttcaacccgattgtgacatggcttctaatcttcattccaacttgtaaaatgttgctgataatttacagagctggcacacccgaaagtttggacaattaaagagtgatatttctcaagctcaatcacgtgtgaaccatatcaataatttaccttctccaactttattacattctcacactcttaacacagccgagtctattcttgatgatctgttagcaaaagaagaacaatattggcagcaaaggtctcgtattgattggttgcaatcgggcgatcgcaacaccaaattttttcatgccaaagctagtgctagaaactccaccaataagattaaatctttgaaggatgctgatggtaatactgtcactgatcgagatgggatttcaaacattatttgtcaatactttcaagaacttttactgccaaagaggaagatcattgggcactctctcatgttctctctactatcccaactacgatcaatgatgaccaaaatgaatttctgcttcgtgattttacaagagaagatgtcttttttgctctgaaatatatggcttctgataaaagtccgggtttggatggtatgtcggctatgttttatcaccatcattggcacattgttggggatcttgtttcctcggtggtcctaaatatccttaatgacaatggagatcctactattttcaataaaactcttcttactttgattcccaaagttaagaagccgagctctatgaaggactttcgccctattagcctctgtaatgttgtgtacaagcttgtttccaaaatgattttttcaggtttaaggatgttcttcctttggtcatatctgaaacacagagtgcttttctacccaaccgcttaattacggataatgttttagttgcttttgaaatgattcattctctgaaacatcgtaagaaaggttctaagggctatgctgctattaaattggatatgagcaaagcctttgatcgtgttgaatggtcttttttggctgcggtaatgggtaaaatgggtttcaacattcgatggatctcccttatcatgagatgtctgcatactacatccttttctttcaatctcaatggttctgtggttggttccattactcctcagcgtggact

SEQ ID NO: 246153 - DNA, 2889 bp, Cannabis indica
gtaaaatatttccaacattaatttcattgacacttatgctcccatagttaagttcaataccttaaaactattatttgctcttgctgccattaaaatttggcattcacatcacatggacataaagaattcttttctccatggtaatcttaataaggatgtttacatgaaactacctcaaggttacactccaaaaggagtaataccaacaaatgatgtatgcaaattaaataaaatcctatatagtttaaaataagcttcccgacagtggtatgctaaacttagttccactctcctataacaagacttttgtcaatctcaaaatgatcattcataatctattaaacaaacatcaagtgtattcttagccattctcatttatgttgatgacaatattatagcaaataataacactactagactaacaacattcatttaaactcctgatgctcagtataaacttaaagatcaattttaaataaagaaaacaacaactataagtaaaatatataacaatcaaagacagcaagaaaaataacatcataacaattataatacaactataaataaattataaaatagccaaaaaagcaatatatttatttttactgaaaaatatttttgtatataaaaaagttcaaaatgtaagaatgaaaaatattccatgttgacatatttttatattttttttttcaattttgttatcttttatgtaaaattttctttatttattatatttcggtagaattttcaacccatatgacatttcataaattttttctattaaagtatgaatatttttcatcttgaagtgatctaagtcattatattcatgtggtaacataaaattttatagtcttctcgaccaatcccgtgctaccacatgaccaactcagaagatgagtcgatctcaagatatatatcattactattacaaagactaataaaaaagagtttatattcaattacatcactacatctaattatgttttcaaagagattgggatgcttatcataagagaattatgttgggttttatgtccttataaaattacatattttatataattcatttattacaaagaagtaaaaatcatttttgttttatcaattttgttatttacatattttattatatgattaattgtttttaaaacaaacatttataaagtctcaaacatacagtaaattacaattatagtgacacagtcacagtgggttataattgtaattatatgttcaaaatacttttgtcttaagattaaatcaacacaccgaatattttttgattcgacaatctacgagatgatatgcttacacattgtgatgtcttatttaggacattgactaagatatcattgaatatattttgttatattggacttgacctattgattatttataagataattaagtatcattacactactacaaaatctgaaattctcgaagactttacaccgtggggtaaagaattctcaacggtctataaaattttcacttatacgagcgtcgtaaatattgagtagaataggcgatggtagaaaaatgtcgaggaaaataattcttgatggttgaaaattatcagttatagtcgatacaataggccacagtttaaaattatcgctatagtgaattctcccaaaaaatatcatcgtcttcatccttctcaaaaccaagatgggagtttcagttggccttaagagccccaaagagtcgagatttgggccacggttctgccgaaaccacaaccctgagatctttgaagatttgtgaaatacaaaaatcttaaaactacataaatcttaaaaaaaaaatagtaataataaagaagttaatgagaaagagtggacaagagagagagagagagagagagagagagagactagtgacagcggtgctcgtggtggagcttatggccgtgttgtggccgactgtggtagagcttgaatgggctttcatctatctatgatggagctcgtgaaagagagagcgagagatgagagacaagtggtggagcttgtcgacctccgtctatgagaaagagagaggacaacggggagcagaggtcagagagagagagagagacggtttgaaaatgaatagatttgaaaaaatttagatctgaaaacgtgttacattagagcgacagaaaacacattatctaaaaaattttagatttgaactaaaaatcgtggcctataacactgtagtataggccacaatttaaaactatttgttatagtataggtcatggtttaaaatcctcagtaattctcctttaagaaaattcataatttttaaggtacgcttaaaagctattgagaataccttacgagtgtttaaaactgccagaaatatccaatttttctcgacgattttaaacactcacttaattttttagcgatgattcctcaaaataagtatttttaagactgtcgagaatagtgatagttgtagtagttttattattttatctaatcatatcacatcgttgaccataagtaaattcgatcttaattttaagtgatgaatattctgctaattgtaagtcttttgatttgtttgttatcgacttactacaaactaacccatacttacatattgaagatttagtgatataattgatgagagtaattatcatagacgtgaaatctataagttcggtttaagaaatgaaatgagaatattttttatagctagatccaagtgttaaatgatagactgctcatttttgtaataatttacgagaataacacttctaaggaggtatgcgggagtttaggacactacaaaaaatcttacttttagtcacaacaaaacttgtggctaaaattaaaaaaattgtgactaattataaattattattcttttgttgtgactaaaatgttc

SEQ ID NO: 246154 - DNA, 703 bp, Cannabis indica
ggccaaattgtcttgatcgactaagaagggtaggtcgaggaggaggaagagggcgagatcctggcccccttggaccggaagcgtaaaggcaaaatggtggaggtcgagtcttccaaaaagcctaggagggttgatactccggccgtcaactccgactcagggatcccacctgaagcggaggaatatcttgtgcctcccgggattgtccttactcccgttcccgttgatgaggagagacaacagctccggatcgccaagcaccattacgctatggctgagtatacgagagggaacaccgaggtggaggctttgaaaaaggtcttaagggaggccctggagaactccttgcgtgatgaggcttttaggaacgcctgggacctgaacatggaccccctgacggactggttcaaccgcttcgtcgggccgaccctcgctccttttgcctctgagttgacaagccactttgtctccaacttgacccaactcctagccaagagatacgcagcctgcacttccacgaactcgatctatcagatcaaagatatcagcgctgctatgaccgctgtaagtctctgttagtgttcttgggccttactttatggcacctgatccctcgtacttactcctttttcttgtattgccaaattactgcagagaccggtcacctctcgaagactttaattgatcatgggtacatcatgtc

SEQ ID NO: 246155 - DNA, 715 bp, Cannabis indica
aacagctccggatcgccaagcaccattacgctatggctgagtatacgagagggaacaccgaggtggaggctctgaaaaaaggtcttaagggaggccctggagaactccttgcgtgatgaggcttttaagaacgcctatgacctgaacatggaccccctgacggactggttcaaatgcttcgtcgggcctaccctcgctccttttccccttagttgacgagccactttgtctacaactgcccaactcccagccaagagatacgcagcctgcacttccacgaactcgatctatcagatctaggatatcagtgctgctatgaccgttgtaagtctctgttagtgtcttgggccttactttatggcacatgatccctcgtacttactcttttttcttgtattgccaaattactgcagagaccggtcacctctcgaagactttaattgatcatgggtacatcatgtcagaatttgggggcatggatgaggccatgaagagtcttagagacttgggggttgagaggaaggctttccgggaggaggcccaggagaaggaggctcaggcggagcggaggcatcaggaagcactgaaggccaaggctgaggagttaagagctaaggatgatgccctgaaggcctggaacaaggccgtgacttaattaggcacgatacccaataaggtataatctagagtgaccgttttaagaatacaacaaaaa

SEQ ID NO: 246156 - DNA, 937 bp, Cannabis indica
ctcaagacataccttttgcaacttggtttccaaaactcgaaggccgacaccagcttattttacagaaacaactgtggtcaacttctgctcattctcatatacgtcgatgacattctaataactggtgcagaccagcaacaagttcaacacctcattcatcagttacacaaccagtttgatctcaagaaactcggttctgtccactacttcctcgggtttgaagctttcagacaaggcagtacatattaccttactcaacacaaatacacaacagatttactcaacagaacaaacatgcttgaagccaaacctcaatctacaccgatgtgtgccacttcaaagctttcactcaattctggtaaacttcttgaagatcctaagcaataccgaagtgtcatcggagcgttacagtatttaaccatgacacggcctgatatatccttcgtcgtctacaagctcagccagttcttaaaagctcccaccactgatcattggggaacttgcaagcgtgtgctgagatatttagcaggcaccacacatctcgggttgtatttttctccaaccacccttttggatcttcaaggttataccgatgcagattgggcaggctcctatgattatcgcaaatctacatctggctattgtgtgtttttaggccaaaatttgatcagctggtgttccaaaaagcaaagtgtagtagctcggtctagcactgaatctgaatacagagcccttgctctggccacgtctgaacttacttggattcaatccctcctctctgagctgtctatctctcttcctcaatgtcctattctttggtgcgacaatcttgaagctgggtcccttgcctcgaaccctgtctaccatgcccgcacaaagcatatagagatagatctccactttgttcgtgacaaggtccttgaaacaaacttgatgt

SEQ ID NO: 246157 - DNA, 598 bp, Cannabis indica
agtgttaaacctggtagatcgtttgatagctatgataagggtttggaatcctattgccttgcacaaaattagttttactccgaaaaagtgggtttaggtctataccgatcaggattgagagtagagagttgagtgctgatttagtggaattgggcttaaaaattttgatatcatacttggaatggatttcgtatccaagtattctactagtattgattgtaagcagaagatggtgatcttccaattcgagggcgaggagccatttgagtttgtgggatcagttcagggatcccatattccagtgatctcggtattaaaagccaaagatttattactagatgggtgtctagggtttttggcagtggtattcgataccacatgacctaaatcactttggtcagaagacattaaagtggttcaggaatttttacatgtgtttcccaatgagcttctgaattttccaccgcagagggaaatagattttttaattgacatagcacctagagcgaagccaatttctaaagcaccttatagaatggctctgaaaaaacttaaataattaaagattcaacatcaggggatgcttgggatgcttgac

SEQ ID NO: 246158 - DNA, 5409 bp, Cannabis indica
ccaaaatttaatttcgccttacccatataccttaggaccggccctgttcgtaccgacagacaatatttttgattacaaaatctaaggctttcttggccgttatggatttcattagctctgcttctgtccacttcatgaaataatccacgacaactattgcatactttactctgccttttcctattggtagagatcctataaggtcaatgccccataccgcaaagggccaagagcttgtcatcaatgtgatttcatttggtggggcccttgggatgtttgtgaacctttggcatgggtcacactttagggcgtagtctatgcattctttcttcatagcaggccagaaatatgcttgtcttaaaaccttattagagatgctcgaacccccatgtgatctccataaaatccttcgtgaatctcccgtataaattttttagctttggagtctgagacacaacttaggtatagcatgcttaggcctctccaatgaaggataaagtctattataagataacagggggattgatattgtatccttctggaagccgcatgatcttaaggcaattcttcctttgtcaaatagttaattattgggtccatccaacttgatacctgttcattcactggaatctcagccttcgatacaatacttagcaccgtgaggtactcgacaagaactactcccagtttttccatttctcgatttgatactaaattagctaagtagttgcatgagcattcttttctcaggaaatttgttcaattttgtaactcttgaattcctggagcaactccctcatggctgaaacataggcagccatctttttttcttgaatttgatattctccaaacacttggttaataaccagttcagagccactaaaaacttctatcttgtgggctcccacgactttggctagtctcaaccctgctagtaaggcttcatactcggcttcattgatggaagctaaaaatttaaaccttaaggcggcttggagtctcaacccctctggagatatcattgttattccaaccctagattcattctcttttgatgctccatcaacatatacccttcaagtaggaataccagggtctagtaagtcagttgttgcttccgtttcattgcattcatccatgaagtctgtgagggcttgtcctttaatcaaaatacaggtagcatactatatgtcaaattgactaagctccatcacccatttgagaagtctctcaaaggctaccagtttctaaaggacttatcagagcggtttgtgaatactttaattgtatgcgcctgaaagtatgatcgcaacttccttgatgccatcaaaagacaaaagctaacatctcaattaaagtatacctagaccagcatgtcatcaacatatacctccctatttcttctcaataaatttttgaacatctggttcaccatgcactaatatgtggctcttgcattttttagtccaaatggaatgactagatagaattataaacctttgtcgattcgaaagctggttgtaccaggagtacgcatccatgaaggaaaatagctcgaatccagaggtggcatccaccatttgatcgattctgggtaacgggaagcaatcctttgggtaggccttgttcaattctgtgaagtcaatgcatattcgccatgttccgtttggtttgggtactaaaactaggttagctagccattctggatagtacacatctctgatgaaggtgttcaatagcatcttatccacctccttttctaaggcttctaattttaccagatccaaaggatgtcttttttactgtactggaggcatgtcctttaattaatgtttaagacatgagtgatcacatgcgagcttattccagtcatatctccatgacaccatgcaaatatatatgttgattttttgatggtgcttataatttttctccttttgtcaggactcacgccttttcctaagcggataactttggttgggtcttgattgcaaattcctacttcctcgagcttttccataggctttaaaagggtctcatagccaatacgaagatccaaatcatcttatcctttttataaggttgtgtttccagttccctaaaccatgaaaacagcttgttgagtagcgacattataaaactttcttacctccccttaatttccacgaatagttccaatccccgtcgcttgagtgcggaatttgaggcacatatgcttgattgaggtaatggctccaaaatacaccaaagctagacgtccaaaaattgcattgtaagttgtaaggtagtctattacaacgaaggtgaaatacttgaatgttctttggggggtatccgggcacatggttataggaagtaagggtagttccattgaatcttgtgagttttgaaccactcggggagaggtctttatcagtgagtttgatggcaatgaaagcgtctttaaacagaaggtttactgaactcccattgtccagcaaaatcttggcaacaattttgttggcaatgggagtttcaatcaccaatgggtcattatgaaggaaatgcactaacttgacatctttttttgtaaaggtgatgggttgatccatgagtcaaggcctttgtgctgggagttggttaacttcccatacttctccatcatgatctagggccttagcataactcttcaactcatttcatgtggttcctctaatatgtggccctgctgagatcattgctacccttccatttggtctaggaggctgttcgggcactggatggtgttgggggaggactcccaaatgaacttgagctctgagaggtgctggtgctctgacttgtcctccattcatgtgcgacaatctttcctttatccactcgtataagtgaactagccttattaggctcccgataatgtctttcaagcttttgcattcattggtagtatggccaatatcattatgatatttgcatcttttattgggatccctccgtgaactatcccggtacagaggaggtggtctctggtagtggatgttttgccttgtggctaagttcacacattcttgagtgtccactaaatcggtatactaagtatactgggaggtgtagcgtttcttttgcctcttattcttagtctgtatgctttctttcaatgacctcttactctgggaggtctgaagagtttctgttgcagttgctttaagtcgtgcaaattgagcgggatattgcgagttcactccgggagccaggttaccccctagcgctccaaaactagactgagctggggtaagagcaaggttgtgggtatatcctggtgttgctaaaaattatacattgggcgctccacttacctgcaacacaacaggaagggtaattcctagaaactgcattccgaaagcataccttggactgccagtcgtagtatcctccgaaagtaattatctgtgcttcctataaattaatatatttttgggccctcttcttgaagtcctgaagactagcatctctttcttaatgattctcattccagaaaagggtttgctctagataccagcttgtagcaacgccaactgatgtccatcatctacttttttttttgttttggaagcttctttcttaaataattttttaaagtttcaactagctagtagttatttaatgttgcgttaaagcactgactttaaggtttattttcttggctgccacgaactgccttctaaaactaacttgttccaacagtccacgaataaaagttccaactttttaaatcactcctcagcagaccctcctaatgtcaacgggaaacacaaacactttgtgtcattactgactctcatgaccgtcattacacggttaaatctggataagtgatcactaggattcgagtctccagcgtataaggttatttcaagcattttgaaattctttgggagctccgcttcaagtatgtttctggcacaagatcagtcctcgcaatcagacttcgaatcatctcccctttgtgttcgagtgactttcgctatatcttttttggggtatggcgagttcggctaggatgccgtcattcaatgcactattggagattgttaaagctttcttctttcgttctaagtgatttctaagatcacagtgcttggtgtcaagtttttatctcaagtcgatagaaggatccttgtgactcttcctcagcactttgtgcacggatacttttttccagtctccccgatcctgaggaccaacatttccctttcgaaacctgcccctctgtggaccattctgtttagggagatcagagcggactcttcatggatcttgagccttcctattcttttcaggaatggctattgggtttgcctttagggaaccttcggaagggtatcagattgggcttggctcccgattcatgtgcctctgacattctgaaagttgtagagattcctctcttattttgtcttgcccaatgggtcctgcgttttgatgcacatgaatgcctatagtttccatcactttttccatggtgatcattatctcttgcatcattctgttttgctccttttgctctgttaactcagcttcatggtcaacgactttctgtcttaacactaaatgttcggtataactacgatcatcatatgcctcacaattctcttggttttcatcgtattttggatcattagtttcatcttgctcttccacctctacacgtggagccacctcttctttatctagcccttagggccttaaggaaaatgtggttgatgtgcatggttcctagttaacaccatcataccaaggatttatttatgatattccttctatggaaagctttctatagctctcaatgaaaacaataaaatattgaccgagatttttagcaactaattaattatagctatttaaatgtttagtttaaatttaatacaattatatttacgtggcttgggcattaatgagccttagtccacgagttattgctatttaatatagtagttttttacatagggtgtttatactattttttcagatcccttctccaaaatatagaaggcaaaaatgttactattatcgcaagtgtggaagcattactttcacaagtttccagattcagattatagggtatgtatgtctgtctggtaggttgtataggcttttcctaagtgtttggagaggtaagtccttaaccttccttgattgatgcaatagttcattatgcaactatcataagattcataaatcagagtgtaatcatcgaataatggatttaatgcatctcacacgtctttttagaaccattcgtagacgtctttgttgggttttatgtcctaaataaaactctatttcaatgtaatccaaattattcaatatcaataaaataatagaagtatttttcattcatttgtgtatgttttggttcaccttatcaat

SEQ ID NO: 246159 - DNA, 1251 bp, Cannabis indica
tagtattcccgacagtttataatagtgcctaaaaattaggtgacgttgttcaattaaaacgaaaacaaaaaaaaaaaaaacaaaatatataagtattatattatagctaacagtttaaaccgtcggctatactatatccgacgactttaaactgtcgggtataatgctcatatatttcttttaacatatctccccttatactagatctaatttttaccatagacacacacacacacacatcttagaaccaattcctgcaaaacccacaaacccgcacctccggccctctctctcatctcatcattggtgccacccacgttagagcaccaccaccattgcaaaactcacattacaaacccacattgcaaacccgcaaacccacattgcaaaacccatgaaccgatcagtcatctcccacctccatcaatgttgtatccttcatcctccctctctctctctcgagctcacatcaccggcgccacccaccacggcaacatcggagcaccaccacacgatctccctccccaccacagcaatgtcgaagcattagcaccacctaccgccaattttgtacaggtatatatatattaatatttatgtatttattgtatttataatctaaatatatttttatatatatttatttatttttatatatatatatttattttttaatgccgaatatatatatttatgtaaattatttaagtaaaaaaaattaattgtttaatttaaaattagatgttattctataaatttaatgtgtaaatttgatgtattttaaaaaatgtaatacgttataaagttaactgttattgtcaaatatttggagaaaagttttttaaatagaaaagattttggtttaagtaaaaagtttatttatttaatttggtattgtaaaaattaactagttgttttaatttagtttaggtataattataaattgttattagataaaattaaagtttaattagttaaattttaattattttttatgcaatatgttcaaatttaattagtttgatttaattatttaattaataaataattgataattttttgtaggtgtttatttgtagtggtaccatttgaaaaatttggggacgctatattaatcatggtaagctacttaaactttttttttattgtagtgtttaacattattaatttcaattatgtttagacattactggtgatcttattcgagtacgttgattgaaagctttattaggcatgataggttactaaaat

SEQ ID NO: 246160 - DNA, 542 bp, Cannabis indica
agaaagacaattgaagtatttccgaattgaaaatatctacaagtaaaaaagctaagggtgtcaaatgttaatcctaaaccaaacatacctcctctgtggcagctgaaatcttctctttcacgtttgcggagacctataaaaataacatgactaattgaataatatgcaattacataaatatatattgtgtttgtgcgagtgtgcacatataacataattttattttttctcaagcttaagcaaaatcaagtaaattgctaggtaggttcccaaggaattgaatctcagaactcaaggggcaaagtatggccagtcacttgacctgacacaaacatcggtaatcatgcctaacattgaaactaccatatcctaaacaaattatctatagtggcatacatgtagtaactagtaagaactaaataataaaatagagtgtgtgcagccaaaagacaccgacactaaatcaaaagcatacacaatgtcattgcattaacaagtaaatttatgaaaaataggattattatatgaatttgaactgacct

SEQ ID NO: 246161 - DNA, 723 bp, Cannabis indica
attttattattattttaataggtaagataataaaaaaataatataaatgctttacaatttaatgttatagttaattatattaataaaataatacaaataacataaatataaataaaaaagtagtgtatttattgtgatgtaaactttacatcataataaatattatgtcaaatttaatatttactatgtgctaaatttatatcattttttggcatagtattagaatacactttttcttaaataagcaatattttagctttctaatgatatgaaccaaaattctctgttagaaaattatatacgatagtatgttaaactaattaaatttggccaactcaattaatttaattttatattaaatatgctgctattttattaaactcggttaacaatacacagttttctcttttttttgtcaactaattaacttttaaatttagtaggtcccacatttattacattattattattttacttggtaggttcctgatttattaaactattatagtaaatagaaacgatttgaacaatttttccaaaaataaaaaaataatcatcaatcaatatatcaatatcaatatatatatataaaggaaagtttaaagagagatgatgtggcattccatgtgagttttctttgagtttctttttttttctcattttttcatattttttaatatttttgtatacttttgttaatatgagagtcatgttaaaaaagtc

SEQ ID NO: 246162 - DNA, 694 bp, Cannabis indica
taagtaaattcttggtgatagaaggaacatgtaatagattttgaatgttgagctgagtagaagtaaaaggagagagaatataggaattaccaatattgtctatgctgagaccactgccattgccaacataaacttgttcatttcctgagtatgtgctgctgttgtgaaggttggaaaggtcaggggtgagatggtgtgttgctccagtatcaggataccaatgttcatcacagatggattctggtgtagcatatagtgcttggatctctgcaaggttagccgtaggagggaaattgttgaagcattcaggcccagtgaaggatttatcaaagcggtagaaacactgcttcacactgtgacctaacttatggcagagctggcactgtatcttttgtccaagattgggagattggccacggccataggtgttgggaccactgcgaggtgctgaattgtgagggggaccacggctgttggggggaccaccacgtgtcactgagttgttgaagcctggtggaccactggaaccacgtccagggccattgttgaagcctggtggagccgtagcagtgtgatacggattgcgattatatgagccagaagctggagttctgaactgagataaatttgcctctgctttattgatatccagacttttggcatgcttttcaattcgaacggattgtgccattaa

SEQ ID NO: 246163 - DNA, 638 bp, Cannabis indica
ggaggagtttgatgagccatatatgaaccggggcaggtttgaacgtgggtatggaaatagagaagctaggatgggtagacctaggagggataatgatttaggaaacataaaaattaaaatcccatcttttcaaggtaaaaatgatcctgaagcttatttggagtgggaaactaaaatggagatggtgtttgattgtcacaactactcggagataaagcaggttaagttggctgcaattgaattcaccgattatgccattgtttggtgggatcaattactgattaataggaggaggaatagagagccacctgtggacacttaggaggagatgaaaatgcttatgaggaagcgttttgtactcagccactattataggggattgtatcaaaagttgcagaggctaattcaaggctccaagagcgtggatgagtattacaaggagatggaggtagctatgatccgggctaacgtagaagaggaccgagaagccaccatggctaggtttttgcacggtttaaatcgtgagattgcggatatagtcgagttgcaacattatgttgagttgacagatatggtgcatcaagccataaaggtggaggaacaactcaaacggaagggaatggctaggaggggacaac

SEQ ID NO: 246164 - DNA, 531 bp, Cannabis indica
tatttaggcctccccaacattatgaggcataaaaagtcttcgagtcttggtttcctcaaaaataaagtcatctcttggatcaataatcggaatgaaaaatttctgtttcgtgctggtaaagagattttactcaaaactattatccaatcattacctacttatgctataagtgtgtttctccttcctacaggcacttgtaatgatattgagaagctaatggcaatcttttgttaaaagactaattctagcaaaggaaagggcattatttggatgtcatgtaggatggttgcccaaaacttgaaggcagtatgggttttcctcatttacatgactttaatcttactatatgttagcaaaataaggctagtgtcttctgtgtaaatctgattctctaatgggtcaggttttaaaagctaggaactttttgcactctgacttttgtcggctcagctgagcttggttataatctaagttttatttggaggaatatttggagtgcccaaaatcaggttcatttgggggctactagaa

SEQ ID NO: 246165 - DNA, 1247 bp, Cannabis indica
ctagaattactacaatctttttatgaacattattattattattatttgtaaggatgaacattattaataaatattaaatagctgcgttttaatatattactatgaggtgataatttattagtatctcgatttaaattttatcaataatagtatgatatttgtagctgatattgggtactaaaatggtgccctttaagatttatcgttataatagagataaaatttcaaatttaaattttttattaaaagatatgttaaatttcttaattataaaataacatatttagcatagtacaatttttatttattttttttttagagaaattaggtttttttttattattatctaccattaatggaacaaaatattgcttaaatttcccaactttaactaaagtcatgttccttcaagtggaagttacacatttatgggtttatatacaatgtatgccaactataaatttttttaatcaaaaaagttattttatgagaaaaaaaaataaaaataattgggaacagtttagagtaatcagctacctcttaggtaggtaaccaattacctttgtacgataacaagttactttatgtattgctctctctaattttaactttttttttttttttttgttaattttacctataaattaacctttttggaaaaagaaaagaaaaattctcattcattcagtatagggaagaagaaaaaaggtaatgcaaagaggatgaggatagaacataaacaaatggcataataagatttttaatttttattagaaaaagatggcaatattgtaaataataaattagaaacatgatagaattattagagacaatccatgcaactttgattaaaaaaatcagtaaattaaataaataaaacttggtgaagtggctgttttgtctagacatgattcaagtcaacctagttcatagagtaagatgaatttttgaatctcaatacaataaaaatatctatataaactagtgtatcatcatcccctatgataaatctttaaaacattataataatgtaggaaaattcatcccccaaaaaagagtgtacggatgcactatgtacattgtaattatttaaaataatttaatatgttaaaaataagattcaaatagtacgttacacgttttatattttatacgtgtgaaaaatacgctttttaaaccctactttctgtattgtaaattattcaaaatttctcaagcaacaagtataataccatatataaaaaaaa

SEQ ID NO: 246166 - DNA, 659 bp, Cannabis indica
gtaattatatatctcagttgacaaatgtttgacctttggtttggattttgttgggcctgaagtaggcctttttcggctgagtaatagcttcccatagttaattatatgggcttaactgttgtaatatacttttaagaaaaacaattgtgaactattccatgttgtaacttataaaatgtaatgtagcatgctttattttaaaaaagcaattccttgtaatttagttgcagcaccattcagaaaatacactattcttttattgtttggacttcgtacaaaataaggtttctgagaaattatcatcaaacctcttactcctctcgctctaatgctatatatatagtgtacgtcatttattttggaattgtaaactgaatattgaatatttatcctttaactatgaaaaatttaaatatttatatttgagagaatattgtttatccaaattttgacaatagtgatgtggcaaaaataagggtacgtggcatgaaaatattaaaattgaattaatgaagaatgtgtaaagtcatgaccgcttcgtcatggctgttagggttgtacatcggtcggtttagtcggtaacccaacgtaaagatcggtttgtaatgcatacaacctacccaattaaaaaaaataatcttaacccgaccgacggtttg

SEQ ID NO: 246167 - DNA, 836 bp, Cannabis indica
gatgttaatgaaacatacttgttagtaaatctagatcctggaataataattccaacacatgtcacccattcaaatgcaaaggcagctcagatgaagtctacacgcaacttcggaagtcccgtttagacttggagggcaaatgttatcccaatttttgcactctaacgtggcatcacacgatggtaacacgtggagtcgactccaagtatttgctcgcaagatataatctgaacaggatacctcatatgcatgctcgaggaaaagcaatcaacaatccgcccagcgcgaccaacacttgaattcagctttcgcattgtgagtcatcaaggaaatccttataacttggggatcagattgcagagatatggcaagctgaccaaattccacgatcagtgtattttgtatttactatgcaatctttctgcttatatccattttaataagaagggaaatacttcatctccaagcttatagccctataaatagtgatgcatattcactgggcaaagggtcaaaagattttactggagagatattatctaagaattcatattcagagatattgttgtaagagctataaggaaaggaacctttctccttgttcttgagttaatacaaataacgaggattaggctattaccgaactggtcggggttgaaccactataaaattcatgtgtctttatattgctttattatatttcaatcgttagaagctacttgttgtttactaaattagactcactgtcgttggctaaaagctaggtcaacaaaaactgattaatctagaactctccattagtactaattgttttatgttactgcaagtgggagttt

SEQ ID NO: 246168 - DNA, 1250 bp, Cannabis indica
aataaataattttttaatctaaagataagaaatataaatcaaaatatttattaatatgaataaataaataaataaaaatttatttatatttaaatatatataaaaaaatatatataaataaacatttctaggtggcaggcttactagttgagaaagagagatggagagaaagagagggaaagacttacgtgaagagaggagaaggttgtggttgtgctgcctgattaagaagaagagacaagaaggtcaggattgggattgaggttgggggttggggctaggtcaccgatagacatgaagaagacaataagaagaggatcaagacgaagtgacgagaggggatcactttcaaaattgtcagatctttttgcgcaagtctggattgagatgaagtgaacatgcaagaatctaatttttgggggtttagggatttcaaaaaaatttgcgttggtagagggccttcacaattatatgtcgtgtctgttataaatgctcgtgaacattgtattcaatttttttaaaccgacacaatatgtaatgaacaaaaaaaagtaattttcactttattcgtcaattttcttttttatgtcattttagtaaatgacacgaatcaatattttgaatgctgtttaggaaccgatagctcaatagattgggacactattcatgtcggtcgatgcaatgaataattgcgttgatcgacttgaatagcattttttgtagtagtatgtatttactatcatacccttgtatatgattagaacatatgttataataaatggtataacagtaattccccatggatatgcttaaagtaaaaaaaaaaacacttcccataattaatgaaaaaaatagtgtggtcggttgttgctgaatgttcaaagaaatgaatgacattatgccaatttctttcttctacagcattaacttcctcccatgctcactcccctaccaaacatcagcgctcctagaatagtattcaacaatataaactaaatgtgttcaaacgaaatagccacaaattttaccaacaatattgtattttttgacattaactctacttacaataatggcacttcattttaaattggtatttcttgtagaatttgtcaaacttgtttcattgtatgtaacccaacacaaagacaaaggatcaattaaagaaattaactcaataagggtacactatagacaaagagtacaaaccctatagtgtttatagactttaattatttcaatctccaatggcc

SEQ ID NO: 246169 - DNA, 513 bp, Cannabis indica
tcccggtcaacttcaggttttggttccaattttcggtcacaggttacgggttcgggtcaaccttttggtttgggagtgggttcatgtccgggtgtgggtttgggtccttgtcagggttcatgtccagggttgggtcctaaattgagacactgactacttgtttttttcaagccttgtgtccagatcctgatcccaatctcgggtcctagtttcgttccatttctggtgccggtcacgagctgggtcgtagcttcaagttcaggtctgggtcgggtactaggtccttgtcaaagttctggttcccaggtccctatcttgattcagggtcgaggtcccggttattgtgagcgttttggtgccgctctaggttcgggttcgagtcctagtctcaattcgggtttaggtctctttttcgattttaatctgggttcaggtttgtgtttagttcctagtcccggtcctagttctagttcagttgtagttccatatgctattctgagttcgagtttgggt

SEQ ID NO: 246170 - DNA, 685 bp, Cannabis indica
taaaagttgtatcaaatttgacacaagatatggtattgtgccaaatttagcccataataaaataaatgcaacttttttatttactataatacctataattattatgattaatcaacttttataaaattttacgttatattactattatttaagcaataacaaaataaaaatgataatttttgtatattcacaataaaatattaagtaattactaatataattaattatttttttacttattttacatcctgtgcattggaacacaattataagagcattgctattaggcactagtggtgcctagcacccttagatacgccgccttgtgattggctaccaaaaactccttaaatattattatattaaaatatgggacctctctctacaaaaaaaacaaaaaaaaaaaaattatatgagactcgatactaaattggaacaatagtgataataatacatatgagggtgctagatactatgataccttttagcatttctccaattataaataccaaatatagcacaaatttgttgttttttttttttgccaaattcaacacaaaacttaaatggtcttaactgaatgacatcagatctactactttatttttttttggaaaaatcaatattacaagcaattaattggtatttgagcaacccagttgacatttataagtgacgctagtcc

SEQ ID NO: 246171 - DNA, 575 bp, Cannabis indica
aatcaaatttcccaaataaaatagaaaaaataaaattttagtgagatattttgaaagatagaataaagaaactatatgagagtgcactaagaccatctctaatgagagacgtacaaattgtgttatatttacaaaaaataattttatgatatatttgcattagcttttaacattataattcaatataaaattaattataaactttaatgtaaaatttaatattaaattaatgctcactcaatgttttattggaaatataaaataatttttctaaagagagaaaatagaaatattcattaatatgtaaatagaacaaagtttattacatgaagatgtaacttatagagaaaaatcaacaacaatataaaatacacaactcgagcataaaagtgagacaccaagatttttacgtggaaactcaaagcgggaaaaccacaagactgcagtttgctcaaatcatccactatcacgaaagttcattaatgagattactaagttcttctctagtaaaactagagacgcagaacaacatcaagaataaacaatcttgaatctaatacaatcatcatcattat

SEQ ID NO: 246172 - DNA, 665 bp, Cannabis indica
tttttatattgtacttgctggatgtcctcttatggttttcgtgctttatgtattatcgtaccgaacggtcttattcatgccttttgtgaaaaggtcttttatgttgcctttcttgaaaggtcttttttgttgccttccgtaaaaggtctttattccttttatttttgacttggacgattgttttccgaattcccctcatttttatttattttaaagagaaatttcgatgacggtttccatgtactttgaagttcctagcttttaatttatacatagaatttcttgaggtaccttgcattccagcttcttgtgatgtcggctccgtccatggtggacagcctgtatgccccatttcccgtcgggcttaccactcggtacggtccttcccagttggtggacaactttcctgctcgggtctcttcggtgttttgaaaaactttccgcaggaccagttcccctgggaggaaattccttggccttactttcttattgtattgtttcgccaccgcagaatagtaattctgcattcgggtcaaggcgcgctcccttctttcttcgacgttgttagcagcttgtagtcttagggaagtgttgtcctcgtcacttaactcggatcgcaaagtaggtacttgcgtttccgttgggataactgcttccatcccgta

SEQ ID NO: 246173 - DNA, 565 bp, Cannabis indica
aaaatgtttaaacataatatgcagtgtgatttcttcctctaaggccctaaaattcatgtcgtcgtggtaattattagctatagtttctttgcatcattttatcaaacacttaatagacatcaaccattagtttaagagtaacacgttacggttaccctacaagtaccttgaagctcaacaaacaaccaacacagaaaactaacacagacactactcataatccagaaactaacccagaaataattttaaaaacaaccaaaagttaagagtgttttttttcagcaaacaaacagcaatggcatggaaaaagaaagtgaggaaaaaccagaaaactcacctctggaatcaagacaaagggaaaagatggcgtaggtagaatcggcagcggcgtggcggcgaccaggttggagcttcagaatcttcgagtagagctatggggttcgcgcgggtataggtgggagaagctcaagattatttattcaattgagggaaacttaaaaaaaaaaataccagaatttgagttaagttttataaaaatactgattttttaaaaatattgtgtttt

SEQ ID NO: 246174 - DNA, 568 bp, Cannabis indica
tttgggtgaactctgaaacaattctggtgttttctctccttgtttttcatttttctctcatctaatctaagctatggttgtgtgtgggtgtgaatctgggttttagatctagaatcgagcaagttctcaaagagaacttgctctgctagggtttcgagtttgtgagtgtgtgtgtgaattgtgtctgagtgttttggggttctagactcttctattgagtctttgaatcaaaggaatcatacgacatcaagattggtgtcgtggggttaatacggggtcgtattggtctaagttttacttagacaaggaaatgtcatttttgaccttaatactgatattgttatctttgttggtgtagggttaaaacagtaaattcctacaccaaacatgacctaaatgttacttctacatattgcaaattcatttgcttagagaattattagttgtaattaagaatttttatttgcttggatattttgatattatttgaacactttaacattatattttataaataaataaaattcaatcaaattatactccatcatttgaagaaataattagtttc

SEQ ID NO: 246175 - DNA, 866 bp, Cannabis indica
  modified_base (816)..(816): a, c, t, g, unknown or other
tgacgtactcgtgtataagagccattcattctgtgggtgtaaggggccaatggaggcttgaagtgaagacgttaaacttatacctaagaatgataatcctacttgtgctattaattatcggcctattgcatgctgcaacacactttataaatgcatatctaagatgctttgcactagactggctaaggtgttactattattggtgaatgaaaatcaaggagtatttgttaaaagtagatcgcttgctcacaatattatgattttgcaagatctgttaaagggttatcagaggcatctcatgtcccttagatgtttactcaagattgatatgagtaaagcatatgacactattgattgggaatttttataaagactgctcaaagcctatcacctgccatctcagtttgtacaatggctcatggtgtgtgtttggggtacatcttattcattagtgttgaatggtaagatccaaggaaaatttaatggtgcaaagggacttagacaaagagaccccatctctcctctcctctttgtcttggccatggaatatttgacaagattgctccactttcacaccaacaataatgagttcaggtatcatctaatgtgtaaaagtcttactcttgtaaatttatgctttgcggatgatcttatagttttctgtaaaggaaatgatccctctatgaaatgtatggcgatagcttttcaggagtttcagttgtgctcggaccttgttgcaaacaagagcaaataaacttttctactttacgggggtgtcaaagtagttcaaaacaaaccatgcttgaattgctaccnttttaggaaggttccttcccgtatgaaatatttagaggtgaaccttagcc

SEQ ID NO: 246176 - DNA, 1130 bp, Cannabis indica
atgaaggaccactccactctgtcaaaagcttttgccatatctagcttgaccgccatccaaccttttttacccctgttttcagtttgatggagtgcgccacttcctgagcaataatgatgttgtccgagatgaggcgatccgggaggaaagcgctttggttgggggaaatcagattattgaggacgagtttaagccggttagcaatagttttggagatgactttgtagatgatgttgcaaagactgatcggccggaattccgaaagagtggaaggacgtttgactttggggatgagggtgatgagagtggtatttagaggggtgatgtccccattgccattgagaaagctggaggcagctttgaggacatcattcctgacagaggaccagctggctttatagaaattagaattgaaaccatcagggccaggggctttgtcagagggaagttggaaaaaagctttttcaatttcttccagggagaaatcctcggcgaggagggatttgtctaactcagagagagagtttgtaataccatgcaaggctttgttgatctcgtcaatcgaggggcccgtggacgagaagagctggttaaagtgggattccatttcacggatgatgctttcttcgtcagagacaatacctccattggccaaatggagcgattggattttgtttatctttttcctgtgagaggcatggcgatgaaaaaatttggtattcttatcaccttgggccaaccactgggtcctcgctcgctgtttccaataaatttcttctttatacagaagagcatcaagccgggattgaagctccttaataattcgaatagtgttatcgttccaaacaggagcggagcgggcgagttccagctctttctcaagcttgctaatgtgccttttgaaattgaaatcctttttgtggttccaattgttgagattcttggcacaagaggcttgagtggcgattaaattgaggatgggctcatgatggttcgattgattttgccaagacttgtcgaagacttggttccaattggggtccttaagccaaacattctcaaagtgaaagcgcttgctattattgatggggtgagtgcccggggtgctggaagtgttaagctcaagggcg

SEQ ID NO: 246177 - DNA, 898 bp, Cannabis indica
tggttatgtagaattcttgattttccttcgtcaacattaccaacttcgccatccatcctgcaaaagagtcactttcaagtgctctttatcacaatgaatgtccataagctcatttgcaaaatgaacttctccaacacatggatacccctctcaaaggaaaacccagatggtagaaaacagagcacggaaaacttgggtacctctctcaaagcaaaaccccgatggtggagaaacaattgtcgttgctccctgcctattgtaccaatagtgtttgaccacccaacgcctcccggtgtgctgtccaaggatagatctggacgtcgcaagtccattgccgagcttccatggtggtcgatgatctcggaatggagaacatggccgtctgaaagcggtgaggggcctggggtgaaaattaaaacaaggctttttttatataattattttgacacaatgtcggtttatctttaatttactcagtatttctataaaaatgttaagttcataatgtatcaccatttcttagcactagctttataaaaaataattctttaaaattgtattaaaaagtgtcaaatatatacaaatataaatattttgttctttctctaagaaaaaagtcttccaacaatagctttttgtttatatatttatacaaccagtttgatatttaattaactaagaatatttctaataaaatgttaatatattgccattttctcgcacgaaagataatttcttgaattatatgttaaaagttgtatcaaatatagggatattggcggctaaaccacctgaactttacggtttgtaacacttaaccgcaaaaatcgaatttttggcgactaagctacctaaaccctggttacgttttgctctgcacacctccgtccaaaaatca

SEQ ID NO: 246178 - DNA, 856 bp, Cannabis indica
ggtcgtctaactggaggttcgtcctgtacctgtggtgcgtcattcgggactaccctcgtagtagcagctacgcgttccagttccccatttctctaatttgactcagtaagtctttcctgaagttggtgattttccaattccacaattagaatatatcttgtgggatcataagcatctgaatttctcctttttgaaatcttccctcatttacatctctttcgaaatcccattcagcagggtgtcttcttccgttttggccttcttgaggttgagtcccttgaggctctttcctaagacgatgcaccatctaatcttgatcaacattaacaataaatgagtcttagtttccatggtgggaaaacattcaagtttttctttgtggggagatgcatttttttttagagtcttagttttcaaaaaagggctctcaatgaaagtaccaaattattaactcagaatttcgttaacaataaatgaggccttttatgaatccaaagtaataaattcaataagcttttgaagtataataaacaatagaataataaacgtaagatatttacgtggttttgtagttaactttacataatctacgagtcattcatatttttaatattttgtttacagagtacaaaattcaagagatataaagaataagagatgaatttctttcaaggtgtttcctttatcaaattggtcgtcctttgctcagtggtctttcatcctatttataggatttctcatatggtatttatttcttttgacttatcttaataactgttcatgagacaaggtcaatccacacatttcatacaaacacaacgtgtggaaaaatacataactgcctagtaaccgtcat

SEQ ID NO: 246179 - DNA, 1164 bp, Cannabis indica
ttagaatattaagcaaatatatagtaagccacaaaatattagttgtatatacttgtacggacatcatatatatgacattattgattatccaatatttgttgtatcttaattacaggtgtcacaaaatgaattgttatactcaagtatatatcaacgttgtcttcttcacccaaatcccaaagttgccaactttacaaataatatattggataacctctagctatgtctctagtcgtagtaatttttccttcaaatctttacatgtactaaattatatcttttaaattatatcttttaaattatatcttttaaattttttttattaaaaattttctccgaactattaaaattattaaatttaaggacttttatctaattttagtaaaaaaattttaacatgcattaaagttcagaaggcataatttagtacgtattaaagtttaaggagcatgatttggtagatatcaaagtttagagaacatgatttagtacataaacaatcactgaaacagtaaaattgaatgaaattagattaaaattcttaaatctaacaatctcaatagttcaggagaatttttaatggccaaaaaaattcaaagagcatgatttggtacatatcaaagttcggaaaaaaaattcctaattaaccttcttttttagttaaggtaatattaaaaacattaattcttcttgtaaattaataagaaaaaatatatatatttatatagagtaagtttataatataccttttcttaagtgagttttaagaaaataaaaattattagactctttatttaaaaaatatatagtaattttaaaaattattgaaaaatatgtatattttttaagagaaaatatttgtttgggcttttaagttgggtgggccctaactgcgctagccgcggccctagtctgccttagcccaagttcggccctgaccccgacctatctttttcagcatacataagagttttttttggcaaaataattagaatcactcatgaaattacgatgcccacgtccgccatcggcgctggaacctcctcgaaccatgatagctcatcgtctaaccgcagagcatgctttgccaaccatgggccactaaaatcttagagcgatccccatgagacaaaactgcccacccaaaattttagacaataaagc

SEQ ID NO: 246180 - DNA, 1190 bp, Cannabis indica
acctaagtttaactattggttgcagatagatacgtaagtttaatttttgatagtttaaagtattcccgtgagtttccataaccgtaacctatacgaccgtcgtaaaacggacagaataagcaacagttcaaaaccatcgctaatgtggacttcctgacggtttaaaatcgtcgcctagggtataggcaacggttttaaatcgtgccctatactataggtgacggttttactatatccgacggctatactatacctgacggttttaaaccgtcgggtataatccctcaattttttattttttttttttgcatttttaatgaaaaaacgtcgcctaatttttaggaactattataaatcgtcggggataccaatttttttttcggttataagcagttacataatttttttagcaacggtccctaaaaaattgtttttaggaccgtcgtaaatttatgccctaaattactcttttaaaaaaagatagacttttattttattattcagtaacatgaaaagagtgaagagtctttaatttatgttcatatatcaactataattcattattttacttatttatcaacaaaattgactataatatgataaaatgacaatgtaagttgttgtaaaagttatatttcgatgagtattattaacaagacttataatatattataactttttagaaaacacccaatgtacataccccacacattttttcctctaaaaatctaataaatagatggtgtgatgaatattatttaacaataatgtgaccaaagataaaagatttggtcaaaatgtgtggagtcgtgagagaatttgagattattttgattaaatgaacaacatattttcgttagagtggcatcaatgggactaaaaactaagtttcatttgttttgagcactagcaagaaaaaattgatcgaagatgacacaaaaatatatatcttcataacgatacaagcaaaaacaaaatatataaaaagagaaatgaacaatagaaaactctctccttccatatatgaagctctgcaaccttcgtgggggtgtggatcgcggttggttttctggtccctattctacttctgttcgcccttgtggtgtacatcacattttcccctatctattacattaataatttcactgattaggctctgttacatattaattacattttaattttttttt

SEQ ID NO: 246181 - DNA, 840 bp, Cannabis indica
cagccttcgccaaaaaagcatcactgtcttcattcttctgtgagtgttgatgacaatcagtagagaaatccgatcgttggtgctggttgatattagttgtatctgcaaatggagagcctctggtgcgacatctcttcaaaacagtacgcacattcccaccagaaacagatagctgtcgtttggagaagagagaattcattcgattctccgtatactgtagagagtcagcagcagaagtagtaacagctgtggaggtggattgcagaggagaagaaatctctggtgtagaaacatgtatgtacgctggtggaatgggcatagatatggctacaggttttagcaaatgtggagtggtagtgggtggataagtggcaatggggaaagaggttgtattctgagtactattatcaggaaaagattttgtggaagaggggctggtagtgtcaaatggtgggcaattttctttataaaatgtggtgacagggggagtattacaatgaatattaatgtgcttatccatgttaatttccttagaacctgaagtagatgcttggcctttggaagtgggatcctttggaaattgagaagagaggcaattgatctgcaaggagtgtaaatttttgttattggattcaatgattagagaagagtccaaaacttgcttccctttctcagcgttagtaacattcactgggacagcagggaggggtcttgattgtgaaagaatcggcttgattgtgtttcgagcaagtcttgtgaggaatggccaaggaccctcttttgaaaaatcctgcctataacgatcataactagaccttggaagaggagaaccttccatcc

SEQ ID NO: 246182 - DNA, 772 bp, Cannabis indica
aaagttatagattctcctattttgatgtattcatcggtagcacctatcggcatgccgtatgctagcattcaaaatatagctgttactttttgcaagcctgataactcgagtttcataagtacatacattcaaagcgaaaaaagacgaatttataaagaaagggcacaaacatccaaagttggagagcaatgagaaggatctcaatatcagagatatccatatcagggatctcaatatcagataacacaatatgaggggtaacaatatcgagcatcttaatattcgggacatggcattgaagatgaagatcaacgatctcaagatcaaggtgaaagagctgaaaatgactcacaagtttatagtctgtattatgactatctcggcggatcaggaaatgatcttccacatgcattattgaattgttgtatctcattttatctctgaaggttcaaatctatgttattacttttgtgtttaatgtgtttgatgtgtttaatattaatttttaaatgtatgtttaagtttgtaatgtttttattatgttaaataagatcaaaaaattataaaacagtaactaattactactatatgactaatcaaatgattttttctagaaatagggaaaccacatcttgaaatattcacattgaataatagatcataaagattttttttaagctcaaccaaataacaatgtggccagatattatttttaatattagagagaaattagagaaagagggaagagaaaatatatatagatatataaaaa

SEQ ID NO: 246183 - DNA, 811 bp, Cannabis indica
ttatgtaattagtaggcttactcattaatactatataaattagtcataaaaatagttatacaaatctaaatatagtaagttgactcattaatatatctattataatttaattaagaatttgtatgaatttttgtaaatatgttttcaaatgtgtacatttttaaaattgtatttttttgcacattttttgtaattatttaagaaaatgtatacatttatgtaaaatgccaaaaaaaaaaaatgatactaatagtaacgttttataaattggcactcaagaattgtcctaatttatttatataagttaggttaatgtgcacataaatattgaaagtgacatcactatacatgttagtttgttggagaaaatgaggataaccaaagcttggtgtgagtttgttcttcattggagtctattcaacacactccatatcgtattacttatgaattttggtattaaattgtttggattggattccttgggacccctaaacatatctaatcatcaaatttttacataccatttttcttagctaataattttgtaattatttattatctaaatgtttgaaataaagtatacaaaaggtaaaattttaatgagatatttgaaatgatagaatagaaaaagggaaatttacgcatggtactgtcttttctacttttatttcatttttactgttaaacgttatttattacatttttactatatcttaactttttgctaaaccaatttgttattccatttaactgatacatgtcacactatagattatttatattcatttttattattttaatgagtgtaaaa

SEQ ID NO: 246184 - DNA, 649 bp, Cannabis indica
gcaatattgatcttttgattgtggaaagattggacaatgtagaatgattatgatgcttttttgaggttaatttacatctatacattatttttcaaagtaagtatatatctgaattaattgttagatttttaggattgaaattctagtttaattaatagattgaagttttataggcggcaacatcattttaattgtttgaaggcttagttaattgtgtgttagtttgtgtttgtgtgagaagaatttagtttgaggagatttgttaggctatttttaacctatatttcgggtcactttttatagttattttttatctttattattatttctcgaatagaattatgcttattttctttagtttcaagtttcacacttggaatgtataaattagtcaaatatcgaaaaatgatctataaaataaagaaaattttacaagaaaataaagtggaaacttcaagtctaaattcgactattttttgttcagattttagaaaaagtcaaaacataaaactttagacctctttttcatctttccaacgcatcttgaatcaactcatttgaagtttgtatgtgaaagttatatgcatattttattaaaagagatcgaagcaagaaattgaattctagtcgcgacgagcccgtatatcat

SEQ ID NO: 246185 - DNA, 859 bp, Cannabis indica
tgaagcgaagggagccagggtggatccaatgaagcgattgaaccagtcagtcaagggatccaaatttagatcccaaacgttcccgacatactcactgcaagtaaaactttcctgggcctccctcaagatcttcttcaaggcttcaaactcagcgttccccttggtgtactccgccgtggcataattatgcttggcgatccggagttgggttctttcctcatcagcgagaatgggtgttaggacaatactcggaggaacagtatactcatccacctcgaacgggatctctgaatcatagctgggagccgaagtgtctactctccagggcttcttggccacctgagtctccaccattttccccttgcacttcaagtctaaaggagggagaatttcaccttcctcttgttctacctcctcgtcctcgttgattaaaatgacttggtctaagagaaggctggaagaagacctcctgggagtcaccatcgggtcttgggcctgaggcagagctgggtcaggactgtaggtttgggcgagagcatccaggagctcatccattagcttcgctgcttaaagacacaaatagattaaagcattagaatattatcgagaaaacatgcatgcaagaacaaagcagtaaaactaatcttacgttgacgatctaattctaccctagcaaaatcatgcattaaaaggctagtgtcgtcgtccccaagaaagcagtccgaggggaggacccaactagaagataaataggctgaatgatccaaagggataggtgcgggaggaccggaccccatccgggaccggcctaaaaagagacctaggttggaaaaataaaacccttggcatgatcacccca

SEQ ID NO: 246186 - DNA, 1308 bp, Cannabis indica
tttctttattgatattgaataaaatggattatattgaaatggagttttatttaaggcataaaacccaacagttctaggctgcaagggataaacgacccgaggcagcctcgctaaccaatataaagcaacagcccggcgaaacactaatggcatacttaagtcgttttagtacggctgctgcaagggttagaaatttggatgatagtacacaacttacagcccttcaggcgaagatttctactgatccatcaaccgctgggggcaaactgtgggacaacttatagggttgcccagtaaagaacatcactgagttcaacgaaagggctcgggtgttcgttcgaaaagaggaagcttgaaaagggatgaatctgttgaaaacaggctcgggaggcaaacccagcaatgtttcaacaagtgttgtctatactagagttgataactcaggggcctctggctcaaaaagaaaggacgattttaaggaattgtcaaaggacaaaaagaaacagaagaatcacgataagtacgtgccagtgtatactatttataccgagcttaatgaaattagggaaaatatttacctcgcgcatgagcagaaggttgcctttggtaagcccgagcccatgaggcatgtgaggcacaaaagagatcctacaaagtattgcaaataccataaggacattgggcacacaaccgacacatgctgtcagttgaaagatgagataaaaagtctcatcgctcggggccacttcaagcagtatgtgaagagacaaggcaatggacacaaccagcccagtctacctaacaacccaaacaaccaggggttacaacctcctcctgttgaaggagaggacatcctggttatttcgggagggccgcatatcgtaggggagagcaacaacacccaaaaaaagatatgtgaaagaaataaacgagcagtcggcgttttcctggaacctttcaagtaaaaattggagaacctccaataatattcacagaggaagatgagataaacgtgagatatcctcacgttgatccattggtgattaccattcagctcaccaataaaaggataaagagggtgttaatagataacggaagctcagtaaacatcctttataaggaaatgttgaggatgatggggctcaaaaaagccaaattgaggccttgtatggtaaatctttacagcttcattggtgacagtattgccagtctaggcataatcgagctcgcattgaccttcggtgaggcacccctatgcgccacatttatgcaagactttttagttgttgacctgccatcggcttacaa

SEQ ID NO: 246187 - DNA, 674 bp, Cannabis indica
aaatattaaccattaaattttaatttaatggtcaataataaaaaagaaattaaataattaaattaggaattctccctcctaaatctatagttaccgaaagttatcttttttctcgtccagatctgtcgatttttcttgggcttatgtatagcttggtcacgattatattttgctactgcgatttaattcttgtaattgcgtttagtcttgtttttgcagtgacatagttttgattgttctaatcttgtctctgtgacatgagtattttagtcttgtttatatgacatgattttattttattttatttcgttgttggttcttatttgttcgatgacttgccatcaaattgttgttagtggttaggaataacaaactctctacgtatgactgaatgagttgttagtagtgcagttacgcacattgcacaatagttgagtgctcaagctacgaagttgaatgaacctgctgtaaaaatttctactattgtgtcttctgagtggtggatgaaacttaatataagtgttcttaagagttaactatgatgcaacaatcttttttatttgattttatttagtttttttttttgtcaaatgatttgagaatcaggcaactgattttttagctcatttttaaaattttattcctagttgtatctccaacggaagagatgtccc

SEQ ID NO: 246188 - DNA, 878 bp, Cannabis indica
aagatctgaaaagagttaggttaattcataatctgtcattcacattaagaaaaggatagcaattaggtattaacattggtaacttaacaacaggattcacctccctaatctctcatcttgattaatcttcatctattctttttaattttctgaattgttttctttaaattgcaaaaaagtattgttttaccaaatagaatcataagtatagtgtagtagtacttccaattccctgtggtttgacctcacttgcgtgagatatttcttgattgcgtatacttgtgtatttttcataattttcgtaacaagtttttggcgccgttaccggggaattgtttaaagattgatattgcataaaattagattaaattctactttggttaatttttcttgcttatttctaatctgtttctcttagattgtcttatgtcaggcattggaggtgtatgtcaaggacaagttgtcatattgccggttgatcctgaaattgagaagacctgtagaagaaacagaagaaacaagaggcaagaaagagtttcagcaactgctgaaacacaagaaatcatggctgagaatgctaatggaggaaacaacggcaataatggaggtgtcgttgaaaatcaagctaatggtcgtagtctgagggactacattcttccaacttttacgggggtccagtctttaataagaccacccgccgtagatgccaacaactttgagataaagccagccatactccaaatggtgcaatcttcagtaaagtttggtggactcccctctgaagaccccaatctgcacttgtcaaatttcatggagtgatgtccgagttttaaagtcaatggagttagtgatgaagccatccgcttgagacttttccc

SEQ ID NO: 246189 - DNA, 875 bp, Cannabis indica
cgcctaagatagttagggtgttacattgacacttctccaaacaactactccactcccaagagtaaataccatcccaaatgtagtctttttgtcattaagacaagcttggaaatcttaattggtatagcctaagggatttaaagtacaacccttgtagactaacacataatctattgtcctctttaagtatttaagaatatgctggactgctgtccaatgttccttttttgggtttgactgatacctgctcccaattcccacttcatagcaaatgtctggtctactgcacaacatagcatacatcagacttccaactactgaagcataaggaaactttctcatatcttctatctcttagggatcagtgggatactgttccttagatagcgcaagccatgtctagaaggcataatatcccctttggcattactcattgagaaatgccttaacaccttatcaatgtaagctacttgcgagagagaaagtgatctatttttcagtttctaataatttaaattctaagaacataattagcttcgcccaagtctttcatttcgaattgggtactgagccattcttttttgtcagtcattttcttgatattgttaccaatgactaagatgcatcaacataaaggactaggaatactaccacttgattatccttgagttggtaagcacaaggttcacctaatagtctagaattctatgtttaagtgataaattacttttaatgatactgtgatgagtattattatttatcatgaagaatataacctaagttaaatgaattatatgctaaattgctttattgcttagattaacttgtttccatagaatttaatatttttcctaagttaaatagattacatgctt

SEQ ID NO: 246190 - DNA, 656 bp, Cannabis indica
aaaaattataacatattgcccaactcattttaattccatatatctttattatttaactaataataataataaaaaaaatactttgaataagttagaacaaagatggtgctctcaaaatcctaaatatatattaaggtgattgtacaatacattgcactaaatggatgtactgatatattctttatttgttttcgcatttagaaaaattttctagtctaattttttcatattcacattatagctatttaaaatattctataaaattttaaaaaattcgaaataatttaaaatataaaaaacaatattcaaaccgtctattttatacgcacataaaataaaatagtcacgcttgcaacacactattttaaaagtagtttgtaacgtgctaaattttttcgaattttttaaaactttacaaaatatctagatagagatgtatcgatatatctcgattagattgtagaatatattaaatctatggagagtttttcttgagcttgcgtacgtgtaaatccgaccgtgcttactgcttacgcttaccgaagattttcaattatctatgttaaacgacgccgtatcgacaaagccttgtaactaattacttttccagaagaatgagaatcagatgatcggtatcgtctagtgccttctccaca

SEQ ID NO: 246191 - DNA, 966 bp, Cannabis indica
accaacgtaacatagagaggagggatttagcttcaagagtagcgacagctcctcccccgatataaggttgggcaagggctgctactaccaaaccatcgctatttctcataatcccaccaaaacccacttttctgctattctttgagattgctgcatccacattgaacttgagaagacccgacgccggaggggaccaagaaaccgaattgtctcgcgctctagagatgggaactggagccgactgggaatcttgaaactcagctaggtaagagtgcgccagatcaaggattgcgtgagtctgatcgtgagattgtccttttagcactttgttcctgttgaaccaaataaaccaagcagtacaaacaaacaattctacttctttcttggttagagaagtgtatatcatatcagctatatcatgaaacataatctcagaagagcaagaaaaaatgtaaggataaaattgcgtacctttccagactcttctaatgctctgacagaagaacaaagcatgagacactgattcttctgggaaaccacagcgatcacaccccggaaagtgaataattttcctatgggctaggttttgggcagtagggagggttgagtttgtggctcgaaaggcaaagtgtttaaccttggcagggagattaaggtgccagaggtttttccaccaaggggaaggagaggaaggggaagggatatcaggggggaggtagaggatagactaagatgataaccagatttgacagagtacactccagactttgaaaattcccaaatctgatcatcaggggagggggtaagggggaggggaatggccagaatttggtcaaccacatgagtcgggtagcatctgtgtaaagcagcaatatcccaagtcatagaactagtgatgaaagattcaactctgtcaaggacgggggagatgggggaaacatggcgaaaacccgggatccaatgatc

SEQ ID NO: 246192 - DNA, 2490 bp, Cannabis indica
ccctgtaatttgggggttcaacctcctcctcttcctccacctcggagggactgctaggatgtgcgtcgtactgctcctcaatctcctggaccttagcgtccccttcatgatccccctcctcctggacggctggatactgtttggcactgggcaaagtggcgtgccgagccactagagggtcaaacgcgttggccatacgcattgtcttcttggtacgagccatcattctatggctagataaaagatttgggagaatgtccttcactggaagaaggtgggctagaacaaagacaatgatggtcctcgtgcaaaagttgaagcaagtcctggtcgattcgatgttcgctctccaaaaactgttcatctacaaaagacatcacacaagatgagtgtttggtcgaatatcgaacgataaacaagcaaatatgccgactaggattactcaacagattaaaaaataagaatcttcaaagaaaagtcaaaaatcaagaagtttgaaattttctcgagttagggcaaaaaaaatttcatgaagcttagaataagcaagatgaaagacatgcattatgcagttcagaaagtgagcattatggactgtaaaatcgcatgaaaccatgacaaagaagaatcgcagagtttctaaacctagggtttcttatgtattttctatagcaaagtcgaaggtgcattcgaaaagtaaacatgcaaaaataagcataaaggaaatcaagaacttactcaagactcagatgtctggattcatgcaacgtcaaaccaacgagcagtttcgatgaaggcacttcagcaaacttgaagccaaaaaacctctctttttgctctaaactcacttagaaaagaaggatggtgaaaatgagtttatgtgccaatgcttgttgataaagacgcctcggttcccccttaaaaaaatatgagaaataaaaaataatcaagtacagtcgtcaaccgtggtgagagaaaattagatttcgaaatattaattatcagagcattaattagccaaaaactgaagggacacccagtcaacctcacatcgagtctcagacagacgcgctcgacacgtgtccccatccaaaggcaaaagcagcttagatgaagtctacacgcaactttagaagtcccgtacagacttggggggcaaatgttatcccaatttttgcactctaacgtggcatcgcatgacggtgacacgtggaatcaaatttgagtatctgctaagaaagtacagtccgaacaggatgcctcattggcatgcccgaagcaaagggatcaccaatccgcgcacagcgaccaacacttagttaattcagctttcgcatcgtgagtcatcaaagaaatccctataacttggggatcggattgcagagacatggcaatctgtccaaatcccacgatcagtgtattctgcatttatcatgcaatctttttgcttacatccattgtaacgagaagggaaatacttcctctccaagttcatagccctataaatagtgatgcatgttcacagggcagagggtcgaaagattttccctagagatattatctaagaattcatatttagagatatttttgtaagagctataagaaaaggaacctttctccttgctcttaagtcaatacaaataacgaggattagggtattaccgaactgcttagggctgaacctgtataaaattcttgtgtctttacattgctttactatatatcaattgctataaattacttatcgcttactaaataagactcactatcgttggctaaaagtgaggtcaacaggtttaattttaaattttttatttatttatttatttaattttattccgaaatatatatatttttatttatttaattatttttgaaattattaaattaaattaaatttatttaaaattaaataaaccctatcagtagtcatcattcgaatgttagcttctgctcgagagaactgattcgccaacactaataacatcacaaaaagaaatctgaagctaattggtgaaagtatcaggagcatgccttctaatagcgagataagcgcctcactattagttgtttgggttcgcctaactgttatacttagtttgtatattatatgctaagtattttcacagtcattatgcatcgcttacatcttcccaggcacaacgaagttgatgtcttgccttgtgcatccaatgtcttatggtttctcgtcaatacgtgaggcaatagtttgtatatctttatctcgcataggaccttatattcagcaagttgcaaatatactctgtcacttctgcatttaatgagttattccattaaatggtagccaaattttgaatataacaagatgatcttactttcaagtggatattggcatattttccttttgcaaagaatgatcttgtcaaaacaaatatgaacaagatgtgaatgccatagatataaaatgtggttgtggtcttttgatgacttaggtctagttacaacaaa

SEQ ID NO: 246193 - DNA, 711 bp, Cannabis indica
agagatgcgagatagagagagaaagagagatgcagagagagtttgagggaaggagagagaaagggtttgagttttttagaggagtattttttgggttttgaaaaagtagtcatatattttcaatgtagaaaaatattattttaaggaaaaaattatcccctaatgcatgcattagaaattcaaatttccctaaataaataattaactcctcctaaagatattttattattgttttgtacattcaacatgaccaaacttaataatttactcaatacattctatattctaaataaatagctatttgatttttaaaggttacttttggacttctaaagttcccatatatatattgactgtagtttaagtttttaattattagatctacaaaacacttttggaaaatttcttaacaaactaaaagcttaagtggaaacgcatccaactagattgtaaacatgccatggccattccaagttttctcgacaagatatttatgttattactacaaataagactttgaactgattttttgtcaaaataaaacttaataataatttgatataaagatgttataacaaaactgattacattttctgtttccgttcgtattataaattatcttaaagttggttaaattaaaaaataaatttgttgaaaattgagctcaggattctatttttatcattttagaaaatatagggtccattttat

SEQ ID NO: 246194 - DNA, 993 bp, Cannabis indica
caactattttaaaagggggtcttacgtctggcctagtcagtgataaatggatttggactttggaaagtaatggtcagttctcaagcaaatcggcctatattgcccaagcacatgaaagagcgcccaattgtgaggttgtcccgtctcttttgaaccgtctgtggaatagtaaaatctctgaaagattgaagaatttttggtggtgcatcctgtccaaggctatccctgttcagtatgaaatctgcaaaagatttcatattgaggatgtgctatgccccttgtgtgggacagatgatgaatctattgaacatctgttcttatcttgtaatgtggctttccacttgtggaggtcctcttcgtggggcatctttcctatttgtggtaatggcatccggatgtaggactgggtcaaattcatttaggaccttaaacacaaagacatcaattctaatgaggtgttcctttatgcttcgttaattgtcgacaccatctggcgggccaagaatgaaaaggtacataattgtctggttgatgtgattaagtgtattgatagtatccgctcttcttttgatgtttatcatgcttcgttgctctcttgttcgcttccgagtttggcgaaaacctggcgccctcctccaagactggataaaactgaactgtgatgttaaagtggggttggacactatgtgtaccgctgttgttgcaagggatcatcttggcaaggtaatttgagttcatacttctaaattggagtttgcttgttgcactgcgctggacgttgcgaagacttatggatttaagtttattattgttgagagtgattcgagggtagttatcaacgctcttaactggactgagtccaggtgggagcttgagaactatgtctcattttgtattagatcctctctctttttcttcacttgtattttctctaatattagttagaattgtaattttgttgtccataatctggctaagtgggcatttacccac

SEQ ID NO: 246195 - DNA, 1229 bp, Cannabis indica
tgttaaataactctgagcgggtgtgctcgaggggtaaagaccaattcttgcctttcatctctgacttgatcggtaggtttgcgcttattagtttgcctgtgaagggtgatcaactaacttgggataaccaccgtgatggagagaaccacattaagtcggctctggataaagctttggcgaacagggactggctcgacctcttcccaaaggctatagtcaagtcccttcatacctgtaattctgaacatcgccctctatgaattagtacgatgaaccaagattcaagactgcctaggtcttttcgttttgaggcgtggtggactagggacccccggagctcgcttattgtggatgatgcctggggctctgtctctcatggctgggccccggccagggttttcaagaaggtagggactacgcgcattgccctttgtaaatggcaaaaggcccagttcgggaaactagatactcgcattgctaatctagaacgccatctgaaggagatccagaactctcctacgggtttgagggattggaaagaggaggttgacacaaggaggactctaaatgaagcacttaggcagagggccacttactggcaacaaagagcccgtatctcatggattaaagagggagacaagtgctccaaatttttcttcactacggctaccatcagaaatagacgtaatgctgtggagagtataatgaataagaatggggtgtggattagaaacagaggtaacattggcaaggaattctctgattttctgggaggaattttcaccagcactgttaaaggtccgctggaacgtttggaccatcttgttagagatcacctctcgacaactgatcaatatgacctcttgacgatcccgactcaggaggaaattcgccaaaccttattctcaatggggagttttaaggcccctgggcttgatggcatgtcttccctgttttataagcattattggagctcggtcgatgaggacttctgtgaagcggtccgcgacttctttgtttcaggtgtcatgcataagggtatcaatgcaacgaacttaattcttatccccaaggtgtctaatccgaagaaagtgactcagtttagacctatctccctatgcaatgtggtttataaagtgatttctaagatcattgctaataaaattagaccgattctcccgagagtgatatgtcctacctaggcggcttttgtcctggggaggagtatt

SEQ ID NO: 246196 - DNA, 1113 bp, Cannabis indica
taagaatatcttttctacattaaaaaaattcttttctttctttacgatttttctgagagcaaacagtagggtgttacagagcgatacagttcggtgcagaacgtatcgtactaacacagaggctgttttatcctggggacaccgtggttgctagactgccgtgcacacttcgggcagagccgcgaaacgtcttaaagagagcgacattgtccgcgactcagccagattattctatcggtaattcgttccaatttcactgtatttaatttcggtataacaatccatattgtaaaatgatctttctaattattgagaaacccaagaaagtggccatgaaatatttctcagcaatggctggagagatggtaagttttcaatcgcatataaaaggaacggaaacacttgtagttgacttggtgaagaaagtgtgcacttgtagggctttccaattatcaggcataccgtgtccccatgctttaacttctatattggcaccaagattgaaggtatatgattttgttgatgactgatataaagaagaagcttacatagttgcatatactggtataataaagtccatgcctagtccagataagtggactcaaactgggctcaaccccatgctcccacctctaaagaaagtcctacctggaagaccaaagagagagaaaccgaagtaatgatgaacctccaccaggtgctaaaaaaatgtcaaggaagggtgagattcaacattgcaacaaatgacattctaagaagacttgccaaaatgaagttgttaaggagatacactatttgactattatatgatactttattgggtttgatattaatgaaaatctctttatgtgttatttatataatgcagcccaaagttactaagaagagaagtagaccaattaaggctaacccacttcctgcgagagtgaagaaaatgcgaggagaaggaaaaaaaaaacgtgaaggaacatgcctctggatctcaacaagaacagtgatgatttttttgaaacctatagttgtacagatcattagatactatgtggagcagcctcttttgattaaatatttaggttggttgagtgccttgactttaaacatataattatgaaa

SEQ ID NO: 246197 - DNA, 971 bp, Cannabis indica
gttttttattggcagattggaactttgaaaaatgatatatcaaagcttctaaatgagataatgcaaaaaagtccgcaggttctcttctctttctcagctatcagtatcagtattcaggtatatgttcttatgtttttctataaatatgttttcattaatctgtttatgcacatttggtctgctaagaaatttacaaatgtattcaaccttacatagattcatcatcatcatcgattattaatacgatgaaaaacatgtaactaatatataattattagttcttgatcgaatatatgtttattatagtgtgtgtatattaattggtttatgtttttataatgcaataactatcaataattccaattagtattgaaaaaaaaatacatttattgtagtatatatatatatcaactgatctgattagtttagtattttgaagatataaccattggaggtttaattcgatcggttagaatatttttgaactttttgattatatatgcttggtttagtttaatatatgcgcatatgtgtggtttttataaattaattgctgctacatgtatatatagtttttctggtatgttatttaacattttatcctggtatttgaagttttattacttaataattaattagacaaaatttatctgttatatgaaactttttcatgaatcaaagtatttatatttcaaattattagtacattccatagagtaacttttatatgcatgcatttttacacttatcacaaaaggttgtattatgtataaaacatattaatcagctaatcctttttgcctcgtactgtttttattttcttttcatttaattggctaactcaagtctcaagcttcatgccatctcatttaacacacacatatgtataaccaagtaaatatttgaaaaacaaaaaacacataaaagaggaattaaagcgataaaaacaagagatataaatagatactaat

SEQ ID NO: 246198 - DNA, 874 bp, Cannabis indica
gtgagaaatgtaatggcgaagagaataacgtagtcctcattgtggtgaggccatgacacattcgctttaagccctttggaaaaggttggctggattattttgctctatttaacttgtaagaccctgatatattggtggcaaattatgctgagttggtcatctatatagttgttagttgcatctaactttgtggtctttttggttctttgacaggtcagcttagttatatcaaactaaggacaactgtcctttctgttagctgagctgtcaaagttagttgtttttgagttgttagtataaatgcaggaattaccggtttttctaactaactcttcttcgttgttaagtagattgctctgctagggcaaaacctcttctcgtcttgttctgttgtttcttgcaggtctactgaggatagcttctgagattgaaggtgtttcagagatcgtgcgttttccgaagggagttcagattgctttgctgaagaaagatcagctgaagagaagcaaggaattcgtgtcttctgttgtctacagttcgtagatgatttcagatttgagtgtgttcaaatctgttgggtaaattccgtatgaattaatttctgattactttctggtataattgtaatagaaactggatagtgtatcctttgattcatagtggatgttattaccctggttcaagggaacccaagcaatagtcgcctgaaatgaggtttcagggtcagacgaagcttgtaattctgtgtgttctatgtttagctgtttgcacattgaaattggattaatactgttaattcaccactcaagaaatcgacactctagactttacatttaacttgtgatcatactgtttgttgcctcgtgctatgcct

SEQ ID NO: 246199 - DNA, 682 bp, Cannabis indica
tttttggctaattgtcttttttttatattaaattatgaatgcagaaaagttacattatatgtatatatatattaactttgtgtgaaaaaatacaatttgtaccccaacaatacagaagagtcttggatcactctaagtggagcactacttcctatcaaagattctctaaaagaagagaatgccttggaatttaaagctccaaaattttatggagaacccctcaattatcttaagtaagcccgttctttactcacccattcgaattagattatctgtatttaggtttggtcatcttcctctgaattggcttgctttaatttcatgtattgtagattatggagagttgttattagattgggtggctgtgaagtggtaagtttccacctgcacctaatggttgttcttcctcttattgtgttctgttttatgcattgtaagctatcataattatatgttttgataaactttgcacaagactagaataatctttaaaacatatggttaagggccttatggctattgttacacaaagtgctcaaggttactaaagaggaataaatactatttttttgagggaaagaaacatctagatgaactttaatgtaaaatagtaaatgtggtaatttgtttttccctaagaaaaagaaaaaaatgttatgtttctaaatcctaattgagagtt

SEQ ID NO: 246200 - DNA, 664 bp, Cannabis indica
aaaaaattatcagtaaaaatagctattttttgtagtgtcaagtcaagtcaagctctcagtctctactctagacttttttgtttttagccataataattcaaaaatctaaactgatcatatactagaaaaataccaattttacttaaatttatataaaattattaatgtttacagaataattgttctccaaccccaaaatataagttatataaaattgagttgtaatttgttctacttaaaagactttgaatttataatgagaggttgacttgacttgagttgagtttatatatgaaaaatttaaccaaaattttgaaaaaatttacttgacttaaaaaaatttacgtacgaatggcgtagctcacgcactaacatagtttattactaattttttagggggagaaatttaaaaagatgcttgtcctcgtttcttatgtgttcttggaaataatcaattaacaaaaaaattgaggataattctttccaaactagccgattttgttatggtgacttatgccaataattaattaatagatttataaaagaataaaaaaatattaattactaattattacttgttttataattagctagttttatctttacaacacaaagtccatttaatgggtacaacttttttgtttttagtaaatcaataatgata

SEQ ID NO: 246201 - DNA, 738 bp, Cannabis indica
atctaaaagatagaagatcttttcagtgtggtgaatgtgcgaaaacaatataattgacctcacccgcataaaaaattcaagatctccttggaaggctgatttggattctcgcgaaaaaccaatcagcccaccaaggcataaaatcgcaggtgtgcgactagaagaatatctcaaaaaacggctgggagtttcccagtgacacaaggggcatgcgttttcgagcatgactctgatgttactgggaaacacccaccgtttcgaggaatctaaccaatcccaacctgtgagtatgtcactcatatctgactagcgatatacctcaaaaaatggctgggagtttcccagtgacccaaggggcatgcgttttcgagcatgaccctaaagttactgggaaacacccaccgtttcgagcgaatctactagttgaagaatacggttatatgggaactgggagcactggcgtatgtcgcaaatggctgggtgtatcacagtacttcaaggaacatgcggtcgcacgcatgaacattagaatacggtgacacacccaccatttgaagacttaaccaatattcccacaacaaaatgcccaaagaatataaaactctatgttctaaacaacggttaagaatgataaagtctctgtaaaacctaaaggaggcaggtatgcgagtattcgaagtgttcatccgaatacccgcgagtattcaagaaatatacaagtaagaaaggtgcgaatat

SEQ ID NO: 246202 - DNA, 1052 bp, Cannabis indica
tgtgcaaattaatcacgaaataggctttattatcgttaatgaaaatctgcgttaacagttattaccttagtatttaaatggttttgaatgcaataggttagactcgatgactagaaccaagataaaccgttctaagaccttattgtaaatggacgtgtgagcgtaacacgtaggtctatgtcacatatatgatagatgttgtggcgtcaaatattatgtgaattctgattttattgcatattgttatttatactgtcttgctggaattggctcacgggtgctctactgtgtaggaaatttgttattgatcagttatgagttcgagggcttcaggtgtattgtacatgttcaggccatactagaccatgatggttgggtctactagatgaaagatttcgtattctagcttttgccgcttaggtcggcgtgtaaaaataacttgtaatattttgcaaaagtttttacgtgatcccggaactaatgtaatattttggaatatttgtaaagttagataattataagttatgattttactccgtaatggatttaaagtttaaatttcccgtcttatttcttgtagtctcggtttagtgggattagcttatgtttaatggttgttcgtagcgtgccttttgttagggcgttacactagtagaatgttgttcttctttagatccactccgatagtctaataaatcaagtcaatgcaacctactattaagtaagtgaaagatataaaagagccatatcacttattcttttgatttgatcttacggagcctgttcatacatgacattgaataaagaaagagaaactgaatgagaatttcttagtattttattttaataggatgatcctttatttatacgaatatgtgagccataaattaagaaactaaggagagaaatagtaaatacaattaatggtagttaatataaaaaatttgagagattaagtgacttggacatccatataaataatattttataacaagactataatattaaattattttatattattaagagtaaaatataaaattttattagaa

SEQ ID NO: 246203 - DNA, 699 bp, Cannabis indica
caaaacatacaaatgaatgaaaaataattctgtttctttattgatattgaataaaatggattacattgaaatggagttttatatttagggcataaaacccaacagagggtttggtgctagtacaaaccatcttagtcaggtaaagggaaaagcaaaagaaaagtcatccgttcaagcttatgctcttggggttgatgatgtatagggcggtgcagaccaaggagttgttgatggtatggttctcatctcacactcttggggctcatggtttttttaatactggtgcaccacattcctttatatctttaattcttgctagtatgttaggtttgacccggaccccaacctggactcggaagcggaattggacctgggacccggacccgaggaccctaacccagaccaggacccgaactggaccgggaccgagaccgtgatcgagactggactcggacccagacccgagaccgggacccagaacctaggacccagacccggacccgtttctaataatacactccatgtaataaagaaatatacatttttttttctctttttgaaattaaattcttattaaatgcatctctcttcaaactttattataagagaaatttgcagtcaaacttctgtatgtttcaatttgtatacacataaattcctttttttttggttaatattcctttagttctaattcttctg

SEQ ID NO: 246204 - DNA, 2420 bp, Cannabis indica
taacagcaaaatccatctaaagagagttgagagagcgaggaagcccgattacccacattaatcggtttcttttgcaaataaagcttatgtggaaataatgctcaaagaatcaatggctggaggtatttcgatccttatattcatatagtgtatatgtttatttattccgcatgttatatacacatacatatattttatattatacatataaatgtctaacaaacaattctttgaaaactaattcaggtgcattatcagacctgaaagttttaaaaacacagttgaattgtgtttgaacataggatagaaattgtgggattatgcttttagcatcagatttgtgctgcattaaataaatccatgtaaaccgtgagtggtcatctactagagttagaaagtacttgtgattagtgtgtgaggctatgtgataaggtccccatatgtcacaatgtatgagatcaaaaatacaatttttagattattattattctgaaaagagagtcttttctgcttagcaatgggacaaatataacatggtttatttttatgtaaagcagaagtgttacaatgtaaagtttccccgagaagatctaatcgcttatgagacaaatgcccaagtcaagaatgccaaatttcagctgaaatggacagaacttggaagggatctggtgcctcatcaaggatatagagatcattgatattgctaccttttccaatcatcctccggtatggctttgtcctagataaaaaaactatcagattcgaaaagtatggtgatagcagtattctttgtcatatagctagtagaaatgatgttatacttaaaattgggggcataaagaacatcaataagggtgatgttattattgagaacaattgtgccactttgactaacataaaaacaattattgttaggcaaaatgagttttgtaactggtattttgcatatacactgaaaaagttttatattggaacagatatgtcttgtagctctggaatccataatccaagaattatgtaaaatagattgtgttatgggatagtaagatacctgtgttaccagaagaggtaggtggttcggagatattcataccagtttgctgtgcagcaagcaaattaagcaattgttgatactgagttgtagaaagttgaggaaggagagcctggttttcttgctggttgttgctactgtcatctgttgtttgaatttgatttgcattggcctctttggatttattcttgttaaaacttggtggatacccgtgaattttatagcatctttcgatagtgtgtccaaggatgttgcagtgagtgcaaaaaggtctactccttttgggaggctcattcttggaggtggtattatcagtcttttgacctgtatttttgtttccttgaaacacgaaggccatagcgaaattctagttggtagtgttcgactgattacctctttgatgttcttcttgtgtgactagatgaaagacacggctgatttctggtaatggttccatgagaaggatgctaccaagaacttgagaaaaagaatcagaaagtcccattaaaaaggacataatatgttccatatgatagtgatcttgaagtcttttgactcctccacaagtgcacccattgcaggtgcaagatggcctaaaattggtcaattcctcccatatagttttaagcctagtaaagtacataccaatagtttgattatcttgtttcaggttcatgagatctttccttagattgtatatatgggggccatttctttggtggaatcggactctaaggtcattccaaatggcagcagcagactcatcatagagaatgctagaagagatttccttagatacagaatttaaaatccatgaaataacaatgttattgtttcttatccatgaattgtaaaaaatttgatcagaaggtaagggtttagaaattgaaccatccaagaagccgatcttgttcttgacagagatggcgagttgcatagccctgctccaagctacataattgtcctgccccgtgagtggttgagaaataagagtatgtcctggattgtctccatggtggagaaagtatggatttgtaggatcttcgagtggattttttgaagctgaaacttgcagagaagagttttgagtttctcccatggtggtttggatcgtggcttcatcttgagtgccttgattcgattgattattggtagacatgtcagacaatcaatcgaggagaaaatcgattgaaatcttgatagaaaggaagaagagtgcaacggaagaagacacagcttcgtcggagaaggagaagaaaatcgggtcccatataattttaaaaaataacttttagggaatattgctaatcaatcacgaggcgtcacctctaggtgatgctaggcatcattggtacttaatagcaatgct

SEQ ID NO: 246205 - DNA, 820 bp, Cannabis indica
aattattaaaaacttaagaactaaaccaattttagtttaaaaaaatgtgaaaataattctaattcctagagttatcactatatcgggatgaactactataaatttattgtgtctatcttataaattctcaactacttattcttttagccaatctagcgagtgggtaagtctagtctagatttctcagtcaacaaaactaattttaaaagaataaaacaagaatccagggctaatattatgatgtggcaggacataaagagaaatacgttatttcattaaaaaagaggaaagcagtgcatgaagcttaaagatggaagaataaagctctagatgaggaagatatagagaagagctcggtttagaacaaaataacatgattaaggagttctgaaggcaggaaaaagagcgcgatgaatagcatatgagaattagtgcacgaggacagatcagaacagatagagagaaggaagcagacaatttgttgtgcctataaatcgaagaccccctcattcaaaaaacatatggatttgatcacatgagactagccgaaattctatcaaaatatactcttgaaatcacatttgatctcgggaagcaagcgacccagacacgattaaaagaatttagagaaaaattttataaactgattgaaaatgaatttcaattagattgaacctggcataaagaattcaaagtttaaatgacaatttgttgttgagccaatttttgacatcaataataatgtatttatatatatatagttttcaccacctattatacctataaatagataataatatttattaaataaaattaacat

SEQ ID NO: 246206 - DNA, 794 bp, Cannabis indica
aaacccacacccttattcaccactgcctacaatcctacccacaccattaccataaattgccacatagcaaggaacccgtcaacacccataaccaacagccaaacagacccccaccaacctagagccaatcagctatcacaaccagatccaaacaaagacagccaaacaacctgtacctaaccaaacaccacttctccaatagaaacacaatcaaaacccaacaaaacactacccagagcaaggcaatcaaccccaaaatctagaaattaatgccacgcccctccaatcggacatccacttgcacctattaactccattcgtccctccaattagatctccaatcactcatccgaccgcaccaccgctcgcaccattgatcgcgcctccttttgcaccctctaccaactagagctctggctagccactcgcctcactaaactagagcaactgccccagccaactttgagaatagtccctcatcgagaggaccgaatttgtcgagatgttgttgttgtcgtggaggagatgttgacatcgagaatgtcgttgtccttcccatagccgcactaacgaaaactataccctttcaacatagagacttaacctaacgtattcctttctcagaaagagatagaaatcctaggaatataagatggtgtgacttttattaatggttaatgatattgtataatagtaattcaattaaattgtacaaaattctatattttattacaacaatttagttagtgctagtcacccctcttattaatatttctctaaatatgtatctcttt

SEQ ID NO: 246207 - DNA, 875 bp, Cannabis indica
agaccttctgtcatcgatgacagcaaccaagagactaagagttgatcttgaacttcccagctgatgtaatcttgattgactctgccttgtgttcgatcttctaaagtgaggaattcagctagaggtggattcttgataaacttcagtaaccgattgcctttgatcgcagcaaggacctgttgcttccacaaaagaaaattatggtcatttaaacgaattgaaatgctatgattgaagtaaacaggttcttgagatcgaggttgaattgcttgaactccattaacaccagaggtgtttaagtttccaccagcagctcccagagtagccatatttgcattgagcggagggaagtgctctgataccatgttaaacctccgatccattgagctgtaacaccatgaaacatgaagaacaagttgcagaagaaagagagatgaaggaagaagaaagagcagagaaaagatcagagaaagaatggagaaagaaagagttatctcattgaacaaatcaatgtacatccttatatacaagagtcataacagaactctaaccaaaaccaaataacagaaagccaaactgaaataacaaaaaaataacaaaccaacaaactaacaaactaacagctaaccaacagaactaactgctaacagtttgattggtcttaacactgtaaaaatcaggaacatgacggttgccagatgcatggtagataatggagcttcctccaacattcttttcagatcaacctatgaaaagatggggctccgtgatctgatcccaaaattatagggatttcttcagtctcacgatgcgaaagttgaaactgctaaatgttggtgtgctgttcggatggctcactgcccggttaagaaggc

SEQ ID NO: 246208 - DNA, 812 bp, Cannabis indica
ggaggagacatatattccgctgaaatcactgtaagatttctgatactcttatgtgtttaatttcctatcgttttagaagttcatatttaggttgttaaatcaacatacttgtgagtagatctaagatcctggtaaaataacttccaacacgatcctcatcaaaccagatgcactctccacactttgctccgcgccaacagccattgccgccttcacaagccacaactcgccaaccgaggccttatctcggcaaatgtcaaggatgtcgccaacaggtcacactgttgctcaatgtccactctttctgctagtgcccatgccctcgcaaagtgctcactcatcggtctcgaaaggcactcgcacatcactctctggatctcagtggcaccctaaggcgcatgtggctacaacatcaggagtcgaaactccaacttggcttcttgacagtggtgcctcacaccatgtcacaagtgatcttgccaaactttcacttcatgctccatacgatgggtttgatgatatcgaaatcggtgatggtaccgggttacacatttccaaaactggttctacttctcttacaacaccttctcacacttttcaactacatgatgttttatttgttccttccatgaaaagaaacctcatatccatatctcaattttgcaaatccaataatactgccattgagttcttaccatcttctttttgtgtaaaggatctactgacaagggccacattgctggaaggacaacctaaagatggtgtgtatgaattgtcagttttgcagctaaatactcgtccttctgcattcc

SEQ ID NO: 246209 - DNA, 543 bp, Cannabis indica
tataccagctggacagtcgcaaagaaagcacaccttaagagtcgtccacagctgctagtcaatccaagtttactgctcttactttcttttctggtttagtgtcaaaatcaaaggatcagcatgttgctgagtcaagtttactttcaatcaaagaaaaatggcataggagactacgccatccatctagtagtgtcttgaatcgtgtctttattcatgtcaatgttaaaccccctgctaatacaaaagaaagtttctgtgaagcttgtcaattcggaaaatcacatgctttaccatttaacacgagtagtagccatgccaagtaccctcttgatttaattcataccgatgtgtggggccctgcccccgtgatgtcaaacaccaactataggttttacattcattttgtggatgattattcacgttacacatggatttatcccttaaaaaccaaagatgaagcactcaatgccttcattcagttcaagaaacttgttgagaatcaatttgatagacgaataaaatctcttaggactgactgggggg

SEQ ID NO: 246210 - DNA, 602 bp, Cannabis indica
cggcttctcaatggatggcactggctttgttggaatcactctgagctcttcaaaataatttttgttcaacggcccataagaatcaattcacaaagcataattcatcgcctcctttccatcttggtcaaccatatcctctctcaccaaagtcagattaagagggtcttcattgggtttcctggtttccaccaacttgtccaccacatcaatcgagaaataactatcactagcttcaggataagttatacccttgagtacattgaacacaacttcatcttcttatactctcagctttaactcaaccttttgcacatcaattaaagcttagcctgtcgccaaaaagggtctcccaaagataatggaaacattgttatcctcctccatgttaagaactatacagtcaactggataaataaacttgtccaccttgataaggacatcttcaattaccccccttggatgagccaaagaacggacatctagttgcaatgtcacagttgctggcttggcttctctaagttgtaatctcttgaaaaatgacaagggcattgggatactttcccccaaatcacacaaggtgttgataccctctagtcttccaa

SEQ ID NO: 246211 - DNA, 693 bp, Cannabis indica
agctgcattgttgttcacaatgtctatagtttactttttaattaaaagtggtcttgcatgatttttgtagtttcttttttttttttttgaagatttatttttgtagtttcttaataaatagtttgcgaggtcatttcattacaactgaccaaaatgttaatgagtggaaaaagacagaaatagccaataatgggcaacatgtttgatgataataattcattaaaaggaagaaagaaaaagaattccaaattaatttaagagattagtgtgtggcatatgctgatggctttctcctcatactttaattatcacgagaagaatggaccattatacataagtttgagttccctatagctatatagttagtacgcttagggctaagcatgaaatctaaaacattgaaaaaaaaccattcaaactatcttgttaaacatggttagaatcgaaactgataaaattgaaaatggtgtttagtttataatgttgttttgatgcttgatgtgtaagttgctactttttgtgtgaaaatggtttttcttcgagttttcttcgatttatggaatttggtttttttcatcttgtttgatggtgtccgataagggttcaatagtggtcggatggtttgttcaaatttgaggttagggatgttcggttttgtatactaaataaaacgcatttcaatataatcagatt

SEQ ID NO: 246212 - DNA, 683 bp, Cannabis indica
ggaatatatatttaatcacataatcttgattattttcccctgtgctgacgacacaataaacaagaacataaatgtgttaaggatttggatgaatttataaatcaagtaaacatataaatgataacatgaacaaaatgacacacaaagtgatgaaaatacttctgtttctttattgatatttaaaagataaagatttcattgaaatggagttttattcagggcataaaacccaataggaatcgcccttgtcacgcctggggggcaacacctgcacgtcgcagtcaaatttggatttaaggcatccaataatgaagctgaatatgaagctttgatcgccggcctaaatctagcctgggagatgaaggccaaactcattgagatctgcagcgattcacaactggtggtaaatcatgtattcgaagagtacgaggctcgactggaaaagatgatagcctatctgagcaaaatacacgacctgctcacacagttcaaaagctatgctctcaagcaaattcgaagagaagagaacacgactgttgatgcatttgctcgacttgcgagcagcaatgtaaatgataaagcaaatcggattcctatccaatttcttgaagaacctagtatcaccggcacggaagaggttgaaatgattaatacatccccaaactggatgacgtcaatagcag

SEQ ID NO: 246213 - DNA, 699 bp, Cannabis indica
tttagcttgaccaatactatcctccttcatctcctcgtacttcaaaaacaacactttttcgggattctctaaacttgctttccaaaaccctaaaacatgatcccaataaggcccaaaattattctttccactacaaaatatgtccactaaatcttcaatagtgcacttattgatgtcgtgattacgctctgaaagattgtttacgaaataccaatatgatacgatgacatcaagagggtttcgactaatatagacaatacgagacttagaatgatacttgatagaatcagaaagagatgtgtagggcatatgtgtggagaccaaacgagggcttgacatagtactcaagtcatagaatttgggatcggaataaatcgagtactctaatgaaggcacgagatcgtgagggttcgtggagagcaaggggtgttgatcatagtgttggttgcggttaagaatggaaaatagaagagaaatgagccaagttgtgcctgatttgggaaatgaagccacgattatatcttcatcttcggctttgaattgtttttggaaagagatgatgttgagaatcatattggattggaaccaacaattttggtataaggttacaccatattttgacaaactattggctttaggtagctgagatatgatcgattccaatgattcatcactattattgtcttcttcattggaaaa

SEQ ID NO: 246214 - DNA, 670 bp, Cannabis indica
ggaatgggatgtggaatttaaagataccacagaaagtcagagtctttctctagcgaatatatcattgtgctctcccgaccaattcccaacttatcaaacgtaagattccagttcaaccaatttgccacagatgtggtgaggacaaagagactccagaacatgcgttagtgttttgttcttctttgcttcctatttggtcaaagctttgggtttggagtcagttaaatcggtgtaggaatggttcgttggcggagcttgtggtttgcttatttgaggtgcttgagcagagtaagtatgagttgctgtctatgatttggtggtgggtgtggtatgatagaaactccgttttttttgggaagaaacaattaagacaagatctgatatttgagttagcaaaggatgcgttggaggagtttcaaggggcgacggtgctttctaatggtcgggttttgggtggcccttgtgatggtttttctggggtgggtaacggggctgctggtgtggtgttgggacgggggcggtatggtgtgcccgacacgttggtctcctccgaagatgggtgagtttgtgttatcggttgatgctgcggtcacaccaaggaggggttcgctgggtttgctagggttattcgtgggggtggggtgtggtgtgggcggcgtgggctgtgggt

SEQ ID NO: 246215 - DNA, 562 bp, Cannabis indica
atcaagggaaagcttgagttcttaattgatgaccagaaagtgtgttattctcctggttcttagtgttgagaatgcactccaaaccagtaatcacaccctgcttctgtttgacaagagcctctaaattggtaagggattcacccctcgctagaagctcagcctcattggcctttagcttctcctggagagctcctgaggaccccttggagttattgtgtgaaaggctgaacttcaaaaaggcttgaaaacaaaataaagtcaagttagtgtagaagacatgtctggctggtcagcccctctacggtgcttctaggaccagccagcctcttaagaacataccactagccaggcagctttgcatagtagctccctatggccagccaacttttaataatatagaaaatggagcaaagttatatgtgcaacttaccgaggccaagtcctagagactgctagatgatagcctctccagcttgccatcactgagctcctaaagctcatcattgacggtgggtaagactcagtcaatacgcttgtgagctgcctccatggctctctgccc

SEQ ID NO: 246216 - DNA, 783 bp, Cannabis indica
tgagttatcttttcttttagtgaaatattttctagtactataaatagttactcttaggctacgaattgagcgattcaaaagctacaaattagagagagaaactcagagagagagagagcaaggaagagacgatgatgggcttcaaaatgttcttcattctggttcttttcttctccttgtactcttaataaatattatgattttcattataatatctagttttgagtagtgttcttttagtgaagggttatttcaaaactcgagacatgaattcttaatttcattattgaatgttaattttaagtttccattatatatcaaactgcttctattcttctatgtttaatgtcatgattattgttttaatcttttttagatagccactaaattaggttttactttaatctaccgtcatcttaggattactattcacctaatagtctaggattctaagtgtttgtggcaaattgaaactttaattgtgatgaataatagaacctagattaaatgtattatatgcttcattgatttgttccctagattaatctatatccataaatctcaaagctttatctaagttaaataaattacatgcttcgtagatttttttttttgaagaaagtaatcaaactttattaactttcaaattcagcaaccaaaaaaggaagcagatcagttgggacatcccccatactgaagatacgatcagggtaagaaatagcaactttagcaatcgcatgagctactatatttgttgactgtttaacaaaagaaatagtaaca

SEQ ID NO: 246217 - DNA, 1218 bp, Cannabis indica
ctaactcattgagtcataaaaaacacgacggcacatattcgagttttaaaataaaaacacacatttggattcaaaactaaacttgcccggcttggtaggtctttcttgagacatggccagtcctaggacttgatcatgggagttagtcagttctaaggttcatcctataaggctagccgattcatgcatgggtttagtgaccctggccagttcttggttgagtcatggaaccttggccgaccctttcaaggcttaggaaccttggccggcttgggccttagttccaagtgggttgccaattttctatcctcttttgacttcggcaacaatctatcatggccatgtaggcatatacaaccttaatctcatacgtggttcccttagaaacactatatgaaacttaatggtgagtctattatagtcgaatgttcaacttaagactcaatatttgtccaagttattacacttgagacttgtacttcgttgatatccagcttgtacgctgacatggtctggaaagtacccttgagtacggttgtctagagttttgtctatggcttggaacctgtaaggaactctgccttagccgtagcccttatagaaactctgtccggttcttttctggctatacggttcttacagggccttagccttatgcatgtgaactgattttgtattcatattcagcattatgcctttcatgttcttgcttttggcctataggccctctatttttgaacactactatcatttagccttaaagtcttttatcatggacatatgatcgtcctggctatcttcttagggccttgacatgtaagtatctagatttacttttctttatgttaagccaaagtatggttgtacttgacttaaaggtagttttagtagcttattctaagcgttgaaatttctctacataagttctatgtgctagttcaatgcattgtacggtgtagggtgctccccaagtgaacgcgcaaacttacgatctcttggtcacttgcaatttaccaagttttatagaccttgcctagtaattttcttagggtgctgcttggtgtacgcatgtggaactggcaaagaataactttaagaagttatctttgttagcaagtggtttagacacagttagtcttacgtgtaacaaaagcttacagcttagtgtccacttttgaaatcacgtagtgactacccctgcacgacttaccgcgcaac

SEQ ID NO: 246218 - DNA, 1158 bp, Cannabis indica
catgtaaattgtgaggtttagcttacttagacaaaatcttaactacatttgtagttggtagtcaagtcggttaggttctatcttaactaactgagtactatatatagggggtccaaggactcatgttgaagggatcaggtttagggacacaaaactcagtttgaaaatgagatgaattctcttacaatttaagttgagagtgagggttgtaaaaagtcttttgcatgtgtttgattggattgccttaagtgagattaaatttgtaatagatgtgtgtcaccattgagattgaatttttgataggggtgtatcaccattggtgtcattgtgtttgtgatcctagtattgtaatcttcatccttgtcattcaataacaaagaaaaacacagccaacagagttgtttctagctggggattaggtccaacttttatccaaaacttgtgattgaaccttgttaaaactttgtctatttacttttcagttttagtttatgtttgttcttgggttattgccgttgtttggaccactttcttgtttttgattgttgggaacaagtgtgtcatttggccttccattgccacacccaagaggaaaactgtgtagaaaataacacttatctttgtagtgtcctggtttttggaaatgaagcttgattggctgttggatttgaattaggtactgtaggattggtaagggcagtaattgtagtagcaagagaagggacagtacgatttccaaagtgttcttttcctttcttggtgtatgatcattgaaaaaactttattgagaggtggacagagatcgatcagtaaaatttgagctcgaacagcatgatatgattcattaaaacccttgagaaattgagaacttgtcatgattaaggtggtcttgattacgtgcagcaacatcagaagtgcaaggaatctgaggccttaaatagttgatttcatcctacatagccatgagttttatgaagtagatatgtatagaatcatcaccttggtgaaggtatattaaggttttattgagcttaaagattcgggaccattgccctgattgaatcgactgttcaactctgtccacatctcaacaactgtgtcaatatacataatgttgctcttgatttcaagagataccaaatgtaagatccaagacaa

SEQ ID NO: 246219 - DNA, 700 bp, Cannabis indica
catataaagtttcattttgttcttcacatttactatttgacgccaatagcaacttccttgagcaactacctcataatcccaccaattagtcccttttaaataaacattattcacccatttgacccacaaaatgtcttgttttgttgccacatcccaaacatattttcccaaagccgcctggttctattgtatcagtttgcaaaatcccaaccctccttctttctttaatctgcaaagatggttccatgaaacataaccaggacctccacgaatagctactcctttccataaaaaaagctcgacaaagcgagaactccatgtttaaattcgggctaccatcttctctattagtcattcacaatcagttgctgataaacatttagcacaaataagaatacccaaatagtagaaaggcattttacttctcacaaaacccaatgtatctaggatcctttgtacctcacttttatccatgccacgacaaaatacaactgacttggcatcattagggaataatctagaagtttcaaaaaatagctttaagccttgtagtagaagatatatagatttgaaatctccattacaaaacatcaatacatcatctgcaaaacaaagatagtttagagacaaacctttacatctctcatgaaatttgaaaccatcttgggacccgaccttgcacagaattctcagcaaatac

SEQ ID NO: 246220 - DNA, 685 bp, Cannabis indica
aaaaaaactagcaaattcaaaagaaatatagttcaaacatagaagggaaaaatcaagcgttgggagcagcaggaacagattcatccgcgactttactggccacctcgttctcaacctcctccacctccgcgacttcggtctcctcgagaaggttccctccaccaccttgagttggtgtgggtgacatagcgcgaaaagcttcgtccatttctgtggctttcgctccaaggattgagaagttgaagtctggaactttggaaagagtagtatagatgtagtccgagaccgcctggtcgtaccgtttcttgccgttctccttcttagtttccaggtcgcgagagatctcttcaatcttcgcctttgcttcaagctcgacctgctccttggccttacgaagttcctctaattctttggccttagaagacccatcttgtttcagcttcttaatgtcttcttgaagctgagcaatatgtttcttcgcgagttcaacctctttgggccctacggcaaaagccttcgcaaatgtagccatgaactgcgaagctaactgcgcagcgcgagaaagcagctcctctgaagatgacttgtcaatcttcaacaagaactcatcgctgaaaaacctctcctgaaggtacagcacatgacgagctcgagccgatggatcgatcacaaccttcttcccttt

SEQ ID NO: 246221 - DNA, 499 bp, Cannabis indica
taaagtatattctgttaaaccaacaattaccaggcggtgacgtgaaaccttaaaatctctccaaaattatttttctcttctcaccttacttttctcatttttaatattttattagagcataaatttataaattgataatttattattgttttagtaatttatttttctcttctctttttaattgtctcatctttaagattttattaaaacataaatttacaaaataataattttatattattttaatattaatttttaaaatacaacatatatactattacacgttattattattattattattattcgctttgaattatatattttttagatttatcaattacctttttttaaaaaaaagattttaattttgtgtgagaattagatacaattttatttattttctcattattaattaatagattttatttgacatatacttttataaaagaaaattttacagattcactacaaattttttttacatttagtgacaact

SEQ ID NO: 246222 - DNA, 911 bp, Cannabis indica
atattgtataaacagaggcaactttgccaaaaattttaaaaattaaactacttttaaataactagtacttaaatcaaaaaattagtttgaaaactcgatagattgatcgtttagcttacttaatgtgatttaattattttaggtggttttagttagatatggataaagaatagatgaaaggaaatagattgtctaaggaatatgaagagggtgttaagtatttcatggaatttgccataaaaaatggcgacgaccctaatatgataccttgcccatgtttaatgtgtcgaaattttaaaaagttgagtggtgtagactgtagacattagagtatacctttacaaatttggtatagattcgtcatataaaaatgggatttgacatggtgagcgggtgactcgaccaaattcttcaaaaaagctcgcagagagcatgtattgaacaatgactttcataatgacatgtttaacaatgtagaagaaaattttgcagaccgcccaggtgaattcgtaagactaattgaggagtccgaaaagccaatttatccaaggtctaaggttacaaaaatatcattgctggttaggatgtataatttaaaggctagaaatggatggagcgacaaatgattttctcaactactttcttacatgtgtgagatttttcctgaaggtaacaatatccctagtagtacttatgaggcaaataagataatgcgatcactgggcatcgagtatgaaaagatacatgcatgcccaaatgattgcattttgtttaggaatgagttcgctgaggctagtaattgccctatgtgtaagtactctcgatggaagttgaatgataatgggaaagagcttaaaattggcactcctgcaaaattgttgtggtatattctcccgatccctaggtttaag

SEQ ID NO: 246223 - DNA, 541 bp, Cannabis indica
attaccactgctcttgttgaggcaaatcttgaacgataacaatttccaaagggtctgtctcactctttccttgaaaaaatcctgtgctcttatcaatatctttcctttgatcataaaaatttacatgtgacaacaaaataggcaacatgacagcaaaagcacgaaccaatttttctgagttcttgtacctcccaaatctcatagaattgcacactttaagacatctcaaacgtatgtcaaaaatgcacataatccagtgagccaaatcaatcagattaataggcattaagacattatctaattcaatccattttctactgcaatacataccaaaaccagctacgtatgcagaagctttgctgtccttcttaacagattcaatgtcacaatcattcttaacaaactcattatacatctcaaaaatctgggcagcaaagaaacaatcagtggtattaacaaaagagtttacactctcattgtactttatctcctttctcaagtagtaaaaacaaacatccaaatgctgcatcagaaaaaaaaa

SEQ ID NO: 246224 - DNA, 916 bp, Cannabis indica
tttatttcccatagaaattaattctcactcaaaatttattcatcaaataaaatctttccttgtacattgttgtatataggtgactcagagatcatggacctatatttcaaagctccaataaaaacttgactattatcgatctcattaatagaataatttattttattaattatattattaatccactataaatatagtataacactctctgacaatataaaattatatttacagaattcttactttaagtctattgttataatcaatataagtagtttatcctctaattattatttcataattatagttgataaaaatataattttacccttctcattatctctttattccttatgtaccattaatttaatgtaaacagttaatttatagcttattatagatttggatctaactgttagcatttccaaaattaacactataagggaactaatattcaatccattaggaaagtttaaattccactattgtataacatgttcccagccattcatgttattaagctcccaaaatagaagttgtaagaatcatcttctctaagaaacttaatttaatgagtgaatcaaaaaactcaatgaacacaaatagaagtttatgtatactaagaattcaggttaatgtactaatgactatcattgtgatatgaatagctctttaatggtaaatggcacgttaatgaaagatatttattactgtttaccaaaattttaacgatgattatcttgcaagagtaacgacatgtggcacgaaaatactgggactgaattaatgaagaatatgtaaagtcatgaccgtttgagtgactgttaatcatgatgggtgcactactacaatgttagcctttagaggcagttttttcaaccccatttataaaaagggaagctaaagggtgtgaaaa

SEQ ID NO: 246225 - DNA, 1544 bp, Cannabis indica
gatattatccattgttataatcccaataatcaatgatcctctatagatgatctacattgcatagggataaaattaccgttacaccctttcaatgtattttatccttaaaacacttggccacctataaatgatattatagtgaactaatatagtcactaaaatgagcgctctatcatttatctctatttagcaagctgtacctatcgctgattatcatgccagtctaaatccagtgaactgacaaatcatggaattaaactttcgaacatataattatgattatattccactgtgctgacaacactataatcatgaacaaatacatatgttttggacctaatagaatttatacattaaatataatcatgaaataaatcatgtgaactatgcaacataaaaatgtgatttctgatctttatttgattatattaagattttatttaggctacaaaacccaacactcgggtgttgtggccacgggggtaaaccccaaccccaaatggaatgttactcgaggtatgaataaggagatatctcagggtaacccgagatcaacactcactcacggggtgcacatcaccccgacactcaataggggggatcaaacctcatctcgggtgagggctacatccaaatggtggtgtaattgtaatgccaagctcagggtagtgggatatgtaccccgacacaatggttgctagaccatacccgagctatgtggttgttccgagccaaatatttttccaaaagagtatcacatccccacaaatacatttttacccttttatgagaatcaaaattggaaaaatggagggaaaatgaaatttttttatgttcatggtatttttcaatattcaagaacacaatcaacgaagagcttcaaagttattcattttctcaacaaattacatcaaaccagatctaaaaacacactacacatagcctatgctactgaatccaatcgccaaacactcatattttatcaaaaactcaaaaatcccaaggattcaatgccatttttggccatagaaaaagactaccaaaaagaagtgctaaaaacttcatcaaatttcaaatttgaagcaagaaatttgcaagaggaagtgtggagaacctacccactatgaagatggagacctcaaagcttccaaggattattataatttttttctttgtaaatatttaaattatttcttttgtaaataattgtaaaaccctaactagcataggcgtgttaacgtgatttttaaacgtattgtgcagctcgttgctaatcaacgaggtttatggaaaacgtgattaattaaaattttgctttttaattaaaacttatatattacatacaaaatagttcgggatcccgattacaaaatgctttacaaaagtttactagttctttacaaaatacttgtcgcccagcaactaactacaaaagcactgttgtcccgaggatcgtacgctccaggcctaaccgccccaacatgtacaatcttcatcggctcgtcctcacggttcctcaactttggccttgcccttacctacac

SEQ ID NO: 246226 - DNA, 514 bp, Cannabis indica
tttacggaggaggatgagacttcggaaggatgatgacaactggttttgggtgaattttaagtatgaaagggcacccactttttgtttcatttgtggtgttattggtcattcggaacgcttttgctataagctattggagatgcctgctgatcaaattgtgaagccatatggagagttcatgcgtgctaagttccaaaagcataatcacaacatcgaggcgaaatggttacgtacgaaaggttgggttccaccacggagagatggcagcggtagtagtttccggcgtatggaggaggaagagcaaaatggaaatccggtgaacattaattatggagatactaatcagaatatgggagattggcaatcacgtaatcaaaggatcaatatgcatcaattgcatggtgggaatgcgggtgatacgaatgcaataatgacaaataatgaattggagataatgggggaaaagtcattagttggaaaaaaaaggaaagagttgattggagacaataaaaaa

SEQ ID NO: 246227 - DNA, 594 bp, Cannabis indica
tcatctcttcctttggatttgaagagaatgtcatggatcaatgcatatacctgaaggaaagtgggagtaagatctgttttcttgttttatatgtggacgatattcttcttgcatccaatgataaagggttgctacgtgaagtgaaacaatttctttcaaagaactttgagatgaaagacatgggtgaagcatcaagtcataggcattatgattcataggtatacattctaagatatcttaggtttatctcaagaggcctacatcaacaaagtcttagaaaggcttcagatgaaagattgttcaccgagtattgctccatttgttaagggtgataaaatgaatttgagccagcctccaatgattgattttgaaagagaagaaatgaagaatattccttgtgcttctgctgtcgaaagcctaatgtatgcttaagtgtatactagacctgatattacttcttctatcagagttttagagagatttcaaagtaactcgaggatagaccactggaaaattacaaaaaacgttatgaggtactttcagggtactaaggactacaaacttatgtttaaatgaaccgacaatctagaagta

SEQ ID NO: 246228 - DNA, 519 bp, Cannabis indica
ttgtacgggtcatcccaatttgggccaaacactcctgctgcaggatctttggtattcaagaatactcttcagagcactaagtctcttatgaagaatttcttttccttaacttgtttattgatgtacttggcaaccttctgctggtaggcatgcaacttaaggttgccttggtctctcctttcttctatttcgtcaagggactccaccaataaggtgttgtttacctcttggtcataggttgtcctcctataagatggtggccccaattctacgagcaacattccttcatacccataggctaatgcaaatggtgttttcctggtcgccgacttctcggtggtcttatgtgaccagagtactctgggagtaattcaagccgaattcctttttccttttctatacgctttttcaaagtgtccttgagggtttgcttatagcttccacctgcccgttcgtctggggatgagcaatggcagagaagcttttgatgatgtcatgtctgttggaaatattttacca

SEQ ID NO: 246229 - DNA, 1645 bp, Cannabis indica
atgaaaaatggaaaagcaattctcttagtttggggggaatagtatgggttaatttcacaaatgcacaaaaacaacaaaaaaaaaaagaaaaaaaaaatacggtttcacggaattttaaacatttttacgatttttttgattttatttacataaaatacggtcttttatgttgaaattttgttcatttgttgttaattttttgttatctgtatgttattttttattgttattttgatgttacttttatgctgttttcttgttgattttatgttgtttttcgtgttattttttagaaaaccgtaaaaatatactaaaaaacattctttgaacgtaaaaatgtaaatattttacaaataatggtgccttatgtaattattctgaatagtattactatggaattcttttccaaaatttttattttccaaccaaacaaaaggatcaggcccattagtattccattccattcctatttgtcccattaccatcaaccaaacggtccctagggtttttcctttctactgcagtagcaaaacaatacgtataaacaacttataaacaacgcataaacaacactgtatcaaatttattgataaattgactaattcataaaatcagaaagaacataaataacatcagaataacaatataaaaatcccagtttgaagaggaataaaaattacaatagcacaattaaagataccctctttttttaggctagtgattaagaataactatgttaggcatttcgtcaaacacatggaaggtatgcccttatatacacattaacaaaatattcagcttaaagaagaagaagaaatttacaaaatttgagggcaaatgagtagaatcaataataaacaatcacactacaacaatatttttattaaactttcaaatctaaacttttattaatgtaatttgaaaaggaaaaaaaaagaagaagaataagaaaagaacaacttacaaatcgaagcttcaaaaaatattaatagcactaaaaataagtttgaaaaagagggagatggcttgatcaagagggaaataaatctgaaaaaagtctctctttctccctagaccacaacatagaaggttgagtagatgttttgcttgacatcgagggctgggacaagagagctggagacaagagaggttggatgtgagatggaaatggtggagatggttgccttttgaagtggatctgtgtgaataggaggaagaaggaaaaatagtataaactgtataattgtaaatatcaaactttgtaaatagtattaaagaaaaatttaaaaagtaaaaaagtaaaaaaaaagatagggcaagtataaatgtttaatattggaaaaaaaaagccacttagtgtaaatttccccccaaaaaatataaacttaaataatttttaaaaattactcttaatatttttttaaatttttttcctcacattatttatgttaatttctatacatattttaattttatttttataatttttttaactcatatatatatacactaaataacttaactgcccttcgtgcagtataaaatcaatgtggtatataatttatgttaatttattatttatattacaattttaaaaactaatattttacattttaatttatatcttgttaattcttcttcttat

SEQ ID NO: 246230 - DNA, 647 bp, Cannabis indica
aactagtggggtccacatcttatagttggccactagtgtttaatttgctattattttatcttttttgttccatataatttaaatcataacccttgttgaaacactgtaaaaggaatagaatgctctcattctcatccatatttgataacctagttttcatttttttgtcacaactagaaatttgagagcctcctcccttgctattttgagatcccctctctttttcttcatcaatttttgagctttagtgataaagtacatgcctattcatatcaattcaagtactcaatcatagtgtggaagattgtaaagaatccaacacctgaaggagatccagactaagatcttgttattactctatgacagacaggaacaagggttagagatctgagtggaaggagccataacattttgctgccaccaatgcaaggtttttaaaactttatatgtgtttattttttttattattttaagaattcatatttagggtgttagattatagaatataatcaacatacttgttagtaaagttagatcctggttaaaaataatcaaacatttatatgatattttttttatgttatttcttgttactttatgcagttttcttgttattttcgtgttatttttataaaacaccataaaaa

SEQ ID NO: 246231 - DNA, 719 bp, Cannabis indica
aaaagttttctactaccaaaccgattttagctgtagaaggacggaatgcctcgattttggaaatcggtttgaatttggagaaagaggctctcaatggtgtgggaggtgggccaattgatattggcctgagtactcttgttgggtcggccgtgggttcaagtgatgttatggggcctcatgggttgaattgtttgcctagtgcaatagttaatgggggtgggggcccacttcagacccataaagattctaatttaagtggggttgttgacaaggcccactccactactatgctcggccagaaagaatcaaacgaggctgaaaataataaattgaataagtttgttgggcttggggccgtgcaaaatagtgaagagaaaagggctttagctcatttctttgaagcccaagaaaatttactttatgatcttaaacactttggggaattagatttgtatgagataaagaattttgggggcgatattggtgttttgcctacatcggaaactaatgagagaacaacaccttttaagaaaagaaagtttgaaggctctgcatcgctgtgttctagacctcataaattacaccagaagtacctgggtgtagtccgagattttccttaggaccctgtaaggccggatcatgaatccaaagtggtggaggaagaaccatctaaggaaagctctagttccctgagctacactgatggaattatgaagaac

SEQ ID NO: 246232 - DNA, 865 bp, Cannabis indica
aattttgtatttcatttgggtgatttgatatcagaaaggagatttgtaaagagcaatgtcatcttcttcatcgaaaatattggatttggagaggacttctaccaagattctctcacatttacggtgtacacttcattttctctcaatttacagtgtttttcactgaaattttgttagattcatcaaattaattcctttatttaatataatagttaattcactctaaatgtttgtagaaatgtctcactgatttagttctaaacccataaaagtaggtgaagaacaaagaagacaaaaaggaacaactggttgggagaaaaattatttatagcttttgggtactaaattatgctttttctaaataattaaatgggtttacttgaacctttgcgtaaatttgtattatgtcaaccagaatttgcttaatagttgtaattttgatttaattttagcgatgtaatctcaataattacatgattccaagaaggataattgagtgggtagttttgtttacaatatttattaattgttatttagacttttattttatgtgaattaagatactctgcaggtctgaattcaaagaacacaactttaattttagttagttgcttacagtaggaagataatcttatacctggttggttttgtatttaattcacattctacaatttgaactttgagctaccatcctatctctgttcaactctgagtgttagttttcagctataaataactagaaaaagatctgaatgtgttagatacattcaacctaatttttgtaattgggatgtataagtatatttgaatcattatgatgtataaaagagactctctctctcttggggttatagttgattaaata

SEQ ID NO: 246233 - DNA, 585 bp, Cannabis indica
ccaaagaaaaaatatattgaagaatcagaatctgagagttgataaagaaaataataggacctcatactgtttgtggaaacataagcataacatgttaggttaggacagaaatatggtccagtgcatatttctgcagggtaaacagttgaaaattaaagtacacttgaaatttaaagaataaatacttggaactaggatgtgaactgaaatatagaggacaaaaatgtaaaaaattagatttgaaggtgctgaaattaatagtacaagaaatacgagaaaaagaaaagttgggagtatttatttatttattttttttgaaaacaaagttgggcgtatttcattcaaatggatctcggcccgtttgacatggtttggaagagctttttaactctcaaaacttctttaatctgcataatcaatcaatatctattttatataaactctgtctatataacagaattgttagtttattagaaatttatgggtgactttttatttatattaaaaataaaatggtttattattaaaataaataaaataaatctcattaagttcaaaaaaaatacgattggacttttgttgttg

SEQ ID NO: 246234 - DNA, 778 bp, Cannabis indica
caattttctcttgaaaatttatcataaataagttgataatatatttcaaataattgtaatgtacactgttatataaatttttttttatctgaattactttatatactatttttttaactttttttttttcaaatttacagtttgagtttctaaagtggttgcagcgctagttgcaataggagtttctgtacgattttttttgttgaaatttaagttacagcgctagttgcaataaaagtttctatataaaattttgtaaaaatacaataaaaaatatttaaaagtgtaaaaatgaaaaatacctttttcttttaattagaattaacatagtaagcatatgaacgcaaccaattttcaggtccacttaactatttatatctaaaattggaaattcaacttaacatcaaaaataattaatacttttcacaatctacttttgtgtgttccatctaaactttttattaatatattgtacatatcaatttctttcgtgtttttttttttctcccgtttcacgcctattcatttttcctcttgcattcttgtgatcctatcatctaccaagcattgtttttactctcttttcacgttttatcttgcaattaatgatatggatagctaatttttaatataaagatatgtttcaagtgacgtacgtctaatactatgtataatcaattctttcaattaataatgttacttgttattttaaatacgtggcatgttcacgaaaggatacgtaaaatccagtcttgtagcagaataaagtctctttaca

SEQ ID NO: 246235 - DNA, 569 bp, Cannabis indica
gccttaagtaatttgtactcggaagacatgtccggtaccacgagactggagagataaaaccgtgtgttcctagaaggcccttccaatttccctttatattccaacacataaaaaacaactcaaaacattctcaaaaaataatcaacaaacttttagaaatatgagcaatgacttcattcatcttcattttctccagaattatcctacaacgaataataaaatattaaattataacaaatatattaggaaaaaaaagtggtaaataaatctaatcaatagattaaaaaaaataaataaactataataaaaaataacaacatacctgatgctcataataagtatcagtacttgcaactccatcatctcttttctttttgtctcctttaaatggggtgtttacaataaatttctcactaacagagtttgagaatccctcttgtttttggaacactctgtcctttttcttaaaatcttctcctaaagactcaaaaatatttttgaattttaattctaattgttgttcctgaaattcattttctatcaagaactttttcttttttcttttcttt

SEQ ID NO: 246236 - DNA, 717 bp, Cannabis indica
taaagtttatgttgtaaaatactttgaaaccagtttgtaaatattttgaaaacagggggaccccgtagtctatattacttatcttttgttaaatagttttaaaagttaaattttaattatcaaaatttaattacccacacttttcagtataattacatattatataaatcagagtattttattaaattgcacacacgtggcgtccctattagacagggtgttacaaccacaccactgcaaccatcactacgaccactacaacactaccaccaccaccaccaccaccaccatcactatccaaacacaaccaccacaccaccacaccaccaccactatcactacgaccacaacaccaccaccaccatcactaccaaaacacaaccaccacaccaccaccactatcactacgaccataacactgccaccaccatcactacccaaaaaaagtcacagagttcaaatccaaatacctaaacaaaataatcgtcaacccacttgaaaaattcaaatctttacacaatcttatcacaatactcgaatcagtaacttgaatccgataaacccaatccaaaaccaaaaccaaaattccaaactaggaagtaactgaaacaaatgaaactttaaagggattatcaatttgaaacccactgaaaggagccgagcttttgggtcgacaaagagagagaaaagagggtcccttggtcgatgatggtagac

SEQ ID NO: 246237 - DNA, 1204 bp, Cannabis indica
aggtgtgttctgacaggttggcgcggtatagtcacaaccaggtattttgggccgaacccgaaatacaatttgggattaaatgttggcattttatttgatatttgataatttgaaatttatttggaaataattgagtatgaaatgactaaaacacccttgtgagggtgaatatgtgtgctttggccctaggggcattttggtcttttgacctttaagatatactttgattaattgaattttttggagaaaaaggaaatgattttctggctttttccttcccatatccgaacctctctctctcaaccctctcttgaaatttcaatttgatctttggagaattgcttgaattgggcttggaattttggtgtgttgtgcttaattcttgcttgaggcttgaggtagctttctttcattgaatttaattgaagttcttgctggtttttaattgttgaagagcatgaaaagtgatgttgttcttagatttgcatgataagagaattggtgcttgactttgttgattttagttgtgaaattgcaagatttagttgtgagtttattgttgattattgaaggagattattgagtattttctaggtcaaatttatgtgtttattggttgtatttgcagctggaaagtatgggtttgaataggttgaagttcatgattacgagcttaatgagttgttagtttaaagcatgattttgtgttgaattgtggaatttatttttggtaaattcagagtcgtttttagggtttcattgagtttgaaatctgattgtaagctctgattttggttgtgtaaagcaagcttgagttcatggaactcaagcttcgagctttaatggcactttttgattcttggtgaaattattgtgtgtgagctgtagaataggtttaatatgtcatatgttgatgctctggaaagtttggtggtgtttggggaagatttgagtaggtaatgggggcttaaagattgaaatttttcctgttctttctgcccagacaaccggaatttcggttggttcagggctgctccaactggaattccggttggagtacatcgggaaatgctgaattttgttttggccgtaacttttgactcgggactccgttttgggagttctttatatcgttggaaagctcgttctgagctctacgtgatttttctgaattttaaatgctatgtaaatattttatgaatgt

SEQ ID NO: 246238 - DNA, 542 bp, Cannabis indica
gaaagaattactcctagactagcatttggacaaaatagtacttaacttgacaattttaacacacgaaaatcaagacatacacaaatggagggaaatggataattttttttttcttcgtcattgagcggtatgctaaaccaagctgaaaataaatgaaatatacttctcggttacaagctaacacaaaacagaacaaacatgaccaagtaacatgactaacacatatctaaccacacaatgtttattactcacacaactaaagacaacaataaaagtaaactaattaaacaagcaaacataaccagcaataacaattaaactaagaaaaaaagaaaactttcttaagattcagactcttcaccaccagagtctctgcttcaaaatattggtacactttactgtaacaactgggacttattgcttcaaaaagaaatcctgctttacaccattgaactcactcccttttctatagtttatgtcttgtacctgcaacaaaattaccaccaccatttaaaaaatacattaataacaatagaaacata

SEQ ID NO: 246239 - DNA, 868 bp, Cannabis indica
gagtttggagggtatgttgcaattgggacatagatattggaagcagaaccaatatcaggggtatatatatggttaaggctagtggttgatgaaggattgataggaagtgtactggtacgacttaaggaaagtggtataagtggggtaacattggtggaaatagccatattagatgtggcatttgtgatagatgacacaggaatggtgagtggagttggagataattgcggagtactaccagtatgtgaaggtgaaatttggtgtcgaggtatggaagcagagttggtatttcctggtaaaactgggacagcagaagaagattctccttggaagaggattttgggttgtggttgagatatcgatcctaagtttgggatggtagaaaccaatgatttacgagcaagtcgagtcaaaagtggccaagcgttccccttagagaaatcggtgcggtatttgtcatagccagtagttggaagtttcgcacctttcatccaaggaccatactcaagatcatcatcattaccattgtccattctctccatgaaggctacacatttttcgaaagggtggccaagtcgcccacactcaaaacagaactccggtaatcgttcatatcgaaagtcaatccaaaagtcatctttaatccttggcaaactaatcatacgatcccgaagaagcggtttatcaatagaaagtcttacccgaattcttaagaaagggccccatccctcatcaagagattcttcatgcacatcaatagactcaccaataatgtttcccaaagcagtagcaagcgttttggatttgcttaagaagggcaaacgatagacttgaacccaaaaaggggtgcttgacagatttcttactg

SEQ ID NO: 246240 - DNA, 557 bp, Cannabis indica
acgcattagaaaattggaaacacatatgagttacaacatacctatgcttcggcaaacgcagggattgagtggagggtgtaggcgacttgaagttgaagcttcgtgtcccggtcagtgtggtctgtccgtctggggaattgggcgtgaggagtgataatagagagtgtcaaaggagaagggaagatctcggtttatttttaataataattaaataagtttttttaattattttctttgtcatatattttttaataaattaatcatacaattttattaaactaatctattaaaataatagccactaatttctttgaagactggatgagaattataattaaaaaaatgaactaaataatatttagttgtctaattcacaaatcatttaataaaaaaaataaaaataaaatcaaaataaaaagattataatatcaaagttaaccttaaaaacacttatatatagttagtaaatattgttgcaacaaattcattcgacctcgtagtttgagcacttaactattatgcaaaaatacgtaactacactactaataactccttca

SEQ ID NO: 246241 - DNA, 1292 bp, Cannabis indica
tcttatatactttgtgcaaggatcatttttcaacaatcatcatcgatcccaactgcatttctctctccttgatcgagagaatttttaaaaattataatatctaataatattaatacatctgtagagatttcaatatatcacaatgaatcaatatttgtttaaatccatataaattatatgacattgaacttcaggttcaataatatagttaagaacttatttcatttataaaaatgagtcatatgtgtccaattagaaatacatatacttataaattttgtaaatctatgatcatatgatgttatcacatcgataagaaactatgcaacaaaaatttaacaatggctcaatattgttaaagaaacataattcaaatatttttttcattataatttaatatatatttataaataaaatcatatatattcaaatgaattatattagcaaaataattatcaataaaaatataactttatcttataaacaagtataaaagagaaactaagggggcgtttggtataaagggttcaaaataatctgattaagggaaatattatgaaggagaatatgattattagtaaatttattactatgtttggttatccatggtaatatttaattagattactgttaattaaattatagtgttcgattaagcataagaatcttatatactattttagaatagtaaaataaaataaaataataattattattatatctcttttatgttaattataaataaaataaaattattatttgtaaaaaaaatatatatttattaattaataaatttaatttcattgtatttgtgattaactgaaatgaataatggttcacatatattttttatacaatatttttatatttatttatataaaattattatagcgtgaatacacataaatgaatgttatatgatttttttttataaacgtcatatttttcttttaaaataaataatcttaatattttattttatttaaatttattatttgactttttatttaataaaaattctcatcaaatgttcaaataactgatgtaatgtttgaattcaaccttttttgaagggattaacattatacattttgagggtagttggaatactacggtaaaagtattaaattacttaaaaaatctaaaacttcataacaaatagggtaatcattgagattacctttcctcccctcacattaatccattctaaacaacccctaagtgttatcaaagttttcattaataagacacgtggcatgatcaggggaagaatatgttggaaatattttacc

SEQ ID NO: 246242 - DNA, 678 bp, Cannabis indica
ggatatgaagagtgatgatttggtcagcttggttagtgatgaagaagatggaccagtgcttaaaaagaaacacattgagtttgatccacacttcaagcctgagaacatcaagtttgagttgggaatggaattccctactgttgagcacttgagggaagcattgaaggagcatttcatcagcattgacaggcagtacaagtatattcacaatgacaggttaagaattagaattgtatgccaaggagaaggctgcaaatggttaatgtatgctcgaaggatgagagatgattgcactacaatgcgaatcaacaaatttgaggaagaacacaactgtggaattttatgggagaacaggctggtagatgctaattggattgcaaaagagttcttggagaagttcagagcaaatccagccatgtcttttggtgatttcaagaaagcaaatcctgagggtaagtactccaaactttcctcctggactttttatcgagctaagaacaaagcaatggccaagatacatggaaccgttaaagatcaatatgctattctgcatgattattgtgctatattagtgaaactgaatcctggtagcacagctttcatcagaacaagcttagtggatgatgtaaggtatttcgagagggtttacatatgccttgcagcatgtaaagctggttt

SEQ ID NO: 246243 - DNA, 747 bp, Cannabis indica
atgttcacaacacaacaataaaaccagtaacagaattacatactaagacatctatttgatcacttatgaaaagattataaaagcactatattgatcttcgatgagtaatcttatcataatcttcaacaggtgtatcattgcttactaattctgccactacttttcctatagatggtgatggtgatgatgatgaagcaccatcaaatgacataccaatctctttcttgaaactcccaacaaaaatctgacacatgaaaacaatttcattatcattacttaaaccaaaaattacatgaacaaagaagttgataatgtcacctaataaatacctcaataggtgaatcagctactaatcggtatgcaactccacctaaaaccctgccactatataaattgaccaatacaactttcaataattttcttgtatcataattcagaggaatatgatttgaatcaagttctactgtccaagacagagatagaattttaaaacaaccctacaacaaatcaaaaatcaaagaattatattttgattaaaatcaagaaaaccaaattgtgattttcttttaataaaaaaacttacaaaatatcttctgtatgtattttcaccacatttaataatgtctgctattaatgctgtcccattagcagaaagaacagtcaataatgaatttgatgtagttgcatgatgaaaaggaaaatatttcattttcctcacaacatcctaaaaaataacaaaaaaaaaat

SEQ ID NO: 246244 - DNA, 523 bp, Cannabis indica
caggagaatctaaggtggttgttaaaattagatctcccctggttcacttgttttaccagaagaagaaaattacaattaaaacggctcgtggctttacccactcaccagactcaactacattaacaaattggtgtaaccgaatttctgttttgcaacataaattcttttacactccttacaacctaatctaatgctataaaaggagagattagacacttaccaatctctcaagtcgagagataccagaaagccgaagccccaggagtgagagaggagctctctcagttgttgttttcagttgtacatgcaaaagaaaagaaaaagagagttagtgagaatcgtaaaacacttaaaagaaagaaatgagagaaacatatgaaatactagtcgagtttgtgactaggatttctcacctgatgtaatattcttcaaagatagtgcagatctgagatcgatcttcaaggcgagctcaaaagcagacgtacccctaatttagggcaaacctctataactcttgtgtttg

SEQ ID NO: 246245 - DNA, 671 bp, Cannabis indica
gtattggtaattttttttttctttttcttgtacatcatcttatttttctttctttattctactctcagatctctctctcaaattcaatgttctttatttttttattggaataacagctcttactttaaattatttttgggtttcatcggatctctgcttcgtcgtataagaagagtgagaaggtgaaactcgttcctaatcgttcgactcagtctaagccctggtgtagtaggatcaactagatttggaagctgaagtttttggttagttactcaatcactcactcaaatttttgtatataatataactatatgtttatatacactgatgaacttaatataattggaaaaacaatgaaagattaattggaaaaagaagcaaaaattaatataatgggtcacaatatatgtatatgtagtggaatatatgtatgcctttcatcttcacactagtttcattcatatttccttgaccaatttttgcttaaaaattataactattttccttaggacccagaagggaagaagataagtactttatttaagttgtttatctctgttctcttagatgttttctatgatcaaatgaaggggctgtattatggtgctgctagtttttactctttttttttaaaaaaaaaataaataaatagtagctagaacatattctag

SEQ ID NO: 246246 - DNA, 930 bp, Cannabis indica
aaaaaagaaagtaaaaataaaagaaaacaatataaaaaaggtatagagtgtaatttcctctgaaaaattccctatatataaaccaaaaaattatagggcccatggccgtgcaaggccctatgtagtttcgcctaatccactctcttcattaattaagcaatgttattagacattatatgaaatataatgttttaagattatatttttatgttttaagatttttttatatatatttttacagttttctatagaaacaatatgaaaacaacaagagaactatataaaagtaataagaaaataacatccaaacaacaacaaaaaatataacatataaatatatataataaaaaattaacaacaaattaacaagagtacaacataaaaagactctactttctgtaaataaaataaaaaaaatcataaaaatatttaaaattccgtacaatcgtatttttttaattattatttatttattattattttatttgtgaaataatcccaaaataaattagactacggtcattaggtatattataggctcaattactagacttagcacttagcaatacacagtaggttaattttggcccaaacatacctgagatggatctagaatccaacattagaggcctaaataaaaaataaataataataacaataaggtgtttttataaaaatattaaattttaagtaaaaatttataattttactttcacacgaaattttttacaaaaatactatctttttataaaacaatttttcataccaaaagccccatagtatatactaggcaaataagaacttagagcatgtttaatttgctataatggatattgtaatagaatcataatacctataacaaagcaaatccttcaagtacaacatcgagattgaccatcacgagcacggagcatctagtcatgggaacgc

SEQ ID NO: 246247 - DNA, 4459 bp, Cannabis indica
aatattagactttaatatattttggtctttttgcctcttgacagttaatccctttaactgttttctgttagttagttatcccctagctcagttagtttcatccttaggtcggttagtgatgtatatatatcagtatcttgtacttcaattcattcattcacttgtaatcttcctctcaattcaataaaaattttctttgttctctgttttctgttacctaaatttaatactaaatcatttttgttacttcgccaaaaaaataaaaaaaaatacgtatgtctgatatataataagtatttaatttaatttagttattatattagagaaggtaatatctattttttgttgatatatcttgagatctcgtaacattctggattgattggtggaggactgtacgatcgacaactcagcttgaatatcaatgcatatatgagttttgaattgcattaatattgcaatatatttttggtgcagaactattaattccttcggttctaaggctatttcagtaatcacctgctaactcttatactatcattttattttatttggatcatgatgaatagtccaccacaaaacatatcaagccttcaaaagccaaatatatatccctcaaaattgaccgggtgagagttataaactcttgacccaaataaataaagtgatcaataacaactttcctactattacaccacacaacaacacacgtagaaatatcgcaatacatttaataattgtatttgatgtttatgttacgtacgaactagggataccaaattattgttgacaaagatcagaaaaaaacaacaataaataatacaaaagcatttaattgaagggacaatgctttggtagaatccaagaacagactgtacatatgtaactaaattaaattttgacaaagcattcaatctaaagttttgtcttttaattaaattttttattcttaaaaatcatatgtaattacgtgtcacaagctgaccggtcctttcagtctgccaactacgtgtacgtacagtagtgcattaactcaaatagagtacatatacaacttattttttatgattttttctttttatcaagtgctatatcttaatcttaatacatcacatataatctaattagtaatagggaagacaatataaattaaaagttcgaccttcatatatatacatcaactaattaatattattactacatttaatatcaagtgaatcatacaatgtgggacttgggagcttcgataatttaatttaatatacccttttgaacggagtaaaataatttcaaatttttcaaagaatatttttgtcttacttcattatcgttacattcctaatgtgttaaaatttagtgcttcaaaaccattagggagaaagaaatgaaaacaaagtaaagtaaagaaggatattgattgaagtaattgaattaaaatgtgatacaagagtaaagctttatatagagctgtaatacagttggagataaaatcccaaccgacaatagtaacttaactgaattacgtacttataacaaactaactaactctaataggttccttcaaggtggtgtgtaaaaattcttaacacccatcttgaatacaatgttgttaaattgagtggggaagagtgctttagttaggagatgagctaagttgttttgagatggtacatgaatcatttggagtgttccattggtgattttatcacggattgtatgacagtctatttcaacatattttgttctctcgtgatacactggattttcagcaataagtatgatacaacatataagatattgtattatgggtccgtttggcacaccatagtacgctattatattagtattatattgggttgtatatattatattataatatattgtattgtatattattatttgatgtaatattatatttgatactgatttgtagtattttttttttatgaatcagtaagattatcattactccaaataaccaattacacgtacatcgtatatatatattgaaagtacaacttgttgattttaatgatccaaattaccaattgattatctttaggttgattgatttcaagatatgaattttagacttgaatagataataaagcagtaaaacacacaacgatttacaagcttcatctgcacctagaacacatctcagccgactagtgcttgggttccccgaaccagggtaaattcatctactaattctcaagagtttcgtaatataatctccaattctctctaaaggaatctaatacaaactttacagcaattagtaatgaattaccaaaaacaatcaagaatcttgattgttagtacacaatcccttgtgcaccaactgagttcttcttcgacatttcttcaacctgaaatcccttcagatctgatgacgaagttgacactgaactcccttcagttagaactcagcaactccaggctctgatctttccgccattgatgaccatcttcaagctatacaatcagacctgtagatacaacaacaagaatagcaagataccactctaactcccacgactggcaactgaataaacaaactatacgattaaatggataaaactgtttaacagaaatgaaaaaccgactatatatacccacaaaacagtccacatggcactaactaacactaacaataaccgacttaacagaacgctagtgcaaatataacagacaaaaactccaaacacgactagacattgtacataactaaactgtcacaaaaataacgacacttacatatatatttctattacaaattctcaaactatattctattcttagcactaactcttttatgccatacacttttgactctatacaaaatatctatttttgttctagctactatatgactggtttgcacatttttttcactccacaaaatttcattccgagccaaccaaataatgtaggctaaggctactaatgcaacagtaaaaatcttggttttgaacctgtttgttttgtctctttgcagccacctcactagtctaagaagtgaaaatgacataaccctccactgaagccactctttaatttgttgcaagtagcctgttgcaacattgtagccaaaaaagagatgctccaagttctccttaccagacctacagagtaaacaattgtcttctgcaattatattgatttgtattattaggttgtacatataaaattatactatctttaccataaatgtagactcaaaccaggccccgaccccagccttgaaccccaacttggcctcaaccccagcctcggaccttgcacatgcccaccagtgggtccccaaagaagatagattgggcaaagcccaatctatctaggaccttccaggaacgtatctttgttgcatgatcatatcaccttccgccagtggcagctcgtatccgaaagcaggtctagtacggtgatgctggaagagtcagacatcgtgttcctagaagaccagaccaattttccttttcatttctgtgcatagataaggaaataactgcttcctaaatctcgacagatggtcgtatcaagctaaaagggaaaacttcattataaacagagatcaagcaattaattcatgattaatcgtccataattataggacacaattttaatcaattcagtcatatccaatcttcctattcagcatatcttctccttcgtggactggacttcccgagacagtccaagttatgtaattgagtgtaaactccctaatagacagaaaagaaaaaccaaatgtcattctctaaatactataaatacccaataaatcctacggattaaaaggtgaattctctgataaaacttgctcaaggaaaaatagagaacttaggctcattgtattctcgaaggtctttctagctcaatgttacataataacattgactcgtggactaagactagttaatgccccaaccacataaaaattgcttgtgtcgttctttctttttctcttcaattatttatttctttagttctaatttctttaattggttttccgaaaatttcagtaaacattttagtgctttcattgagagttgaaagaagcagtgataccatagagattgcgttcagtaatcatggtactcacccgtataaaatttggtcttcactttactagtcctagcaccaaggctaagaataccgaagaagatccacatgaggcgaccagttaccagaaagatcaacatgatgaagatcaaaatcgagacgatcccataatcaaagatgtggagtctggagagaataattctaatgatgctgaggatgatccctaggatacaaccgaagggccaaatctacctaaactcgaaattagaaagcccaatacctaaacgggcatgtttggtgcatagttaaaatcgaaatctgaacccaaaaaaatcaaaaccccaaaagcccgcctgctatgcaatcctatttactatatctaaaggtattt

SEQ ID NO: 246248 - DNA, 877 bp, Cannabis indica
gtaactctcagattgatagctcctcgtattactcctactctctcaatcatcaatacggagaggtctatctccccctcgcatacgcctttctaatcgactatctcctcaagatcctgaatgtcccgatctagagcttgcctcgtcctacataggccttctctttcaagaagggttaggtacacatcctccgctataatatgtgtacgcctcctccctttcagtttgagaaggacactaggggtgcctcagcatcaacccacttgtcctaggttgtatcccaagattgctctcgttattacgagggatctcttgttccctagttctgggctgccttgttctcgtccctacgagaagattctggcatgtcattgttttcattcccctaatttgtaaatccctcgggtcattgaggtacccctcaatgaggagcttaattgttgggttgtttgtgttcaggaacatcgctagttccccatgttgctcctcctaggtattctagggatattcctaattcatctcctacatcctggttctcgaaccctgaggtctaccttgtggccttctcactccagaattaggttggttttgtgtagcgtttccttaagtctcgctggctgcggctgcctctctttccaactcggagttttgttggttagactcggccaaacattgctagagtgggcaattttccatttcaaccaacggtacatacctagtgggatcataggcaccctcactcctaggtacataacaacagcatttgttttgtttcctaattcctagttttagggttttgatcatgaccaccttggcgtcatcttgtacaggttgttcctgaggtaggtctgttggaaatttttttaccaggatcttagat

SEQ ID NO: 246249 - DNA, 1119 bp, Cannabis indica
tccgctgcctgaaaaggtgagcccgtgacacatggcatgtgggtccagaggtattgtctttttaggaaacgtaaaccccatagaaggcatctttgggagggcataaggatggtacgggtggggatgcaaagcctcaactgtgggtcgtggcgcgaggagtggtcccttgttccagaaacaataatttcatgccttggtattttcctgccagtatcaagtacgcccacaactttagaggaaccaaattcctccatcatacacctaaacgtacatgcaagggtcagcatatagttaggcaggtcagcatggggctagaccccacgtctctctctctctggtaaaggccatgtacatcgtgccaacattcctaaaataagtaactgcatgcaacatgcacccttccaactcctcaaaaactctgggttaaataaacaatgacaaagaaaacttaccagttgacatgcaaaggtgagacgggtgttggttatgttacgttgtgtccagcaaagtgtgtgtctaggaatgatccagttagagaagtcttacaagataggagagggaataaagctaaatgccaaaactctaatgcgacaaacgggaaaaatgtgaagtttaagatggttgctgtgagtatttattgagcatcaagaaagtgtgccttccacgaggggcgaacaattcgaatcattcaccaaagggatgtttgacgtttggatgaatggggagttaggaagattccaagcatttaacgtccatcattgcatgcttcgtgaaaagtgttcagtaagtgaagagtctactcaatcggatcgccactattttggtaccatatcaaacacacatccagcatgcgcgcaaattacaaaagtcaatatttaaggttcaaacaataagcaaaaaaaaataataccttctgacagtaacacttcaattagcagctgctggcacaatgtaataagaagctcagatttgtcccatgtgcctggaatcaatcaagaggtaacattgcaagctcccgaatcgtggcacttcccagaagcttgggaagtaaatgttgtccagatttttttaagcttgacacgtggttctcaatcagggaaggctaagatataatcagtt

SEQ ID NO: 246250 - DNA, 837 bp, Cannabis indica
acacgacctgcatccagcaccaacagtggtcccaactgtacgaacccttcacccacgaggaagagccttgttaggggcccaatagtctatattcttttgtattttaccccaatcgtggtgatttttttacaaaaaaccctagacaggtcatgggtatgcccatactcgtactttaacctatataaacccctttataatttcttcacaaggggggatgatataaattacttagctaaagctttgctaaaatactctctaagctttcttcttcttcaagagaaacctaaacaaccagagtttgggtttttattataaacaccacctataatacattttcatgtcatcaaggctagtatattgacttgtggactagggataattaacgcctaaactacgtaaaatccttcatgtcatttacttaacagtcatttaatttttaaagctttcatttaattattttttaaaaatctcagtaaatattttggtgctttcattaaagttaaggaaagatctaagccatggtgttactacaaccacggtggctacacgcaaaatagtaataaagaagaatccttcggaaacctcgacgtagtcatggcagatgtaaacccctctttccagagcatgcccaattgagtaatgtgagagaaggggatgcatctgaaggtgacaacaaaggggaagatccaacttgatgtcacaaacaagtcaaagaagtagtccctaatgaagagaaaaaagaggagggcagtgaaggatacatcaaagatggctacaataaagactggtactttcacgagaaggaaccagatatagttcgagtatccaacgaactgc

SEQ ID NO: 246251 - DNA, 659 bp, Cannabis indica
ttgtgttcttcaatggcttacagttaacacggtatcagagcagttcccttcgctcacggctaacatggctactctaggcaacaacaactccattccagtggctaacaacaccagagctcaagctcctagaactcaagctgaaaacagagcacgcacgaataaaaaaccagttttcttcaaccatagcatttcagttcgtcttaatgatcataacttccttctttggaagcatcaggttctaacagcaatcagaggaaatagattgatcagatttatcaaagagccaccacctgaggagtacctaaacgatgatgatcgacagcagaacagagttaatcctatctatggcgattgggaggtttaaaataagttgctggtttcttggctcctatcatcgatgactgaaagccatcttacgcgtatggtcggctgtaattcagctcgacagatttgggaattcctagaaaaatacttcacgctgcaagtttcttccaagatccttgagtttcgaacaaagctacagaatttaaagaaaggaaatctgagtcttaatgactatctgttgaaggtcaaacaggctgtcgatcatcttgcatctgtaggagaagttataagcgatcgagatcatgtggctgcaatctttaaaggccttccgagtg

SEQ ID NO: 246252 - DNA, 986 bp, Cannabis indica
gttcaaaattttgagatgatttgattggtaaaacttcttaatgttccacttaggccgattgactgttactgctacttctaattatcagtgtgaatgtgcacggtctagaaattggaaagtattgagagcccttccatgatgatgtgctcgttttggttttgaatggttttctgaattggactttggttaaagatcatgggctgaagatttataactttctgaatggtttactaaattagaagaggaaacaaaagatctaaggataattttaaatgattatttggtgttcaatcacttgaagatttcttttctgttgggttttttacttggatggaatatggccaagtgaccatcttaatttggtgtgttcggcaatgtagttattaaatttaatgttttaatggttgaattagcaaaatgtaatatttaaaatttaaggtaataatgagcttaactaacacaaactaattatttttcaggacagctacttgggtatacaagacaaaatcctgtttagatgttatgtatgagacagatatagttttgccaccgaaaaatgaatattatggtgaagcaagaaatgttgatctctcctctcgttattcacaccagtttgctcctctggtaagcatacatgtatagttttacattatcccttttatgatatctgataattaattatgactatatttttattctatccttttttttaatattgaattaacagcttacagaatggatcagcactggggtgaataagaatttaacaaaatgttaataacggatggtgacaccgaggacttgttgtgctgctccataaactgtggatgatttgcaagtttacaatcatttgctgagtgaggtgtctttaatgattatgattgtatgtatctctggtgaaaagcttgtaatatatacactgagattgcataattgaaatagaggtctcaaatggtgtgtatctatattctatcacctattcttag

SEQ ID NO: 246253 - DNA, 1421 bp, Cannabis indica
ggaatatatatttaatcacacaatcttgattaattttcattgtgctgacgacacaataaataagaatattaatgtgataagggtttggatgaatttataattcaaataaacatataaatgataacacgaaccaaatgacacattaaataagtgatgaaaatacttctgtctctttattgataattaaataatagagattacattgaaatagagttttatttagggcataaagcccaacacaatacactgttaagctctcgaactcatagctgatcacaaacagacttaccctttcctacacaacagagcacccaatgagccaagcccagcaagacagtataaataacagtatacactacaatttaaagatcacttaattattgatgtcactgcatctattgtctatttgacatagatctacgtgttacgcttacatgtctatttatgtctatattgcatagacccacgtgttacgctcacacgtctatttatgttaatatggcatagacccatgtgttacgctcacacatctatttacaataaggctttagaacggtttatctcagttctacatactgagtctaacctagttatgccttaactgtataactctttatatcatcatatataatacattattgcattcataatcacatatattctagagtaatgactctagaccacataatcttgattttctgcataattattcaaataatatacatgagcgcaactgcgctaaactttatgtgctagtttactgtcttacctggtaatctaagtatatggagattccaaattctcgagtgtttctgagcaagcgtcggtaatcttagtcacacgttcccgagatttcacaaatagggttaatcccaaatttaatttcacataaacacataatttgcattctatttatagattaacatgtagagctcgaatagttatggaggttgtgaccttataaaattgttctttggtagtcatgagactagttccgatattttcttgttgaatctaaggtgatttagagttaaaaattgagtttaaaactttttatagcttaaatctgaacattagtgatgtttaccaattaagggctcaattttagtttctattatgtatgaatggttatatgtatggtatttgtgtgtcctgtgaagtttggagtggtttggacaagtttcagtagcgtttcggtgagtgcgtaaattgagaattgagagtttttaccccttgcccaaccgattaactggttgtgaaccggtcaaccggtttaccatttctgggcagtcttgggaaattagggaatcatagttttatcctaatttctcactcgggtgtccgttttggatgtctatataacgtttcaaagcttgagacaagctttacaatatggtttatattttagagtcaaaatataa

SEQ ID NO: 246254 - DNA, 754 bp, Cannabis indica
aaactcacattgctatgacttgagtcacttcaccttgtggacccatatacaacaaacaacttctgcaatagaaatttgagagatgcagcaaatttttcaatttttttccctgagaccaccttctagaagctatcatcatataatataaccaacagtataaaaatcaaaactaaactaatagtgagtatgaataaacttagtggatagcaacttttttgaatactcataggagttaacttgttaaaaagtggggctatgagaattgggtagagtgtcatcatcacaattgacagaatgaacataaaggcccaaagatatatggccaagtatggacctcctttctgcaattacaacataaatttttaccatttcaagaaaggaggttactcaagcatagtgcaaaatagaatacattattagttattacaccattatatatttaaagaatttttccacacaaagaaaaagaaaataacacagccaatttgttttgaatacaaaaaccagagcacttatctagtcataacgagacaaaatcagagcaggaaaccaaaccttattaaaaccatgacggccctcaatcacaaaagtagaataaagggaaaatgacaaatcagtgatctacagacattccaaagagcaaaatgtcggtaattcataaactcagaagtagatcctaatgcattataagacttcaactttgtacaataaaagtacccacacaattatgggtttggttacttttacactacat

SEQ ID NO: 246255 - DNA, 1157 bp, Cannabis indica
gcatcaatagtacctagcatattttattgctggctgttttttgtatacgcgtggtaaataattgtttaaatgttatatttgtcactataaattatttaaatttttttaaaaatttataagttatcttaaatagttacgaaattataaaaaaaaaaattaaaacttaaaaagatttcttagatgctgaaataaatgaggaatttaccagaaccattcttttaaagggatttactagataaatttctcttattatatatattatactagttgaatatactttgtacttttgttgggtgtgtgttgatatttatagcttcatacgagtacaagtaacatgttgtagttaggagtggcaaattgtgtcttcgagtagtatttgtgctgtgtcgagactcatgtataataagtatatacttaatttaaacacaacctgtttaatagtcgtattgcaaaataaacttgaattgactataagtatgtttggtttaaacatgtcaattaataatatatttatgatatatttaatacgtttgtgatttttaaagtagtaaaataaatagatcattaacgagttagttttgtattagttgtgtcaaaccgaatataatccgtttattaaataggttacacgagtcaacacgaacacaattcaaacttatttaaatccgtaattgggttattgtgtctagtctgttttgtcttgtcagagttaattatagagctatgctatactatccaaaatgagattctagaacgcaaaataaaacaactttttgataatccacccaacactctatgtattatagttagaggacaaatatattcagagtttcttttttttttgagtttcaaatatattcagagttagatattattgtgcctgtgacttttcaactagtcaaaaatgttatattcaatgtattcataactgaccttactatgtaataaatatctaaaattagttttacatacgaaaagtctaaattcgtaaaagtttttacggcatttctattagtctatgtgtactaatgacaccattacgaggaggtaaaacattactatgacttaatgatttttttttcatataataattattatgtcagaatataaaaatttaattacaccataatattattatgattttttttttcatataa

SEQ ID NO: 246256 - DNA, 636 bp, Cannabis indica
tgtgtgtgtgtgtatgtgtatagatcagatcttatcagatctgatcttggattggtgtttgtgtggtgatttctgggttttctagggtttggcttcgagtttctcagagagaaactctctgctagggtttcgaggagaaacctaaggaagagggaaagtgactgagaaggttctcgagttttggggttttgttcaaacacaaaacgcagtcgttttctctaggaaccatagaaataagaaattggaacttaggtcttcattttcctacatggctaaaatcacaaaaagatatctttagaatagacatgtctaatactggaatttcagatgtcattccttcttggttatggaatttttcttcagctgattttgacatgtcaagaaaccaaatttatggggaaattcctaattttctaaatgatggttattatatgttgaacttgagttacaacaagttgacaggaccattacctcatatcccagtttggaacatgctagatctttcaaataattacttgtctggtaacatttctaatttcctttgtgatccaaagagttctaaaacaaatgttatggcattatatctcgaaaataatcttctatcaggaaagattcattaaatttgataaacttgga

SEQ ID NO: 246257 - DNA, 779 bp, Cannabis indica
tggcatttacatcatatggacatcaacaatgcttttttacatggggatctcaatgaagatatctatatgacattgccccaaggatacacccccaaaggcaccattccatcaaatgctgtatgcaaattaaagaaaagcctctatggcttgaaacaatcatcccgtcaatggtatgcaaagttaagcaccacactcatagctcatggattcaaacaatcaaaaaatgataacactctgtttattaaacacaaagcagggttcttcatggccttgctcgtttatgtcgacgatatcatagtggcaacaaataacactacagaactatctgattttgtcaccactctcgacaagcaattcaaacttaaagacttaggcaaactgcggttctttcttgggcttgaaattgcccattccacaaaaggaatctctgtttctcaacgcccattcaccattcaactattaacagatactggcacccttggcactaaaccagtttccactcccatggaaacaaaccttaaactcaacaatgagacaggtaaacaactacaaaatcctacacaataccgtagtctcattggcaagctaatatatctcacaattacaagaccagatatctcttttgcagtcaataaattaagccaatttcttcaaacacctcgagaacctcaccttcatgctaccaccagaattctccaatatctcaaaggcactcccggccaaggcttgttcttccatgcctctgcaccaacaccacttcaacttcacgcctttgcaga

SEQ ID NO: 246258 - DNA, 705 bp, Cannabis indica
attttcaatttattgatggctcaaattttataatttgatgaaagatgagtaaacagatgagaaagaaaacaaacgaggatacacttgatatgaatataggttattatttatatattatttggtttctagaagcagagatgaaatgtttgacaaaatatctcaaagaatgacaccaatgagtgacttgaaaattgtcgaacatgcttttttatttgtaatatattttattgtagttgctgttataatattcttgatgtttcttttgtgattctaacagagaggtgatatatacatgtctatttattatacatttaggagtttcaagcttttaagcaacaaatgtgcattctattctaaaatgtacaccttcaatgataaaatattaagtttgaatatatcttaaatattaagtttgtaattacattatcataatttcttcaattatattaaattattaaaactaacatattgcaatcagtatttattttagattgcaacaccatcatttaaattatttgaatatacataaaaattactacacccaataataaaataagtttttcttgaataaatcactttattaaaaaaattcaattaaactataataataaattaaattatatgattatttattgaatcattctcatttatattataaaacacctatcactaaaattaccgtatacgtgccttgcacgtagtttt

SEQ ID NO: 246259 - DNA, 1914 bp, Cannabis indica
gattagtcatactgttgttttattacatgttaccctgatagaggtagaaaagtctgaaatgatttatagtttgtgcgaaccatttgataaatgtgtgccgattgatttgaacagaatagcaaacttgcatgatgtttcttggtaggatgtagtataggtccatgctatcagaatagttacttgatttgaacttagctagtcctagaaaatatctttcccatcctttgtggttaccatccaaggaaatttgggattctgttatggcaagttgctgttcttttttagttttggaatttgcagaaagtaagcttttactctattagcattagaggaaagcataagatagtttttctttttggcttcaatgagcactgggcaagccacttttcttgtttagtcacggatattgtagagaagtaaattttgattctgtaagagcgtaagagtttttgcctcccatgaaaagtgggcatttttttttctataccttgctcttgtttgtgtttatggtactgcaattctttttatagtttataactgtcgtaaagttcaaattttgggttaattcctaatctcttttcgaaatatatgttttatcatttcaatgtttaaacagtttcctttagtgccatcatagtgtatttgatttaatagtgagcttcttgttttggttttgttgaatgcagatccctgaactagaatttgagattcctccagaggctcaacgaggaagtttgtccacggtaccatattcaaatatgtgctcggtttattttcttttagatcttattctgtcctttttaatggtctttgaagtggcttttccccgctaagtgagtatcacccaataacattttggcttcccccattatgaatacaacccatgtatagtctcctgtgaatgattttacttaagattttatagtttggactggttattataccagtgctcacatttggcagccacttcactcgaaaggaactcatgtgtaccagtgttccctatccaagtgttttgttttttggaggactatacaaatgcatgatatgttgtttatatgcgaaaggaaattgttttgatataattataaccattccaaatggttactcatattaatgtatttgatgggaggtgaaagcacacgtactaacttttcactttttgcttgtgttttttatactcatttttccagtatgtatatttctaatgtgtattgatcatcttttgattgtacaattacacctatactttttcaggtggaagggatattgctacgagcagcagatgaattggaggctctacaagaagaacgcaaggtattttataagtactttcatttcctaccttttgttgtaccccataattgatggctaattaggattctttttcgaactttaacatgtgccaaatcatgctctctaaactattgagaattgagatagttagatttaagaatttttatctggatcaataaaaatgtgaaaagttcaggtggcatgatttggtatatgtcaaagttctggggacaataatcctaattagcttaaattgattttcagcatcttatgtggtgttgtatgaaatttgcagaaagtgaatcctcaaactgccgaaagctatagatcaattcttggtaaagttaagagcctgtgcaactggagcgtcacccttcacttttattctagatgatcctgctggcaacagcttcatagagaacccgtaagtatggaaataacataacataacagagacatgattttatattatgattcgtgaacatcatatggaagaacataagccgtattggatggatgattggttgaactaatgttgctgatacttgtgaaattgaactcttccattgggtagtagcatcatccttctaagaccttagtagataatatgcagatttg

SEQ ID NO: 246260 - DNA, 1207 bp, Cannabis indica
attaaaaacctcataacaagttctgaatagcccccggtttttttcttatatgaactctcccaattcaacattcgaggatacgtattggcaatcctcttgcagtaattaggagacaggcttggtagtatctcgaacaaccaaattaggaaagcaaatggaaacccttggaatttaaaagaataaaacttatccttctcttccttggccttctcaatcttgtaatatatattgtcaccgtccttgaatgccaaattcatgtagtggaaagtcctatcccacagcagtttaccaaatgcgatattccttagctcagacaaatcgccatcgacaaaaccaaataactcattgtcgactctcttaccgttctcatacccatataaatagtgactcaacaaataaacaatcgccatcttcacagcgtcaacgtcatcatcaaattctcccgccaaaaaccttcctctaacttgttcttgaatgactttaatagtcatatcaggaaacatcttcttcttgaacgacatcttgtgtttaaaatcgttcaagtcaaatgacccttccggacttaaccccgttatcaagacaaactcctctaaaccgaaacggacaactttgtcccggattaagaaccacttctctacatcctccctctcttgatgaacccctctcactaaagcaaggtgaggcagggaaatgtgccactaacattgcccatcttcaaaaattgtgaaaaaggcatcgttaaaaataacgccttttgagaaggagtaagatttcctttgatctcctcaataacccatatgttattccaaagctggagcttacttgcgaaccggtgctccggtttcatcttcaagtaaacatcttgtaaaaaaaccagttataaaataagatttagccagtaacaacaacaacaagcacatgataaataaaataactggttccataaacaaaaattaaatcacattaaaaataaaaaacagaacatgtatgtaaaatgaaaaacttaaagcacttaccacatccgaaaaactagtggattttttaacggactcttcaactatcgaaggactagggcccttcgaagcaacagatttaatgccaaacgtgttgtacgacgtaccggcggattgggaagatcagaatcagccactgcggcctgaaaaaaaatggaaacaaaaaaagattacataagaaaaacaacattcac

SEQ ID NO: 246261 - DNA, 1292 bp, Cannabis indica
aaagaacttcttcagtcaggccttaggaagtcaattggtgagggtactaccatcaacatttacaatgatgcttggattcctggttatggcaaactgcactatttaagatatcattcaaatgccaatatgacagtggctgatcttatcacacctaacaaacaatggaaccatgccattatccaatccctctttcctacagacattacacaagctataatggctattccccttccttcaatttccactccagacacacacttttggtccctcacccctcatggttcatacacggtcaattcaggttaccaccttgcccatagacagcttcattaaaatgaacctaccccctcggataacaagtcctcaaatgaatggtggaaaaatctttggaccctccctttgcctcctaaagttaaacacttcctttggcgtgtctgttatgatatactccctactagccgaaacctattcaacagaaagactctatactctccccattgcagccgatgtcactatcacgatgagaccctagaacacgctctcttcagatgccctgctgcccagaaggtatggaaattaactgattttaatgcttttatttctacacactcttcacttaactgtatggatttattatatcttgctgccactgaatttattactggacattatcatttctttgtttgtttgctgtggaagctctggaactgcaggaatacttggctacatgagggtctatccctctccccagatcagattattcgtgaagcctccacctactttgagcaatacaagatctgcaccaagaagattccaacaccttctccagcccatgatgatcatttcatacccaatgatagccgcacatcttctccaacattccatcatcggcttttcgtggacgctgcccaagattcccaactcctcaaaatgggctttggcatgaccatccattccaatataggtgaagttctcctaaatttggccaagcctagaagtggaatcattgcacctttacttatggaagcacaagcacttcattcagctttaccttggtgccatgaacactcattttatccggatagtattgtttcagattgtaatgtgttagtcaatcatatttgtaaaaatgatactcataatctgcatcttaacccatttgtcattgagattaagagcttgctctcttatttccctaatgtttctcttagctacatcccaagatatatatatataaaaatttatatgtatcatatttttttttggacgtggtgaaacaaagtcacacatga

SEQ ID NO: 246262 - DNA, 606 bp, Cannabis indica
attataggagcagctggtaaagtaaagtgcaactcagataagacatagcagagccatttaacctctgctgcagtattggctagagctcaaaactcgctctctgtgatgcttctggctactacattttgtttttttttgctgaccatgagattaaattgcctcctaggaacactgcatagccaccagtggaccttcgatcatctggtgaactcgcccaatcagcatccgaataggcatggagagaaagatgaagagatggcctgaaatggagtccctcatgtacagtgcctttaagatatcgaaataatcgtttgcatgcttcccagtggacatttgtgggagcatgaataaactgacttagtttattcacgatgaatgtgatgtcaggcctagttaaggttaaatattgtaacgcaccaactgtactgcgaaacagagtatgatcatcaaaaggctccccattgttaaggtgagaacatgagcagagctggttgggttcgatgcaggctttgccccttccatattgagcttagtcaagagatcagtgatatattttgactgggataggtacatgcctatggagtttcgaagaacttcaatgcctaa

SEQ ID NO: 246263 - DNA, 505 bp, Cannabis indica
tttaattggggttttaaggcatcaagggctgacacatctttgtttctttatggctcgggcacaactcagattatactacttgtctatgttgatgatattctcatcacagggcctaatgctactcttattcagcaacttattactcatctaaatgcaatcttttctcttaaggacatgggggctgtccattacttcctaggggtggaaattcttcgtgattcaactggaatgtatctatctcaaagcaaatacatcactgatttgcttgttaaggttcatttagatggtgcaaaggtttgctcgagtcctactagtagtgcacacaagttggctttaaccgagggccttccttttgaggacaaaactctataccgtagtactcttggtgcattacagtatttgacacttacacggcccgatgttgcttttataataaacaaactatctcaattcattcatgctcctacggttgttcactgggaagcttgtaaaaggctgctgagat

SEQ ID NO: 246264 - DNA, 928 bp, Cannabis indica
ttgtgtttgtgattgtttatgctttgggtgatatcatagcaacacaaccattatgatggttcggcagtacaggcatcgtactggttaagagtgatattcaccccagagagtattaattgacgctatcatagaaacataatcattgtgttggttcggcagtatgggcatagtcctagttaagagtgaaatcatggccaattgtaatcttgggtgctattgatgctatcatagcagtatgaacatagtgccggtcccgcattgcgatcatagtgctggtagtggatgatatcatggtaaatagcaccaacctttaagagcgttcttaatcatttggttagtcttgtgaataggtgtatgggcgcctatacacaagtcaattatgtatggtttgttacatgtttatcttactaagtctatcgactcatcagtttgctaccttatgtaggtaaggataaagcctggctggaggagcagtgagttggggctcggcaaggattgtacgtatcgcgacaatgcatcttggaaggtttcggtctaaccatattttgaatcatattttattaccgtcttgtagattgtaaaaaaaaaattatgtaactatattatgatatatgtattcttcaacagtggtttaacacttgggatcccgactataaagttttataaatataataaattttatttagatttcaaattagtaaaatttcatgtacgagcgttacaactatataggcattaatagacgtgtgagcataacacgtgggtctatgctgtatagacattaattatagtgacaacattacatatgaaataatgtgatacaaagtgcagtggcacaatatatgcgcactggcatgcggtataaagtgtaattattattataattatcatgctgtattattattttgtcttgctgggcttggctgac

SEQ ID NO: 246265 - DNA, 597 bp, Cannabis indica
taaaaaatgctaaaaaataatataaaagatagataaataaaaaattatatttttaaataatgtaaaagttgttgacactcttaaaaaatatcactattaaagatgcgagagcggaacagacttaattttcttgcttaaaaaaaatggctctagttttaaagatatttaaagatatagtaagagggaggaccggtcctaaggtattaggcgacatcaaattttggggccactatatatatagtttaactattatgaaaataatagttctagtgcttaatgtaatggtaaaatttaaaaactttaccattaaatattttttaaaaaattaaaaagtagatgttgggaattgatcccaagatctcttacactatgtttggtaggagggagagatgggtcaatggagagggttgcagtgagagtgatggaaggagagactaaatcacttgtttgacaagatggatagaaggaggaagatgagagatagagggagacattctccctccaaatctttaaaatttaatctctccaaatttgaaggattgtagaaaagataaaatatattttgcaaaattcaataaccacctttaaaaaactaat

SEQ ID NO: 246266 - DNA, 1027 bp, Cannabis indica
agttttttgattttttttcgtcattttctgtttagatcattgcaggtcttcttttccagttgatttcgccagaattaatggttgtatttttctcgttttagtcattttggttgttttgtagttttgaaacgatcgaggtatgtttatcttcaacgttcgctctgtacagctgaaagcttagtgcatgtggtatttttgtaaatatttgtatgtggactgtataaatgtttaatgggccggcccatagtatttttgtaaatttttttccttttttgtatttttctgtttttttccctaaaaattaagaatatgtttttcacagttaataaaatgtatgataaaatgtaaataattttttttttgcacatataatataattaagtactataatatatatatataaaattataaattccacatttaagaatgctttatttgtaagaataaataaaaaaaaataagaatgctctattttctttactccattaatatatatatatatatatattttaaaaaaagcgttcatatataaatcaaaataaagatagacctaacggtcattacatagaaggttttcagaaattgagggaataggaatacatccaaacctctagtgggtacgcccacttagccacattatgagcaacaaaattacaatttctacttatataagagaaaatacaacaaataaaagagggagaggacctattacaaaatgagacatagctctcaagctcccacctggactcagtcctgttaagagcattgataactatcctcgaatcactgtccactataataaacttaaaggcataattcatcgctacttccatcgcatagcaacacgccgccgctgctccgcataaagcatccgcaaaagccactctagcagtataaacccaattcaccttgtccagatgatcccttgcaattactgcgatacacatggagtccatccctattttacgtcatagggtgccagacaaccgtcaagcagggaggcaagcaagggaacacaaaagcatgg

SEQ ID NO: 246267 - DNA, 1111 bp, Cannabis indica
aaatcactttaacaagactaaagcaaatttataccatttgattgtttgtagtcttgatgtagatgagctttctagcttgattttcatgttttgatccaaagttgacttttcccgagagttgactttgactttgactttgactttgggttgacttttgactttggacttttgaagacctcttttgaatagggtcttgagttgttaatcccttgatgaatcttttgctcttatgaagtatgaagtagtttatatacttgttgaatctacttctttgattatgtttgactttaccgagcaaatatagatactctgtgaacttgcttgcaaaatgataaagaaaagattagtaacaaataataatcaaatatttgtttatcatcaaaataaatgagtgaatgacttttggtcaacacagcaaacacgaattttctgctccaatttaacaccaactcaacccaaaactcaagcaaactttcaaattatcaaatagagttgctaacacttactagatgctcaaataaacataactcatgcatcaaattttaatattaaaccccgaaaaccagattgcataatcagcctaacacatgcttaaattcacaaactttaagctctcaaacttgagcttcaactcaacaattttctccaagttatccagcaacaaaaacactatttaacatgaattttccaactagagaatccccaaaactctcagccacaacacacaattaaatcaacaacaaaattcatgttattcacacccaaaccactaaaatcaaacatcaaactcaacaacatgcataatcaagaacaccacaccctttttatgcttttctcacaattaaattcagccataaacaaagtttaaaccaaagaaaattacctcaaatcccaattcaaaagcaagctcaagatttaacaacaaataagctccaaagcaagccaagatcaagcttttctttccaaaaatcaagtttgaagatcaagagggtttgagtgagagagaggggtcgggtgagagagattcgcaaaccagaaaattctttttgttttttctcaaaattccattttgtcaaacatagtaattgaaggtcaaatgaccaaaatgccc

SEQ ID NO: 246268 - DNA, 1070 bp, Cannabis indica
gaaagacaaagtcctctctgaactcttgaaggtcattcaaaagatgggtccttgaaaaaaaaatacgtagaataaaagtaactcgaacgccagaaaagaggaatctaacatattacacagaaactgaagacgaaaattcccagaaaattcaaacatccaacccagaaaaagcagatgaacagtaaagcatgcaatgaacacaaacaataaagtacgagatgcgaagaacttacataaagcttgagaacttggcgttgtcgttgatcgacggtaaaaagttgactgacaatggcgaaggaaggtcagtaagaaatctgtggtgtttgagggttttctggttcgagggtttcttactctctggaaaacttgaagaaatttggtgaaagtctgaaaataaccaaatgaagtgagaatggtggcttttataggccaaagtgcatgtggaacaggcgcgatcatctaccaatcgtgcggttgggaaggcacacgattccaattcccaggatccaacggctgaattggtttgtcatcgaggcggtggaaacgcttgagtgtccgtctgacacccattaatgcgccgtatcaattaatggacaagaaatgaatcgacgcctgcaaaaagtgaatcgctgtagtaatggtgatcattaaatacaccttcacgcgcccaaagcacgtgccaggaaaccgaggagccaaccggaggcatctgagcaagccttgttcatttcacaattaaataaggcttgggggtaaatgttgcccctgattttgcccaatgtacgtggaccaaccagacaaggacacgtggacacaaaggttttagcacttaaattaatagctaagtctttgtaaagaaaggcattatcttggatatgcctcccggagaaggcatgcaaggttctatatgctcccggagaccaagatggcatcaaagcatctccgggaggtgtcaggcttcctctgagcagtcatctcgcatttaatgccgcatgggaggaggcgtgttggaactaccacacgcaataaagtctgacgacacaacccccgatctgcacctacaagactat

SEQ ID NO: 246269 - DNA, 579 bp, Cannabis indica
taaaatataaccgcatgtgaagcgcagtttgtttgctagttaaagaataattaacctatgttgattttgtggatttattttgagttttttacggttaatacctccaaactactaaactgcttgcaaatttaaggtgtgatctattttttacacttaattgccaatatagactgcttatgtgtacactttgtacatgtgtcaaatttatattggtacacctaatatattattattttaaaagtatataaattatttcaaaatttataatatttttaatttatgattttatttaattttaaataaattttgaaaataatttttaaataatactattaggtgtaccaatataaacgtgtacaaaagtgtacacatcaacagtctataataacaattaactaaatgacatcttaatttgctactagttcagtaatttaaaaaattttagagctgaaatttaagtttagagaattatatgcaattaaaaattagaaaggttttattgcaaaaacaaaaaaaaaaaggggaaaaaacagaaaaatacaaaaagaaaaaaaaattacaaaaatactttgggccggc

SEQ ID NO: 246270 - DNA, 1543 bp, Cannabis indica
tttagaatttgagagtgaggctcaagagtatgatctcgtgagtatcaattccagggtccatttacaagtgatttcacccccttatatagatattcatataggatttaaaattccttaaacataggtataccttcccgtaactatagttgggttaggttcaagatacaaaatcataataataaaatcattatttaaaaaataaatatatcttcacttatcattttttgactatattttcagaacagctctataagcacgtgtctctcgtatttagcgaacccggatagtcatgggtacatgagggagctaattgggtccgttcgtgcccatcaggtccttgagataatttgacacctgaggagctctttgcaccttagcacctgacggagttgggagcttagtgcgcccaaattgctcctccttggccacagtgctcctctttggtcaatgagctcctctttggcccatgagctcctctttggcaaatgagctcctccttggcaaatgagctcctccttggcccatgagttcctctttggcaaatgagcttctctttggcaaataagctcatctttggccaatgtgctccaccttgctggacctccatatatagaataaaaattcatgcacaattattttgaattttttgaaagataacatttggccccaagtttatcataactttataatgttatgatggacttgtagaaaaaaaaatccacgcattcttggactccatacccgcatataccggtactgctgagtgtagacatgtagaagaccaccaatatttttaagcatctttggacgcaaacaatagaagtgaaataataaaaaaaaaaattaattaacccttacaacctttaaataggtcctctcttttctttacaacccattctactctttactctttatcaaaaataatagttcttctaaaaatcctctcaagtagttctatttaccatttcaaaggaatgctcactgtggaagctaaagattattggaggggatttaaacttgggcatcactattgagtaagtctctcccatccattcactatttaattctatttcccatgttaaagttcatataaagtatgaatatcatagtgttctttagactttttcataaaaccctctttttacatatttacttttttctaatgttgtgaaatttggcttgtaatttttggaatctatgaatgaaacttagcaatgtatgcaatggcttatcttgatccactctttattttagaaatgagtgagatttatatatttggtgtgatttaggtaaatcttttgagaaaaaatgaagaacatgatgatgatagtgatgaacatttgaaatcccatatttgatccaaaagaaatttgaaatggaagaaaagatgtatttgtagctatttagcttttcaagagtaaagacaaaaaggcggagtaggttaaagtatgtaggaattgataagtatatatgccataaacatatataccatctccacgcctccttttgtatatgtatatgtattattattattttttttaaa

SEQ ID NO: 246271 - DNA, 721 bp, Cannabis indica
gcaaccaaaaagggtggaagaattcgatcctaccctctcaaatgctcctcctgctgctccaatcttgctctctgctgttgcaactgcttcacacccaagagattcatcgcttcctcagcgtgaatcttagacagtgaagcccaagccgaaacgaattcccaaacaagtggcttggaaatttgtgcgaccccacagaccttgcacttcatcgtcttcatcatcgaaggggtctcctcctcgtgctactgcaacgcctcctgcatcatggaagggtgttactgcatcaacacctataggtccctcctctcgcacccgtgcctagcaagcttcactcaagaaagaacttcgcactaaacgaagccatgacaaacctaatcctactgccaagaagctgaacctgaatcccccctcggcttcttcaagttctgaagaagaagaacctatggaggtctcctctgataactccgagaaaaaatccgcctttatcccttctaaaaaagaacttctagaagattttggagtctcctctgacagtgaggaaactgatctcgatcccgagccaccattgaccaaatctgctcccgcacctcctcgtgcatcttctgcagccaaagcttctgttgttgccaaagccaagcgcctatgagttcttctcttggtaatatttctccatctcaagctgtcaattccagattttcctatcatgataatcagcgtgatt

SEQ ID NO: 246272 - DNA, 765 bp, Cannabis indica
agcgttcgggggcccgaggtgcatgcctagcccgcctacccttagggccagccctgcattcattcaaaatataaaaaagtaacttaatttgacacttaatgtaaaaatctcattatttaatctagaattaatttattaaggtgccgtgtggtaagacttttgttttttaattttttaatcacaaaatgaaagtaaaattttttaaatgcgttctgtaaccacttttgattttcaattttaaaaacagaaaataaaagtgtgttctgtaaagtttattttcattttcattttttgattttatttacgtagagtctaggtccggaatagaattcaggttaaggttagaggacgggttcagtgctagggccgtgggaggatttgggtccgagtctgatcgaaatccaaaatattgattgagaaaaaaaaaactgtttaaaaaaatattaaaagtgattttcttttgtttttaaaattttgattctcaattaaaaaactaaaaagtataaacaattttatagaacatgtttttgaaaaatattttcactttttttaattttaaaaacaaaaaactcattaaaaagtgttaccaaactgcacctaaatgtatatagatatctttgatcattatttttgtgacttcatggaaaaatatataagcgaattagatacatatacgtcaacatttgtttaagagagacaatattgtattcaatacatcttatcatcctaattgatatatttaagggataaaagtcaaaaattaac

SEQ ID NO: 246273 - DNA, 1041 bp, Cannabis indica
caaaataagtagtgaaaaaaaaaataaataaatacagaaaacccagaaatataactaacattaccaagtatgtctatttacagaataaaagaagtcaaaaatctaacctttgaagaaattggtttgtgcagcaaaaactagaggaagggaatgaggtttgtgggttgtgagcttcttcttaaaatggagattgaaaagtggagttgggtttttcaaactggaaaacgaatctgaataaaggaagggagagcgtgatagggttttggaagatttggaaagacatgatgaagaagaaggaggtgttgttattaagcataggctgtgtaatgatgatacagctgaggcagccatgaaaattgtttcaccttaattgattttgcagattaaagaaaatatgtgaaaaaattatgattgtaatgagtaaaaccctaaaattatttatagggaaaatgaagttaattgggtgatttttggaaggattttcttcaggttggtttggtgttttgttgaagctgaaaaagaaactgaattttttatattttgaaaaaaactgtaaataaactctcttaattcaaaaattaaaataaataaaaattaaaaaaaattaaggacatttcttggcctcacaatgagagtgagaaaagggcccacataagactgtttcatcagcaagccaaagtgagaaagaaaattgggtctctttctatttcaagtttggaacagtttttctttatcaaaaaagtttggtacagctcttttgtttttttgaaaagtggaataaatgccattaaaaacaggcaaaaccccattcatatatacctaaaacatttggagtcctaaactgcatatgaagatgcaagaggcaacatcaatctcaaacaaaacgtttttcgggagagcattactattggataccaataatatctaatatcacttagagatggtgcattacgattcgattattctttaaaaaattattatattaaattatatgcgattcgaaacttaattgtattaatagcgatatgacactacctggtg

SEQ ID NO: 246274 - DNA, 1017 bp, Cannabis indica
aaattaattatcaaaccattttacattgaatatcaacattaaatcaagaaaaacttaaatagaataaatgaagaatagtttcgactcaatttactaaatacaacaacgtacgtgaccttaatggtgcaagttttctgttcatattcttgcataagctcgcgggcctaggatgcctgaaagactaacaagtctttgtgttaagatatctacgttctatccaagccgtgtatacggtatcttgtaaaattcgttaacctaggatgtgcgagtccttatcgggtcatcgagcacattaggtcatccggaccagctcgctaaataaagaattgatctttaccaattcccaggagaaacctttatggacatcgcatatatcttggtatatgcgagtgttaaacccaactttcttggtccttcatcatgcgaggcgtaataatgcgactatactctgttagggtcacatcatctcgctgagtccggttcaggcgaggtttatacttgagtgatctccttttgacagctcaacaatcctcgaggagagtgagtccacgtgtcattcttatgggagcctgacctcgagtttcgaggtaaaaattttacactataacaaatacatataaaatatttctaaataactaaaaagaaattaaagatttatatattatttatgttaatatttttatttttagtaatatataataaataattaaacatattttagtacaaataaatttattagaattttttaataaaataattttagcgtttaaagtttgaactatgtttattgtttaatgtatggaaatttttatttatattttcaattttttttttcagaaaaggaataaatactccaaaaattaatgccaaaagaagttcaaaagataaaaggttaattgtggcataattcctaataactttacttgtacttaacttttaaaacttaaattttagcggtaaaactctcaaaactaggaaacttttagcaatttatagtttccatccattttaggtgtt

SEQ ID NO: 246275 - DNA, 1256 bp, Cannabis indica
aaaatttcacggcaaactcgaagtgaaaaacttctctttttgctatgaacttgcttaatggagaagttggaaaaaatgagtttgtgaacaatgctcagtcatatttataggcagagaaacaaaaaggggtaatcatttcaaatacctcagacacctcggttccccccaaaaaagcaaatattgaaaatcaaatataatcaagtgtaattgtcaaacgcggtgagagaaaatcagatttcgaagcattaattgcgtcagagcatatattagccaaaaactgaagagacgcctagtcaacctcacattaaattgcgaacagatgcacctgacacgtgtcgcccattcaaattcaaagacagctcggatgaagtctacacacaactttggaagtcctctacagacttggggggcaaatgttatcccaatttttgcactctaacgtggcataacacgatggtgacacgtggaatcaactctatgtacctgcttgcaagaaatatgctgaacaggacaccatatacacttgctcggacaaagtcctctaaaccgggcagtgaaaaatccgtgcaacacgccaacatttagcaaattcagctttcgcatcgtgagtcatcaaagaaatccctataactttcacatcagattacagagatatggcaagttgtccaaattcaacgattagtgtattctctatttactatgcaatctttcaacttatatcgattgtaaacataagggaaatactaccctcccaagcttatagccctataaatagtgattcatactcactaggcaaaagggccgaaacatttgtctaagagttcatatccaaagatatcattgtaagagctttaagaaaaggaaccattctccttgttcttaagttaatacaaataatgaggattagcctattaccgaactgctcggggctgagcctctataaaatttttatgtctttattcgctttattatatttcctttgtattaactacttgtcgcttacaaattagactcattgtcattttctaaaagtaaggtcagcaccaacaaatggtatcagagccatgctaatgatttgctttcataaaatatggatttaaaacgatgtttgtgttgatttggatgtgttaatggttatttgtgggcatatttgatgattgtatggaaatttcaatttacgttgtttaatatttttaatttctctttgaaaatatttttcctggaaagtagacaaaaaatttataaattaaggcttt

SEQ ID NO: 246276 - DNA, 584 bp, Cannabis indica
tgatgacatacgagaagtgtacacaaaagacattatagtcacttgcaagttatgcgagcttcgaatcgaccataaccaaaaatgctacgattgcagccaaggatgtttctatacacttcacaaaatatgcgctgagtttccacaataccttgaccatgtgttgcaccctgaacatggtcatttgatgcttaagaagagatccatagacgacactagtaagtgttattattgtgagaattccttccaaagccaacaaacttttgcttacatatgcactcaatgctctctccacattcataccacatgcgctttaattcctatacccaccttgatacgtgacaacgataatgataccaaagctcaatatctctgccatcaacatccaatgtcattggtcgagcatgatcagtcaaaggatcaagctcgatgttttgtgtgtcaatcaatttggtcgggtttagcctattcttgctcctctccgggttgtaagaattttctattagaatattttatttatggaaattattttctaattaaggaaatgattttctatttaaggaaataaataaataattgattttctg

SEQ ID NO: 246277 - DNA, 1121 bp, Cannabis indica
ggttttgcataatgagctttgttacttctgttctgtcccctctctctctcttaatggcactcacatcagcttctcgaatatctaatctatatatatatatatatatatatgtactaatctctctctctctctctcagaccagattagttatgaacttatgagatctgagggcagtagtagatgatgatatacttttttgaatatttacctttcttgctgaatgaattacctcaaagtagattaactgaaaataactttggtgatcagatggggattcaccattaagaaagctgttgataaataaaaagagataataggaagggttattgtctttaataaaaatctttgggtgaagcagttaattacgaatgagatacaaccttatcgatcaacaagttgattaaaggataaggttagtgcaaggaggttgtatgtagggtaggttgtattcagggtaggttatgtactcaactcctataaaaggaaggttgaggacacataaagaggacatcagaagaaaagaagagtttctctctaaaaatctcagttttcatcattgctccctattctcttcccttacacaaccagcccgtctcatcaattctcttcttacacacaaccatcccgtctcatcaattctcttcctacacacaaccatcccatcacctttgccaagaaccaggctgcttatctagcaagctcctataaaaatcaggctgcctatttagcaagctcttataaaaatcaggttgcttatttagcaagttcttataaaaatcaggttgcttatttaggaagctcctataaaaatcaggctgcctatttagcaagttcatataaaaacaaggttgcttatttcatgacctttataaaaatcaaaccgttcacactaccttccaaaacatcagctcaccaaggtcaccacgtatgcccgagattgatcatattttttaaaaatatagacatcatttgctattgatccttgtaatatttcacattaataaaaaatgcacaactgactgtttgctaccgtagacgtaggcaaatacaatttgctgaactacgtaaatttgtcttatttttatttaaagcagtatacatatatatatatgatatatgtt

SEQ ID NO: 246278 - DNA, 555 bp, Cannabis indica
gaatatgattgtaaagtttaaacacgggatcccggttaatatatatatatatatgtttataaagttgaaaagtataaataaaatcttaatttcgcacgatttttaagaaaaccctttgattaacaaaggtgggcacaattatttaaaaattactctagcgcgcctaagtatcagggcattacaatactcttttattctcttttcacactgcttcacacgcccaaaatagagactgagagcttgagaatctttcttcatcaatctttctagtgttctttaggtgttcaccaattttttaggtaatttcttcccaaaatttttgattttttttcgaaatgttttttttcttctcctttgtgaagcttattttaataattttggatctagttggaaatctttaactccattggcaagcccttgaaaaatcaaaaatataattttcatgtgagccgattgagctgaaccttttccatcctgaaaggtccagtttatcttaacttagagcattcaactaggttttagttttcatagaataggttgaagagaagctttgaa

SEQ ID NO: 246279 - DNA, 965 bp, Cannabis indica
caattcagttttccatttcatggaagaaaaatattctacaacgttcttcatcaatttgcttctatgtttattgtagttggaacatgcaatccactgcgctaagtgacaacgtttttcatttgaattaaactgttgaaaggaatttggtcaatacgatatgtaataaaatataattaaattacactattaataaaatgtatgaactacctcgaaagatcttttatcaagtctacacctatgtatcataaacaatgcaacaaacactccacaatcaaaggaatttggttgtcttggaacgttttgagcacaatggatgcaaaaacttcagggaaactctatcaacggacaatatctgattctcaaggacttcaaagtagagagggaactcatcttctctggcaaccacttcaatttaggacaattagtaaactccaaatcacttaccttgggagcaataagtccaccatttgggaaaaatacaaaactatcacaattatggatagataaagatgttagttcctccagagatttcccatctgacactgagatagcttcaaagtagtcgctggattcaatcttaagagttttgagattgggaaataaatccatatgaagggatctaaacgatgatccacaataccacaatttaagagattgaagaggagggtaatggtaacgtggagtgagagtggaacaaggattccttggcattattgcctcatacaatgactccgaattctccaacttccaaatttccatttctgtgacacatggtaatcttggaagacttaataatggatactgcttgtaacctgtaatttcgatacttatcaatgaaggaaggaagcgagggaaaactccctcgaacttaggacaatcaataatcttaagtgtttcgagcttcccatatgttgttgcctctacattttgcattgaatgccattgctcccatgatgacatcttcc

SEQ ID NO: 246280 - DNA, 1479 bp, Cannabis indica
gccggccaccatgtgctcttttttctctaattttatcaattttttattcctaatgtaatatcccaaaaaataaaatgatatttaattagacatattttattaaatatataattattttggtaatgaagtaagattatgattttacttggatcaattagtgaaatctattaaatgattatataaagcgtaatttattaataacggagtttatattgagatatgtgggtattgtggataccatttttgaaataaaatattttcgcgcccgacgactatggaaacttgacgatgtggtcagaaatgacacgacattaatggatggattattttgagggtattccggactagtttagaattttagaatgtcggtttcatggattagtaaaactaccataatgcccctacattattttaaagtttaactttactttgaggggtagattagacctttataattttatttttgttccttttgactttgtgggctgacctttatttaaaaaaaaaagaaaagaagaagaaatctttatatcattacttaagagtcaagtaaacatcaaaaactacaacttcctctctttctctctcgctctctcgtgcaagcttgaaccagcccacccttgagaattttcttcagcaaagttcctcttttcaagcagaattctaactcctaagtaacctagaagtgttttgaggtaagctccatacttttggattgaaaattctaggttttgagttggttttaaggtagggttttgcttttatgtggttgtaggatctaagctaagactggggtgtgtttaggataggtttttgagtatgttagggtttgttttgagaggtttctatggctgtttggtttgatttgtgctagttgaagctaaaagttgagtttcattcatttgaacatatgattttgattcaatgattgaattgttgtgttttgaagcttgggatatgttgtattagggttattctactgttctgtgaagtttgggaacaattgattaggtttggagcaagttttgggactttaaagatctgaaattttcgagtttctactgtagtaaactggaattccggatggtaaaaggctgcaccaaccgaaattctggatggtcaattttcaagaatcgatgattttcgtattttagccataacttttcacttgggtgtccgttttagacattctatataccgtttcgaagcttatgaagagctctgaagtatgagacatagattagagccaaaagatgtactttattctagggtgttttcaccataagatttggtagaaaaccctaagttatttatgctggttttagacagtgttttggaatagacccttattgatttacctttgtcatgatataggacccgagattgtcgagcatcattccacttaggtcggcccacatacttgactttggacttgaggtaagaaaagtattaagcaccgtatatggtaatgttatgatt

SEQ ID NO: 246281 - DNA, 1971 bp, Cannabis indica
catcaaccaaatctaatctcctccaacaattgagtcttgctctatattgacatcaaccaatatacacatttacaaacttaacgttcaaggactaacgttctcactaaggttggcgtttgattagaatgaataaaaacataggaataaaaatagaaataagaatagattttagaaatgaaatggaataaaatttaaaatgcataaaaaaaaaatttataaaaaatcattacatttttatcatgttacattagaatgatattttttttctatttcaaaatggaatagttattctaccaaaatgataaaaagtgcattccattagaatgatattccaatactttaaaatacaaccaaataaagaaataaaataaaaattatttcgtttctattttattccattttattacttctaatcaaatatcacataaatgtataacaatcaataacaataagtattgttgccaatttttttactcaagcattagtgccacaacactaaataattattaataccaaaaatacacttctaattaaattgtttcacataattagttaactcgtttttattgcttttttaatcaccatttgacagacataacataaattgtttaataccaacattttttattttattaccaaatcctaaagactaggacagaaccactccttacaaacatgtggacgagtggaaacgttgaaattccattgtatggtgtacttggaaatttcatgaataagcaagtcattcaatttcccaaatttcaaataacattattattaccatggccagaattaattattatataacataagatccaatttccaagccactgaactctcagccataactaaattgtaccaaattcctcagtcaaacctttattccaatattcactaattgttttttatttttttgcttaaaacactaaaactcatgtacagttaaatccgttctctctatctatttttagagcaagtgtgtgtgtatacatacatatatatagaccttttagttcatgttcaacatattgtaaaacacatacacaaattattccgtagaaaagttatattaaccaacaacaatgaggatattagaaactcttttagttctttctttcaatatttgtttggtagctactttagttcatggatcaaatgaaagaaaggtatttcaatattcactatacatataaatatataatcaatttgcaactacattttactttatagaatttaattatgtatattcatggctgcatctcttcaatttatttttctttcttggtaatgttaattaattatggttttgggctttgatgaactacagccctacattgtatacatgggagaattagcaagttcctcccaaactacatcaatggttatacaaagtcacaataacttgcttgagtcagcaattggagagtaagtaacaaaacatatgtatacgaacataacattgttattaagtatcttaaagtgtttatatcataaaaattaaaaaaaaaaataacagtttcacaagcaattatatgacgtttgattggaagtaatgaaatagaatgaaattgaaaagaaacaattttcatttcgttttttagtttggttacattttaaaatattagaataatattctaatggaatgtcctttctaccattttgatagaataactatattctattttcaaatggaaagaaaaatcgttctaaattctgatgtaataggaagagaaaaaaaattaatgatttttttatcaatattttttatgtatttatattttcgttcatttcaattaaaaccaccttaatgtgttggacaccttaaatattttttaatatgtgttcaaaattgttaataattttatctaattctttcatctaattgtactattgttctttgttcagtgcgacattagccagaaaatcaaaaattcatagctatggaaagagttttaatggttttgcagcaaa

SEQ ID NO: 246282 - DNA, 1210 bp, Cannabis indica
agtaaaaagaagttttgtatgtataatatatattgattggatggtgtgtttggagttggagaggttattaattgtttgaagaaaaatgaaatgggaattggtttgaagtgtaaggagaagttatgaggatgttatatagaagctattagagtaagatgaagagatagagaagtatatagggttttttcaaagtgggtggctgaagagaaagagaaagtgtttggtgagtgcgttggtttggtatgcatgagaaatttgaccaaaggaaggcagtgagaaagagtttggttttggttgctattattattattattttatcttttgagtggaagtggactatacaaacaagtttttgggtccctccctttattaaatatttattcaattaaaaagactaattgatattaatagactaattaatatatagttacaggaattaatacaccacactactaccttttctttgtctcattgtaattattaattgtttaattggtttgctattattttatctgcatgcatgagaaaaatcattttctttcttgtttggtcaagtcaatgggtgtggtttttattctagtactagtaattgaactcacaaatgagcccataattttaactaaactttacaaatggatgagagtttattcattttcataaatttattttaatgcagtattctttcatccatatttgatgttactatcttaatatgtaaaatacattattttgctacttaagatttaaataattttgaaatatataaatatatgaatatgtatatatatgaaaataattagttttaatagatataaaaatattaatattgaatatataacaattttaataataatatgtattaaaataattaaaacaaaaattttacaccaattaatcatgaacaaacaatacataccgagacaatacaatatatatactgaaaactcaaaataatcaagacaaaaataataacagctctgatacatactaactattagaaattatatacaaataaaaaaagcacgtgaacgatttatgaaatgtagaataaatccaacatatatgcatataactaaaggatcgaaataccttcagttattgattttttgggctttaatcccatattaactttggatctacaaaagaaaatgaataaatgattagtgtgggtaatcggatttctaagctctctttactttttttttttttt

SEQ ID NO: 246283 - DNA, 777 bp, Cannabis indica
gtaaggacaatttaataagtggaagttcttggaggattttcataaggatgaatttagaattagatcatgtcatgaacatcaaatccatagatctatttcctatctttctaacgcattttgaatcgtctaattctgacatatatcgagaaagttatggctaaaatactaagaccagtaaagtgtgcgagtggggtgtgctagttgtggtgcttttgtgcgagtcgtggagcatttgtgcaagtcatggagcatttgtgcaagtcgtggaatatttttgcgagccgtggagcatttgtgtgagtcgtggtgcgagatgtccgtgcgagccgtggtattaggcgtccacatgagtcgtggtgcatgtgagacgtccgcatgagtcgtggtgcaaaatgtccctacgagcggtggtgcgtgtgagcgatggtgcgagacgtccgtgggagttgtggtgcatgcgagacgtgggagtgatgagtgtgtgagaatttggctaagtgttggagagaaagccattaggagaggaatccaaagacgaggcatgtaagcggaagaatacgaaatagagtacagtcacaccttcaacgtgacttggagacgaggggttacaagtagtggagaaacttcctctgtagccccttatgtcccgacagcaagtatcgtgcaaccactactcatgtaatttgggaccacctgacacccaacaatagtacaaggtgtcctgcacctgcaactcacagccatataagttcagcttgtcccttgagaacaacaagt

SEQ ID NO: 246284 - DNA, 599 bp, Cannabis indica
ttacaaacattgaatacttatgctactaaaaataaacatttaatttatgccacttacaaaaataaaactttaagtacttatgcaactatttaccctttgatagatatacaaaactacaaattttataattttgtggatctgtttttccgttatatttgaaaaatattgttttgatgtttgccactacagaaaagtaacctgattgttttgaggcagccttgtttttataattataaagagtattttattaccgttttttcaaaataatattattttgagtctttgacattacttttaccgacaatgtgaaagtaatattttttttttttttattctaaaagaaaaaatgaaagccagttaaaccaaatcttataaaatataaataaaaaaaattagtaaaaatattaaaaaaaaaaactgtaaaattgtaaaacagaattcaatttgaagtgtattgcgtaaattttctaatagaaatactattgtaaaagttaccgattggaccctgtattttatttaaatgataaaatagaccctgtattttccaaaatagtaaaaataagaccctgagcttaatttttgacaacttttttttttaa

SEQ ID NO: 246285 - DNA, 1807 bp, Cannabis indica
tatgtttgaataattccattaaggaagaatcaattctgatgatctgaaatctgtgaggagtccctggctgagtcttgcaaggttaagtatgaaaagtggatacaagttacttctgaaaatagatcaatgtcaaaaataaataaataattgtctcatcaaattgaatctcttgaattgaaaattaaagaatagactgatttttgtttaaaagatgagaaaattattctattaaagaaggaacttaaaaatttcaagaaaaatatacaaatgttaaaccctagatcttctatttttgaggaagttcagaatgcaggtcaaagaggcttggttagtcttggatcaaatggtactgaaagttctagaaaaataaaatttataaaatctagtgttccaataaatttacctgctgcacaaagacgtcgtctgcagaagcaaagtctctagtaacttcaaaaaaaaaaaaaaagatcacatgtaaggagatttattccaatttgtcatttttgtggtattaagtggcatattaggcctaaatgtttcaccatgcaaaatatgttcaaaacaaattattttggtaatttaaaaaaatttcaaaagaaatatagtgcttcgaaacaaaagcggattgaaaaaggaaaatgtcttgtttgattttttgataaaagtgttgcttctcaaatttgatatttttacaatgcttattctagacatatgacaagtgacaagaattttttggtgaatatcagaccaatgcaatgtggtgaggtcacatttggcaatggtttagcaggttatgtcattgatttgggaactctagaaggattaccaaggttaaaaaattttatgcttgttaagggactaaaaggtaatttacttagcattagttggatttgtgatcaatggtatactatcaatttcgacaatgatcattattttattcgtaacagtgataaagaatacattttacaacgttttagacgtgtcgataattattatactctcacttgtcatactgcattgataatatcagtgctatatatatttccaaaaatcatattcaacattctcatacaaaacacattgatataagtcattgtattagggaacttgttgacaacaaaacattgttgttcgaatatgttgatactgtaaagtaattggctaacattttcactaaagccctagataattcaagtcggtttggctccctcagaaattctttggggttcgtacactactacaatttggacttttaataacattatttagtgactcgcacttttgtgcgtgtcactaaagaattaagattaatttttagtgacacgcacaattagactctaattaaactatcagtattagtctcttataatgtgtgtcaatagaaataggaggtatcactaaagaataatacccataattttttaattttttgtatagtgacacgccaaacgcatgtgggtaaacgtgtcccgacatgctaagcgtgtcactatagcatttacttttttcaaatttaattaatatttttttgaaaaaaaaatattaatctatagtgacacgccaaacacgtgtgggtaaacgtgtcctgacatgctaagcgtgtcactatatattattttacttttttcaactttaattaatctttttcaaaaaaaactttaattatatataaatataatcagatattttatttattaaataaataaatatcatatttatataaaaaaacctattcatatatatcttatttttctaactctttctcttccttataaataaaaaccctaaattttctaaacatgtaacc

SEQ ID NO: 246286 - DNA, 638 bp, Cannabis indica
gtacacatacctaattattatatcttattattgtgttatatgttatatacaaatagatcttgggtttattattaatttttctaacaggtttcaaatatttcacagtattctctctcaaagtgcgtaaaaagaagcctccctgaatattagattggcttcactatttatagggaatattgaatacataagttacccaaaaaataggagataaatgaggaaagatttatatgtgattctctcattccgttacattaaatcaaaactcatgaaaatagggatattaattggctattattgtggactcagttaaggcaagtatctctgaagatatttaaaaaattcttcaggttggccattcacgcttcgtggctcacatcgcttaggtcttaagctcgttcagaggtttcattattaacaagcatgatcgatacaaactggtgtcatactccacttaggggcgatttccttaccacgtgtaaaaatatttcaaattccgtaaaattgtatttttgtattttttttattgtttttgtgtatttgtgaaataattcttaaaaaaatgccataaaaaagtcaatccttaatattttctttgaggaaattacattgcatatgtactttactttatttgttttaat

SEQ ID NO: 246287 - DNA, 1710 bp, Cannabis indica
tcagggtcgggttggggttagggtatgaggcccaaatttgggaccgaatcgaggtcgtgtctaggtctaggtcgaggcctagattgaagtcttgattttggtttgggaacagggccgaccctatgcttaggcgggctaagcccgtacttagggcccactcaaattgagggcccaaaatatatacatatataatatacaatctgtatttagaaaaaaaaaagagcaagttatgataaaacctctaatacttttactttgcttgcacttaaccctcaaaactcaaattttagcgacaaaacccctaatattcgtgtcctgatagcaatttaatatttctatctgttttaggtattaagtgtcatgttggattgtccacatgtacatctacatggacatagtgtacacatggcacaagtttttttagtcaacgtaaaaaattatttaaaaaataaatttaaaattaaaaaaagtgtaaataaaaaaaaatatttttttacctttcaagttttttatttcatttaaaagaattaaaataaaaatttgatttttttttcttttcctttctttccttagattttttttcttttcttttctcggttcatcttctctcccaatttcctcatctatctatttttttttcctattctttcttctttctttttttccagattttttttatcttcttcttcatttatcatcacacaaccacccactaccaccaccgccataaccacctgcactttacttttcatatccaaaccactgctaacacagaaaaaaaccaaaccaaatttaaaactcatttgacctctattccaccacaaaatcccagatctgatcttctctctacccaccgcctctctccttctccaccacgaaaaccctttgaactatgctcctccccgtgaatatcatctctgcatttctccactcatgatctctcaaaaaaaaatacaattgtgccttcttcggccacaagacggtgcaacaaaggccaccatcgaactcgggacctctcaaaacccccaaccctaaatttcgtccccatttccctgctttaagtttctcatcagagtctctctctttcagtcacgatttttcccctctcacttttttagaaatagattttaggtttgagatttagatatgagaattttatatatatgtgtgtgtgtttgttttgttagatctaactttagtttcatttttatttaatttctttactgtgattttggaggtggtggtgtcgtggtcatggtggttgtggggctggaggtggtgacatttattttggatctaaaataaaagtggtggtggtgggtggttgtgctttctgctagcggttgtggtgaatggttatggtgagtggtgggtgtgatgatacttttgaagaaaataaagaagaagaagattggaattttttttaatgttatcatttatttttattttaaattaatttactataaattttcttttattttttaatatttttttacgtgtaccaataaaattgtatcatgtgtactttgtgtccacatggacaatacattatgtacacatggtagttcaacatgacatttaacacctaaatgtggatgaaaataataaatggaaaattgaaatttttatgcatgcatttggtgcatattaaaatttttgaacacaagcttactaaaatttaaaaaaatgggcacactttatattaatacc

SEQ ID NO: 246288 - DNA, 648 bp, Cannabis indica
agcagataaagaatgttttatgagggccctttgcctaaaaatgttttatacagtcaaacattggcgaatagttctgcgtattaagaatggaacatgccatggtcatcttttctttcctaaacaggcctaaggcaatgaatggctctaatcaggaccagctgcatgtagaccccgctgacaaaaattatgatcggtcttgttttacttctttgtcaaagtttcatgtactacttgtaattactatgagaaattgaatctttttttaacatttttcactgtttgtttgttgaaacatatcaaaaagcttacaatgctgctcatctctgtcttccagataatgcaagctttgcaaagttcaggctcgattggcttacgggaagattcaaagagggtccggcatatgcaaatggccagtacaccaagtgaaactcaccatacttatatggttggtaatgctggacaagaaactatagttggtggtcatttctccgaagaggatacttcatctgacgacttcacaccagcaagagagatcaatcgtcgaacatttgggagtatcgatattagctttgatgaagatgagatttctgcaagaagaggggttcgccttcagccaccattgaaagtttcaaatgtggcagaccctgg

SEQ ID NO: 246289 - DNA, 2196 bp, Cannabis indica
aaaaatataaatattttagaaaaaattgtgtcttatgtaattatttcttaataaaatatgattctgtgaagcccatgttagacttcataagatttttgataagtaattagcaactttatccatgaaatatgattactatcatattctatctcttgaacttttactactgccatactttttttttatttaagagttgcagtttggcagtaataaaaattgagagcaaaatatgatagtaatcataatttcgagaagcaaattttttaattttaggaaaaattatcaaccaccaaacaccaagagcaacaagcactctatcaaaaaggaattggggaaaatgctctccgtacgattgggaatttcaattttgatttaagagggaattggtatttccgtacaggaatttcagtgtaacttttgtcgttatatgcgaaattccttctgatccttggtgtgatctagggtttctcttgacatccttcagtatctctgggttttcgctctgggttttgctgcaaaaaggaaaggttttttctcgggttctttgctctctcgctgctctctttgctgtttaaggggtgttttctggttattactggttatctgctttctgtctgtgtttcttttgttttctggggagatctttctagtgatggagaacaaatctgaggagacacaggtggaacagggtggagctctgtgggttggaggatttcaagatctctttagaagcagatcatgagcttggggtggaggccatcgagaaatcagttgttgctaagctgtacactaacaagactgtctttatgggtctactacgctcgattctgggaaggaaatggaaactggccaaggggtggaagcttcaagaagtggagccaaaaacctttatcataaggttaacaaagaaacaggaggcgctgcaaatctccaaaaatggtccgtggcctatgtgtgatggttttctggtggttaaacccatgcctgaggacggtatatggtcagctgcggacttaaattcatccccggtctgggtgcgggcatatgaaatacctcctagatattggacgattaaaaatgcaaccgcgctcgcgcagaagattgggacggtaaactctatagaccgactatggaggaacggttttccaactaatgaatacattagattccaggtgactatacaactgaataaaccgattatggtaggtgtttttctcccaatggaagagggggtgtgcttatggagttatttcaagtatgagaatttgccatgtgtttgttacaaatgcggggttgttggtcatgaggaatctagatgcagacgtaacagaagaatgattgctgatgattttaatagaacggtccccatgtatggtccttggattagactgggagcccggaaaaaagattgttttcggactatgaattgtatgaacaggaaaggctagcacgggagttgagagatgttcgccttcaagtcgaggctagagacaatcttattcaggggaaggaaactttgagccagcgcagattggcactgacttgcacatggaagcagtgatagaggcggctagaaggcaaaaagaagccgaaccggagactggaaatagttcgaaagttccggtggagggtactgtggcggaaggcagtatgccgtcttcggaaattcgaacgttggaggaagggcataaaggtccagggtttggtacgaacgtgcatgggaaagattccactgcaggaggggaggtggtggtgcgcaatcatacggatgaaattggtggtcccagcactacccacacgtcaaatggaaaaggaaaagaaatagctgaggtggaaaagcatcacgtggatcatttagctatggttttcaaagcctctttgggctctaatccaaagccggcccatagaccctccaaacctcttagatccaggaaggatttgggctcaaatgcaaagagtgttacaaggaaggaaataaggcctttacaaattggaaaaaaaaggagatttgattcttgtgaagaagatttctctagtttgggctccttcttacctggggaggaatcatctaataaaaaaatttgcccagaagacagtcttaagtctttgaagtctcaagagcctcactcagggagtcaaggagttccagacgatggagagggtattgggacggcagatcatcctgcagaaaattgc

SEQ ID NO: 246290 - DNA, 1075 bp, Cannabis indica
gaaggtgtgtgtcactacttatctcccaatcttcgaaactagaattagagaggctgtcattggatgaggacaaactagtatggaggtgaggatgatcctcgtgcaagagttgaagcagatcctagtcgatacaatgttcgcctccccaaaactcaccagggttcatctacaaaaggcaggacacaagatgagaattcggtcgggataacgaatgaaaacagattgattataccgaccaggtccggttggaaaatcaaaaatagaaattttgcataataatgaggtttatgatgcataagttcagaattttgagtttaggttgattttcactaagcccttaatgggtaagggaaagtgggtatcatggaatcaagattaaaacgcagttatgatcaggctacgtgattaagcatagtcaagatttcgaatttctaaacctaaattttttatggttctcctagaacaaattcaagaataatcaagttttgcaacaaaaactcagaaaattaaacaatcaaacatgtaaaaaaaaggagatgaagaacttactcactgattcaaagcttttggtctactcggacgacgctggccggtgttctctgaagattctttgaaagaattgataggaaaaaagatttttgctctgattcttcaagagtaaaaatggctaaaagtggttaattaggatttttaaccctatttataagtaaatcaaaggagagtgatcatttcaaattttaaatgcctcaagttccccctaaaagtatatgttatgtactcaattacctgaagaataaccgtcatcacgctctaatttttaggtctggatccaggtagatctatcagtcagcattgatgagccgaaattgaagagatccttggtcagagtcacatcgggtcatcaattgacaccacggccacgtgccacccgttcggacaagaattaagaccgagtgaagtccatgtgcaacaaccaagaaggtcccgcgcagactttggggggcaaatgttatcccatttttcgcacaatgacgtggcagaatacttaaatgacacgtatcctgcatttcctgta

SEQ ID NO: 246291 - DNA, 1094 bp, Cannabis indica
aaaccgcatttttttttgcggtgtggtgtggtgcagacagtttaagtggtttgatgaatatagtattagtatttgatgcatcactagttaacaccttaggacccgtttggtacacaggattagactagattagacaagctaatttgtccagtccagtgtttgggcgtgttgaaagtctggataactaatctagctaatctcatctatcttggattatttattccatccagaagagtgggataaataatcctatgcaggtgaaggtttttttaatttttattttattaatatattttaaatttaataagaatttaaatgaaagaattatcacacatttatgtatagatttttttatcaaaaacttattcattaaaatcagtgaaagtgtataattttaaattattatacataagctttcaaaatttaaaatattattaattaaacaatagttaattaaattgattataagagaaataatacgacaataaaattatatattaattttaaattataaaaaatttataaaagaattaatatttatattaaattagtgtttaacgtaaacaattttacattatttaagtatttttattttactctgttaaatattttttattattatttattatatttttattgtaatttattattatatatattttttattttagtttaagtttttttctaaaagaaaataaataaaaatagtctagtctattcttaaactaaacacaagattacttttagcataatccaatcttgtccagtctaatccaattctttttagtccaatctaattcaatcctgcataggtatggccttttataattgacactttaagatgctttttagtatttatttatccaccgcggctttcaaagcacaaagcaagatcccaattcagcccccgacagttacatatacatataattcagagtaaattgaaaagaaaaaaaaaactgatagcgaattcaaaggtaaaagattaaaacttcaagcccaaagctcagtgatacttttctttatgcaacggatggcaacgaaaaaatagagcgatcgcgtcttcaaggtttagaagagtcatgccgttgaga

SEQ ID NO: 246292 - DNA, 595 bp, Cannabis indica
ctaaactttttttgtcgttaaaaatttctcccgaactattgagattgttgaatttaaaaacttttgtccaattttaataaggaaagtctaacatggtggaagttcagtgggcatgtttgacatatgtcaaagtacgaggggtatgatttggtagatattaaagtctcaggagtatgatgcagtacaaaaacaatcactaaattagtaaaattgaatgaaattggacaaaaatccttaatttcgacaatctcaatagtttcagtgagaatttttaacggtcagaaaaattcatgagacataatttaatacatgtgaaagtttaggcggtaaaaatcttaattagccttaaaaaaaaatgtactatatctacatttagtattatatattagaagaatattcaactctagtggtgagggagacaaaaaagaaaatgagagtgggcatgtgttcgatttcaagatcgctaggatattagtaaattgtaggcactatgctgcaccaaaaaaaaaataaacatgcatataaaaattaaatatataaatatatatatttggggtgtgaagctataatatagattaatagactttttatctgt

SEQ ID NO: 246293 - DNA, 668 bp, Cannabis indica
tgactcttgtgcattggcaggtgaaaattttatatgaacgagtaccaagaatttgttaatattgatctatatcctattgatcctgaaattgagcgcacattcagagagagaagaaggctcaacatagggctcaaggggaaatagaaatgatggatgaccaaggaaatggacgacgagctcaaggggaaatggcccctaataatggtcaaaatgcagtgattatggcggatgatagagatcaaatcatccgacaatacgcagcacctcttttcaatgagctcaatccgggcattgtgaggccagaaattcaagctccacagtttgagttgaagccagttatgttccagatgcttcaaactgtgggacagtttagtggcatacccaccgaagatcctcaccttcaccttcgtctatttatggaggtgagtgattctttcaaattgcccggagttacggaggatgccttgaggttaaagttgttcccctattctttgagagatcaagcccgagcttggttgaactccttgccttctgcgtcggttacaacttggcaagaattagcggagcggtttttgatgaagtattttcctcccactaagaatgccaagctccggaaggaaataacttcctttcaacaatttgaagatgagtctttgtatgaggcatgg

SEQ ID NO: 246294 - DNA, 1032 bp, Cannabis indica
attaaatatagaatggttagaacaatataaaaatgatgtggttcataaaaaaaataaaatgatcgtatatgaaattcatttattatatttcaagttttcgttcctatttttctaaccaatgttaaagtaatgaagataaattatcattataattcaatatattagtcaaataaattatagattgaaggatattagaaaaataaaaaaagaagttcaaaacattgacactttattttatactagtttgaaatacaaaatggaaataaaaaacaatagttataaacgagctcaaatgatattttttttctttaatgcttgtaggacatatttattatagcaaaatagtatccttcaatgattgtttttgcgaagattctctttctgttttttctcctcgtcaacaagcttaataagtgttacaatccagtagtgctcctccttctcgattgcatagagaagcttttgaatggtgacatgttgttgcttttgaatgtcgattgcttctttcatatttagctttgggatgcatcgcgattcaaaaagttggttaagcttatgccttctaattcgtatgtcacttatgcgttgattaatttcttgcctctttttggagaacttttctgttatagatatttcttaattgatatgagatgtgccgtcccgtactaaatcaattaccttattcaagaaggtatggccattaccatcagccgtaactattttttttttggccatttgcgttttcctcttgtgagttgtcttcccattttctcttaccttttcggtcctgtttgattggattcccttggttgatttccgcttttattgatttgatgttgttcaccacttcattctgccgattttgagtcatttttttttgcttgattggtttgtaagatgagtgtgacaatatagaataaaccttgcatatatagatgacaagcaaccttgattcctgtattctttaaatactcagcttatgaaaaaaaaaaaaaaaactgaacacggttatatatatgagataaataatta

SEQ ID NO: 246295 - DNA, 871 bp, Cannabis indica
atttttattaacaattaaaatagatattgctaatttccatccaatttttatatgttatattgaattgtgcacatatacatatgacataaatttattgatccacatatataattattattattatttaaaaaaatatttgtttttctttattttttctcattctaaaaagatcatatttttcttttttttcagttattatttttcttcttcctcctcattttttatacaatcgtcaccacaatcatcccaccgaaatcactaccatcaaaaataccatcgcacaccaccaccgcaacttattatccagattcaaatcaaacgcacacaaaattaaaaaaaaaatcaaaccaaatttaaactaatccagattcaacaaacatacacacacatatatatacaaaaatctcatatctatgccccaaaccccatttaaaataacatatccttaccacttagcggtaatttagtcaaatctaatacttcaaatactcacgagatttccaatgtctatctaagttaccccgctattactaaaatactaaatcatacgaaaatgtgattctattggcctaacgtcgccttctaatgttgttgggcataaaatatgaaaaacataaaatttcatatataacataaatagcacatgtagaatttaaatatatcaccattaattaataaatcaaaattagaaatctaatttttgaattaaactctaattatctgctaatttctatattaaaattaagtagtctttacaattatccccccgttaaaaggattttgttcacaaaatctaacttgaacaactctggatattgagccctcatgttggactccaactcccaggtggcttcctccaccttactgtttc

SEQ ID NO: 246296 - DNA, 1763 bp, Cannabis indica
ttcattgaaaaagattaggaaaaaaaataaccaggtgtgtttgtcatgctttacaaagtaacctaacaatataagaaagtaaccaggtgtgtttgaaacaaagtatgaaatctcaaagagcctgcctgagacattaagaataagaactcaatttatgttcacacaaaaaatataaaactactacatctttttcttctcgggtttttcaggtgcctcttgaacaaccttccttttcttcttctcaagttttctaggtgcctcttcaacatccttctttttcttcttctcagtcttttcaggtgcctctgcatcagtcttcttcttttccttctcgggcttttcaggttcctctacatcagtcttcttcttcgttttctcaggcttttcaggttcctctacatcagtcttgtacccatcctcttgcttctttttagcatgatggtaaagacaaacagcaaggtcatcacgataattggcaatgttgagtttaggagatatgccatttatggtgtcatgaattatgtgatcagcaaaagcaatcacaaatgcaccacagtcactgcaaataagtgtgaaaatactttaaaaaaaaataacatttaaagttaataaaaaaataccacatagaaattaaaatatgttacttaccaatcttcttgttgaggaacaccttttgcaaactttatagccaaaggatgagaccttgcaactgcatatggaccttgattgaagtctatgtctgccctcgtattatagaagccaatacactccataaacaaaggaatcaacacagagaatgccgtaacagttttctcaacaggtttcttattcactctcaaagtcatagaattatacaccaccaagcacctctctctaatattgaaatgtgcaagaatataatgcacttcatctgtaacatgagctggaatcgcaacatgatcaaggtaataccatggaacactacatgataatgattgtccagacatgtattttgcaataatgctttcctggttgatcacattgctgccgttggctaagtaactctcataagtagttctaacaactttatagaaaattgaatcagtagtcgtaaccaataagttgatagtaccactgtgcatgatctttttcctaagataatacataataacatcgatatgctgcaataaaaaagagaggataatcaattagccacttaatttataacaaattgaaaaatgaaaggcataaattaaagaaatgaaaagtaacaggttactttcaatcaaactataaaataaataataatgtaacttggtcttgaactaataaaacaatatacttacagaatcagacaaaaattgaccacaagtttgaagttggtaaaaccaatatttttttttgatgtgcatgatcccaaaatcaaaatcaatgtcattagcgtcagccacgaacttatttctacaatgaaaaaataaaaatgcattaattatagaaatgagaataattcataaaattatgtagtgaaaatttaaaaaaaaaacaaataaaagaagaaagagaatactgacttagtgttaggtttataaccctcaaaataccagtcgttgtatgcttgtgtttcttcagtagtagcattcttcccaatctccttacgaaagggaatgattcccttcacaatctctaaattcttccttttccctactggtacaggttctgatgaaccaaaatcagtaacaaaaggggattgaaagatcgcagaaggtttgggctcccttttctct

SEQ ID NO: 246297 - DNA, 698 bp, Cannabis indica
ttttaatttttctctttttattttgtaaataattgcagtcattttttttttaaatcaataattacagtaattaaaatatagaaaaatgctattttataagtagtttttttatggtagattgagaagcttactgtgtcttgaaaccatcttcgttgtcgcacttgtaaaattgaggacatggttttgggtttagagaggtggttgaagaagataaaggaaacaaagaagaaaaaggtcaacacttttgtttgatttttgcaattgggtattatttgggtggatgaatttgaggcagatgcgcggtgggagcagggccggccctatgttaatttgggccttaggaaaaaaataaaattggggcccaataaaaaagtgaggtttttgggattttcattctctcactgtcctcacccaaccccattcatttctgtcccaccctctctctcggcaaccaaacaagctctctctggattttcattctctatcactgtccttacccaaccccattcatttctgtccagccctctctctcggtagccaaactaagctctctttgaatttttattctctataaccgtcctcacccaaccccatttatttctgtcccgccctctctctcggtaactaaacgaacccatctggatatggctaccctcatcattgtcttcggtgtcataggtaacatcgtgtctttcatg

SEQ ID NO: 246298 - DNA, 1006 bp, Cannabis indica
gcctccatggccagaccatccacaagatctcaagatggtgttccaccatcaacaaacaactctgatcttcctccggatgttacctcagctcctcttgcccaaccactaaccaccaatcgtcaaccagctgctgttcgatccagatctcagctttaagatgaaattgaaacccaatctccaagaatcgacacccagcttccagctcaagaacggagaaccagtaatcaacacatcagcgatgatgtctccagccccttcttcctcagctccggtgaccatcccggtcttgtcctcgtctccaccgtccttaatggcagcaactaccagtcatggaaacgtggaattatgatggccctagctgcgaagaacaagcttccctttatcgacgactctcttcctcggcctgaacctggtaacaatctcctaaactcttggcttcgctgtaacaatatggtgatgtcttggctagtaaattcggtctcatctgaaatagctcaaagtatcatgtactttgatcttgctgtcgatatgtggcaagacctggctgagcgatttaacgagggcaatggccctcggatcttccaactccaaacccaactcacgaaattacaacaaggtgacagatccgtcacttcttacttcactaaactcaaatccctatgggatgagttaaaagaattccaaccaaatactacttgcacatgtggtgcgatgaaaatttttcttgactactacaatcaaaaccaagtccttgaattcttgactggtttgaatgagtcctatgcatctgtccgtgcacaaatcttgctcaatgagcgcataccaaatctctctagagtttttgctatgataatacaagaagagagatagcgttctcttggctcccatgacagccccattcttgctgcctctctcaaacccccatctaccaatccccctcgcaccaagaagcctcgcccttcttgttcaaactgtggaaaacctgggcatttggttgataaatgct

SEQ ID NO: 246299 - DNA, 1063 bp, Cannabis indica
cacctctcctttgggaggcatatcctcgttggcactcctgatgcaaaaagacttagtcgatttatctaatagtcgtgcttcttagatccacctgtcgttgtcatattggtccacgtattttgggcgaaattaagggcaacaagaacaaactacccaaaatacaaactaattacatgtttggaagtgttaacacatatgaaaacccataaaatgaaaataacaaaaacatgaaaataacaacaaaaattaaaacctaaaatgaaagcaaaagaatataaaaaaaccaaaaacaataacaaatgcaattttagagctagggcaaaactaaaatgcaactagaaactaaaatgcaatcttcttttttgcttcggttcataactgaagcaaaaaaccaattagcgtcggttcataaccgaagtaaaaaaaatcagtatttgcgtctatggttataacgtcggttgcaccacctgaagcaaatactttatatgtcacttaaaaactgaagcaaaaagccctttttgtagtagtactgttacgaacgttccttacttccttctttctcttctggctatcaaagttagaatttttttaggcaaagacaccttcgacttcttcttcacaggacgacgactacctctacccacagggggagaaaaatcagagtcatcattattaatgactaggattttccgtttagccttgttagcaactgatttatgacctattttagaagccttttttgataatggagatggagaagcagggccacaagtaatagtcattatatatacgaaatgaaagatatataaaaaattgataaaggaggaagtttgaagaagaagaagatggcaaaagttataggaggtgattttcgtggattttgattgtgtgtttcaaaaaggtaatggctggaagttggtttttaaatgaaaaactgagaaagaaaaaaactgaatgctaaattcgaaaatgaaaaataaaaaaaaaaaacaagaaaaaaaaaagaggaaaagtttatatttgggttgacatttgttaagttatatttttcatgtaaaaattc

SEQ ID NO: 246300 - DNA, 666 bp, Cannabis indica
tctgtgcaagcacatttggatcaaataagagatatgatcaagggcttggctagcccgaaaccatcagaccttgagctagataggtcaaggggctcacctttctcggcatacattgatgccttccccttgcccaagttaaagataccaacttagacgatgtaaacagtgaaaggagatcccctaatacacttaaaatactttgagatccaaacagatttccaacaaatatctagagatgtgtgatgttgaatctttctagcaaccctaaatgaaatcacccaagagtggtatttcaagctagccccaggaagagtcaattcttgggaagaattatcccgagaattctatatttgattctctgcctcaagacaaatactttcatgacttgtaaaaatgaagcaaagacaagatgagcatttaaaaaactacattcaaaggttcattgctaaggcccccatcgtcaaaggcctgacaaaagaaggctaatatacggacaaacatagaggcatcttgtcgttaagtgaattctggaaagatattagaaggatctcaatgagcaacatgaaggagttccttgagcgaggtgatggcttcataaagttggaagaatctgtcttgaaagccctgacaagagggcaagttattgaatagacatagagcatcata

SEQ ID NO: 246301 - DNA, 818 bp, Cannabis indica
tattttgacaagatcctcaagtcatgaaggtatttttcttgaggcaaagaatttaatatagaactctgagaagaattcttctcaagaattaaatgttcctggggcaaacttaaaataccattgttgggctattttagccagggttaccaaaaagattcagcaacacacatctctagatacttgttggagaactgtttgatcttaaagtgttctaggtgtactaggggatcttctttcctctgtacatctttcaagttggcatcttaaacttaagcaagggtaagtcattgatgtatgccgagaaaggtgagccccctgacctatccaactcaaggtttgatggttttgggccagctaagcccttgatcatttcttgtatttgatcctattatgattgtacagaaggatttgctgctacaggagcttggttgactagcccttcttgattgggctgcagcactagattggcaaaagcttggccagcccatgggagagtgtatgtccaaggctcaccagccctcagcctagcagctgctttggccagctagccctaggtaaaggagctggccatgactagccagccctactctacacagttgttcttaactggctagcccgatactgggcatggcttggccacttgttcttccttgattggctagtgcaacttgtgtattgatagttggttgattacattaattgttggagttaggtggatctacgtatctgaagtgattgtactcacttctcaggttgttgttgtcttaggtcattccaactgtttttgacctagctggttaaaggttggcctttgggtg

SEQ ID NO: 246302 - DNA, 500 bp, Cannabis indica
tctatgttaaggaaatacgtttcggttccaacacatattttgattatgaaaccctagagctccaaccagatttgtctcatgaagagaaaccaatgcagatccttgataaaaaggataaaattcttcaagacaagaccatatcaatgataaaaatacttgggagaaacagtagggtggaggaagctacttaagaattagagtttgacatgagggtccaatattcaaaactattcaagttatatttcgaggacgaaatccttttaacgggaaaataattttgatgatcgcttagctttatataagaattagcagataattaggatttattgttagaaatacactttaaattattatttttcactcaatgagttatatttgaattctaggtgtattaattatgttatatgtgaaattttatatttttcatattttatgctcgataacagtgaaatgtgacgatttgaccaattaaaatcatttagatatggtgtacgtagtat

SEQ ID NO: 246303 - DNA, 303 bp, Cannabis indica
tattttttggttttatgtgtgttgctttatagtttatttagttaatttttttgacatactttattaaaatataatgataagattttttattttagttggtaccatgtgcaacagtagttattaatatattaattatatattacccattatattgtataccacattttgaaatcatgagattttgttatttctattactagtgtaattatttatttaatttttaaaaaataaattattattaaatcaagttgtcaaaactaagtaaaaaaattcgtaatacaaaaacatattgaggagttgata

SEQ ID NO: 246304 - DNA, 776 bp, Cannabis indica
acataacatgtttgtaagtatagctgatatcagaaaaaaaccaaacctctagtgaataaacgccaactttaccacattataggcatcaaaattacaagtcctactaatattagagaaaaaacaactagtaaacaatggagaataactattataaaatgagacatagttttcaattgcctagtgagactccttctcattgagagcattaataactaccctcgagtcgctttctataataacaaacttggaaccaatttcctttgcaactgataaagccaaacagcaagccattgcttctctgcataatgcattagtaaagtccaaccgagacttttgaacccaaaccaccctacaagatggttcctggctataattgcagtacacatactttctaactccactttaacatcacaattcaacttaatccaatcatgaggggaaggagtccagacctccttcaggcacgtagcaggggaagggaaaaagaagcatgtaaatttgcaaaagaaatacaaatagagtcaatacacttcttcacatctactgtaattattatgtaccttgtcattgcgaattcgccagatggtgtcaacaacaatcgatgcataaaggaaaacctcctcagcagcaattccgctgtatttaaggtcccgaatgaatttgacccagtctcacatgtgaatactggtgtcacaaatagaataaataccctcaaggagaggaccgccaagcatgaaaagccacatcccaggatagacataagtgttctaaagatt

SEQ ID NO: 246305 - DNA, 537 bp, Cannabis indica
agtttcatttcaaaaccaattgattatgtgaggagtaacttatcttatgtataacatttaatttttacatattatcaacgtaaaattctctaacattttatagccaatatattcataagtttttcctcgaatcaaacaaaaattaattaattcaaattcaagataatcctaaatacttcttcctttcttggtgatattatgcatggactaactatatgatggtcatgtataatttcatcacgaaaaaatagatatatgaatgcatcttattttgtgtaccaatgaccaaattatgagtattacgtacagttttgtaatgtgacagagggtgctactgttgaaagtacagtcgcatttgatgaagggattataggatggatcttcgatggttggtgtatcagctacggccgcaccactgcataattccccacttatgttccattgttgcgtatctgcttttatatcccatttttcaaacaacctgttcaaaactctcactgcatatatatatatatactataattaaattaattataa

SEQ ID NO: 246306 - DNA, 814 bp, Cannabis indica
gctatggagatgttagatttctatggcgaacgttgcccggtaattagcaaaccgtgttgcgagtttattttggaagtggttgaaaattgtcccaatcaagatggtaagttagcccgaaaaagttatgagtattgcaaaaaccttaagaattaattagcaaaccgtgttgcgagtttttttttttttcaatgtgttatttattcagtttagttacttctcatgtctaattaaatttcttagctttttctatttatctactcttgtttcatttttatgaaattaatatattagtcgtttttttgaaaatatattagtcgttttttttttaaatttttttttacattaacatcttcgttttctagtatataccctttaacatgtatgatcagtaattattatatgttaaactttttcttaacaaaagagtgactcatctacgtacttgatcatcgcatgcaacggccaaaattgaatgagcaaccattaattaagactatatataattattcactaccaactttagttatgcatgtcaatatattatatacaactatataaagatgcatggtcatattgatcaatacaaaacaaatacatatatatatatatatacatatataccaaaatatatatattattagttgtttgttggtatttattaggtttgatgattttaataataaaaaaagaaaataaataatgttggtagattgttattgtttctcaacattaatcaaattaactttttaattacaagaaaatagttattatgctttttgaataatcatacagcaaaatatttcagggtcgtctt

SEQ ID NO: 246307 - DNA, 1558 bp, Cannabis indica
taagtaattaataataaaaccaagaaaaagagaaaaaaatggtaaagtaacatacctataaagcttgaataaaagggcggttttcctggtcattcgcagggtgtgatgcagaactgggtgcaaaagggcggttcgggcgagcatgcttctgagcttgccgttaatggtaataaggttgatgctaatttgaattatggggaaaagaagactgactcccttccctgtttggagtcctcgaatgttataatatatcccaaagaaccgttggtcaaaggtgggctgtgtaatgaagatggattatgggaagctgggccgagtaaagacaagagtggaatgggccttgagtttattgggccgggttcagttttttctttgtgtaaaaggcctgaaatgaattgtaatgtgggtaatgtttgtgggaatgttttaaatggtgggccaggccgtgggaaagaagtggaaaataattgggctgatggttcctttgttttagcaaggccgaatgatgttaaagctcttaatggtaaggagagtgagattaatggtgggccacgtggaaatggggatgatttggtggatttgatgaataagaatgatacccttgagacttttgctagtggggccgggcaccaagatgaggaggagagggctttatctcacttccttaaagcccaagaagagttgctttatgaccttaagcattttgggaagatggacttgtatgaaattaagaaaattggcggtgacattggagtgaagccttcgtcggaaactaatgagcgcaccacacctttcaagaagaggaaatttgagggctccgcttctctctgtacccgacccaacaaaattgttagacgtcacccggatgttgttagagactttccttgggaccatagtgagaaggaccttgggtcaaaggcggatttggatgatctttctgaagaaccttctgaggggtcgagctctccaagctgtaacaatggagttaggaggaatcatctgattggctcttttgtaattgaagaatctggttccagtctatccgtgcactcggttaaccctgtggaggagaatgtcatatctcctccacaggagccatgagaggtgtagcctggaactgtagagggttggggcagacctctacagttcgcgaactgaagtccctgctcagatcgcgctctcctgactttgtttttttgactgagctcaaggtggatgctaatccgctggtacgtattctaaaagcttctcatttttattttaatgtgtttgtgccacctatcggtattgcgggaggtattattttagcttggaaatctggttttagttttgaatgtatttcttgctctcgtaaccatatatcggggcttgtctattcggaccccccttcccacctgtggctcctctcgtgtgtgtatggtccgccttataatcatgctaaaaaacacttatggtcagagattatggccctaggggataggatttggtggtccttggttgatttttggggatactaattttgttctcagtccctcggagcgggaaggatcgtatggga

SEQ ID NO: 246308 - DNA, 1349 bp, Cannabis indica
ggcttaagtccacactggtcctttattgagtccgccagtgataaaatattgaaaataaatcaaaggtattaaaagatataatatttaaataatttagaaaaataaatagaaaaaacgatacatgatgtaatataataaaagtttgatttagaatatagaaaacaagattgttgatacaaaaatagagaggaaaaatgttgggagtgattgttttttcttttcttttcttttcacatgatagataacactttctgattaagtggagaacaacattattaagttttgaaggtgagtgatatgagcatgtgagacctccctcttaagtcaagatttagattcattaattaaatcttcaataaaatatcagttgttacaaatgcaattaagagagagtgatctacacgcaccaatatggtctttagtctcttactcaattggaatttgttgtgttgggatgggaaaagaaaagtcacttttgcctatgcaaatttcataatgtggtttaaccataatggattaaaaaatcaaaatcttaattagtatggtccatttggagatattatatcaattaatttaccatttgatccggtgatctctttatgagttaaaagggaaaataaggtaaacaaattttacaacttattatatatgtctaataatctattggattttagtaaatagaaagatgtagatataggtaggtgtcagtaaattacaagatggggtaaagttttgtctttatcatcaaagtacaatgtaaaaaagaatgattttaataaagtttttcacattaaaaaaggtcaattaaaacaagacaattaagagggatccatgtgattaatgaactatttacatgtaataatcactaatttgaaagccgttgatgaagttttgtgccttagtgagaaacttatccaagatataacaagtggattactacaaaagggacccatagtatcattgcatgccatgttcttcaattggtatttgttaaaagagatttatatgctttaagcttaagatttattgagagctaagcactgccacttattctgagagaatgtgaaagagtgatattataaacttagaaaataaatgatttagtataccttctaaagcttaggataagaaaaagttaggtaaacttaaatgttggggagggttttgggaaattttccaaaactagtaacaaaaatattttcacctgatgtcattgactcatttatttcatccccatgattaaaagagtcacatatattattttttaatgtttagcttaaaggagtagttaatttgcaggcttgctatatgatttcatctaaaactaatactatgtaaactattttcta

SEQ ID NO: 246309 - DNA, 599 bp, Cannabis indica
atgacacagccaaatgagttaatagtaatgagcagcacaacaccttcatgaatcaatgcatagtacatccataacattgaacttagtaatgctatgagatatggcagtgattgaaacccttctgctgatttatttttgtaaatcttgtaaaatgttggtctgcaataaacataatccgaatttaaatatattaatactaataataatcttgtgcaattataaaattataaatatagtaaagcgattttcttacactggagcaaggaatgccacgaaagataccatgttacctaagacaccgaagacaattgtgagtgtagccatatccatgtgttcgtttggttgtcgagagagagagaggagacgaggggggatggaagtcagtgactgtatatcttcagttcttaaatcagagagagagagagcagacgaagtgaaaaaaagctataatgtaaatctgttccttataatgcatatcaatatgtcatatatatatatagctctacacgataaatctgtttctttcaagtaaagaagctataaagtaaattaattagtctggtttacagataaaactcgttttagggatgatgatatga

SEQ ID NO: 246310 - DNA, 1113 bp, Cannabis indica
gcttttactgcttagagctctagtcttcgacagctaggacttcgcctttgggctcatgatggagtgtccgagcatagcactccctagctttgctagtttcgccagtaatgtggggtctgcctattatgacccctagatgtcctgccacgagtggtggcatcaaatctccattttggcctccttgcgcctgggtttggtcatcttgtacataaagacacaagtggggattgttacgccttatcaggtactcaatctccctcttcagattttgacactcattagtgtcgtggccgaagtggttatgatatctgtagaactttgacatgtccctcttcccatctcccttctaataggaaagggctttcggtatgggaccgttccttgagtagccatgaagatggcctcaagcttctctattaggagggtgaaggaagtatacttctcctccttgttcttctgtgccatgggagaagtgttaaacttccccttttttccattgttcctcccagagttgttggtatcacgcttgtttttagtgtttttaccacaagaagtttgggcagcattctgttgtttgcctgtgcgtcaggtgggtcatgaggttgttgggtgcctcgtgactgcttgctattgacataccccacttgggcctgtcgtatggcttcttcaagtttgataaagtcatctgctctatcgagggactccttcatgttgttggtggatatcctctggatatctttctagaagtttcttagtgggagtatgcccgccagtatggtcgtatatcgtcctttttcaataaggcctttgactttggtagctttagccataaatctctgaatataatcctttagaggcttcccttgtcactatttgactttgacaagatcttccaactatgatggtacctatcggtgattatcatgccagtctaaatccagtgaactgacaaatcagggaataaactttcgaacatataatcaagattatattccattgtgctgactgcactataatcattaacaaatacatatgttctggacttaatagaatttacacattatatataatcatgaaataaatcatgtgaaccatgcaacataaaatgttatt

SEQ ID NO: 246311 - DNA, 615 bp, Cannabis indica
aaaaaagtttaaaatattttttagtgacactggtaattatttgagttaaaaaataataccatcgttatctacttttcaagaggatcgttttaatatataagaaacattttttatacagttaaaaaaataaccaaaatcaaaagtaacgttttggtttcttttttatttaattataaaaaacaaatttttaaccacaataaaatttaattaccaaccaatttaataagttaccattttttaatgattatttcatatttaaaagttactaaatcatattctaattttataaaacacttttcacaagttcttaaaataacttataagaaaataaggtagtaccttacaaacgatagaataatggattcaacatactaaattttacaatttcttttttgatggaactaaactttacacaaacaaactttaatgtagtgacaaattttatgagttattaaaaagtattttatcacttactagataatattctacatgtttattttatagagcaatttcaataaatatttgaaaaaaagtaactaaattgtattttatataagcttctttttttcaattttaataaatttctaaaaaagtataccctactctctctctctc

SEQ ID NO: 246312 - DNA, 374 bp, Cannabis indica
aggatgtcaatgaaacatacttgttagtaaaccaaaacccaggtaaaatatttctaacaataatcacaagtaaactccttgttagttaggagatccacagaacttaggttgatctcgtttcgaagaaagtcgcatgacctaagaccttatgggagtgtcaacaagagcctatgtcgctcggccgtctcaggagtaggggcaggtcattttgagacagctgtaaaaaataaagcaatgttagaatcagctaaacccgaataaaagttaaggattaatttaaccaagtcttgtgcaaataatcacttacttataatgtggaaagtggttgtgccgatgggagagcgaccggtcatctagaagaattcatccttgaa

SEQ ID NO: 246313 - DNA, 1085 bp, Cannabis indica
ggtaaaatatttccaacagtgtgttgcagcagcttccacccattttgatacatagtccacaaccaacaagatatacagattgttaaaggaagatggaaaaggtcccatgaaatctatgccccacacaccaaacaattctacctctaaaataccaatcaaaggcatttcgtttctccttgaaatttttcccgttctctgacaacgatcacatgctttcacaaattcattagtatccttaaagagagtaggccagtaaaacccgctttgaagaaccttggcaacagttcttgttccactgaaatgccctccacattgtaaggcatggcaatggtttaagacagaatacatctcttctttgggcacacatcttcttattatctgatcaacacagtgtttgtagaggattggctcttcccagtagtagtgcttcacttctgaaaagaacttttttagttgttgatgagacatctcaggaggtgtaacatttgcacccaagaagttcacatagtttgtgaaccacggtaccataaagctttccctcaaactaaagagttgttcatcgggaaactcttcatttatctgcacctcctttgcgttttgactctcttccaatttaagccttgacaagtgatcaacaactaggttttcagtctccttcttgtcttttatctcaatgtcgaattcttgaagcagaagcacccatcgaatcatcttggctttgcatccttcttggtcataagatacttcattgcagagtggtatgtataaactatcaccttatttctaattaggtatggccgaaacttgtcacacgcgaacacaattgctagtgttgcccttcattttgcccaaaatacgtgggtctggataaggacgacacgtggaactgagaggactagcttttaaagaaatcatctaaatcttagatgacagaggagcacctctgggaaggtgcctcccggaggaggtatgagaaggaccttcagactcctggaggccaaggacatgttaaggcagtttcgggaggtactggactctattgaacaatcacctcgcatttaatgtcgcatgggggaagacgtatt

SEQ ID NO: 246314 - DNA, 1632 bp, Cannabis indica
ttggcttcaaaggaaaaagatgatgcaactcattcctttagtaaaattttgagccaccttcaccctcctattcgaaaccttctctctctcttcctctctgcaaaaccgaacccatatagtgaaaagagtgagtgcccacacacatcaagtggtactcaatcatggtgtgtaaggctgtgaagaatccagtttcaagagaaggagattcgggctcagatctaggtgataccctgctacaaaaaagatacaagggttagagatctgagtggaaggagacattatattctgctgcaaccactgcaaggtttctgaaactttatatgtgtttatttcatattgttttagaagttcatgtttaggatgttaataacatacttgttagtaaatctagatcctagtaaaataattccagcaagttcactacgagccagcgaatttagctgttacccacctgtgcgtcttacaagcgagatctttgagggggccattggcgagactagtacaagtggctcgactggtataggcgcttggagccttgagcatattagggcaggggcaataatctccctttgtgattatttcaaagactttgtcaaccacctcgggcttgccccatttcaactgaatcccgtctcctatagaatcttcgcaattttgagggttttgtacaaaattttaaattgggagtgccccactcccgtggaaatagagtacctttactctgtcaaagccgttctagcaaggaagaattccgtaggaggctttcattaactccggcgagcccaaaatcattgtggattttccaaacaaaacatccttcaaggataacatcttctagacaactggcctctccccaattggcacaaccactttctgtataattcgtaagtgattgctcgcattagacttggtaaaattaatctgtgtctttttattctaatttatctgactaaaattttgttttttttttctagctgcctcaaaaagacctgtccccactcctgagatggacaagcgacacaggcttttgttaactcttccctacggtcttaggtcatgcgattttcttctaagcgaagtcaatctaaggcctgtggacctcctgcatgacaaggagtttacttgtgattacaagtgtcccaagtattattctttgcagtaggttcctgtccctgacaaggagaaagttcaggatcgcgtggctcgggcactgtatcttcagaacaccccctcaagaagctagtgaaggagcatcccaaggtaatcaatgtggttggtcacccacactgcttagggctgagtgtaccactctagttacattgtgagataaccgctttaatttttatatttggaaccctctcctcgtagattgcataacccataggtttgagaactggtaccctagattccatgtccagattaaatgtaatgagtcatactacggtatagccaagcaatatggtaccatgatggatagggcaagtcacctagacgcgagcttggatttagaactagttgattcctttgatatattcaagatcaaatgttgcagggattttagttgatattatggtccttctaccccatcttctagtcatacctcttcttttagtgactatggtaaattcctta

SEQ ID NO: 246315 - DNA, 584 bp, Cannabis indica
tattgacaatgatatcatccactaccaacactatgattgcactgtgagaccgccactatgttcgtaccgctatgatagcatcaatagcacctaagagtaaaattggcaatcatatcactcttaaccagtactatgcccatactgtcggaccgatacaatggttgtgcctctatgatagcgtcaattaatactctctgaggtgaatatcactcttaaccagtacgatgtctgtactgctgaactgacacaatggttgtaccactatgatatcacccaaagcataaacaattgcaaacacaccatgcatatataatatattctatgctaatcttacctcattttggtgcttaggtgtggcgatcagcctaattagaacaacaacttgacgtattacagggccctatatcacaaccttcgtaaatttgatgagagacacgataaaaccctttccaaggacttcaaaccaaaactagaattatccctatcgatggataacatgataataccttaaatatcacgaataggggaaaaactagggtttctaaaattttcccaaccgaaagaccagttccccaaccaaaatt

SEQ ID NO: 246316 - DNA, 1131 bp, Cannabis indica
tagtaagcaaaaggttagcttcttaatcatgggatttttggactctgcacccaacaatcttttgctcacaagatacaccaggtacttgtcttcctctcgcacaagcgaggcattgatggcatgatctgacactacctagtacaaaaaagatctttgcccctacatgttttgataatactagagcactggtcagatgctccttcaacttcttaaaagtgtcatggcactcttcagtccatacaaacattttattgcctcgcaacacattaaagaatggaacatttatcaatagattttgaaatgaaccaactaagagcagcaatgcgccttatcacactttggacatctttatgccttctcgaagagggcatattgattaaggccttgattttctctgggttagcattgattcctcgagaactaacaatatatcctaagaacttcctatatgaaaccccaaaagtgcatttcttatggtatagcttcatcccatatttccttatcaccgaaaaagcttcctccaggtcgcgaccatgctcttcggacattttggacttcaccaacatgtcatccacatacacctccatgtttctcccaactgtcctttgaacatgtagtttaccattcgctgatatgttgctcttgcatttttgagtcttaaaggcattaccttgcagcaatagatgcccttgttagtttgaaaacttgtatgttccttgttagctgtatgcattttagtctgattatacctagagtaggcctctataaaggtgagaaccttgtacccagatgttgcatctaccatctgatcgatccgtgaaacaatcctttggccaggccttgtttagctctgtaaagtctatgcacatcctccacgtgtcgtgtggctttgagaccaaaactgggttcgcaagccagactgggtataattattcacagaagaaatcatttgtagttagcttgtcaacttccctttttactgcatcagctctgacgggatttagaggtcttcttttctgacgaactggggttgcatcctctcggatcttcagtgcatggaaaatggtatttcgatcaatcccagtcatgttggaatgactccaggctagcacatcttgattttctctaacc

SEQ ID NO: 246317 - DNA, 1590 bp, Cannabis indica
ttaacaattcaaaaccacaaaccccaaaccaaaccgcgcagtttaggaaaaattcaaaccgcgacaccgtaaagaatttaaaactgcattttttgtttgcggtgcgagcagtttgatgaacacccctaatagaagatagatctatattatataaactactgaaaaatagggtttgggcgactctttaaaatagtcgggtaaattattattgattggtttataaaattgacgcttaaccaccaacaacaaaatggaatgaaataagtgtcgggtcactacaaaagattagatttttaacataacatctataacaaagataatttgtgattaaatatgtttttttttgtcacaactcatagtaaataatatgttagttacaatgaatttttggtgataattttaaaatttttaaatgccataattactaaaaggttaaaactaaatgttgccattgaaaatacatttaatcacaattgtaaaattttataactaaaatttctaattaattatcatttagttgtcacttttttaaattgtaactaataactttgtttttaatcacaactaattaatttataaactcacttagtcacaaccatatttaatatctttgtcatatattaaattaaatttaaagtctatatttaccatatattaaaaaataatatcctaaatgttggaacttattttattaggatctagatttactaacatgtatatttgattatattctataatttaacatcctaaacataaatttcttaaaataataaataaagacataaaattctagaaacccttacattggtggcaacgaaatattataaatctttctatacagatctctaactcttgttcctttctgtcgcagagtattaccaagatctgaacctggatctcctttaggtgttggaattcttcacaatcttttatactatgattgagtactgacttgaattgagtgggcaaggtactcttcagtaggggttcgagattatgaagagaatgagagaggaatttgaattctatatagagaggctctcaattttacagttgtctgacaaagtagaaaactaagttattatgttatgagagccatatcttattctttacataggattcatctagggttaggatttaaattatatagaattaaaaaagataaaaatagcttaaaatacccttaagtggccggcctcatatgtggaccccactagttttaattttgtcattttacttaacaacttatcttttctttcacaaatgctatattttaatttcaatcctataaatatcaaaactatttatttaataattataattaattatcaaataaaattgttatttaacttatttattaattaggccttacaaaatctcttaattaacaaataaaccctaaaacctcttttcttctcaattaagcccgtgcttagtgaaaattcataagttagacatagtctaatttagaattctaatttattaattaaaaccaattcactgagtctacaagccaatattttctcaattagtgcgggatcactattgattatatagaacgctctatatgttccaaatatagatacgcta

SEQ ID NO: 246318 - DNA, 877 bp, Cannabis indica
ctaaataatataagaaaggaaattctaattaatcaatataataaattattaatactaaaaatctcacatttagactaaaatatttaatggtaaaaatcattaaagttatacaactaatggatagatttagtacaccaaaataagtttgaagacgaaaaaactttctataataatttaaaatacttttaaagcattaattataaaattattaatactgagaattaaaataagtttgattcttgaaaaaagctaaacacaaaacagagataccaaacattaaaatagaaagaagatcttctaaatgtagattgctaaaaagtaaatttataataaatataattgatctggtgacaaatagaagagcagtaagtctttaaatatatatataataactattgattaataacaaaataaggaatttaaaagaaaattcaatccaagttaatgagacattattcacttatataaataaagagttaacaaaattaattaatcaaaattagctcaatattaaatacattaaaacctaaaattaggaataccataaaagtataacttatttaagacaaaaaagtcagaaaactgccataaaaataataaaataaaacctaatttaaacaattaattagtagaaaaataaatcattatattattaattatcattaaatgaaaattaaaattaattgctgaaaattttcaaacagcaatcccgcgcgtgaatctcggctcagtcaaccctcaatactccacctttcctcgtcagattcccctaccggccttactcaggcgacaccacccagtctattctacataaccttaggagaactaagatctatttttctccagttgttaaggcaataaacttctgaaagagaga

SEQ ID NO: 246319 - DNA, 1033 bp, Cannabis indica
caaagccatttcaaacaagtggaaagttctcttaccagaggggtcatttgaatcgtatcctgagcctcgagccttggaaacctatgaaattcttgaggtggtaggattatcgtcgtgcggccataaatgccattcgagctggttcgttttatctcctctatcttatattattgattctcctttttacaatgacaccctgttcatttgtacaggttttgatggaattgaaattcatagtgcacatggctacctccttgaccaattcttaaaaaatgggatcaatgacagaaccgacgagtacggtggatcgattgaaaaccgttgcaaattcttaatccaagtggttgaagcagtagcttcagccataggtgtgaacagagttggtgtcagaatctcaccagcaatcgatctccttgatgcccttgactcagaccctctaggccttggattagcagtggtggagagacttaacaagattcaactggaacacgaatcaaagctctcttatcttcacgtgactcagccacgactcactgcaactggtaaaacagaattagatagacccaacagtgaagaagaagatccccacttaatcaggacattaagaaaatcttaccagggaaccttcatgtgtagtggtggatacactcgagagctgggaatgcaagccatagcagatgatgaggctgatttagtatcttttggtcgtctttttatagcaaatcctgatttagtattaagatttaagctaaatgcacctttgaataagtacgatagaaataccttttacacaagtgatcctgttgttggctacactgactacccttttctaagcaacgaaagtgaatcatgtctttgaatattaggtgatatctatgtattatcatcacgagtagtgattacctatttattttatggagagatacttgtatgttggtgcttttagttttttcttttgtaatgttggggcgtcagtatgtgaactaccagagagtatggaagtactcttaagtctcaagtcttaagtcacatt

SEQ ID NO: 246320 - DNA, 713 bp, Cannabis indica
cgaagcatgtgagatatcctcatttcgacccgctagtgatcacaatccagctcgccaacaaaaggataaaaagggtactggtggataacagaagtttagtaaatatcctttataaggatacactgaagaaaatgggactggaaaaagtaaaacaaaaatcttgcatggtaaatctatgcagatgtacaggcgatagtgtcgccagccaaggaataattgagctcccataaactgttggcgaagtgcctttatccaccaccataatacaagactttctagttgtcgacctaccaatggcttacaacatattgctgggtcaaccaacgttaattggactaggggcaattagttcaattaagcacctatccctaaagtttcagacaccgacaagtgtaggagtggtgcgaggtgaccaactgttagcttgtgaatgctaccggaaagagctaaaaaatagaaaggtcggtcaccagctaatggcaggctcgactaaagaaggtgagaagcagaatgaggatcttaatccttagattcaagatgaacggaatcaattgaaagcaatagaggaattggaagaagttattttagatccagaaaatcccacaaagtgtgtattcgttgggaaaaacttggatgaaaaacaaaaatagcaactaataagttttttgagggaaaactaggatcaattttcttggagccactcagatatgata

SEQ ID NO: 246321 - DNA, 650 bp, Cannabis indica
catcgctttgaggatggaatgaggttgagaaattcaaatcagtgccgaggagcttaaacaactcagtccagaacctgccagtaaatcgcgggtctcgatcactgattatgcttgagggcagcccccaaaatttcaccacatgttttagaaaaaactgtgcagtcacttctgccgtgcagtccgttggggcagtaatgaaagtggcatacttgctgaaccgatcaaaaaccaccataatactcacacagccatctgacttctgaaagccagtaatgaagtccatggagacactctcccatggtcgactcgggataggcaaaggaacaagcaaaccagcaggtgcttgttgaagaggtttgtcttgttgacaaacaaggcaggtgagaacataggcttccacatcttctctaagttgtggccagtaatacattgccttaataagtgccaaggtgcgtttcattccaggatgcccggcccacagcgagtcatgacagtccttaataatttctcttctcaaaccaacaacctttgggacatataggcgacttcctttagtatatagcagcccatcttgcaaccaaaatctcttcgaccttccctccttagccattgtaaccaaggtctggcctagcgcattactagccaatccc

SEQ ID NO: 246322 - DNA, 1163 bp, Cannabis indica
attaaagaagaagatgataaaagaggagcggaagcactaaccactatttcttaggtattttctctaatggggaaagagagaatacattggggaccactacctatttataggctcattatataatgagtttttggtttttataattcgacccctcaacaaattataaattaacttatagtatacacattatttccatgaaaatttaatatcattttgatacccataacataattggtcacttaattttgtattacactttataatagtatacacattatacatatgtgcccaagtaagattttaatccaaaaaaaaaaattacactcattatcgatatagtacttcatacgtactatatacagaatatagttactattataaatattagagctcatttggtacgccgtataagggtcgtattgtattaaataataaataacaatatgtttggataaagtaatgtattgtattaattattacgaccaaattttttaatacaatttatgttgtattatttaatacataataaatagtccatattagtttgtattataatatttacaaaggatctggggtcaacaccaatttctgacccgaaatcggacccgggactcggactcggacctggacccggacccagagccagacccgcacccgtagttggtgttgggatcgagtgtattgaaaatatattataactttatacaatcaattaatacaagtcaataccaaatattgtattgtattaaataatattaatacaatacaatacaatacaatacaacacagtgcaacacaacacaatacaatacaatacggcgtaccaaacgagcccttaaatcattaaataataccacatatcaacaatatttgtatataaaatatcaaatattgtctcctattttagatttattttcttcaggatataacagctgaattaaacacattcattaaaattatacttaaacagataatatttacaataataatttagtgtagtcccaacaactacataaagatttgatcaccataataaaaaatttaaaaacaaattataataattaactaattttattaatagttaagagaagatacaagtatattaaaccataaaagtactgattcattaaaaaaagaattatagtattcagttgtcacaatat

SEQ ID NO: 246323 - DNA, 695 bp, Cannabis indica
acagccccacttgaagacaccctcggaaaaagaatgaataaaaatcacaacaccttcagaaatactctaaaaaagaaacaaaaacccaacaatgaataactctagatgggagaggatggcctaagcagcataaaagtgagaagcttgtgttcatgagaattgactccctcatagaaagaaaaaatttaactgcaaaaaacaaaatatacattaataaagaaaaaaataaaataataatcataataaataaataaataaatattattgaaaattttataatatattttcagtacaaattaataaacatattgaaaattattaaaaatattccttctatataaaaagagaaaatttattttgtccaatgaagttgatgtcgatattagatcttggacactatagactacttcaaacaatttaatagcttgaataactcaatatatttacaactctgttagtaaccaagaaacaaaatttgctaataactaatgccactaatagttataataaaatctacctcatatacaattaataattaatagagtttagtatgagaatttaaaaactaacataataagctaatacaacaaaaactaacacctttaataataataaattattttataaaagaactcataaaaatagcaacataactctgattattttaattaatacgataataatactttcaaaac

SEQ ID NO: 246324 - DNA, 892 bp, Cannabis indica
taatgaaataataataaatttatttatttatttatttattttttatcgttcaacaatcacaaccctaatttgaaaagtagagttgttattgatactaatataactacagaaagtttcgcccaaataaatagctctaaaatcttgatgaaggacgaggagtccagggagaccgactaagttggagagatcaaggaggaggaatcaagagaggtaagtgagatcggaatcgacaatggaggattgatagggagaaggcgatggagttgtgcggcggtgatcggatcgttaaatatgtcttcgcctacaaggagatcgggtagatcgagacggagtgggactggatcagaatggaatgaaggtctgcatattactctgaaagctagggaatgggatcctttgctgcttcctcctccgccgctgccgctttggccattggagctcatcttcaaatatgaaaaggtttcactgttttttttttttcaaaagtttggctcatgtcataggtaatagacacgggaggatcaaagagagagatgggataggaaagttagaagaatttgtattattttgggttgtaattttttttaaagatactttgggttgtaatttgaatcatagaaacttaaatatttaaacagactattgcaggtttctatctggttatgatgggtatcaatgaaatagtttaataaatatttattttctaaaagtattttaagttttcagctttttatgttttggatgtcagaatttttattaattttttaaatatttaataatttgatacacacaaaaacatatttgatagtgtacacaccaaaaaaagtcacatatttgatctccatactataggtctaaaaccaatgttcttaccatagaattattctataat

SEQ ID NO: 246325 - DNA, 522 bp, Cannabis indica
attgcctcattacacttgggggcaacaactgcactaagcaatcaagttagatttgaaggcctctaataatgaggctgaatatgaagctctaattgcaagaataaagcttacacatgaagtgtgggcataaaaccttgacatatataatgactcttagttggtcatcaaccatgtcctaggtgaatatactacccaagaagaaagaatgatggcctacttgagcaaaatccaagacttattaagtcagctcaaaggtcacaccattaggtaagtccctagagaagaaaatacaatagccgatgcacttgcccaattagccagcaacaccttaacagataagaccaacttggtgcctattcagttcttgaaagacccaagcatcactattttagaagaaatagacatgttggatgatagtcctacatggatgaaaccaatagcaggatacctccaaacaggagtcttgccaaaagacaagaacgaagcaagaaaaatgaggaagaaagatgcccagtacctcat

SEQ ID NO: 246326 - DNA, 1002 bp, Cannabis indica
atgctataattgaataaatcatcaaccccacctatttatagagtgcttattgcccttggtatttggtgattaagatcttttcctcaaaaaaaaaataataaataaataagcaaccattctattaaatttagacatataattattgtgtatcttgccaaacacattttgcatccaaaatattgaaaagtattggagttattgtgagtgtagaaatatctttgtaaataactagagttatttgtacagttagatttagggtgtttttgacaacttagtttaggttgtattttttttcctaatttccttgattgttgcctaattctactatgtaatcagcctatataaaggctacattttcatcaataatatcatattagaagtatcattcacaaattactacatggtatcagagcatttgtagtaaaaaaaatcgttttttttctgcccctcttttttaaaaaattaaggtttagttctttgaggcccaatcttagaaatctggtatagagtcctcttctaatctcacctcctatctaaaaagcttcccacagccccgatcgacaaaaccccaaagtttggggtccataacagtggtgtgtgagccacacgcaccgcccatcgtccaacatcatcacccacgcgccacgcgcgtgcaggcgcgtgagccatctccggctatcgtttcttcgacgtcttcctccctagcactccctgcttcggctgtgactcttgatctagggttcttcactacaacagattatttctttggccaagtttttctctagattgattttctttttgtttcatttcaatgaatcctcttcgacagcctatacagcagccaaaatctcccttaatcaaggcaaatgctagtatagtgtgtcatcaaggttctacatctcacacgtttactgctgcctccaacaaacggaactggatagttgattcaggggcttctgaccacatgacgggtaattttcaagtcttcaacaccttcaaacc

SEQ ID NO: 246327 - DNA, 1210 bp, Cannabis indica
ataccacagcaggtgtgataggcgcgaactgtcctacgatggccgctgatgttgatgcttttccagcatgagcggcaattttagggaataggttgaggggagtaatggtagtacgtcccactcctccgttgatggtgttgacaggtgttgttccattaccagggagtggaacattcattgttctgacattgaatgattcagtgttgttgttgttatctccattcgtctagtttcctcccatgataattttccaccaaaatcaacagaaaatttctttcccacaaacgacaccaaatattgttggaggaatttagacaactccaaataaaataatatattaaaatataaacagaattgtgcgagtactcaacctagaatgacgagtattcaaactattgatatatggacgtgttggatatataaagaacagaaagagatgatagtggttcaatcagatcacgatctgcttagtccactgttgcaagggttttctgtcctgtccatttcatttaggatcactcctttatatacaaagcaagtgtcctttgatttacacagagattgattttattatcaatctgtttgtacattaaatataacatttaaatcaacaaaaatgtaaatataataaatgaagaacaatttcggcctaattaactaaatacagcaatgtatgcgacttccatggtacgatttatctattcatattctcgcataagctcgcaggctcaagatgagtacaagactaatcgagtataacatgtctgcgtcctgttcgagtcgcatatatggacatcctgtaacaagtcgataacttaggacacgcgagtcctaatcgggttatcgagcttttttgggtcatccggaccagatcgctgagtggagaagcaatctctactactttgcggaaagacctttatagtcctcacatatatctcagtatacgcgagtcttaaacccgatcttcagtcttgctttgtagcgagctattcgaatgtgactagactttatcaaggtcacatcatcccactgagtctggtccaggcgaggttttatactcaagaggtctcctactgacatctccgctctccttgaggagagtgagtccatgtgtcattttttatggggagcgtggtctcgagttttctaggtgagaaattctcactataacaggactcatatgtctccacgagttagaatactcatggac

SEQ ID NO: 246328 - DNA, 1033 bp, Cannabis indica
gtgagaaattctcactataacaacatctaaaaaattggtttcattgatgctcaatcttctttttagtgaaaagtgcttcacagatttcagttttgtcaaattttcacgggcagaacttggtaaacaaaatcggtgcccaggttgaaatgtcaacctaggtgcccatagttgtgtatgggcctcttcaagatgttattgatgaaatatcatgtccttctagtgttccttgatggatttgaggaaataagggtccaagtatgtccccaaaaacctaaccctagccacggtgcgcctagatcgactatgtgtcaacttgggcgcccattggggcttttgagtgcctaggttccatttcatgtaaactcatctcctaagtctgaaacttggctcgagcatgtctctcatgtatcttgggacaatggctaagtagattgcccataagaagttgatgggaaccaaaactgatgcgagacgacgcacaagatgtcaacctgggcacccagcactgatgctcgacccaggttgagcctaaggacgttcatgtgacatccttagcttcatgggtcattgttttagggtcactgagacttgttctcttgaactttgtcgaaggatggcagctagaaacatcttcgcgagatcataacgcctacttgggcacccactagtgtcaaccagggcactaacacaatttccaattctcaagttgaccaccattagtcttagtggataggcccagggttgtttccttcttgccacgtgtcaaaaatatcgtgcatatcaaatttccatgtaaacacccaataaaataaaggtattttccactagtgttacccaagttcaagagcataatactaaatggtaaaattttttacaatgcacccctaaaaggggtctactaatgtactccttatctgtatcgtcatctgagagaatttttttagtctatttttttttacggcgttctacgttgtagttatttaggacatctaaaaaatttgagaaacttcaaaaaacttacatgcaaaaaaca

SEQ ID NO: 246329 - DNA, 1312 bp, Cannabis indica
acacatattttgattagacatgaatataatataataaacgaactaaaaaactgagaaaacttattcttgatcctgtatatgttccagtgttccaattaacatgttactgtagtaatagaaattgataccaataagttattggacatagtatcacagtaccttatcttagtgggagaattttaaaattctagcccatcattatttggatgacactagtgatagcctactatgttatgatcatgataggaactttagaataaaactaagaaactaaatctaaccattcatatggatagaaatgacttttcagcattataaggataagataagaaatttttgcaatgtctattcgaatgacttaggcataatacctaatccttctaaaattttttatggtatctctgatgattacttaatcttaagcaaatattttatattaattttaatactataatgctatgttgatgacttagtctagatgaaacttattgtttcagactaagagaaaatgtcacaacaagaggtccttaagaaccaatggtaagaggttaaatgtactcctacgtattaatttaaccagactcctactattgagtgggagccatgtaagatgtaattaaacaaggaacattagggagataatcaagaaagaatgatgaaagtgacgtatatgttagatgatagaggtgtatattagaatccttttatctacaccaacttagtacttcagattagagaaggtggttattctggggtggaggaattattctagaaggacgtaaaaacccatctataataatttagttccacaagtgaagctaaataacttagttgtttcgaaaagctcttaaaagttattcaaagtgaagaaagttcttaactatttttatctctattcaattttggatagaattagagatatgacttctgtatactcagatgcacttaataagcagtgaagaattcagtatccctagaggactaatacatataaaaaatgatgtttcataatgttttatgaacataaaggaagtaatggtggataaagcagttgcttaccataggcttacagttcctgtaatttgggtttcgtcaaatatactacacttgatttggatatcaagacaatcgattgattgaaatgcacttcttgttttatgttagtgaaagggatagtttgttgggattttatgccctaaataaaatccatttcaatgcaatcttatttattattaatagaagattagaagtcaattatgtttacatgtagttttcttgtttatagttttatatacaatttatgttaaatcca

SEQ ID NO: 246330 - DNA, 950 bp, Cannabis indica
taaaaagtaaccaatttccaaaatatctcatccaatttgtacttttgtggattagatttgagttaatatgtagattggattggattcaaatatgaaatctgtatttagtgtagattagatgcgctaagagcacaatagtgcggattgaattggatgaatgcccctacgtagcattgtcgcagaaaaaatacacaaaatacttccatcattatctaaaaagtgaaaaaaaaagtacactggagttattatcatcatcagaataagtcgccgagaaaatcattcgagttgtcgtcattaccagagatggacgtcttagttttcattagagttggacgttagaatctaacacagaataacttgctatgtaaaaataccaaattagaaactaacacataaaaaccagttacttgaaattcaaaacaaaattaaaaacttaattaaaactcaattacgtaaaacaataaaatcaataattaaatagggaaatcagtttccaaattcaaccaactgaaaactcaaataaatacataaaatactcacataagctccttcaaaatagagataaatggtaaaatagctcatctatcatatgagctactctaaagctattttaaaaaatgatattgtagcttctctaaatatagctacaactatttattgagctatatatttattaaattattttttttactctctcacttttctctcattccatcactttctttttttttttattgatttttctccattaatttatatatatattaaaaataataatatttaaatgatagaaaataaaaaagatgatacaagatgtaattaaaaaatttaagataaaatagaaaaaaaataatattttggtgaagtattttaaagaataaagtagaaaaacatgagaattacatataagatatgccacatatgaattcttaataaatgacttccaaaat

SEQ ID NO: 246331 - DNA, 1166 bp, Cannabis indica
aaattttatataaatatatttttaatttagtgttagaagagattatatatattttaattaagtagttaaattaaatattaaaatcaaattttctttattatttgttattaaatttttaatatttttaaaattagaatttataattaatttttttattaatactcattcatcaataaataatacttatttagaagtaattcgtatatatacatattatatatttatatatgtatgagtgtactcttaataggtattacccatgaaggacaaaaattaaaaaaaaaaattgattttttatgcttaatttttctatctaattaaaaaaaatctctcatttttatattatatgggctgagattgttctatcggtaaaaaaaaaattaaaagagaaaaaaggtttttagcaagaaaaataaaaaaaaaaaaaagttgagtttgaattaaatatttttgtatggacatagtttttgatatatagtgtaaaaagaaatattttgttgatattttctttaagtaagtagttaaattaagtataaaaaatttaaatttctcttttattattctctatcggattaaaatctaaaagtttaatatttttaaaattaatatttataattaaatttatttattatttaaatattctatatatataaataaataatcaaagtccttgtataaacatttggataaagttaaaagtccacaaacattatctgtttgctaacttttcaatattcatagttagctttcacagctttcttaccattattaaaaattaataacagaagattgtagtgattttaatttatacgatgaatttttgtgagaaaagtcaaaatattttaagtccacaccgtaaggccgaaagatatggtgcaggatagcaaatcattgaataatatgaaccacgaacttaacaaggattgattgtcatgtttggtccaacggtgagataatgtagaaattatggtgtttggtcgaagtaatgaaatggaatggaaaggaaaggaaataatttccgttttatttttttgtttggttgtatattaaagtgttggaatgtaattctaaaagaatggtcatttcactattttggtggaatgacaattccattttaaaatggaaggaaagattattccaatgcatgataaaaaaaaatttaataa

SEQ ID NO: 246332 - DNA, 1114 bp, Cannabis indica
aaggttcaaaaaggaaaaatttcgtgagctcctagactttagagctaaaactgacatgggcaaagcaatcttcgatttggggttatcatttgtatcaagaaagttgtttaagcaagaaattagggagtacaccctatgtgaaggaaacgatatattctttaagaagaatgaccctcatagagttagagcacaatgtaaaggtgttaactgcccatggatgtgttatgcttccaaaattgatgatagccccacttttgtcatcaaaagttatgaaaaagaacacaagtgttgtagaactaatagtaatagatttgcaactgctcaatggttgagtgaaaaatacagggaagagttcaaggtcaatgaaaattagggtgtctcatcatttcaaaagaaggttaacaaggatcatgtgcttgaaatatctaggaataaggcatatagagctcgacttcttgcaacaaaagccattgaagggagctatgaggaacaatatgctgctctttgggactatgcagaagaaatcaaatacactaataagggatcaacaatagaattcttgacagaaaatgctgagaatggggttccacggttcaagaggatgtacttgtgctactctgggttaagagagggttttaatgagggttgcaggcctgttattggtttggatggttgtcatataaaaggtgtacatccaggtcagcttttgacagcaattggagtagatgggaacaaccaaatgtttcctgttgcatttaccgtggtgaaaatagagaacaaagattcatggagttggtttctaaatctgttgaggatagatttgaaaattgagaactccaaccattggacttttagcacagacaaacaaatatgattggagcaatctttgaagggtatgtgggatgaaggggtacctgaagccgaacatcgtcattgtgctaggcatttggacaaaatttttatcaaggtattcaaggataaaactctaaaagacctcttctcgaaggctgctagagaaccaacaattcgaaggtttgagggtgcaatggaggagattaaaaagatcagtaacgaggcttatgagtggttgatggctgcaggtccaagtcattgg

SEQ ID NO: 246333 - DNA, 982 bp, Cannabis indica
ttttaaatataaatcttatacaacatgataggtgtaaaaatatgtgctctgtagtaatttttttttttctagtatatatattttgttaaatattatatatatttgtgtgttgatgcaaaaatcttgacaccatatctagccatatacgctctctagattggcgtgattgtattatgagttaagtataaataggagagactcaacagtttatagtagttcactccctgtatcgcgacagtaataaaactacgattacttaaagttttatttctcacaagatgaattacaaaaaaaatagctaaatttgggcactctaatttttagagagattctgtgaccttatgggtacttttatagaacttgtaaaatgagctagtggagtcctccttttaaatggaataaagttctattaaacagtgtacatactctattactttctgttacgcaaattatgggtctggtttattttccttgtcgatcggaagatgctgtttctcataagtggactcctcgggtcaaaatcaattgtgatgtgaaagttggttgcggttccatgtgtggagtggctttggctagggatcacatgggttctattttgtgggtgactactaacaagcttaacttagttgatcccctgattggagaagctgcaacttgtcagttcacatggagaaagccgtgcttttgaaacaccattttgtgttaattgagactgactcggagatagttatcaaggcgttgaatggaaccagttctaattggagtattggtaactatattcaccaatgtaatatgctctctaatttatttttgtgttgtaattttttttctattttcagactttgtaactttggagaatataagatggttaagtgggctttcactaacaatattattgacatggttaatctgttaatcatcccgtcaaatattatttgtattaatgatcgtgagatctgatttattttatttataaacggtt

SEQ ID NO: 246334 - DNA, 956 bp, Cannabis indica
aggattaaaactggtggaactacacagctccacaagattgcagctggttttggaagaaaatagtagcagtcaaagacagattcaaacagaaaatggacatggatagttttctgcaatagaggtatcacgttaaagaggggtatcatgccttatttcctgagcatccgaaatttccatggtgtaatctggtttgggataggttgattattcccaaacacagattcatactatggctagtgttctggagaaggctaaataccaaagaaagagtaagcagatatcaaagaattgacacagcttgtgtcctgtgtggcaaggaagaagagaccagcgatcacctattttttaaatgtgaatatagtgaaagctgtctgcagcaaactaaagccatgttgcaatggaaaacaccagacatcacaaaactgttgaaagcctgccatcattcaaagaggattactgcaggaagaaaaggcatggtgaacacagttgtggccagccttgtgtaccatatttggatggccagaaatgaagctctatggaaccagcaaatgtggctgacctccacggttgtatagaaaagcaaacaactcagtttgctaaggattaaagccttccctcctaagaaagcaaaagatgaagacatggattggattatgaaaatttagatgtatatgattaaagttagagacaggaaattgttttttgagttgtaatgtttgagttgtaaattgttgtgatgtaaagtttggtttgagcaataaaataccttattcatcaaaaaaaaaaaaaaaacttaaggagacacctcaccatagtagacaaagacaataatacccctgctaatatcactctgtaacagctttagttcggagtgtggtcggtgctccgtcaatgtgtacatggacaatgcaagaaattttcttatttctctttgataggctatctcgtgaggcttt

SEQ ID NO: 246335 - DNA, 617 bp, Cannabis indica
aatcaatgacaagtacggattggacagacctttccacatctcaacaccttttcaccaatgaaaaagttcacatcctcccgttcaatcatatcttcttcggcgagccataaattgcttgtccaagaatccaaatacaactgaaaatatctgaaaattatgatcaaaatataggctttaacaaagtactgaaatgaaagaataaaattaagaattttttcatgcatgtagcgaggtctaagtattgattccgtctttagattcggcatgcttttagttttgggcaaagtataaccacctatgcacactgaagtaagtgtgtgggatcacgaaatgtcacttttgccagtacatttttgtgctggtaaaatcgaatttacttgtgatcagtgacgaagctagaaatttagttgagtgagggcttgaataaatattaagtcaaaactaataaaaataatgataaatgtatctttcaaattttcatcttcaacaaaataaaataatactattgacaaaaataaaataaaatattgtcaatggtattaatttattttttaataaagtattatttttttattatttgtattgaactactttaaaatgggcttgattagaataag

SEQ ID NO: 246336 - DNA, 633 bp, Cannabis indica
ggatcatatgtgaagatggatccaaataactttcttagtgggtggagagactatctacgagtaagggtacgaatacggatcgataaagctttgaagaaaggaagaaagttacagatgaagagcggactggaatgtcacactattttcaaatacgaagatttatcaaccttctgcttcgtctgtggtctgctgggtcactccgagaggttctgcgaaaaagcttttgacactcctccacatcttctttcgaagccttataatcttgacatgaaggcacctccgaggcgaagaactcattctatgggcgcacgttggttgagaactgagatggcggcgaagacgtatggagaatcttctgctactccggcgattgacaggtcgacgacaatcattaaagctgtatcatcggaagagattatggtgggaggaaatcaaggagtagaatgtgggagtgatgcaattatgggaaatcaggatattgtggaaggggagggaattaatggtaataaaaaaggaaagtcaattgatatagaaaatggaagtgaggaggatgatagacaaatcattttagagcaaaaaaggaggagagttacgttaggcattaatggacaatctgtccaagaagatttattt

SEQ ID NO: 246337 - DNA, 1119 bp, Cannabis indica
catttcgtgagatgcaaaattaccaacaatagatagagagggcagcaatgacttgaccgacataatttctaatgacagcaccaacaccaatcttactgctggttttatcagaggccgcatcaatgtttagcttcagagtacccattggaggcggctgccaaggtgcagaaggagcagtagatggagaaggcacctgagaggaggttgcaggtggtcgatacttcagctgtgccgcacggtagttgtccaggtattgaagggagaaggctgcaagagcagaagcagaacgggatttcttgctgtgaacaacctggttgcgttctgaccatatgcaccagagtgtgcagataatttgctcaaattcagccttggtatgagatgaggctaagaattttagatagtcccccttgtacatggatacagcttttttccaatcaaaagattggtgcatcaaacgccatacattctttgcataatggcagccaaaaaacacatgtccaactgattcccatgcttgtcgacaaaccgagcatgcggcatcagttataactttccgtttaactagagaagtggcaactgcaaggcatcatggataacacgccaagcaaagattttaatcttttcaggcagctgtaatgaccaaaaagatttccaccactttgattctgaagatgagctcgaggagtgaggttgttcagccaaagatgaggccaaatggtaacccgtctgaacggtgtagatgccattgttggtgtggtgccatactaagcagtcattactaggaaagtagctcaagggaatggtgagggtgcgctctacatcagccggaatgaagtattgatttaatagagcaacatcccattgtcgatccttagtaatgagattagccaccactgcattatcaggacctttgtaaagaaaaggtagaaaaaaattgttccctgggatccatggatccattccacattgtatgtttcgtccttctccaactttccatcgcaagccttctaacaataactctctgccatagagtattccttgccaagataaagatggtgagtgaccatgagaagcttcttgaaaagagtttaaagggaaatatctgcttttgagcaatcg

SEQ ID NO: 246338 - DNA, 1233 bp, Cannabis indica
tcttaaggttacaatgcaggaatcaaagatgtcaaatatcaagttaagagaaaagtaatgatggtgtgtgagagagaaagagagttcaaacttaaagttcagcttatgacttcaagttttagggtttatttaaggccctttatatacgagagcgtaaaaccccttttatccagtaaaataaacagatatttacatagtaaattagtaaaatacgaatgactaaaatactccttaaaaatagatattttccatctactttcatggcctgctaaggtccaatgcacagtctagcttgctgaccacgcatgaagttgtacaccaaagtcctaccaggccaatgtatggctgaccatgcatctgcaagatacaggatggttgactttgtactgtccagaagttggccagcctatgttggccatagggctggccggggtggccggtgaacctccttgaggtggttggtccatcatccatcatcccatttgagtgtcaggacttctcgttagttgaagtgttgagtaaatgacttagccttcttgttagtgagttgtactgccacgtggtgttgatatcagccacgtagacatgccacgtcaggtgggcataaattgggataatattttccccctaagtccctgtgcggatgtctgtgaggatagggactttccagcttagttgggactaatagccttaactgagtaaataatgttgcattttttagtctttaaaataactactcttaactatctaatctcatttgttgtagtaagttaactgcattgtacatctacatgctttttagttgaacattgcgtgacaagtgaaaaagtggtcccatagaagctatataagccttatggagggaaactcctttcacttttcaattttcattctctcactagaaaaagtaattttgaaaagttcctctttctctttagaggttgaagcccacattgctccatctatcgagatttttgcgccatttcgaagattcaagcttcccattctcttcgtcaaaggtttctcatagtgggtaagctttctattcttgctatttactttatttagttgagtttgtcatgattgcatgaatcttttcttcgctttgaatattttttgattcctgtgttatattgtaatttttagtattttgatccgcatggtaatcttaggatgtataatgtgtggtatctagacaaaaaatatatggttttgaccttcattgtgattctt

SEQ ID NO: 246339 - DNA, 756 bp, Cannabis indica
gagaaatctttccgtacaattatagtctgcctggtaccgtatcattagcaacatacgacttccagtatatcataaaacagtgcacctttagttattcatttcaccaaaatgtcttgtcctacattccatccatgggtttcatatatacaaacatcatctattctttatcatcgaattccattttcaattgaaacaacaccaaaataattgagagacttactgtcgaaagaagtttttacaaaagatgaatataacaggtaaattttctttttcttctaggaacactgggtgctgaataataatgttatacgtttagtgtagaggaaaagcatagcaaaagccaacctattctagtttgtttagtgattgacaattccatcctctcacataataaatattacaccacgcattcctcaatataattttatgaaacattgaagaacttctaaggagccaaaagaaatattctctaaatttataaaggagtgatgacaaacaaatatgaatggaaatcaatttcaaattacctgtataatttaagtttttaattttctcatacaactatcgagtccgattataattatgttgtgttatacttaacagaataaatatttaagtgacgagggcaattaaggaacatgaaatgcaatatatttcatattgttgtggttttgtatccaaacataacaatttgtggttttatatttaaacatttacttatttatttatttttaatgaaatatcaactttattaaa

SEQ ID NO: 246340 - DNA, 1223 bp, Cannabis indica
gacaaggtgatcccctttctcctcttttatttgtcattggcatggaatattgactcgcattttgaagaaagttgggaacaaagaagatttctcttttcttgagcgatgtgacatcctaaagctcaatcacctaagttttgcagatgatgtgctacttttttgtaaaggtgattataagagcatcatccttatgctacaaggattgaaactcttctcagctaccttggggctacaacctaacaaagcaaaatctgcaatctattgttgcaatgtgatagaatcagatgtcactagagtcctggaggcatcaggtttctcacaacaacaaactccgttcagatatcttggtattcctatttgccataaaaggatttcgaaacaggaatgcgcaattctatcagagaaaatgacagcaagaatcagatcatggagcactagacacctctcttttgccggtagggctgtcctcatcaattcagtgcttacagctatacactcctattggtgccagattctcaagcttccaaagaaggtaataaatgagattgaatctatatgtagagcttttctttggaagggtcaatatatgatgcagggagctggtttagtagcctgggaaaatgtttgtcagtcaaagattgcaggaggcacgggcattaaaagaatggctgaatggaacacagcagctctctttaagtatgtgtgggctgttgcaaacaaggaagataatctttgggtcaaatgggtacatgcagtttatacgaaagatggaaattggtgggattaccaagcaacaaatcaagcgagttggtattggaagcaaatagtggcagccaagaatcaactcaaagaaaccacagatgtgcaacagtttgtccaacagaaatacaagatttcagatggctatgagttgatcattccaacacggagtagagtcacatggagcaatgaggtttggagtcgtttcaacacaccaaagcacagctttattttgtggttggctgtgcagaatcgcctccgaaccaaggatagattgcagcgttttcagatgctagatgacccgagctgcagcttgtgctcactgctgctacccgagacacatgaccaccttttttttttttttcaggtgtccattctcagtaggctgtctacaacatgtcaaagagtggctgtcgtggggagctcgtaccagtgacttatagcagcttctcaagtggatacac

SEQ ID NO: 246341 - DNA, 665 bp, Cannabis indica
aaattaaagaacgagagagtaaaagttacgacagaaacttatgcatcatctacaaaatgagtcaacacaaatttctatggtggatttcatatgggaaatcggctcaatgtttcctgtagaggatttcattttgactaacaagaatctaagttgaacaatacattaccaaaatttctaatcaaaacatataaagaggtgaactctcattaaaatttttacctgtcagtaatattaaaccatgaaatatcagataataataaacactctaaacaaaacaaagtatatgaatgagaaattaattatcttaattagaaattatatacctcggcttgaagctccttgtagccctgagctgatgactccgagagcatcttgactgccacttgagtgttgtttaagaagccatgataaacagttccaaatcctccttttccaataactttctcaaagttgttggtaattctcattacttcagcgtaagtatattgatggttttgtggctcaaatcccgatccattaatttcgttattacttgactttgggacaatatcgttgggttgccttatcccaacttctgctcctgttatcgttataattaagctttatttacatacttgatttatcattccgataatgattattggtaaatatacatatatatatat

SEQ ID NO: 246342 - DNA, 552 bp, Cannabis indica
tgtccaacaactcgacgctccataactggtttttgtatcttcctcggcgattgtttagtctcctggaaaacaaagaaacagaacactgtttctaagagctctgcagaggccgaatatcgtgctttggctagcacaggcagcgaaataacatggattcagtacctcctgaatgatttccaaatccctcagccgactcctgcatttatctactgcgataaccagtccgcaatccacatagcaaataaccccaccttccacgaacgaaccaagcatatagacctcgactgtcacttcatcagagagaagatcaaagcttccactattcgactaattcctgtcaacacaactttgcagttagccgatgcttttaccaagcctcttccctctactactcttctttcccatgtccgcaagatggctgttgatgatatttacagtccatcttgagggggggatattagcttactgttatttctattgacagttaattctgttaagtgttttattaggttgattagttcagtctgttaagttagttacttggttagtttc

SEQ ID NO: 246343 - DNA, 772 bp, Cannabis indica
tgacgtactcgtgtataagagccattattctatgggtgtaacggcccaatagaggcttgaagcgggaacgttacatgttaccttttcaatttaaaaaatcctattcctattgctataagaatttcaaattacactctcatagtttaggtatcacattctatctacacatgacatgattggtgcaataagtcttcttagtatgaagactacctactgctaagcattaaacactatatgagaagcaaaagagagaggcctcaagggtaccaccccgaggtgagtacccacaccatgacaaggtagtgcaaatggtaggccatatcctgagtgtcctcactgtgaccaacacattcgatattgttccaatgttgttcaaatcccgtgtaaagtttaaaagtggttacaaacccacaaaagtagaaggatattcccataagagacacacttcaaccaccttcaaaatttaagttgacggttcaattttctttacaataaaaatgcgtctcctcaagagagacgcaccaaccatttcccttgggaagggggtccgaaaatattacaagatagcttagcatcactcaagttgatgtgctaggtagtggtctaatattgctttttagcatatttcacgcaaattagcatttctcaaaataaaaagatatctactcaatgtatcatagggaaggtaagccttttgctaaccaagaagaaaacaaccggtagccgggtgctcagtccctttctccattaatataaatgcttctttcccttc

SEQ ID NO: 246344 - DNA, 705 bp, Cannabis indica
ttctgtgggtgtaagggtccaattgaagcggggacgttacatgttacctttttaattaaaaaaatgatattcctattgctataagaatttcaaattgcactctcatagtttaggtatcacatgattgctgcaatacgtcttcttagtatgaagactacctactgctaagcattaaacactatatgaggagcaaaagagagaggcctcaagggtaccatcccgaggtgagtacccacaccatgacaaggtagggcaaatggtaggccatatcctgagtgtcctcactgtgaccaacacattcgatattcttccaatgttgttcaaatattgcgtaaagttcaaaagtagttacaaacccacaaaaatagaaggatatttcacttcaaccaccttcaaaatttaagatgacggttaaaatatctttacaataaaaatgcgtctcctcaagagagatgcaccaaccatttcccttgggaagggggtccgaaaatattacaagatagcttagcatcactcaagttgatgtgctaggtagtggtcaaatattgctttttagcatatttcactgcaaattagcatttctcaaaataaaaagatatcactcaatgtagcatagggaaggtaagccttttgctaaccaagaagaaaacaaccggtagccgagtgctcagtccctttctccaatataaatgcttctttcccttc

SEQ ID NO: 246345 - DNA, 787 bp, Cannabis indica
tatttgtgataaaaatattttaaggttcggcaaccctgaagatctgattggaggccaaaaatatcaccaacagttttagttaacaatattgattgaattgttgagataagttgattttagaaataccgaggtattttggggtactcgaaattcgccaaatattctagaagtacgagcatattattttttagggttttggtttgggcaccaaacccaacaacttgcacttgcagcttgttctgaatcatgaagttttcttaacctcatgcatatcctgcaactcaacaacgaagtattagcgtgtacgcaatatgctcgccatattacaccacaaaatattgaaggagcacatatgaaggtacaattatgccagtttgtgatgagaatgattggggattgcctaatgacataaagaacatgtcaattggagtgcctgttgagaagcaaccagtagggcaacccaagaaacaaaatgttggaagaattaagtcaaatcaaattgcttgtaatggtgaaaggattgtgataaaatgaacctgtagcatgtgtcatggcaaggggcgcaatagaaagccttgcacctatagaggttaaacattattgttgaattttagtaaatcgtattattatgtattgtagtgttacatattcttgttgaactcttgttggactttgttgaacattattatttgtggcatgagtaggttttcatcaacttactgcaacattttcctctaaaaaatggcttgtcttatgttggctagatgcttgcccaatgtcatgataa

SEQ ID NO: 246346 - DNA, 983 bp, Cannabis indica
ttcaaatcaaattgaagaaaagagaggaaaataaagtgagtctgtgaatgggatctaatgtaagagaaaggagatcaagtatataagatcaaagaacgtacctggagatggagcagaaatgggtatggcggagaggagggtagtaatggtgtagaagaagagagaatataattattggttggtagtgcctgattgacgcggaaaggcactcaccatcttcaatggaaatgaatgcttttttttttgttttcttttttttttgggtatcatttaatttctttttttctttcaaatttcatataattttgcctctaatttaaatttctttttgagtcccaccacgtaaacttttttttaacttttcataatttaatataattttgcctatgatttacatgtaattttgctacgaatttcactccatgccccttgttaattattactattattattagtaagtttcctataaattcttaacagtcgtttggcttttatgcctgattaagacttgtcagctgtttctcgaccttacagtgtgactctagtcgaatcttgttgattcctacaattttttcgattttgttgaggttgttgcttttcatctgcttaagtgttcttttcttttctgtcttctttcttatatgactatggggttactcgaggttttggtgctgcatgtgtcgctgacgactgtcatactttttttttttggtcagctgccaagggttttggtttggctggctttgacttctaggtttgagattttggagttgtttgagagactcggattagtgttgatctggggttcgtagttcaattttcacagtggttgtagggataggctggtggggtggttgttgagtccacatggtggtctttggattaggttttgtggctttagaggtgtgcctcggagatttgagttgctcattgactcagaattagatcttcgttgttgttaatcttagtgttatgtttaattt

SEQ ID NO: 246347 - DNA, 887 bp, Cannabis indica
ggggtccttcatctcgattactttagttcagatcacagggctatctccgcttcttttgctcctattaattctcgggtacagcacgacaagcgacgtagtaggtttcgctttgaaaaactttggctctcggatgaccaatgtaaagatatcattgttgctagttggaaatcatcatcaacttctgacccgatctctgttgtccttggtaatttggatgaatgtgccgttaatctacagaagtggcattttgataaatatggtaacatgaagaagagaataactgatgcacaattgcaagtggaaactctcaataacagtccccatcgaacaccagcaactatgaattctttgaaaaattcagaggctttgttagatgaattattggagcaagaggagatttattggcagcagcgctctcgcgttgattggttacatgcaggagaccggaacactaagttcttccacgctaaagcctcagcaagaaagtcaaataacacaattaaatttttgcttgatgagaatggtaatcgggtctcttctaaatctgaacttgcagctgccatccacgactactttgttgaaatttttactgcttctacattggatgaagttgcccttgttaccactttaaacaccatcccttcaacagttacagctgagatgaatgccacccttctaaaactctttgaagctactgaagtcgaggctgctttgcactcaatggcagccgataagagcccgggtatcgatggaatgtctccactattttatcaacataattggggtgtggttggtcacttagttacagagcagatcctacaagtcttaacaaaacacttattacactaattcccaagatcaagaaaccacaacgattgcaagacttt

SEQ ID NO: 246348 - DNA, 752 bp, Cannabis indica
atcaacttcaaggaaagatggtaatttcaaagattgacctgtgatccggctatcatcaactaagaatctgggaagaagatataccaaagactgcatttcgatttagatatgggcactacgagtttctggtaatgtcattcggattggctaatgctcctgcggtccttatggatgtcatgaatatggtgttcaaggatctcctcgataattgtgtcatagtgtttatcgatgacatccttatatactctcagtcagaagaggagcatgagcatcatatttgaattgtgttgcagcgacttagggatcacaattgtatgcaaagttcaatgagtgtgaattctggttgtcttaggtgtctttcctagggcacatcgtcgggaataatgcaattatggttgacccaagcaagatcgagtcagtgaagaattggccgatgccaaaatctgtgatggaagttcaaagttttcttggtttagcaggccattatcaacattttgtcaagggattttctaaaatctctatgccactgaccgagttaactaagaaaaatcaccgattcgtgtggttagagaaatgtgaagcaaggtttcttgagttgaagcaacatttaataaaagctctggtgttagctttgccatcagatcaagagaaatttgttgtttattgtgatgcatccagacagggtctgggatgtgttctgatgcaagctgaaaaagttacagtctatgggtctcgtcaactgaaggattatg

SEQ ID NO: 246349 - DNA, 684 bp, Cannabis indica
taggacgacgatctttttgatcaacttcttgggaaaactgtcatttcaaatattgatctccgatcaggctatcataagttaagaatctgagaggaggatatcataaagacagctttccgcactcggtatggacattatgaatttctggttatgtcttttggactgaccaatgctcatgtagcttttatggatttgatgaatatggtattcaaggatttctttgatatttgtgttattgtatttatcgatgacatccttgtgtactctcagtcagagcatgaccaacatctccggatggttttgtagggacttcgggaacataagttgtatgccaaattcaagaagtgcgaatttttgctgtcttaggtgtcttttcttggacacattgttagtaaagatgggatcaaagtggatccgtgaaagatagaatctgtcagggattggccaagaccgaaaacaatgacagaagttataagtttcttgggtctagctgggtactatcgtcggttcgttgatgttttctaaaattccaacacccttaaccaaactcaccaaaaagaatcagcattttgtatggatggataagtgtgaatcaagttttcaggagctgaagcagaggttaattacagctccagtgttagctctgccttttgataaagagaagtttgtagtttactgtgatgc

SEQ ID NO: 246350 - DNA, 566 bp, Cannabis indica
cacctctgcaaataaatcgaaacgaattaacccatggagctgaacaatatagcttaagcatataatattagttgactatagttacctgaaaaaggcagtaagagcaatgatagcagcctgcaggatgttaccatctatttgaccgtccacaagttggctggagttttctgctttctctgaatcacctctaaggactggaatctgtttaaggacgccgatgacgtgctcgagaaacagaaaagaaagtgttgtatgctgggaaaatgcctaagggacacaacgaaagaaaacaaaatgatgcttcgattttcatttctataatccaccaggaaaataagtgtgtcaacccttttgatgcaattatgaataatgcaatgttttcctccaacacagtactttgcagagttcagtgatggatttttttttttaatttaaatagacaaatatataaataaagatttatcttccaaactgtccaaccaaaaggagcttcaacagaattagtaaaattatgatccacttaaggaattgagaattaatgacatattgtagtccacaaaatgtac

SEQ ID NO: 246351 - DNA, 915 bp, Cannabis indica
caattatatgcgtgtgtggtactgtgagttttcattcatgttatagaattgtcattactccaaatgtgatttagaatgaaccatttcatggacaactaattcttttttgtcataatagtgaaactatggatccatacatgcgatacagattagcctctcaagatactgtagaatttttacagacatgttgacaaatgaaagtactgaaaagaagactcgaggtcctacacaaatgcgtaaaatttgggaaaatcgcgatgatgtgaagataaaaattacatgtaatagttttggacaaccacatgatgaaaatgtagacaaactttcaagctttattggaacaataggacgaaatggaaaaaatgctccaattaattataaaaattggcataaggtacctgctaaatacaaatatgggatgtgaaaaatcgtacaggtattaattatattttaatttgaaattttaggttacaaatttatgtatttttaatatttatcatatttcattatattttaaatgtgctaaaaattagtgttattattcttgcatgaaaaatttaacattccttttaatgctaagacttggacttttagattgtttggtaaaaagcttagagagtggaaatattttcttaaaaatatttattatttagaccacttatcatttgaggaaaaaaaaatataaggacaaacgagtatatagggatcaatgggaagagttgatcaaatattgggcaacagataatgcaaaggtattttcgttcaaacttgccatgtatttactttattttgaacaaatttcattaactcaattgcactctttgatgttgttctagagtaaaagtgctaaaaataagagtagttgtgcaaaaaaagaatacaatcatacaattggcagaaagagttttgcacaac

SEQ ID NO: 246352 - DNA, 928 bp, Cannabis indica
gtggtgggggacaatttcaatacccgaagcggggatggggcgggggcggggataatactatccgcaccatatccgaccccgatatagatatatataattttttttgtttttttttcaaactttgacacatatttagtttttattttctattaggttatgctttttttaagtaggtttattttttatcttctatgaattatgaatgcataataaatatttgtgagaatattggtttaacttatttttttcaattattttaattaatttgttttttcattttaccttaatggatacccgatgggttccccataaccgatgggtattcccctaccccgaatccgttggttattagacggggatggggcggggatgggggtataaataggtagcggggatgggggcggggattgcattccccgtacattaaccgaccaatttccatctctaccttccattattattaagccctataataattgcataatatatacttggtaattagtcatgaaattaacctcattgtgtttacttttttacacttaaccctgtttttttttaaggcaatactcacttaaatttactttttgtttgcaaatttaaaaggtcagcaaaattctacgttgaatatcaacttagattgcaaatgtgcacaggtaatctaatcaaaacctatcacataggtacaagtgtacacactgacaattcatggaatttattaatgaaatttaactataacctcaaatttgcaaacaaaaataaaattaagagtattgcccaaaaatatcaattagtataacaattaaaacataacaaatttggagaccaatattatcttacaacttcatgagtagatgactaacttttctttatcttttaagaaaatatcgaaaagagttgctaaagaacacaaggagctaggcacacctcg

SEQ ID NO: 246353 - DNA, 757 bp, Cannabis indica
attttattccattcctattccaattctcattcttattcctattcttatattttcattcctctcaaccaaacgctatctatgtgtcattaattttattaactttaagggcatttgttcgtttgttataaattttttgaaaggtaagcctattttcatattttattaaactattattttttatagcattgttacaacgcaccattagtgttggcaattattttaccaaaatctaaatttattaataagtatgtttgattatattctataatttaataccctaaacatgaattttctaaacaataaattaaacacatataaagttcttgaaaactttacattggtagcaatagaatattatgactctttctgttcagatctctaacccttattcctttgtgtcgcagagtaataataagatttaaacctggatctccttcaggtgttgaaattcttcacaatcttacacattatgatttaatactgatttgatataagtgggcaaggtactcttatcactataacgacaaaatttagagagaatgagagaactcaaaaattagaaaggagcctctcttttcaattttctgacagaataaacttatgtatagttgtcaggttatgagtccatcatattctatttataggctttcatctagggttaggtttaaattatatagaataaaaaaaaaggataaaaatggcttaaaatcacttaagtggccgacctctattgtagaccccactagttacaattttg

SEQ ID NO: 246354 - DNA, 616 bp, Cannabis indica
aacatctctgtgataacccatgcactcaacaatgatcctagccatcaggcctgttcaacaaaaaaggcggttgttggataaggagcgtgcccaggtactcaaggatgatgtcgaatgactaagggccaatgacttcataacataagcattctaccctcagtgggtgtccaatcaagtgttggtacctaaacccaacaagaagtgaagagtctggattgacttcaccaacctgaacaaagcatgtctagaggattgctttccactgcccggaattgaccagctagtggatgccacgacttaccatgaagtcctaagttttatggatgcatattcaggttacaactagataatgatgtgtccaactgatcaggagcacagcagcttcatgatagatctaggcctatactactacaacaaagccatgccatttgggctgaaaaatgcagggtccacttatcaaaggctggtgaacatgatgtccccagatatcatcggccgtgacataaaggtttatgtggacaacatgctcgtcaagtccaaaaacgttaggggcatgtggaggacctaggcgagtgcttcaaaatcttttgctcctacaacatgaagctcaactccc

SEQ ID NO: 246355 - DNA, 1061 bp, Cannabis indica
tgatcttcttggatagactgggtctggatgtgtgctcttaatataagccttcgtgtatcttatggataacaacacttatttctgtactagctatgcactttagatatggtactgataacacctttcagtataatttttcatctagaattacatatctgggagcttggtgttggatttttaaggttgtactcttgttaggaggaaattctttagaacatagaaacttgtataaatggcctattcaagaggtggagtgatcaatggagtttaccctcagtggtttgtgcttggaacaactaggtgggcaatgggaacaactcaatattgctaatcagattagttgctaacttttccaacatatccgcaaagacattttggtcctgggggacctgcctgatggtgtatcatttaaagttttgaagtagctctctgaatttgaagacataggcagccaccttctcacttttagcttgatattctccgggtatctgattaaccactaactgggaatcactatagacttcaatattttgaaccctaacttccttggccaaattgttggggaagtttttccattcctgagcagtaggtctttgtacctgagcaccaagcctatcattcctcataattttgcctcatgaatcaataaggtagccttgccctggggcataggcaaccttctttttctacagaagttggttggatgggttcttattgttgcgtggagcatccagagcagtcttttttggagggtcacccataataccttttcctttatcctttgtcgaagcgaaaggtctaacatttgtgggaatattatcttctggagttggctcttcagaagcgttttcctcaggagcctcttctttaggctcgatcttggcttgtagtcgcgccagtgttttttgcatttgacaggagaatgcttcctgagctgccaacttctttttggtattggtgagtgctcgagccatccaaatcactttgggatcttgctcataataatattctttgttgttttgttgtagccatcatctccaagattttcctcctcgtcatcc

SEQ ID NO: 246356 - DNA, 744 bp, Cannabis indica
aaagagataaataacaaaaaaaaaaacttaccactttatctattcacaaagaacaaatatatatatatatatatataaataagaaagtttaccatattctggaggttcttctccaaggaaacatttcatccacattgtcgggcagcagctggagggaagcttcgtctttgtggacggtgatgcttcgtctttgtggaatagtccttcaaaattctttagggtttttcaagagcaaaaatgttgggtatgaatatagaacataattttttctttccataatttatattatttaaatttattattaatattcaaatttattaattagcttttgttattaatactgataagtttttcaaatttaatttataatattaaaaatattaagttttaaaataaaaaataaataaatagaatgcatctaagccttacatgtgtcaaatatttatgatttaacggaattagtagtaacggtgtaagagaactgtaacattgggtatttttgccaccaataataaagataaggagtgtataaaagttaaaatatcaggtatttatgccgccattacaaatactaattttctaagaaaatgactaagtctgaacataaagtagcaaataaatgagatattttttcttgattccaaaagtgttctatcatcttattctacatatgttgatcccactgtctctgttgtcttgacacaaccaaagaggttaatgttggaatttattttaccaggatct

SEQ ID NO: 246357 - DNA, 844 bp, Cannabis indica
ttaaattagccctacccaccaggataaggtcatctgcaaagaacaggtgggtaatgataggacctctcctactaagtttaataccatgtatattacccttcccgagagcttcttccagaagtctcgagagaacctcagcagcacagataaacaggtaaggggagagggggtctccctggcggaggccacacgaaggcataatctgaccaacttggcccccattcaagcaaatattaagagaggtggtggtaatgcattgcgaaatccaagaacgcagcttcagagggaagccatagcactccatagcgtgatcaatgaatctccaactcagtctatcataagctttaaccagatcaattttaattgcaaaatatccttccttacctttctttcttttgaaagaatggatgatttcctggacgattacattattatcttggatatttcgacctggaacaaaagcagcttgagtaggacagatgatagaaggcaaaataggttttattctgttcgcaactaatttggatatgactttatagataacgttgcaaagagagatagggcgaaattgactaggtctcttcgggttcgtgaccttaggaatcagaactacatttgtagtatttattcctttatgcatatggccatttctaaagaaatccgacactgcttcacagaaatcatcacccaccgactcccagtaatgtttgaagaaaagaacggacattccatccggcccaggagctttatgactattcattgcaaacaaagtcctcttgatttcatccctgtcagggcactgaagggtcccctcctggtcctctatagatagcctttcccggaa

SEQ ID NO: 246358 - DNA, 1687 bp, Cannabis indica
aggatacaatatcaagcgcactgatgtgtgatgatggagagaattctctatcaaagaggactcagcatgccgtatctaaggtgtgtatcggaccctgaagctaagcaaatgatgctagagatccatgaggggttctgtggagatcatacaggaggcccaagtctctcaaagaaaatattgagacaagggtacttctggcaaacaatgaaaaaaaaattgcatagactacgtccagaaatgtgattcgtgccaaaggttcgggaacatacctagagctcctcccaatgagattaccctgatgactagtccctggccctttggggtctggggaatagatcttattgggtccctactggagtatgtaatagtagtagtagactacttaacaaagtggacgaaggctgagccaatgaagactataactgctaaaaaagctctagactttgttatcaaaaacatagtctgttgatacaacttccctaacaaaatagtctcagacaatgggaagcagtttgactgcgcagaattcaccaacttctacaaccagcacggagtcgttaaaaggttctccgcagtgtcaaggccacaaacaaacagacaagcagaagcggtcaacaaaatcctaaaggtcaccctaaagaaaaagctgctagcatgcaaaaacaattgcctgaagaattgccgagagtattatgggcgtaccggacaaccccaagaaccacgaccgaccactcgccattttcgatggcgtacggttgtgaggcaatggtcccggtggaaacgttattcccatcccatagaagaacaacttacgatccaacaacaaacaaggctttattacaagaaccgctggatcagattgaggaactccgagatgagtctcaaatacgaatggcgacttatcaaaagaaggtggctaagtactttaactctaaggttaaaagtagaaaattcactattggtgatatggtcttaagaagagttttcccagccactcaggagcccggagtgggggtattgggacaaaattgggaaggaccatatgaaattgaggatgagatcggctccgggacctataagctgaaaagaatggatggaaccatggtgcctagtgcctggaacgctgatcatctccagaagtattaccaatagttaaaaaatgtaaacttaggctttgttaagagaatttgtaccgatatgcaacctcttaatttataaataaaactgagtgccttcaaaaaaatattttcatgccactcaggggggtagtaaggcataccacacagacaaatgtaaaacaggccaaaagtaaaattttagcaaaaacaagtaagatatgtatctacgcaaaatatatatatttaaatgtaaatataaaagatgtcctgacccaaaagcaggtcctaaacaaatattaagggcctggggacgggccttaaaaattgtctccccttaaaagataataattaaattgtctggaaaaagggaaaagaggctgtaaatgtaaagataaaaagaaagaaatcataatggtgaaattggctggcttaatcgacacaggatggaagacgagggcccctgcgctcctcaagcaaggtgtcaagtctcttcttcttctcctggaagcgaacgaggacttcctcaagcttgggataaaagtccaacttgatgttctggccatttgact

SEQ ID NO: 246359 - DNA, 576 bp, Cannabis indica
acttgtatccctcaaaaataggaactattaagccttatttacacaattaaataataaatattaaatgggttagttataccccatgaataagggagtggctgatatttctctctgttttcgttggttgttgaagccacaatcgcaacttagcttactctgctcaaatgaaggctgcgcaccaaatgcctggtaggtgcaggctggctagctaagtatgtacgtggacggtgcaggctgggcagcccaataatagttggaggctggccggcctatgctggccatagggctagcgatgggtggccggccaacccccttagggtggctggttcgtcatttctttgtcccgcataggcactcagacttcctgtcaattgaagtgttgtgtagatgacttgactttcttattgtaaattgtacttcacgtggtattgattttgtccatgtacacgtcacgtggacaaaaataaaaatgataatatatatagggatatgattttgtctcgttattgtactttcacggattgtaatctgtgatgtacaacagccgtcagatgagggagttatttgatctgacgg

SEQ ID NO: 246360 - DNA, 1054 bp, Cannabis indica
tcttaaaccatgtgagactatttaaaagcaaaaactctggagttatgttagcaaagttagttagataattttaaagcaatttataaaaatagataaatagtagttgaatgattttttatgcttacaaaatttgtaaattcgcttctcatactaattttgaagtgatgaattgacttcttatactttttatcaatatattttttaattttattattttgtgagaacttcaaattttatgttaaagaaaaaaactgttatatcattatttaataaatttttaaaaatctcaaaaaggattttatttttcaaatattaatattttaactaatttgaaaatattaaaaatatatattttattaaaaaatttaataattttttttatttattaattttttttttaaatattaaaattttaaccaaaaaaaaaaaaataaaataatatatattttattgaaaaaaaagactaaatgggctagattgatttaattaatcacccattatacaacatttacaatgcttactaaacacccttatatagcctataataccatattttcaaaagtttttaaaccatgtgggattttttcttctcctaaaaaactcactaattttgaatcaaataatcaaatttatatgtttggacttttatttaaaggtctcttcttttcactacgtttttatattaattattttaaatgagcttgacatattaaaaaattatataaataattacgacaacaactatgactaaactaaattaataaataaaaaaaataaaaagaattaaaaggtaaacaattagatatatatactttcttgaatttttagaataagaacatctcatgaaatttttttctaaaaaaagtttaatcctaatgcaaattttatatcaatactaataaaattagttagaagaacaaagaaaatgaataataatgcatatatttatattcatgagattaattagaaagaaaataaataaacaaataataattcttatacataccttagagacacttacatgatgatcaaagaataaattgaattaagattt

SEQ ID NO: 246361 - DNA, 569 bp, Cannabis indica
aaaaaaaaaagtagccccaacaaatagaagaagccataactcaaagcccatttgacactgcaaataaactattcaatctactccaaatgacagcataaacaccacagacaagttaaaaaccagtttgaaggacccaaatatctgcaccttcactcaataaataaattctaattcaaaggcaagaaattcaatgcaccttttgggagggaatacagctgctgacgatttctttgtgaacgtattctacttgacaactggggcattgcattgatgagatgcccaaatgtcactacggaattcttgtactcgttgtatctttctcctaaaccatttctatgcctgcaaagcaaagccaccaaattagtctttcatagctatatatctcaaaattttcctccctagttacgtatataaaaacgcttccaattatatatatgcagaacaatgtagaaaccatgtcgatcaaaaccagaatggtccattaatgtgttgatagtccctgtatatgataaaggtgtctgaattgatttcagataccttataggtagactctgatcctatcaaaactc

SEQ ID NO: 246362 - DNA, 922 bp, Cannabis indica
gatttgactatggatttcattgagggcttacccaagtcggagggggtcgacacgatacttgtggtggtggatcagttgagcaaatatagccatttcattcccctcagacatccattttcagctcgtacggtcgccgaacactttattcgagaggttgtcaagcttcatggcctcccttgcatcattgtctcggatcgggaccgggtctttttgagccatttttgggctgaactgtttcgccttcaaggtacttagctgaggcatagcaccgcttaccacccccaaacggacggacaatcggaagtggtcaatcgttgtttggaaacgtatcttcgttgcttcgcttcggatagacctaaggcttgggctaaatggttatcttgggccgaatactggtataacaccacttaccattcctccttgggttgtacaccttttcgggtgctctatggacgtgatcctccacccttggtccgttactcagatgggtctattgctagctgtcgagtagtccttggaagaaagggatgggtttctggatgattttaagatgcatctgttgcgtgctcaacacaaaatgaaagccgctgctgattcttcgcgtcggcacgtggaatttgctgttggcgaccatgtcttccttaaactctacccttatcgacaaaaatctcttgccatccgcaaaaacgagaagttggctgcccgtttctacggtccatttaagattctgcagcgagtgggaccagtggcatatcgtttggacctccccgtgtcatctgcggttcatccggtgttccatgtttctcaactccgcgtggtagtgggcacagcacattcttcactaactattccacctacattgactgctgatttggaattagtggtggaacctgctgagttgttgaacgtgtgtcaacggcca

SEQ ID NO: 246363 - DNA, 665 bp, Cannabis indica
ccactcgacacacctccccacatacacacacaactcacgtgcgagcctcccatgggctcacatgcaagccctcacactcctgcacttcccacgcatgcctcaagttcaacttgccctagggcctccacatggacttgtacgcaggtcttccatgtatgcgcacatgtatctttatcggagtcacatggtaacctttgggatagcacgaatgtatcctgagtcaggaatacttcctttgtgaaatatgcattaggtgagtaggctagctcggtgcgctctcgcgtgtctcttcacccttgggtgaataatcccaaaaattaagagcgctaattttttgggttaacataaataaataagtatatattacaaaatatagagtcatgtgtgtattataggaataaatgagtaagattataatcttactatgataattatatgaattaagattattaatagaaatgtgggaaataagcataatttattaattacggcgatatttttggaatatatgaattaaatacatgcagtttgtgaatttaaaatatttttagatatggcaaccatggaaacccaatgcattgggtagaaagtcacatcaatattagtataagtaatggttgaattgggtagttttattggtgttagttttattagagtagtttggg

SEQ ID NO: 246364 - DNA, 1689 bp, Cannabis indica
ataaattgaaataataatgaaattttggtaaatttgaacaaaaaaacaacaactgtttgcataaaaaaaatattaatgcatataattagatactagagggttttaatctgtaaatagttattataagttattttccagtaaaacaattgttgtttgggatctgcaaacaagaaatgatcaatctattcttattaattactgaatgcttcaaaatagttgatttgacagataaaaatagtcgtccagatcgaaatgttatttgcaaatgttgttgctgaaaagagttgtttattagtttttttgtcagattgaaatagttgtttgcaacttctgaaactaaaacaaataattaatttacatgattttaggagacggaaccattacaaaatttggtacatagcaatgggtattgggatgacaacaaaaactatgttgaatatgaatcaagtggagaattaatttccagcaaatgcacttttgatgaactagtgagaataatgatggaagaactccaatgcaaccctggaacaacacaaatacaactgaaagaaggaggccaaccactacaaatcaaggatgacaaaattttgttgttctacataaagctattaagcaaagaggttgatttcacaaggtacccattgtgtgtgaacaaagtcagcagcacaacaacacctaacaaaacaatggtgtgcaacaatatgatgatggaatcatatgacaacaactcagcacaggcagatttgtagcaacctggaaacaacccgacaacaacttctaagcaacaactatgtgctcacacagttggatcagttcaagattatacattttttctagaaacagggagcgtgacattagaataaaccatacaacaaccagaaaacaacagagaaaaaactacaggagtagatgaatatttcgacttcaccgattacgcaaagcttgtggctgcagaaatggtacagcaacttgaaaacaaccaggaagaggaagaagaagtcgacaacatagaaatgattatcatcactgacaaacacatgaaacaatagaaaatggacaaatttacaaggacaaagatacattgataagtaccctatgctactttgcaatcaagaaaacatttcaatacgaagtagtgaaatcttgcacaaaagaatacaaaatagtatgtttggacacaaactgcaaatagagtttaaaggcttcaaaaaatggaaacacagaaacattcataataaggagctaccaagaagaacacacatgtgagttccaataagatttggagatcaacgacaagctatagcaaagttgataacagatttcgtaaaaccaaagttcttgaacctgaaaacaaagtgcaacccagcagacataaagggagaaatgaaagacaaatacgaaatacagataaattacatgaaagcatggcatagtaaagagcgagcacaaacccagctacatggaaatcctaaagagccgtacaatctcttgccaagataactgtacatgctaacaaaaaaaacaaatccaagtaaagaaaatattttttttcaaaaatatttgttgaactgaaaacgttgtttttgtgttgctaaatagttgagtaacagttgctttaaaatactgtttgattgaaattcaggaacaataattgacatagagaaacaagatgatgatagttttaaatat

SEQ ID NO: 246365 - DNA, 616 bp, Cannabis indica
aaacttaattttttttatatttattttcaagtcttatggtatttttgataagtattgctcaagctttgttgtattggtgatagtttaattattggtgatagtccaaactgcaaaaattacactgctttgtactattctttgtagtgcagtttctgcggttttttagtttcgcggtgcaggtgcagttgggaaaattaaaaaactacatgtgtgaattaatttaaaaaaatagtcagaaaaacgcatcacatcacttgcactacaaacacccctaattaacactcttaattaataagatgaagtttataagataaatcaagctctatatgatacatattgaattatcaaagcttgatatttgactttttccttcttcattatcattatatcattatcatcacctaataaaaaacccttactagtaaagcaaaacaagatgttatatgagataactatgtctctctccacctcttattttttctttttttttttaacttaatgttgttgatgaatattgtatcataactcaactgaaaaagtcatttttggtaaagtaaatatacattacttttatattcaaatattaatataaacaatccaattcaatccacctttt

SEQ ID NO: 246366 - DNA, 612 bp, Cannabis indica
tccacaagatttcttccgatggaaaccttatttcgagaatgccgttccagatgtcatctaacttttcattactagaacaacttttggagatccttacatttagaagaactataccacaacatattatcacacaaacgaatttaaaaaatataaagtgtgaaaatttaaaaatatattaaagtcgtaaaagaaagaatttaaagagaaaacccatatacacggtgatttcctaacaaaatttatcaaatactttttaactttttttcaacaaaaaaatgttacaatactttttttcaaaaattattgaataaagagaggtaatactttttactgtttttacttttcaattatattataaatatattaataatattaatatttaagaaataaaataaagtaataataataaatgaaatattctattctctctcatctgtcgtccaacttccaaccaatcaaaaaataaatcaaaacttttactgacctttttctaccctctctcatctcctattctcctatcttatctattatctaagtctgactctctaatgagtcttcttctctttctatattttccataaaaaaaaataaaagccttaaatctactagagt

SEQ ID NO: 246367 - DNA, 1021 bp, Cannabis indica
tatacatactctccactttttgtttggtttgggcaccaagacaggattggatacccagagcgggtagaaatcttcatgatgaagtgattggcactcagcctatcaacttcgtcttctagagcttgtgcgtgctccttatgcaataatatccttttttgttgtacaggtcggaagtttggatctatgttcagggcatgagtcattacagatgggtctattctcatcattcatcatgtcttcatgtgaccaggcgaagacgtcaaggttcgcccttagaaattttatcaaagctaattttatttttggcgctaaacccttttcaatcttcaattttctagtcaaaagagtggggtcaatctccacttcttctaactcctctaccggtccaaagctttctgcaggatctccaaagtgaggatctaaatctgcctccccactatgggttgaactttattatcctttgccagactcttggttagagctcttagcaagcatcttttctttcttggctttagacaaagctaagttgtagcagtgtcgggcagattattgatctccctttaggcatccaaccccatgtcttgccaggaactttaggcataggtggtaaattgacgttactgccttcaggtcgtgtagggctagctagcctatcgttgcattgaaggctaatggcacattgattactacaaactgagccatcaatgttcttgtagtgggactttctccaactgtcagaggcagtcagatgtatcccaatggtgcaaggccttggccaaagaagtcgtacattagttgtgtacaagatgctagatctgtcaattggagccccatcttttcataagttgatttgaaaaaaaaagttggaagaggccccattagcaatcatgcacatagcaaccgtcatgttccctatttgtgaagttatgaccagggggtcaatatgagggaacctaacctgggaagcatctcctccggcaaaggatatggcaggttctccaagcttaagctgcttggagtc

SEQ ID NO: 246368 - DNA, 530 bp, Cannabis indica
agtgttcttttctatatttataactttctttttgttggctatttattcttcgagactcttgtgtaaatcccaaacgttgtttgtcatttaaattctaattatttaatttttctatcttgtgatcaatatttgttcaaattgtttgtcctaaaataattgtcttctcttatttgagcgttaattgttacaattccaactccaagagagtcatctctcccattaaaaaaatactttcaatgcctgtgaggaaattggagttgagacctttacgcttttgagatttttcgatactatttgtgttatggatatggtttggtgtacacacacacaactttggggttacaattgagtagtttgcatagcgatttcgaatttcttgatgatatttttttttatgcttggctagttttggttggttcgacttgattattcagcttgataattttcttctccgcttgaattgcaagggactagcaataagccggttgggagttgtgattggtggtgaaaaatgcatatttattggtctc

SEQ ID NO: 246369 - DNA, 558 bp, Cannabis indica
tttatttaattttaaaatgaattttgaaaaaaaatttcaaagaataatattacgtataacaatataaatgggtcatgtgtataagagtatacacataagataagcagtctataatgacagttaaccgaatgataccttaaatttattactagttcgaaggaatttaccgttaaaatttaagctttgaggattaattgcaagtgaaacaacactaaaaaaagattttgccagaaaaaattctgaaagaaattagcaagtatttaggtcatgtagtgatattggacaccctggtaatagtgtttttgtttgaaaaaatcttttaattttgtacaaacagaggttgtagcggtatctcatcacgatgacaaaaggtttacgtcatgattattgtgatgattgggccaagaaaggaaaaggagcccacacaaaaatttccccacgcttccaacacccccgtgtcagtatcaattcaaccaactaaccccaaccccttccttccttcctattcttcttcttattcaaaaaaattcttcttctattattgttaccacatttttc

SEQ ID NO: 246370 - DNA, 589 bp, Cannabis indica; identical to SEQ ID NO: 86891

SEQ ID NO: 246371 - DNA, 586 bp, Cannabis indica
cttttattttatttttttataattataattaaatgtgtaaaattaataaaatatttgggatatataaacaaggttataaaccctagacttcttcaacacacctattgaattccttatctctctctctcttctttatgcggcagacatgcccagctctagagaaaaccagaaaaatccatgcttgtttacctccggctgtcgaggaaccaagaccccaacggaaaatgcccgatctcctctccctctctctccctcttgagcctattctctctctttaatctcctatatatttctttcgtctctctctctcctcgacggaaaagagccacaagacagttttgccggtctgccactccctcgacctctctcatctctgttacacgagctccgcgccatctcatctcgaactttcatctctctcttcgacgaaaaagggcgacaactccacctctcgcactgcctcggatgacagtgtgaacttcgaacggcgtaggtttgagtttggcattgaatagctgttcaaaatttttgtatttattttattcaaagacttaaagattttagttttgattgaaatatatgtttg

SEQ ID NO: 246372 - DNA, 491 bp, Cannabis indica
taaggttcccccggggagcgattggtgccaacgctccagacgtaccccctgtcgctccttggggcaaaggtcctgctgccggaactgggttgagatgaggtagccagttcttaatccactcgtagagacgacccaatcgaatcaagttttcgacctcatctttaaggtttttgcattcattggtgttgtgtccaatgtctttatggtattcgcatcttttgtagggatcccttcgggagctatctctatacagaggaggcagtctctggtagcgcgtattttgcctggtggcgaaatacacacgttcctgagagtccgtcagttccgtgtattgggtgtattggggagtgtacccccttttctgtcgcttgtcctccgtccggttgctacctttcgaggacctcttgctccgagagccttgagaaggtcccactaggcttacagtaggagcggggtgagacaggacaggtccacttatcccagaaggattc

SEQ ID NO: 246373 - DNA, 725 bp, Cannabis indica
aacttttctaaaagctaccccaacatgggcctcaataggtgggctggccatctcctcatcataatgccccaaggatgatccctctggatggacagttatctgactcgcttccaacttgctctccaataacactttcccttgagccaatatgctctccaggaaggtctcatcacccatgtatgaaaggtcagcattagagttgcgcaactttaactcatagataaaatctgaggacaagttgacgtactcatcccttatggcttgctggccatcaagggctgctctcagcttctcctcataccccacgaggtcagcctccaacctggagatggtagtagcttgcatggtgttctcatggttcctagtaccaagcatggtctccaaaccagaaatcatactctggtttcgcagagtaagagcctccatctcagatatagtctggtccttcgccaggagggcaacctctaaggtcttcacctgctcctaaagagccctcgaggacccccgggagttatcacatgaaacactcagcttcatcaaggcctaaaaagcaaaataaggtctaaatcagtgtcaaagcacaacactagcaggcaagccctttcccaaagctgctatggctggccagctcctaaaaggcacatcactagtcggccaaccccatgcaacatcactatggctggccagcttgcaaaaatgccaaaaaaaaatgaagcaaagttaag

SEQ ID NO: 246374 - DNA, 918 bp, Cannabis indica
tttaaaattatgggcatatatatattgacaagcgaaagaagggcagagaaggtttttttgcaattaagatcgatcttgttaaagcttatgacaggcttagttggaggtttattgaccacgctttggattgtgttggattccctcagaagttccgctcttggatttcacaatgcatttccactaccactctcaacatttgtttgaatggaggcctcgccggaaagatcatgccgtcgtgtggtctccgacagggggattccctctccccttacctctttatttgtgctgctgagatactctcaaggcttttggaagaggctcttggaaagggcactatccatgggataaaactgtgtaggggtggtccgattattacccatcttttctttgcagatgatcttatcctggtagggagggccaacctaaatgaagctaacagtgtctggaattgcttggagaggttctgctcttggtctggccagaaagtgaataaactaaaaacgtctattttcttcagtaataatacccctgtcggtatgaggagaggaattaaggaagcgttgggcataaattcaccggaaggtgctataaattatctgggtctgcccctgttcagatctagacagaaggatgctgactttaatttcatattggaaaatctcacctctaaattgcagggttggaaggctgaaacgttgtcgaaggctggtcgagctactcttatcaagtcggtaggattgtcgatgcctatctacgcgatgcaaaccaccaaactctcgagtcgtatggtcacgaaaaccgatggattagtcagagatttttggtggggttttgaaaaaggaaatcatggtcttcatttgaaggcgtgggacaaactgtgtcttcctaaatcattgggtggtctaggatttaggaaaa

SEQ ID NO: 246375 - DNA, 720 bp, Cannabis indica
ataaccgtaatcctggttactaattacacccttcctagcattaaaattgaacaagtataaccccaaaattcagattaagtaacaaggaataccaagctcctaacttcagcatgattcaccacaaatccaacatttaaagctcaagtatttaacagtaaatcccagcttcaacaatagccaaaatcacaattataaacccacaaattacttcaaaaatacaagagaaacatcctacacgaatccctactcaaactagcatgaattaacaagatcacaccaatatccaattcatgcataccaaaaacatccaaagctttaaaatcacaattacattttcaattttagcaagaattcaaaaattaaatcagtaggtacactacctcaattccttgcacacacaagcaccaagaatcaaagctccctaaagaaatttcccaagcaattcacttcaattcaaggttgaaattaaaagagggtttgagagagagagagcggtttcggtaaggggaaaaatagactaaaaaattttcttaaaaaaaacctttcttttattacatataatccaacggtcaaaatgaccattttgcccctagggccaaaaacatattcatgcacatacaagggcattaaagtgatttcatgcttatttaaattcaaataaaatttcagattaatcactaataaaaaaaatgccaataactcaatcccaattgcatttcg

SEQ ID NO: 246376 - DNA, 907 bp, Cannabis indica
tgtttgtgtttaaggttttagaatataaatgaattagcgttttccttgttttgttagatgttaagagagctcttatagctttggaaagaaaagaaaataaacgatactttaatggttcatttgcttttgtatctttgtcatgattatgttggcatagggatgtagagcaaagtctcttgtttgtgtttttggttttaaagaataatacatgatttagtttttctaattgataacggaatagtttttctaattgttcgtggaaggtttacttgtatcttttatagtttaagtgttgtgttttgattgctttgaatctgctgttctactctcacccaatggaatagcttaaagatgctatcatcttgctaaatcagaactgaaattgtgtaattctatcatgaggctccttgcataacttttttgtaccaatttgaatgataaatcttcatgcattcaaggaaaaaaacactgaagcctttctatctatgcttctcaattatgtgttttgttgtgcttgttttagtatgttttatgctaaaactaatgtaaccacggttttcctccgccacaagtgagggttttcaatatataacgggtagggcccagtctaagacaattagagcttccctttcttcataaatggactgtggcactcaaaggttttggaagtggaattccctcccttggtcctcactctcgtttaagaagagataagaatattttgtagaagctttagatgattaaacatattgtgctagtggaaaggagcagaggcaaaaagtatcctgtgtatgaagcttctttgtttgaactattagcaagtgtatatacgcagagtcaatcattatgttgcacaactaaataaaattacttttgttgttttgatgagatcagctttaaacttttc

SEQ ID NO: 246377 - DNA, 1744 bp, Cannabis indica
agctcagaaaaaaccctccttacatctaaaaaaattgtctccttcatgattgaatacgcagagaatgttaacatgcaacatgaagaaactcatcaccatcttggaaaggagcccatgggctccagaaggccttccaattcacaatctaaacgggccactcactccaggaggactcaacctaagggtggccccaatactcagaccactcgttccaggaggacccaacctgaggctggtcccagcacacgaacgacacgtttgaggagaactcagcatgagaatggacaagatcccggaatgacagatgaagggcccaatcgtggcggtacttagcccatgggtgagcgtacttatgaaatggaaaacccaacaggaggtgccaatcctattaattagtaaatctgattatattgaaatgggttttatttagggcagaaaacccaacaagaagtgttgatccattcatagatgatccatgggccaattcaagttcaatacaattgtccattttttcaagaaaaattgcgcatttattaaaaggatgaccaatgatcccattctccatataatacttagaaagtcgctcgtagcgaaattcaacctataactcatctggtatttttggtaacgtgatcatttttccttagagtaaaggttgtctaatatcaagtctaacccaaaaatgaaggaaagggccccaacattcattgcacgagttgtcatatacttccaaaaatttaccaattaaagagccgaaagctttagtcaaagaacgtgacttacttaggaacggaagcctataagcttgaacccaaaaaggaaaaaaaaaaaacccattgaatatagtgtgacattccgtagaaaagatggcgtatgaagtataatgtgttgattttcaaaatgccaagtctcactactacaaaacaaacctttagaggcgcttttttcagcataataataaataaccgacgccatagggttgaaccgacgccatagggaccctatggcgtcggttgttatgaaccctacaacatcacttggaacagcgtcggtagcgaatttcgccaaaaccaacgctaaaagtccttaaaaactgcctctaaagcccaattttgtagtagtgtctccatccttagagccctttctttgttccattacaaccaaaagtaactaaaatcaaacccgagtgatgcttagtaatttttttttttgaaacagctatcccaatgttgagccattttcctttgcaatgtaaataactaaaccttcatggaagtcagtatacatacaactagaacaagttccagagattcaggtggcagagttaccaccgtcagtaatgacaaccaccgtttattttgttcaagtcaaagatactgcagatatgatatcattagttaaaggatccataggatgcaagaagaaagtaaaaccaaaaaagagataagagaaagaagaagaaaattagaagagaacaaataaaaaaaatgaaaaaaccgaagtttttgcaaatgtcaataatgtatacaaaaatataaaactgtatacgtctacagaagcagaatgtaattctgttactgcagagaccagttttgcagtggccaaaagaacagacagaatataaaaataattgcagaaaattaaataacttgacacaagaaatttgtatgtggtatttgtgttctttcgaatactcctagtccacgggccacccccacgagaatgaaatcaattaataaagtat

SEQ ID NO: 246378 - DNA, 499 bp, Cannabis indica
atttcagtataaaagtaagtacgagttgaacccataattgttgtttattcaattatttaacaattaatgacaaagttacaaaaaaaaaagttttgagattgagattaaaatagcagaaattaaaatagagcaaataaattaaaattgagattatgatatgagaaactagttaaaggttatttgtcaccctcaacaatcattcctaattcatattaaagaatgttattttcagtttccaatcaaattattaaccctgtagataacactgaagcagtcaattatcgcaatctccctactgtatgtagtcaaagtgaagcgctcaataattaactattttacctaagcagtaaatccacgaagcatgtaatttatttaacttagataaaactttgagttttatggagatagactaatctaggcaacaaatcaatgaaaacatataattcatttaacctaggttccattcttcatcacaattaaaattgcaatttgtcacaaa

SEQ ID NO: 246379 - DNA, 787 bp, Cannabis indica
ttgaagcggggacgttacatacgttggctctaaaacatgcaccatatcgtagagcttgtcgtaggctttgaaacagtatatttaacatccaaaattgacaaccgagtaaaaaattatggccaaaatacgaaattcgactttttcaaaaactgatcaaacgaaattccgattggtacattcggaattctagttctgaacaaccaagaacacgattttccttaacttgaaccctccaaactagctctaaacctaaccaaatcattcctaacatatataccatatatacaacaatcatttcgtaacagaaattaaaatcgagcccttaaacggaaaatgccattaaagctcggacctaagctttaaaaagttccaaactctcgacctcaaattcaacaagtaaatatcagaactattcccaagactacccgagaataattttataaggtcagaactttcataactattctaatttgtaaaatccctatccgaaaccaattgttttaaacttaaaactgaaataaaccttaccttaagcattcccgctgtgagaattttctatcccgctactaccggagcatatatcgcaaagtttcggattgaaacttgaagaaaataaatataacgggagagagttttgacacagaacaagagtattgttacattaataatattaatataatgattatataatatattaataataataacagtcagattaataataataatgatataataatattaataaaaaaaattattaatgattatcctattatttcttagtcac

SEQ ID NO: 246380 - DNA, 765 bp, Cannabis indica
tacaactaacagctaacagaaagactccctaatacaagctactctatattgcagcagatgaagaaaactttatagctagttaagcacgatttccatgaaccattttatttcgttaagtccaaattgaccacatgacacaaaattatttctatttcagccatagaaaatatagttgacaaatggattaagtagtctccttgaaccattgaattagccatatgaaagtaaaagctaaaatctgagtgtttccaaacagctttcgcatacttacaaccaaacattgcctgaccaattgactcccaagcatgtgagcataaggaacaagtagcagatgtaataacttttcgtttgacaagtttggtagctaccggcaaagcataatttataactctccaagaaaagattttaattttaggaggtaattgaagggactaaaaagttttcttccaagattcatgattttgtgaagaagaggaataattttgatcctccaaagcagaaccgaatgataccctattttcacattataaatgcctgtgtcatgaaaatgccatataaggcgatcatgttatccaaaaaaaagtcaagggaatggtgatgttatcaacatcaattgctgagaaatgttacagcaacagaagtatatcccactctctatttgtgttgatatatgtggacacaactattgttcttaccgcacgaaacaatataggcttgaatgaagtatgattaggaatccaaagctcattaaggcataacacttgg

SEQ ID NO: 246381 - DNA, 1219 bp, Cannabis indica
ttttcccaaaaaaccagtaaggaccttatctttgaaacttgagtccttgaggtctttaagcctttcatcatttaaatagaagaatcctgaggatttagccatgaatataagttagcaatgtctatttatttgtaatggcagtaaatatcatatcatataatcttcaatacaaaattcttagaaatagaaccaataaacttttttgtgtgatgtttcatattctttgttccaaagtttaaattccaaaagggctttaagacaaggggcctaaaaattgattcagcatttagaagtttctctaacatgaaaaacaagaaaactgcaagaaaatgcttcaaatgcttataaagtatgtatatatagatatgataagccccctctacacttcacctatcgtgggcgcaagaaaggttatcacgtgcctatttgaagcttgtatcaaggtgattagagaatatcgagccggcatcattctgttacgaggatgtatgtagtgtagctagttatgcctagagaggtgcgagtgaggtgtgtgcttcgcctatttagaaagggtaaggttttctggagagggcatctggtagtttctagtgttgtgaggtttggctttgttagagagaaccaagtctcaaatactagtttattgtaataatacaaaagtatttagtcaattgtgtattccataccttagtttatattaagtacatttatcccaagaaatatgtaaaatcatacttactatgccttttggatttacactgaccttaaccataaaaatacttacactttcattttgacatccctttgcacatatttctccatttatccttcaggtctatcgcggtgcgaccttccatgaataccgagtctccaaattccaagattttcttccacatattcttttcatcgggaaacttttgcaccccctcctgcagcaatttttttatcctataacatgtcagaaatatagaaggcagaattaagtaaaacaatatgatagattctatatctaccccgaaaaaagtgttgcagttttaaaaaatcacttgtaagacgcccatgcttttagcaattgtaaagtactgtctaaacaaataactaaacgcaacaatgcaataaataaattacagttagaagaacaatataaaaatcagattatagaaatacccagtgtttgccccacatttaattacctgtaacttctgctcttcctcagttg

SEQ ID NO: 246382 - DNA, 588 bp, Cannabis indica
ggaatggaggcccatgttcttccctgtcaaccgcagctggtgccaaaggaattcaattttttctctgatgcggcggttcgtggtagctgggcgtatgtggctgttgtagtgttcaacaaggaaggagatttcgtggatgccatcactgccaaggcgtcagtttcttcgcctcttcatgccgagagcttagctctctgtcatgcattctctctgtgtctgaaactgaattgcaaggaggctgttttttatactgattgtttacaacttgctacggctgttaggacattttctatacctgtgtggaagctttctaatgtttttctgcatgttttttcttgccttaaactgaattctggtttgtgtatttcgtggctgcctcgtggtgccaatgcggtggctcacaatcttgctgcgtgggctgctgcaaacaatgtatcgcgtgtgtgttcggaaagggaagtagcaccctttgttgctactagtgcttagtttggttgtttcaataaatctctctgttgcataaaaaaacaaggacatttagttacatgctgaattaattataaacacttaaaatcaaaaaaaaaaaaa

SEQ ID NO: 246383 - DNA, 909 bp, Cannabis indica
taatttagtagtaattagtgcaattccctgtggttcgacctcacctgtgtgagtttactacttgattgcgtatacttgcgtagtgattataaatttagcaacacttggccttcccaatattattggccgcaataaaaacacaattcttggttttattaagaacaaagttatttcctgtatcaatagttgggaaggaaagtttctttctcgtgctgacaaagaaatcctcattaaaaccgtcctccaattgctgcctacatatgcaatgagtgtttttcttcttcctattgggacttgtaatgaaattgaaaatctaatggaaaatttctggtggaagactaagtctagtaaaggtcgtggtattacttggatgacttgggatcagctagcttcctctaaggaggatggtggtatgggttttagacatttgcatgatttcaatcttgctatgcttgcaaagcaagattggaggttgttgtgtaacccaaattctcttgtgggaagactgttcaaggcaaaatattttcctaattcgaattttctttcagcgtatcttggttataatccaagctttgtttggcgaagcatttggggtgcacaagatttagttcgttcaggtgctactcgtattattggtgatggagctactactaacattactggccatccttggttaccccattcgagtaacagacacgttaattctattcatccatctctgcataataacacagtcaagttactcttctaagttggagtttgcagatgggattgtgatgttattcatgatctgtttttggctcatgaagctgaattaatattagggatacccctttgtgatactgatactgttgactgctggtcccaggctgagaatcgaactggcctcttcacagttcgtagtgctta

SEQ ID NO: 246384 - DNA, 1247 bp, Cannabis indica
cagatctgttttaccattttccacctgaaaactaggtggttgctccatgaaatctcttcatccagaaatccatttaagaaagcagttttgacatctaactgctccacctccaagtcattttgtgcaggattggctagcatcattcttatgattttgtacttcacaacaggtgagaagatatctgtgtagtcttcccctttcaacctgtgtgaaccctttagctaccaatctagctttgtatctaggtgactcaccctctgtcattccctctttttctttaaacaaccatctgcatgagacaaccttcttgtcttgtggcctaggcaccagaatccaagttttattcttctttaaggactgcatttcttctcccatagcagtaagccactttttctttgatttgcaagcaatggcttcttcataggtagttggttcaggttcactctcagattgaaccacaactaaggcataggctatcaaatcagcctcagcatacttgctagggggtttgatctctctccttgtcctgtctctagccaattggtagttggttaaattttgttgattatcttgaccaatttctagagtttccacctcagatgtgcctgcatcaagttcttccacagtactatgtgtttccacctcagttgatgtccttacttctggtgtgtgtggtgattgaattgcgacttccatcctatcaaaattaatctccaactcatctaggtcatccctgtttgtacctgcaacattagagtccttgccttccttggctatcaagtgcatgaaattatgatcattaaagactacatccctagatataataatcttaggcttcccattttcaatatgacatattctatatctattaacacccttagggtatccaagaaagaaacatttaatggccataggttccaacttgtcaagtttctggtgtgcatatacagtgcatccaaaatctttaagtgattcaagttaggtgtattgccatgcattttttcatataaagttttcagattaatgactctattgggactcctattaatcaaatagcatccagtaatgagagcctctccccaataaacatattactatattcaacaaagtcctattcattctctcagcaacaccattttgctgaggtgtgtgcttaacagtcctatgcctaaaaattcaaactcagaacacagcaagccaaattcagtattgatgaattctaaaccattatctgtcctaagcacttt

SEQ ID NO: 246385 - DNA, 756 bp, Cannabis indica
tgatcaaatccaaattggcgagcgaatctattgggaaaatatggttcaatgaataagtccttgcctactctcacaggcaacatagatgaacgcatagaaacaagcatttcaaatctatcatcagataagtcttcatggtctatacaatcaacatcttcttcaataggaaaagaatatggtcggtgaatgacataatcttcttccctcaggatacgacgggctatgtttaaactcggctcttcaggtggcactccagcatacttgcctaaaaaaggcaagtcaattagggaactccaaccactataaagatcacgaaaatgttcagccaaccaacccagtacgtaatgtacaggcatgaaactttcacccagaccttgcatatgcagagctccgatactcaaaccatgataaatatatcctaaaacagaaggcgctaatgaaactttaaccccttgtgccatcaacgaagccatataaaaagtctctggtctcacatcgtagccttggtagggaaacacaaatcgacttaaccataaagacacaaaagctgcaaggatacattcacgggatgcttctaaaggaagagagcgcacatctgtttgtttatgcccttttctttggaaagttctctttgaagttttggaagttttggagtcagaagttgttttaacaccttcaaaaactttcttctttctataaaaatattcaacccattgctgccatgttacttttgtaactttcaaatggacacaaatt

SEQ ID NO: 246386 - DNA, 757 bp, Cannabis indica
ttaatcttgccatcattagtttaggatccatacaagcctctgtcaccacaatattatccaccattgctaacttatctattttagcatatgttcattagaaaaaaatcaaatcttaaatctgctttagtcatagtcaacaactacttaccaaatagtttggtaatatgattatattcaccatcacattttttccagctcaaagtgaactacaattattttgcacattactcaagatacatcaagactgtaatatgtctagtttgtgctgaatgttatgctataagttttgattgggtgagtgtatttagttgagttattgtcatatatatataaatgtgattaaatagtatatatatacacacatatattttgccttattcgaaattttcattttagaaaaatgtagtaataagacatgaataatatataagttaaggaataatatcatgcaaatttaaaaaaatacccaactaccctggtttacatgatttatttgataaaattaattcttatttcaaataatgttatctatctttggttttacagttccacgatgacaagtcttacatcaatgaggagataaagaaaatacaagatgaatggacatttttgtgaagtctgaaatattgaagaaatgagtacacaattattactttatttttttgttatgatatatgtagaatatataacttttatatgaccattatttttacttatacttagttttattgatatactttatagttatatcaatttt

SEQ ID NO: 246387 - DNA, 3341 bp, Cannabis indica
attcgagcattagcttattctattctaggcattgaatggcagagatttccccacacctttgattcgctatcatgctaaatcttcgcatgtgtccgcagttgataccttgttggctaatggagatgccaacattgatgacctatggatgcatctccttcgagcccagcagcaaatgaagcatcatgctgatcaacacaggcaccatgaggaatttcaagttggcgacttggtttatctcaagcttcgtccctaccgacagtagtctttagccaagcgtcgctttgagaagctcgctgcaaagttttatggtccttttaaggtgacagaaacggtaggcgcagtagcctatcgactagagctaccaacttcctcatctattcacccggtcttccacatctcgcagctgaaaagagcacatagttcgactctttcattgccgactctgcctcctttcacacctgagttagagctgcaagttgcaccagaagcagttctttaagtgcggcagcaagctacacatggcctggaagacttggaggtcctcattaagtggaagtccctgcccgagtttgaagctacatgggcgagctttgacaagatcaacacaacctttcctgaatttcaccttgaggacaaggtgaaagtgcacccccggggttgatacaccaccaattaggttcactaattttaggagacctaagaaatatgctttgaataatagcataaagaatagaaatattagctgaggtggcagtattatgaatgagctgtcaaaatattagttaatagttttgttagtggtgtctataaatattagtgagaattgtaattgggacggaaggaaaagaatcacttgtaaatagagtcttgaactaagggagaccccaagtttctcgaattgcctggcaccattgttatttgctgaaattcaataaaacttcaattctttctaccccattcttgtgcctgttctagtgtgtatcaagatagttgagtcctattcagtgtcaatttgaattgaagaagttgataatgagaagtgatggttttctggtgtatatggctctaatagtagcaggggctgggatcagctttgggatgagttggttgatttatgcaaggataaatggtgtgggaggggacttcaatgaagtgaggaacacatcataaatgtttaatagtagtaccactacaagaagtgtgagggtttttgaattaattaattagggaattatctctaaaagatttgagattgaataatgaccaatacacttggtgaaatcttagaaaatttctaatctgtatcaagttggacaaatttttatctctcattgatgggcagaaagagtcatgttcgtaagacaaacattggagataagaaattactgtctagtgatcattgatagatccgtcctaactggggttctcagtcctgtcccatatatttttgataatatttgggtgcagcaaaaagcatttaacagggaagttttaaagtgacagtgatgatattaaactacgaaacttattattttatatgaatctacttttgtaaacagaattttacatgtaagcacacataaaacgaagtccagagcatactaaatatatataaatgtttaagcacataaaatcatgcgcacagtacacaatagacttggtccctgaatggagaaaatgtatatatatatttatatgtttatgtatgcatgtatatagatgtaaagaattgaccatgacatatctcattatcctctgctgagaggaatagaagttttaaaaaaatcattagaagttctaccatacagtgacagtaaatgctctaaacaatcctgctcagtatctttctgaaatactttctcaaattcaatgtttcagaaaaaagtattttccaggtactacgagtactcacaaagtaccatgtcgcgagtacatgccttcagtctggcaggtgatgttccatgacaacctgtttgctgctttatttcgtgagatacaatctgatgttctggggagctaatattctgctatattgtacattttatgacgctcttctgtagttctgtgtgggtttcatctgaatgtatttagttgtaagagtactgttgtattgcaaatataccttttaattgctacttggcctggggatttttccccacatttttctaccgaaaagcacctgattttaggaacttctactcataaaatagtttggttaagtaagcttttacccttgcaagataaatgaaaaaagagagtcaaggaggatagaaaattattcaatgctcatttatatgtatgatttacttgttgaacctttcactttttttttgtgcatgcagtcttttgtcacacatcgaatactcatacgagcttcaggtttcaaatctcttccatgctttaattatagcaatgttcatctaccctagttgtcattgtaatgacattggaagtagtttattagtaatggactatatgaatgtggactgcaattgtgcatgcagatgatgattccactgttagacatcaacaaattggccctgtttatttatctgaatggctactgcctccattgagtttgttagacaaatttacagtgaaagatgtgagactcacatgtcctcattttggttgtgtacaagaaatttagctcttcaggttcataatcattgctgtttaattttgcccatgcagggattttttcttctagtttcatgaaggttggattgacatatcgtgcattgtttgatacgttatattggttgctcatgtgatttaaggtattgtctcttaataatacaaataagtgtgatttttctgctgtatttcagtttattattatcaattttttccgataatgctctgacaaagaaaagataaaaaaatctcccataatgtctcaaggttggctcaattggctgggcatctgagtgtgtgggttctactaattgacaaaaaaaaaattaacaaaaagattatttgaaaaaaaagcaaatattatatagaaaagtgtgaaaacaccaaatgtgaaaggaaggatttgcgatgttttttctaagttagtggttgcagtgcattatatttgtgttggatgtggttttaccaatttctgtaaagttctgcataccatataaaccaatactttccccaattattataggctctcgtgtcaatacgcaagaagccataaaatttagagtttattatcattattcttgaattgtgcagatggtgacaggagtgaaacagttttttttttttgttggaaacagttggttgaacttactgaaactctaagaggggatgatgtataccttagttgcattggacgaatatgaagg

SEQ ID NO: 246388 - DNA, 566 bp, Cannabis indica
cgttaatccccccgaatcgttaacccctaatagcctaatcgaaacccaaagatccaaccccagaaattgattcaactgtttatcacgttgttgaatcgtgacctaaaactagttgcttcaagtcgactgcaagggaggtacccagaaatcgataggacgatggacgacgacgatggaggaggtacaatctcatttctacctttatttgatgttttaattgttttttgttggcataatgcttttttgctttcctcattgttcaggaatgaaaatggtattattgttagattgtgttggtgtgaatgatattgtgttaagtgtacacatttatttgatgtgttcagattcttagagaatggtagtggtagtatttaaggcattttgatagattttttgtgggttgaataagtcaagtttcacttggttttagtgtggggctattttatgtggggtaaagtgttttcactggcatgtgggaatattttcacatggtgttaaagcatatgacagacacttttattggaaagttctattattttactattaaattttgttgttttgttctt

SEQ ID NO: 246389 - DNA, 616 bp, Cannabis indica
tttcaatttgttgatgatatatatatatagtatctcaacatcaaatcattagcaagataatttgtttgtgaaaattgttctagttatccaaggtgcccttccaatggcaacaagtttacataagaagaagctcatcgattcagccgcttcttcaaggtgtgttcatgcttgggaatcgattaggcatgctctattctgctgtaagcatttcaaggttgtttggaaacaatttaattttgatattgattatggtaaaacaactatattaaagtcaagcctccatgctctcaagcttaacgtagatgttgccgtacgttaactcaaactctaaggtgtattggagcaattattctgaattttgaagctattgtgattgttgtgtactgtctaaatcagttcaaaaatgctttcgatcagataaaatggaggcgaaggccctctttcatgttctcaattaggctatgttgagagtctcatctactttgaacaatttgttatatttgattgtgatgttcgttgtcttttatcagctttctctagtattgttatttgtggtaaataatccactctaaactaaatctattcttatatctaaatcagttggaaaatctgttaa

SEQ ID NO: 246390 - DNA, 561 bp, Cannabis indica
ttcttttgttagtgtttttaacatgttttgtgtttcatttattgttttagtattataattggtttctcaatttctgtttgagcttttaaagttttgtttttgtattttttttaatcggtttcttttttgtgtttcaaggttaaggttgatccatcggatgatgattttgttgaacatattgaatctggaaccagttctaaagtttcagttgagaaaaagatacaacccactgttagggaaactcgcggccggaagaaaaaggagtttagatgtttataattttgttttttgttactgtttgtgaatgttgttttcttatgtatatttttgttttttgttccctgtttttttcaggctagggtggttgattctgatgctccgaatccgccagtacgtcgtacaatacgtgctggcgttaaatgtcttgcttcgaagggccctagtccttcgatacctgaaacgtctattaaaaaattcacaagtttttcgaatgtagtaagtacttcaacttttttattttacatatattttttttttaaatgtgattttatttttgtttat

SEQ ID NO: 246391 - DNA, 559 bp, Cannabis indica
tcctcaaattccagcatagtggggagttcttggtccatcttaacttcaactaaaactcgaggataattcaatcgatctctgccttttgttacctcgtcaaccattataggatttcccatctgtccaactattttgaatagtgatttctggccccagtacttgaggtctaagtcttctaattgaatccaaatgggaatgttcctcacatcttccttcctaaaatttgtgttaggatcccacggtttcatgataactggtcgtctattaaagaaaatgtacccaccattcactactttgtctctgtcttcgatagagtgaaaacgaattatgaaaattccatatgctagcaagcataccctatcaaccatatctgcccaaattcttttagcaaaaccctctagaatctgcaatggaggattagaacccagcacataacacactatagaagacttccaaaaattaacttcatcttcaatatcctcaaagtcaatcttaactttgctggaactaacaggggacttaaaaacattttccaggttacgaacaacaggtgcagaat

SEQ ID NO: 246392 - DNA, 1025 bp, Cannabis indica
tttttaacactaccacacatcccaagaacataatattacttacagtgaattataatttaaggagtcaactatagtcgttagaatattactgtgtctcaaatactgttaattaacctgattatctcattataatcttaattagacaattgggatcatactatttatatgtaagttcatataaaatattctaatactttgatgtaaagtataagtatggtgttattatcgaaataattcatcgagtagatagtaaaaatgttttgaacctatgcgagttcatgagagtatgtaacacttttaatttcttgtcgttcgtttatttttttttgtaaatgtgttatgcaatcagattcatttatttatggttatgtatcaaatccaaaatagaaagtttttcctaattttttagacaataaacccaactgaaatatagccaaatatagccaaataaaacaaaactttaagtagtgggaccaaacaaaatcaataataacaaagtagttggttgtccaataaaattaaattaattggttacttatagtatcaatatggaaaaaatataatttattataagaagttatatattttaattttatatacttaatttataatttttttttgtgtggcgaaactcgtgatatattttttattggttttgaaattttcttgttacttgtatacatatgtatgcattgacaatcttaattagcaaatataattggtgcttaaagtttgcaaacaaaaatgaagctaatgagatgttatcacaaaaaataaaataaaataagtgtagaaatactaaaacataacaaatttggcttccaatattactctatatatattatgcgtagtaccctaattgaaaatccaagtcatggtccacttatttttcatttttcacatgtttgttgagttattagccaaatttcgccacatcagttcctttctttcttcattaaagccagctggactttcagccaaaatatacttactgggctgcaattgctacgcgatgattgctatag

SEQ ID NO: 246393 - DNA, 1355 bp, Cannabis indica
gggaggaccctccggatagaagcaggtaaagaacgggcgccttctcggcctaagttgctgctgtcggtccccaatactagggctcctgatgtcaagacatccggattcggtaagtctcccttaacggttcatcatgttccctccgcttaagattattctcggtgtaggcctatagggtttgacaaacgtctccttagatttaggatgccccctacccggtggggtgaccatgccaagggtttttatttttccaacttaggtcatttttaggccggtcccggatggggtctgtgcctgccgcatctattcctttggatcatttagcttatctgtcttccagctggtttctcccctcgaacaactttcttggggatgacgaagccagtattatagtataagactttgctagggctgaattagaatgtctgggtaggactagttttactgcttaatttttggtgtgcatattttctcgtggccattctgacacttatttgttcgtttttcgaagcagccaggccaaaggaggaacttttggcgacccttgcccagacctatagtcctgactctactcttcctccagcgccggaccagatggtgaccccagggaggtcttcttctagcatccccttaggccaaattttcttgatcgacgaagacggggaggtcgaggaggaagagggcgagatcctcgcccctttggactggaagcggaaaggcaaaatggtggaggctgagtcttccaaaaagcctaggagggttgatactctggctgtcagctctgacttggggatcccacctgaagcggatgaaacctgtgcctcccgacattgtccatactcccgttcccgctgatgaggagagataacagctccggatcatcaagcacaattacactatggctgagtatacgagagggaacgccgaggtggaggctctataaaaggtcttaagggaggcccaggagaactccttgcatgatgaggcttttaggaacgcatgggacatgaacatggaccctttgacggactggttcaaccgctttatctggcctacactcgctccatttgcctctgagttgacgagccacttttctccaacctgacccaactctcggccaagagatacgcaacctgcgcttccacaaactcgatctatcagatcaaagatatcagcgctgctatgaccgctgtaagtctctgttagtgttcttgggccttactttatggcacctaatccctcgtacttactctttttttttgtattggcagattgacgtagagattggttgcctctcaaagactttgatcaatcatgggtacattatgtcccaatttgggggcatggatgaggcc

SEQ ID NO: 246394 - DNA, 601 bp, Cannabis indica
tgtacaagtgaaagcatgcaatgtgcatttgtcgatagaataacgatacaatgtcgatagcttgtcaatagttggaaaggcgggaaaaattaattaccattaatgtctaattgtacacgtgtctaacatgcatgtgcattgtggagtctatatcgatagtgtgtctatagtatgtcgatagttggaaagaaaggaaaattaattagcattatgtgtctaattgtacacgtatctgacatgcaatgtgcattgtcgagtctatatcgatagtttgtcgatagggaccaccacccgaattgtagatgttttcatcgacagaatatcgatgggatatcgataagataacgatattttcatttttagtattttttggtatttttccttaacttactttttttgtttgaaattgtaggatcgactgtgtttcttgttgtatcgtacgatggtgtttggtatgttgagggttataattaggtttataagactgaagacagtttgacgttaacagttggaactgacacaactatacaacaaatgcaccaaatttaaaatgaagagttggaggttgatcctttggcgtatgatttaaaattggagattt

SEQ ID NO: 246395 - DNA, 564 bp, Cannabis indica
aaaatcctatgtactgataaattggggactaatatttaatcacgtaatcttgattatttttcactgtgtagacaacacaataatcatgaataacattgtgataaaaatttaaaaatatatcaaacaaatgaccgtgaatcaaacatgtgaaccaagaattatcttaaataagtaataaaataattatgttcctttattaataaatgaaattcaagataacattgagataaagctttagctagagcacaaaactcaacaagaaagaccataattggtggtctttatgagaagaggagacaattttctaggatttgctcaacctatccactcaagttcttggctctatcatctgactaacaccactctagcttcgacgatgaggcctttggctatatggctaggtcttgaataaaacatatcagaaggcgtttcaaagcatgaatatagaaaaatgtcttgccctcagctgagaagcaagttttaatgggtaggtgcactgccacttcattatttgaagcttgaggtcaaccttcttggggcttgtcaagacttgaagtcctcaca

SEQ ID NO: 246396 - DNA, 1384 bp, Cannabis indica
tgtaaatctatctcaatgtgttttgatcttgcatgaaagactggatttgcagcaatagcagctgcactttgattgtcaacccataatatgggacagtgagtagaagtaacatgtaactcagaaagaagtgagactaaccatttgatttcagcagcggcatttgctaaagccctgaactcgctctcactactggaccgagcaaccacttgttgtttcttagcggaccatgatacgagattaccaccaaaaaacatcacataaccccctgtacttcgtctatcatcaacacacgacgcccagtcagcatcagaatacccttctaaagttaaggaaggagctggtgtaatatgaagaccatgatgtatggtgcctttgagataacgcataagcctcttgcaagcttcccagtgaagacttgtgggagcatgaataaactgacttagtttattgataatgaatgctacatccggtcttgtgagggtaagatattgtaaagcacccaatgtgcttctataaagagtatgatcaccaaagggttctccttctgtaagagagagcttaatggccgaacttgtaggattagaacaaggtttggctccttccatattgagacgaacaagtaaatctgtgatatactttgtttgtgacaaatacatgcctgaatggtcacgatgaatctcaataccaaggaaatagtgaaccggtcctaagtctttgagggagaaagacttgttgagatcagtaatcaactttgaaatgagatgagtgttaggaccagttactaaaaaatcatcaacatagacaagaaggattatgatgttgttacccgagccataaacgaacaaggaggtgtccgatttggaagcactaaatccccactccagtagcttgtccctaagtgtttgattccatgcacgaggggcttgctttagtccatagagagccttgtgaagttgacaaacatgagtaggtttggtaggatcaacaaaaccttctggttgactcatgtagacaatctcatgtagctcaccatttagaaaagcattggagacatccaattgtttcacttgccagttaagagatactgccaatgtaagaagaattcttactgttgctggtttaacaactggagaaaatgtttcctcatagtctatgccaggtgtttgcaaatagcccttagctacaagccttgactttagtcggtcaagattgccatgagcatctagtttgaccttgtgaacccacttgttgccaatcacagtcatatgaggagaataaggaaccaaagaccaagtacctgccttttttagagcatcatattcttgattcattgccttgaaccaccttggattgtttaaggcagatgtgatattctttggctcag

SEQ ID NO: 246397 - DNA, 874 bp, Cannabis indica
tattacattcacacatgctatataaatctccgtaattaacaaattacgcttatttactcacttatagtaaaatttaatttgttttctgaaataaattagtaggatcataatttcacttattacctgattaacccataatataaatataaatcctaattatttaccattaggcttatcgggatattacataaaggaaagggaaaaactgaataggagtgagttccaagctcaggggatgattgtacatctcgagatggtgcgacctggagtgttcggtctcgagacaacttggagtgtattttgtagtcgatgtgtgacatatctgtaaaagtattttgataatgattgtaaaagtttaaacacgggatcccagtttatgtaaatatatatatgtttataaagtttagtagtttaaatcaaaaatttaatttggcacaatttttaaggaaaaccctttaattagcaaaggtagcacgttaattagaaaattactgtagcgcgcttaagtatcagggcgttacaatacactccgtaacactaccgtactagtattggtagcatatgaattaaaaatatagcatgcatgtattacgcatacacatattcatatataattacattctatgctagttttacctcgtttttgaattcaagtgtgccactcaatgtttaacgcccaaatgtgacttccactagcggtggttgtagtatagatcgggcggtcgattccacaggaaggtgattatggacaaaagcgttagtagaaaaataaaaacaaaaggttaataataagtgataatagtaaccaatgattttgtgatttttaatttgataataaatattaaaagaaagcaaatagatgtgtaatcaatag

SEQ ID NO: 246398 - DNA, 863 bp, Cannabis indica
catagtatagaaaattattcccatactcatcaagctgggcagacaattctcatgaagaacctatagaatgtgtatatatattgatagtttctattgttgggaatattttaccaggattagatttattaacaagtatgttgactaacatcctaaatatgaatatctctaaaacaatgaaattaaacacataagagtttagaaaaccatacattggttgcagcagaatataatgactccttccgctcagatctctaactcttgtttctttctgtcgcagagtattatcaagatctgagccttgatctgatctcttcttcgggtttagttaccaccatcttactcattatgattgagtacttgacttgctatgtgtgggcatgagactctattactcaaggttcgaatatggtgaagaacaaagaaggaagtgaaatcactatagaaggaactctctcatctactagttgtttgacatagaaaattaggtctgatttggttgaaggcatcaagtggatgagtgagagcatcatgtcccttttatagcatttcagctagggcttagggctgaattatatggataaaaaaagaagaaaatattgggcaaaattcacttaatggcctgctataaaatggaccagtttctagttacaattttgccacttttttcaaccatttattcttctttcaataataccatatcttccaattcaatcatataaatgccaaaactatttatttaataattatatttaattatcaaataaattaccatttatataatttattaattagaccatgtaaagtctcttaattaataaattgaccccaacacctcttttcttcacagttaagcccttgcttag

SEQ ID NO: 246399 - DNA, 777 bp, Cannabis indica
ttaacctttctccttcagttcctctagatgctgatgtgcctgagagagtatagagagggaaagatgtctcatatggtcatttgagagtctttgggtacaaagcattttttcatattcttaaagatgagagatctaagcttgatgataaggcaaaaccatgtattttcttggggtacggtcatgaagagtttgggtacaaattatgggatccagtgaataagaagattattagaagcagggatgtggtgtttcttgaagatcaaatgtttgaagacagtgacgaagtttagaagcaaaagtcccatgttaatgttcttgtgagttctagttcagttccttcacccatagtgcatgatgatcatgggggagatgaacagaaaaaccatgaagagcatgcatgtcaatgaagaagtagatgaacaagaagatcatggtaagaatattaatgatgttgttcatacaattaatgatgatgatgagccaactgaatgagatcaagaagcacctccaccatcactagttgagactccagtaaggagatccacaagagagcataaactaacttcaatatacaatcctcatgagtatgtaatgctcaccgatggaggagagctagaaacttaacaagaagccattctacatgagcataaaaatgagtaggatggagccatccaaaaagagattggatccttgcaaatgagaatcacacatatgacttggtgaagtttcctaaagggaagaaagctctaaaaataaatgggtttataggcataagac

SEQ ID NO: 246400 - DNA, 666 bp, Cannabis indica
ctctttggcattgatgagtgtaggccagagattgtaaattgagaagaagagagacacatcacaaatatgttgtggtatattgaagataatattgtttggtggtgactgagaaggctttagagttgaactccattttgatcatatgtaactaattctaattctatgagcatatatatatatatgtatattatatagtaacttcagatcgatccagttgtactgtagagagtacagaacagagctcaacacttaattttgttttgtatataaaagtgttgtttgttctactagcttttacttctaaagctactttgataatcagccaacagggaatatagtcatattcatttcatttttcatttggaaatgaataacaagaaaataagcataaaacgaaaaaagtgcatgcatgaactctttacagactcaatatccaccattttttttgttgggttacacaaacattcaatatcaatgctttgagtttgaagtttgaatacataatttataaaagctaaaataatctgaaaaactgcttatatataactataactgatgatcaaacatgtgaaaatggatgaagttagcctagttaggtagtatttcatcttatttttacttaaattctaagagaaatacgtagatataaatatactagtaaaaagc

SEQ ID NO: 246401 - DNA, 842 bp, Cannabis indica
aaaaaatgcaatccaggtatacctgctttggtcttaaactatacttaatcttataaaaactaatcagtagctctaatgtgcccatactctctcataattttccaggaacaataacagacttagtccaacatgacaacactgcacacctctaattgtggttgatgcaactttccttaagaatgcatatggaggaacattgataattgctagtgcacaagatgctgacagacacatattcccactagctttttcagtagttgattctgaaaatgatgcatcatggcaatacttcatggaaaagctcaaagaatcatatggggagcgtgaagaccaatgcataatttctgacagacacgaaagtatagcaaaagcaatgaaatcagtattccctaacttgatgcatggggtatgttgcttccatttgttccaaaatataaaaacaagattcagaaaaggaggagatgatctaagagatgcattctactgtgcagcaaaagcatacaatcaaactgacttcgacgattccatgagggacttagacaacattgatagtagaattcgtccttacctgacaaatgaagttggcctagaaaaatggacaaggctttacagcccaaataaacgctactcaacattaacctccaacatcgccgagtctgtgaactcagcattgaaagaaatcagagagctaccgattggaacactgctcgaatgtctacgttgcttggttcaaaaatggtcatgggaaaacaaaaatagagctttgtccacattcacaacattagcaaaagtaccagaaaagatactaaaggataaactggaacgcagtaagaaactaaagg

SEQ ID NO: 246402 - DNA, 709 bp, Cannabis indica
aaaaaagtaaacttttaaaattttccaatatatagtgtaatttctactagaaattacatcaattatgtgattttagggattatttcacaaatatacaaaaatacaaaaatatgattataaggaattttaaacatttttatgatttttatgattttatttacagaaaatacagactttttatgttgtattcttgttaatttgttgttgattttttgttatctgtatgttattttttgttgttgttttaatattattttgaatgttattttcttattacttttatgtaattttcttattattttcatgttatttttataaaaaataagaaatatatattaaaaatctttaaacgtaaaatatcttttttacaaaaaattgtgctttatgtaattattctttttttaatgtatttttatgatataattaaataatgccaatgaattatgggttttttttgctttatttatatttttatgagttttttatcacatatttttgcaaaaaaattatcaaataccatattttaatttttcccaaatctaactcattatctttctctctctttcccgttatctctcttagttgcacctgtgcttcgccggagtctagatcggaagcactgtgctccaaccatgcccacccctaaaaaactccaggtccattccttctaaactagaaaactcgtaaatatggagctctctctctctct

SEQ ID NO: 246403 - DNA, 903 bp, Cannabis indica
catgagagagtactgctagcatcatgaatctcagccaaagaagaggcaaaataatatcctgatttaaccaagtaattacccgaatttgttccattccaaatcaaaacatcaggtgtgggaaagatggccagaggaatagagagtattctgtcaacatcagcttgtccaaaattggctgaaatagccactaaatcccactgtctatgctgagtaatcaggtcagccacttggagtgaactatcatggcctatgaaactgaaaggggtgaaatcagtgtggccaggaagccatggatctgtcttacagttgatttgattacctattcccactctccaacgaagacccttttcaagaagttcttttccccaaataatacttcgccatgttaatgaaggacaggcacctaatctagcagtaaggaaactaccatttaagtagtatctgtgatacagaatacggctgagtagagagttaggtgattctaagatgcgccaggcttgtttagctaatagagcttgattgaaatgaatgaaattcctaaagcctagacccccatgaatcttagctttacaaagagaattccaatttttccaatggattgcattaccagatgatgtggatccccaccagaagtttgccatcatactctcaatttggttgcacaaagtgactggcaatcgaaagcagctcatagcatatgttgggatagcttgtaccacagctttaagaagaacttccttcccaccagcagaaaacaactgttctttccaactactaaggagtttccatatcttatcagtaatcccactgaaaagtttggttttatctctaccagcaaaagaggggagaccaagatactcctcatgacaaggttggattggcatgttaaggagccgttggaaa

SEQ ID NO: 246404 - DNA, 1155 bp, Cannabis indica
ttagtttttatgtattttttttttatatttttcacttaatattaaaaattaggagtgtaattggataaacaattaaaaaataatttaatttaattactaattcaattagatattttaaagtctaattattagatgataatttttcaaatctaattactaattggattggagtgcggataaatatgacagcttataattttttgtaactagaagagatgaaaatttaaacaaacgaagacataaaaaatatattattattaataatgaatattaattctaatataataaaaatgaatgaattacatcatatatcatatgcattacgtacttaattactactacgtcacagtttaataatcacaacatcataaccttaaactcatcaaaattaagaacaccatccccatcgagatcaaatctagaaatcatgattttacactcgtcaacgctcttagactcaccaagtctactaagcattttcttaagactttttggagtaatacaatcagaaccgtccatttcatacatcttaaaagcctctctcaaatctttaactttgtcttcttcttcaccttcttcaaccaacttaacaaaatcatctaaccccaacaacccatctccgtctgaatctaagtactccattaccgcctcagcctcagctttcgaaagctcgcctcctattgctcccacgcactgttgcaactcgcatgaggatattctcccgtcgccgttggagtcaaagtggttgaaaacacgttcatattgtttgagtttgttcatgtatatagaaatttaaatgaaaatttgatgaaaaccttaattgttagcaagggttaaaagttaaaggtagagctagagaagagggaaaatggcggcttttgaattgaatttcataaaaaaggttagggttgaggatatggtttgtattgatcatttatttatacataagattatgacgcgtgtcgtggttgaccaagcattaaggggagggacatacgcaccttcttaaatatgaaaaattatatgtattttcgtaaatattataaagagatagaaagaccgttgacctattctggaatcttctttgaaaaaattttagttttgcacctgaaattatagaaaagaaaataagtctgaatttgctaattttttttt

SEQ ID NO: 246405 - DNA, 657 bp, Cannabis indica
caggttcttcaacctacagaatgctcatctcatattcctagtgaaccacacactgctactggttttaatggtaacaccaatgctgcaacaacaccacctgatccttccatcagcaacacagatcccacacctgcctctacagggccacgaaacagtcacaatatgacaactcgggctaaaaatggaatcaaaaagcctaaagctctacttgtcactcaacttcctacatccctcaaacaggcattgcagcaaatacaatggaataaagctatggctgatgaagtacttgcacttaaatggaataagacttacacccttgtcaagctaccacctggtagaactgcaattggttgcaaatgggtgtatcgaattaaagaaaatcctgatggaagtgttgataaactcaaagctcgcttagttgccaaaggatttcaccaacaaccgggttttgattttacagaaacttttagcccgattgtcaaacccgttacaataagagttgttctcactcttgctctttctaaagatcgggaaatacaccaacttgatgttaataacgcttttctaaatggtgaacttcaagaggaagtttatatggttcaacctcctggctttgaggatcccgactctcctaatcttgtttgtaagctccataaa

SEQ ID NO: 246406 - DNA, 680 bp, Cannabis indica
taattatattaataagtggcaaacgagtaaataaaaatataatatttattatgtgtaaaattggctgatgctatattttgtgccaaatttagcacaatttttaatatgtactaaatttttatactcaacattagaattcacttttatgaatttggactaaaatatacatatacatcacttttatgactcgtataggctttgctagcaaatgggtttaactcattatgggttgtgtatctacggttcactacacagtcgttcataacggccatgtgattgactctatctccccatccagaggtatccgtcagggagatctgctttctacttatcttttcatcatatgtgctgaaggcctcttcgctctcattcagaaatttgaagctaatagacttattcaaggatgtcgtgttgctcaacgggcaccttctataacacacatgtttttcgcggatgacagctacttgttttgttaagcccccggccagaaattcaattacacaaagtcttcgatcttcttcagtcccaatactgagactaccattcgtaatatggtttgtgatacactccatatgcctgaagctcttgaaggcagtctctatctaggtcttccaaatattataggccgcaacaagaatgttgtgcttggctttattaaaaataaagtcattgctcgaatt

SEQ ID NO: 246407 - DNA, 1583 bp, Cannabis indica
agaaattgaaaaggcattgcaggaagtggtttggtaaacagatcaactatttgattttatgtttcaacatatctgatgtcaagctgcttggcaataactcgatgtcgaacaaaatgaagatccaccacaatgtgttttgtccgagcatggaacacaggattggaggctaaggatccagctccaagattatcacaccaaagaattggtggtgatggagtgtgaatgcaaaactcagtaagaagagattgaatccaaattatttttgcagtggcaagggcaagtgctctatattcagattttgtgcttgatctagcaacaacagattgctttttagagcaccaactgattagatttcctccaaagaatatgcaatatccggatggtgattttctgtcatcaaagcatcctgcccaatcaacatcagtatatccttgaatgtcaagtctgtttgtgggtttaaaaatcagtccatgtcctattgagccagctaggaatctgactaatcttttacatgcaccccaatgttcagatgttggagcttgcatgtattgactcaatttattgacagaaaaagcaatatcgggtattaacattgtgagatattgtaaagcaccaataatgcttcggtagtgagtaggattgtccataggagtacctgatgttgcagacattttggtggttgagcacttaggtgttgattgaggcttagaatcaagtaactgggtccttgctagaagatctctagagtatttctgctgtgtcaggcagacttcggttgttgttctttgaacttcaaaccccaggaaatattgaactggaccgagatttttgagggaaaagctagtgtgtaaatcagagatgagatgttgtatttcagtggtgtcagcacctgttatgaggatatcatcgacatacaccaagataagcagcagggtgccatttttgagagagaaaaagaggctgctgtcgaatttgctgctggtgtaaccccattgaatcaaagtgttttttagggtgtcaaaccaggctctaggagcctatttgagaccatatattgctttgttgagtttgcacacatgattgggaaaattaggatcaacaaaaccttgtggttgagccatataaacatcctcttgtagttggccatttagaaaggcattgttgatgtcaatttgttgaatttcccatccattagtgactgcaagagtgaacataattctgatggtgcaaggtttaatcacaggactataggtttcaaagaaatcaattctaggagtttgttggaaacctttggccactaatcttgcttttagtctttcaatagagccatctgcattaagtttgattcgatagacccatttgttttgaataataaccatctctgaagttctaggcacaagaatccaagttttctttttctttaaagttgacatctcattgttcatggcagcattccattttggatttgtaaaggcttctttaaaagatgttggttccttttcataattggaatatgcaagatgtgtcttaggtttatagatgcctagcttggacctagtgaccatgggatgttggttgttact

SEQ ID NO: 246408 - DNA, 982 bp, Cannabis indica
aaatttagtctaatagttcaggtgtatttgccaaagtgggactcgggtgtaatcatttttatgtgatttagcttaaaatctagttactagagttaaaattaagtttatacattgttatttgtctaaatatgtgcatctaagtttttattttatgtgactacctgacaagcattttcttactgagtttagtagttccttcttattaaacttaccatgtgtagattaatgttgtgaaagttagaaagtcggtggcgagtgagaccttggaggcttgtgtgtgtgctcgctgagggccctataactaagggtggtctaggatgcactccatttgttttattaagtgttattaaattaatgtcccattttattttatttatttattatatgtcttttaagtccaaattaagctcaattatggaatattttatttatgaataaaaaaacattctattttctgtattttaacgcttgtatacaatttcataattttataaaagtacgggtgttacaggtatcagagccacaattatattagttctgaatgttcttacgagttacacatatcggctaaaaaggcttcgctcgctaccaagtaagtattatttttgcatattttgtattttatgtgcattttggtaatttcaaaatttcttttcatttttaaaaccctagaaccaacttagcaccaacatcatgagaccagagcaagtagagttaggcacattaaagccttaaaagagttcccaaggccccacccatgcatgaagaaaacaaagtctttatagaattaacaaaatataagaggggatggataagataatatacactaaagaaaaaaaaaatatcatcgacacaataatgttgtcaggtctgaattccttcaaaaattaccaatctcgttaaacatagtgtatttagaactcgactatgtaaatttgatagaaaatatgatagaggaagggttagacataaaagattataa

SEQ ID NO: 246409 - DNA, 1126 bp, Cannabis indica
caacaacacccgctggaaaagaagaattcaactcagaggaatcttggagtggagacgaaaccgactgtgttggagagccttcagaatgagtttgaggttgagtattgttcctacaccgtttaagaacacttcgaaggttgtcagattcaacctgtcttttgaaaattctttggggagacccctcacccgatagatcatcttcaaccataattgatttgcctttagcttttgcagataaagatgtggcagcagtaacagggatgctggcagaggagggtgagtttgtgggtgtaaggttgatagaaggagaagttggggggtacgtggctataggagtggagtggataaagggcctagtagtggttatagtagcagatgtcatagtagcagaatccaatgtgttatcaacaatagggccatttgggtttaaggcatagaaggttgaaaaaaaagatggaaaaggggaagggagttcaggtggggtactggttagatgtttgtcaaggttggattgagatgaagattcagcaattgtgagaagggtcgggtgaggagtagagccaatagagaggtgtttctgggataagtgtttaggatagatggaggtaatagattttcgggttaatcgagttaaaaaagggtatgcattagctttggaaaaatcattcctatatctttcataaccagatttgggaagtttgtcacccaacaaatcaggaccataaggcaaatctggttcaattccttcatcaaccatctcaagaaaaccaatacatctttcaaaaggatgacccaaacgaccacaatggaaacagaaagttgggaggttttcataacgaaactccaaccaatgttcatcacgaatgtgtggaagtttcaccaatttaccacgcatcaaaggctgatggatgtccagtcaaacacggactctaagaaaagaaccccagccctcatgaagtgaatcttcatggacatcaatgtattcaccaatccattcaccaactttacaagcaagagcacgggacttactaagaaatggaagtcgatgaacttggacccaaatctgaactgtgtttaaatcctccttagagacattgtgcagaacagttggtgagtgtaagactat

SEQ ID NO: 246410 - DNA, 1006 bp, Cannabis indica
gccttcttcaaggctggtctctaaagtccttcagctccttcaaatccacggccaggttggccgtagactgcaagtctgcctggtgcaactcctctagggacttcaccttggcagccatttcgtccatggcctccctagcctctcgaagctcgcgtctggcccgggcagcaacctcaccctccaccttcagcgcctcctggtgcctcgcttccaccttggcctccctctgcctagcctcctcttgaagctttgcctctgcaagggcctccctctgcttggcctccccccgaagcttcgcctccacgagggcctccctccgtgtagcctcctcctggatcgcccgcctttcggcagacaaatcctgaaggatcctcatggcctcgtcaatgcccctgaattcggacatgacgtaaccatggtcgattagagtgttggaaaggcgaccggtctcagcggtaatctaaaaaaaaaaatatacaagtgtgagatcagatgccttagacaaaatattaagaggtggaataaattacgaagtactcaccgcagccatggcagagcttatgtcttggacctggtagatagaattcagggaggcacaagcatcatatctcttgggcagaaattgcgtcaggtgggagacgaactggctagtcatctccgaggcaaacggagccaaggtgcgcccaacgaaacggttgaaccaatccatcaaaggatccatgttcaagtcccacggattctggaaggcttcctcctggagagtattctactgctcctcccgaaggatcttcttcagggcctccacctcggcatgcccccgactatactcgtcaagggcgtaattgtgtttggccactcgaagattctgcctctcctcatcagcaggaaccggagtcaacactatacccgtgaggcacagtgtattcctccgcctcggaaggaactcccagagtcatggcttggggccggagtgtccaccctacggggccgcttagaaggctcctcc

SEQ ID NO: 246411 - DNA, 579 bp, Cannabis indica
agaccaaaaccacaaagcatcaaaaaagctgaggctataaaacatctcgttatgtaagcaaatttcccatgctccgcaaaaatcagacccaaaaggaaagcaaacataaggaaaaagccactaattctctgtccctttgtgtggtggcaaagtaaacatgggagtctttaaggttcttttgtcatttcatgactcgttcttgtcagaatattattcaaatacaagaagtttaaataaattactacaggtgagttccacggattaaaattgctagaaataaatacatggtacgcgcttgggggtaaagtatttaattcacattgtataccttactcggtagtgaaaaattaaattcaaaaatcctctattgtccaacaagtagaagctttctaaatggattaattagattctgacttctataccttccttcgacaaatgttctttaacagattgaattggtacctgtgaacacataattcacaggttataacataaaactcactcgcacaactgaaaaacataaaaaattggactggttcttaaaaaatgctataatctcacctcctttcgatgaaaaat

SEQ ID NO: 246412 - DNA, 990 bp, Cannabis indica
gataatgctctgctacagaaaggaatcaagggctagagatctaaatggacggagtcattatattccgctgcacccaatgtaaggttttcttaaactcttatgtgtttatttcattgttttagaattcatattaggatgttaataaaacatacttggtagtaaatctagatcctggtaaaatatttccaacactgatgtgttatttaagataacttggcttccttgttgacaagttgtactccacgtggcattgatcttgcccatgtgaacatgccacatcatgtgttcaaaaattgggataacatttgcccctatgtccctatcggacgtctgaaagaatagggactttccagcttagtttggactgatggtgccttaactgggcgaatcttgaaatatattcaaccttgaaatattttctcttgtttgtttggtcacattccttagctctgaactgataatatttctgcatgttattttttgcatgcttcgtggtaaatgagagagggatccacctgaagtatataagcttagttggtgtaactcattctcattccacactaaagaaagctcttcactttccattgtggctgacgcaccatagtccttcaacacccacgattcttgctttgttttgacgatccaagccttccaccatcttcctcaaagttttttcactagcgggtaagctttcaaatcctattttctacttgtttacttggattttccattgttgtattcaagtttttccatgctttgaacattatttgattctcacattagattgtattctttttggtattttgatccgcatgatagttttagaatgcataatgtgtaatttctagacaaaacagatttgatttttgtctttgtcatgattctttactcattgagtcacgaagaacacgttcgagttttcaaagacacattttgatccaaaactaaccctagccggtcctaggggtcttatttgagacctggccgacc

SEQ ID NO: 246413 - DNA, 533 bp, Cannabis indica
gaagcatccgtaggaacagggacttcttcaaaattctcagactgggcagtagactcgaactcaggataataagccgccgtcgtctgagttgagcttccctctgacatctcgggctcctccttggccgcctcaagtggtgccaacacaggaggaaaaatagcacaaaggcacatagccagaggtggcgtaacttcgactcgagaaacagcgtaagtccctaagcccagtgcagcttgctcaaaacagggacaattgcagacctctgaaaaatgcaatgggggaagcgtagtggttcgaaatcacgaaaactcgaaaagggattcaatgaaagaaaagcagggtccaggggctgcaagcctgagaaaatgttggaggaggaaggctcttttgagtgcggtatctgatctttaagtagggaagccataatgcaggaaggatggacaataaactcaactgaacttacccagaaaaagaaaagagagtcgaaagaattcttagataaaaaaaaaagagctcaactagaagcttattta

SEQ ID NO: 246414 - DNA, 1292 bp, Cannabis indica
tgaaaataaatggttaagcgtcattttttaagtaattaagtgtgattattaatatgcatcaccataaatattttcatgaaaattgaaatgtctctctaatcaacaaaaagtctaaatcatgaaatcattttaattgtagtggctatgattttaaaacttaaatatatacatatatcatatcagaacaggtatctatttctcgccccaccccgtttctgactcgaatatgaacatttaaatctatacccacccgcccctaaaagtcgacccctgctcccgccccattaggagcaggtacccgcgggtgtaattgtcatgcctaatacaatctaggaatacctataaatttttctactctatcatttaaaatacattacaaaaactctacttttttctattttagaacacatttttacattacaccatacatcacttttttttaagatatatcactaaaatcttacttttttttaaaaaaatatattatattttattcatttgaaatatataatagtagagaaatgataaaagacatcagtagtgcctaataccctcttatatttatatcgatattggtcaaattaagtattgagtcttatatagtttaatttaataatttttaaagagtatcgctaaccaatcgtaagaggacacgtctaaaaggtgttatgcaccagtggtgcccaataacaatgctcataatattaatatatatacacatatccacatacaaaaataattattaaaaccctaaacaattaataaaatatatttagagcaatcaatagtaatttataaatataaaatataaatagtgtattataaagaaactttaaaatgaataatgaatttagaacatatgttgttgcatgtttcactgttctttaaattttttaaagcttttatatttttctaaatctaattacaatttttttttttacatagtaattagaatcactcatgaatttacgatatatatatccgcaatcagcgtaagaatctcatcgaactatgataactcatcatctgaacaaagagtataatttaccaaattatagactattgaatttcgaaacacatagaataaaactgctctcgaaaatctaattactaagaaaattgttggattaaatcgggtctattatctatataccaaatataccgagaggcaagagctgcttctcctattgtctaagatattggcccatcttctcgagctgtgggagtggcctgggcgcaattagagaaaattacactctatacattttttatattgttcttttttattttta

SEQ ID NO: 246415 - DNA, 994 bp, Cannabis indica
gtctgatgttccccatacgcattcattcaataaaataaaagaaaaagaaaagtaaataaacgtgtcagtatccatttaggcattttgctaaaacaaacagcatgatcatcataaagagaagaagaatttatacataagtatatagatatactgatacatgttaaactgtataagagcttcagcatctgttttggtataatctaacaagagtaattagattttgaatataatttttacaatatttgagttctattgtcacaacaattatgtttccaacagaccaaataatcatatggatattactgatattgaatgactaatttaaattttagatggcaagctttcttcagatttaggttcctacctacatcaacatatattcttgcgcagccaataaaagaaagttgagtttgcatcagcattcccctatctctaacagtctaatttatttagagaaggcaatatttttaggctcataagagaaggccataaatctaacacatacccattaaattgaacaagcgaaatggtgacaactcaaatttgattttcggtagttgaacaaaagcccatgaaacagctcctacgaatggctcagttggtatcaatcgcaatttgacccaaagctctccatcaatgtcaaagtctcgaacaccaaccggtactttaattggtaaaatcccaaattttaatgagagcatcagcaacatacgtgcaccgcctgtataacggaggcctatttgatacctggagtaaggaaaatattagcagacaaagatatcattcaaaagttcaaactaaatctagactgtttcttacttctaactggaatccctgcctaaccgtataatattcgggagcaataaaactatagcaattgctatgtaggtatgcaaggactcaaaaatcagacattgtgggacatgcttaaccaagaatctaaacatacgtcatacaaaagatctctaatcttctcaatagattgtagtaatcc

SEQ ID NO: 246416 - DNA, 1186 bp, Cannabis indica
cttgaagccccgaagttgcctgagatactaaagtctgaactccctaaggttcctgaagtgccaaaacctgaagccccaaaattgcctgaggtaccaaagcctgaacttaaggttcctgaagtgctgaaacccgaagctccaaagtttcctgaggtaccaaaacctaatattaaggttcctaaagtgccaaaacctgaagccccaaagttgccagaggtaccaaagcctgaactgcctaaggttcccgaagtttcaaaacctgaagccccaaagttgcctgaggtaccgaaaactgaactccctaaagttcacgaagtgccaaaatttgaagctccaaagttgcctgaggtaccaaagcctgaactgcctaaggttcctgaagtgccaaaacctgaagcgccaaaattgccaaaggtaccgaaacctctactaccaaagcctaatattcctaagttgcatgaactgaatcatgatgatgcctctaaggtgcctgaattgccaaaaattgaagctccaaaaatgcctgagctaccaaaatttgaagtccctaaattacctgaaattccccatgaatttcctaagcttgaaattccaaaattacctgaactcccacatgagcttcctaagcccactttgccaactattccttacctttctaaggataaatctattccttccctcattactccacctcacactagtaagccttgagcatttatgaaacgagcattgcagtggaaaattgaagtatcgcatgatctgtttgtgatgtttctttatgaattgtttcttttgttaccaataggatcctgatatcccagcatagttacaattttttctaccattattgttgttacatgataattgtgacaaatttttatcgattatagcttatatttttattttaacatcctttgtattgtataataaaatttattattatgttcacatgggtgaaatctttcctttctctctagctagtactcttctgcagtactacgacaagaacaccacaaaatagtttttatacattgttcaaacattaatattatgattattataatttttctactttatttttgtttgaacaaactcttatattaaagaaaatagagaaagtggtactctaatagcatgtatttgttccaaaaattattctcaccttatcaatgaatctcgtatatcg

SEQ ID NO: 246417 - DNA, 656 bp, Cannabis indica
taaaggggcaggacaatgtccatgaccagctcgatctatccagcaacctaagtgacgagggaccataaccttcccctgagggaggaaaagataccctagctatcttaggaggataatatattgcaggaaaagaacgatgacgcttgaaaggggggtatcaaagaagttcgcccaacattaattggattaggggcaattagtccagtcaagcaattacgtggaagtattgcaaagaaattaaataccggctcacgatggctgttacccgatcatcttcttcttatgttgctaaaaatcctccaaaacaaccccaaaaaaacagaacaacgattatcaatgggcaagaagagtttgaaagataatcctcttagccctacttccccagttcttgctaaaagaaaattaggtgttggtacttcgaagaacactaaatcaaaacgccatcgacctatcttggagaatttcaactctgattttgagttggagccagaatttttaaagtctcccaaatctgataaggtatttttctattaattttgtgttattttagggttttttacatgttgatattattacacatttctctgtttgtgatttttttttgcatgtttctgtttgttagtcctcctattttacagttttgtgtttgtttgact

SEQ ID NO: 246418 - DNA, 716 bp, Cannabis indica
gcaataaatgattctcttccttatcatttaatccgagcccaaatatctctctaatcaggaatttcaattgcccttactgtataacttgtcacacatttaatctagatcttccgaacacttaaaactcagacaagtatcaatatcaatatgcgtataccatacacacattcttagtatagataattagtacactgcttcttcccatcatacactataattatctaagcaagtaaagcaatagcaaataacataagcacttactataccatgagtcaacctgtcttcgcagtaaatgtacatattcgacaatctttagaacctttaaaactatggctgctctgataccaagttgtaacgccctaatctataggaatgccacgtgtgtgattttatatactagtttaatattaatagattaattacttattaaaaaaagtaataatattaaaaacttgactagaagaagacactaaaaacggacatcataatagcattaaaaatgtgtttcggggatccctattataaaagatttactcaaaagactatatacaataacaatttaaaatatagcagattcatccagtccaaaacaactcctggcaactcggcacatagagcggtgggatcaatatatacattgttggagaaggcagtcacctcatgggaaatttaactttttcttgcccttacttgcaccacatagcacccgtgagtca

SEQ ID NO: 246419 - DNA, 568 bp, Cannabis indica
taaataagacaaaaggcaagagacgacatcataaatttaatccaaattatttggtaataactttcttttttagtattacttgtggaataaaaatcaattgaatcagagtcaaatagagtttcttgaatatcccttaagaattacaataagatattttaggtgttcttttagaaaatatgaattaagatcttcaaaacaatgaaatgagccactatttataaggttataattaaataaatgacattcattacaaaatatatattcattaagggtgtgtttagaaataactatgtaattattaggtatggtaactaccagggtggtaattacacagtttagtaattacactatattttaaaatgcaaggtgtgtttggatatgaggtagtaattacatatgaattcttaatatcttgtttggcaaaatagttagtaattacatgggaaaataatattttttagtagctaatgtttaatatggaaagtttttagtaattacacagtgtaattacatccaattctcatggggggccatgagaattggagagtgtaattggaacccctcaatt

SEQ ID NO: 246420 - DNA, 1294 bp, Cannabis indica
gaagaagactgagcaagagagttcccgctctgtatgactttgactgcatttttttttcatcgattggttgctgttttgtatgtgatttcaatttcttctagcaggttggagttgaataacaggggctctgttctttacagctcctgtaccattaaaatgaaccctttaataagtggtgctctttgtgtacaaagtaaactaactacagtgggagtttctcttttacaacatttccatgtttgtttatcttggttccttaaaacacacggatttgtatatttgtgatgtttgtttacatggataataagattgttatttctgattttgtcttttattttggaacattttgatagaaactagaacattttgttaattaaataattgctgcaaattatgttttaaatatatcaaagtttacatgaacaattctttctaccatgctcaaatttctgaagttcatataccgaaatcgctgcaacattggtctgttcaaatttaaacaaatcaaaagctacaacttacaagattgctcagtttttgtgtgctagtttgggcagccgggaagaaaggcagagaaaaatggttaaggaatgggattatttacctcttgaattttgacatgtactaaactaaatcatgtcctttgaatttttctagtcgttaaaattgtttctcgaaccattgagattgttagatttaaaacttttatctaattttactaaagaaagtcgtggatgaaaatttaggagcacaatttggtacatatcaaagtttacgggacatgattttattaatatcaaagtttgggacatgattttataaatattaaagtttgagaggcacgatttagtacacggataatcaccatattaacaaaattaaatgaaattagacaacaatctctttaaattcaacaatctcaatacatcagaaagaacttttaatgaccttaaaagtttaaagagcatattgttacgataaatatgatgttggaatatgctaactcgtgtcaccttagttaattttaagaaaataaccgattagtaataacgttagaaagtaacattagatatttaatccaaaaatatttaagtatttatgccttaaataactttttttaggcatcaaccttcccaaagtatagcatatattttctttttctatagaaatttcttgtatgtgtagtttttctttcttttttccaaaaagagggtaaacaataaaaaaaatcagggttttgaacaatggatgatccacaagccactattcacaaaccaaactaattgattttttt

SEQ ID NO: 246421 - DNA, 523 bp, Cannabis indica
ataaggtgaaccaaaacatacacaaatgaatgaaaaaatacttctgtttctttattgatattgaataatccagattacattgaaatggagttttatttagggcataaaatccaacattctagacatgatgaacatgatgcatagatgattggatatggctcccacttttcacgtagcgcaatctcagcagcagtgctagtttcaatgacagcagctggttcttctttccttattgcatagtccatatatgtgcaagcaaggtgaagaataactcattccttccagattttgaaattgtcactcctaagcttaggtatttcattattgatttcagcgtatttaaatgtgaaagaaatagcttgaagaataggatttaaaatgtagatgttaaaaaaatgaggctttaataaattcatgttttaccaatgtagaaacatgatgaagatgaaaattatactaaatctaaaattgcatgtggacaaaattttaaatctaataagattatatgaactttatgatagat

SEQ ID NO: 246422 - DNA, 1681 bp, Cannabis indica
gccagggcgttcatccttcgattaaaggagcagtatgggaattcctgttaggttgttatgatccaaatagcacctttgaagagcgaagtatccttaagcagcgacggaggtaaggtatttgtttaactgtattttgatcttaaaatatgctttagacatcttaaggggcttctttgttatcatccaagatagtgttcaagtggggggttgggttcatgttgtatcttatactatgctgcaatatttcgggtgtagaaagagattgctacgctttgatggctaaatgcttgctttacttgcactatgggatctaaagattacatttttcctgtccttaaaattctgcctttcatatgtcaatgggagcaaagatcagcatttttttgtcctcgtttaatctcacatcgttcattttagggagcagtatggctcatggaaagctgaatgccaaaaaatggttccagttatcggtagtggaaagtatatcaccgcagctatcattactgatgatggccgaccaatggaagattcaactatcgataaaatgagtgattgtgaggttatgtctacatcttctatcaattcagacaaaaaagtgattcaatggaagcttttattgcatcaaataggtgtgtgtgtgtgttgcataactatcattatttcagtcattttgagctcaagtccacctgaattactacctcaattgtctcaacagaattctgcttgtgttttatgaaatcaattaacatgtatattattgatctgatgtggattgtaggattagatgtggcccgaacagatcgagcacttgccttttatgagaacgaagctcatcaagccaaactttgggatattctgtctgtttatgcttggctagacaatgatattggttatgttcaaggtgtgctttccatgatcattttacatcaaaaactaaagacagttatgagagacaattacaatcggtttgtgtttgtttgtgcaggaatgaacgatatttgctcgccaatggtaatacttcttgatgatgaagcagacgcattttggtgttttgaacgagctatgcgaaggctggtattgctttagatcatccctttcattatcgaagctttttctgtatgcattttaggtaaaaatttagacttttttctgtctttgttttgataacagagggaaaattttaggtgcagctcaagttccataggtgtgcaagctcagttgtgtacactgtctcaaataatcaaagctgttgatcctaagcttcatcaacacctcggtacaactttctaaagctttgtagtacatccaaatattcatggctttttcttagccacattaaattacttttacaatgtgtttgatattaaagcggagaattgaatacgattgtctgaaaacttataactgtgtttagttgtgtatggaaagttttagttagattaaaaaaaactaaaaagccaacttagatgtcgaaacagataagtgatctaccagaacaaccctttaagggggtctattacagaaatttccaaaattttaatatgctaaatcgattgtattatgaatgaaggaaatgtttagaacccactatttttaaaggatttaagattattcttccatatggagtaatctcatttccatggtaatagttttcccaaacttaaaagagaaaatcttatac

SEQ ID NO: 246423 - DNA, 1033 bp, Cannabis indica
aaaaaaatgaggaaagtcatccccgagcgaatgacaaagaagaaaatcaaaatgcgagtggttcgaggactcctcgcaatatcctgactattatttgcgaaccccatatcgcaggagattccaggaagtcgcatcagcgatatgtgagagaagccaaagataagccgctcaccaatgtgaagaacttgagcgaacggttggagaagctgttcaaaagggagcgatatgcgagagaagccaaagataagccgctcaccaatgtccaccgcatactcgtagacaatggaagttctatgaatctcttgaacttctaggccttcaaacaaatgggattgcatgagaaggatctgcgacctgtgacatcaagtagatacggttttattggagatgtcatcgcattaaaaagaatgatcaaacacccaatcactttgggaactccacccgtaatagctaaatcgatggctgacttcgcagtaattgaccaatactcggcatacaatgctgtgattggtcgacctatcctaaaggagatgaagatcgtgatgtccatctatcatctcaccatgaagttccctactcccactggagtaggatctatgcgaggagtccagtcggactcacgagaatgctacaacacagcagtaaaactcgcagaaaagaagtcagttaacgttatttacttgctacaggaaccacctcctcgtcagaaggtattcagaatagaagaagtaccacataaagacgagccagatttggatcctagaatcctcgactacgccacgacggcccaggccgcggaaggcactatcgaggtaccgattgatccaatagataataataaagttttgaaaattagttctaaattaacttttcaatagcgggaaaagcttgtcacttttctcaaacaaaacctggatgttttcgcctagaaacattcagacatggtcggaatatctccgcaggtcatgtgtcatcgattgaacattgagcccgaagtgcgaggtgttagacaaaagcgccgcaaaatggaccc

SEQ ID NO: 246424 - DNA, 503 bp, Cannabis indica
tagggtttgatattttctgcatcatttcaagtaaaattcagctaggtcttgtgatttaaagctgtaggtaagcttccatcacctctctttttggtttcatgaagtttgagaaaatggattatgcatgtttttgtagtttttgttgttgtagctgctgttagtgtttgtattgatttgagaagttaaattatgtttagaattttttgatttgagcatgttttgataggtagtttgtagtttgagcaagctttgagttttagaactcaagcttggctttaatggtgaaatttgattctgagcttgggtactagttttattgcttggtttatatctattggggtatattatgcaggtctggaaggtttggtaagatttggagtcgatttggttagggtttgaaattgtttggattttctggggaaaatcggctaaccggtttttgcagcagggttctcgaaaaatttaagttgtcgattcgcatcagttttaggtttctggttggt

SEQ ID NO: 246425 - DNA, 920 bp, Cannabis indica
atccccaattttcataatgcctaattttcaatcaatcaaattggtgggatgaatggggggtcttctacctctctgcagtcctttacccagtccttaacccgttgtcccttgtgtctacccttgtttgtttccatttattctctgtggtctcccttgtgtccttttattcgtagtgccctctttatctctctttctcgttccctagtgtgtcgtttgtttgtctcttgttcttttctccctggttggtgttttcttttgaggagtttgtggaggtggggtttcctctgttttgacttttagtatttgtctgcctagtgttttttctagcgttttgtccactgtttgtgcgttttcggaattgtgggtggaggtttggtgtgtggtagtctgagtgtgattagtgtgtaccgtgagtcgtgtggtttagtggtctttggtgtgtgaatctgtgtttttttattcctcctttttggcctcttctcttgttggtatctttgtctttggtgcagtaatggaagtagttattgctaccaaaccctctgctaagggtaaatgttactcttgctctgaagcaactgtcactctatctcctagtgcttcttcactcaaagctttaactaccttttgcctttttggtaaagttgtggcccctatgagtgtggatgttgccactgttactgactttgtgaaaaaaacatggcataacaatgtgtccattgtggcaatccctggtgaggcattaaactctaatcattttgaacttggctttaatgatgaggaggatcgttcttgggctttggtgatgggtccgtggtgtgttagggggtacacctttgttttgcaagcttggtccccgagggatgaaggaagactccattttaaccacctgaatctctatatccagttacataaccttcctc

SEQ ID NO: 246426 - DNA, 722 bp, Cannabis indica
ttacggtttgagtttctaaaatggttgccgcgctagttgcaataggggtttctatacgattttttgttgcaatttagattgcagcgctagttgcaataggggtttctatacgattttttgttacaatttagattgcagcgctagttgcaataggagtttctatgtagaatttcgtaaaaatgtgtaaaaaaaaaaaaaacccctaatattttaaaacacggtggttaaatgcatattccatttataaggaaaatataatctaaacaaaattaaacatttttatacatacaattttttttctttcttcgtttaaatttgttattttatttattttaatttattattggagacataaaataacaataatttattttatttatcgttagttatgtgataaaatatatttttaataaatattaaatagttcaatattaaaaagtaatcaatctaaaataatcgatccaattagcacttttacagattggattggattagatttgagttatatacggattgaattggatctaaaatataaaatctgcacttagtgttgatcagatgcaccatgaataaaatagtgcagattaagttggatgaacacttctaatatacattaaggaagatgattggtgggcattgcctccacttaaagtagctggtattggaagaaaattgtaactgttaaagagcaaattcaaagcatgcattgatcagcaacaatt

SEQ ID NO: 246427 - DNA, 586 bp, Cannabis indica
gatggtgacttggaaacaacttggcgggatccaaatacccattccagagcctcaaagttaacatgggcgtagggctaaggaccctttcccatgttgactgctatgactcgagtttcttcactcctagaatattttctttctttccacgtgtcaaacattgatgttcacatcgtcaaagctacttttggtgtaagaattttcccccaagtcaactttacacttgtatgaggttgaatgaatgacgtgaactaagcccatttctctcgaaactaccaggtgggcatcaattttggaaatcttaggcaattgtattttgattgtcttaagtgatttcctttgaattgggagacttctaaaatgtttcgacataagaatgtcaacatttactctgatctttgggtattatcttagcattggctttcttgtcacgcatcgtatttaagtagatacaaatgtagtctttttttcttttaggttgtaccctatgagttctttaatgttctctcgcttgtgtttgcagcaggtgtggttttgttcatctcctcagcttcatagtggaggaagccttcgtcaactccttagcttt

SEQ ID NO: 246428 - DNA, 1030 bp, Cannabis indica
aacactcaaagacacctgtttgatgagctcaacatcaagggaatcaaacaagtcctcaataagctccaagtccattgtctactacctggctttataagttgagacactttacaattagttagtgcgagatgattagagagcacacacgaattatcctcacacaaaagccaaggcgtgttaagcacctcagtagatgaaccaggccctattctcctacgagcaccatctttgagcagcgtttgtgactcaaagacactacgccatataaaactcggattgccacctaactcggcctccaagaatgtacagttaggaaaatatcgagccttatatatccgacccacaagggagtcttgatacaggagtaaccgaaaaccttgcttacccaacaaagacagattatactcacgcaaactctgaaaacccattcctccagagttctttgttttgcataatttcctccaactaaaccaactcacccctttcctgccacccgaactccaccaatacttagacataaggctttccagatgtgaaaaagttttcaaaggcaacaagaacacagacatggcacaagggagcccaagataagtactatgttcatctgcaagtctcattctaaggatcccacacaatcggtctcgagtagcagtaggcacattattactaaagaatacagaggacttaatgaagttaacctgttgaccagaagcgatctcaaatagctgaagcatatgtaatatattcgaagcctctctatcagttgcgcgacaatagacataactatcatcggcaaaaagcatatgagatgtaaccggagcaccagtagccaccttgcaacctttaagcctaccatcccgctcgaactttcgtatcaaagctgagaagccctcagcagaaataagaaataaataaggtgatagagtatcaccttgtctaatacccttcccaggaacaatcagacccaactcatgcccaccatgaattattttatacctcacagagctaaccgtagcaataacaagatcaa

SEQ ID NO: 246429 - DNA, 1513 bp, Cannabis indica
ataaattaccttagtaaacctgctattacatagaaatttgtaataggattagaatcatattaaaccataatcaatagatacaattgaaatccaaagccctaacttttattcattgttaattcctttattaatttacctgtttcttactttcactgtttttattattttctaaatttaattttcccttaaattttatatagccaaatagaagtaaaaattgaattttaaagtacttaactacaatccttgtgggatcgacctcactctttatgagtctattacttgtttacgatacgtatacttgcgtgttaaaaataccacaacaactgcatctgttgtctatttaacgtggacctacgtgttacgctcacatgtctatttacaataaggccttaaatggtttatctcagttctggttattgagtctaaactaattatgtcttgagcgcataattctttatttcaacatatacaacatattattgcattcataatcacttaaattctagagtaataattctagatcacataattgctaaatttagggtaataaccctaatctcagtttctcacataacatacacatgataacttacatgtgtgccactacgctaaactctacgtactagtttattgtcttaccttgtaatccaagtatgtggagattccacatcccttggtgttcctgaggaagcgttggtaatcttagtcacacaatcctgagatttcacaaatagggttaatctcaaatttcttttcacatacagaaataatttgagtttcatttataaatcaacatatagagctcaaaatgagctttccaacaatatcaagaatgtccaaaacggagtcttgagtcaaaagttatggcaaaaatgagaaaacaaaaaccccaggaaaatcaggggccacgccacggttaccaaggcccctcgctatggcggctccaacctgctggagcctcgccgtggcgagctttgctgtggctgcgacgacaggccctggagccctaaaattccaacttttccatacactcgattttaacacaaaaacataccaaaacttaatcaaaatcatgcataaagtaaaattttgatcaaaaccaaacaaatctatcattggtattcaattgagcaccacacaaagctcaaaatcaacttcataattcaagcatgctacacgaataccatagtggcacataattgcacaagcttaaaacttaaatcttcaaagcttagcccagaaattcaaagcatttcccaaaatttaaacatcataattcaaccctaaatcctcccaattcaatctagatgcatatacataaacctaatagctcaatcaggctataatcaacataatttccccttaatcttcacaacatgcaacacaaatcacaagaacaccatgaacatccacaaactctatacacaagcttaatattcagtaattaacaatatgcaaaagagattagagaaagctacctaaaaactctcaagctccaagtaagaaatac

SEQ ID NO: 246430 - DNA, 1127 bp, Cannabis indica
aacttagcataaagcttgtgttctcgtaattgatgtaaaaaaattcaaagatgttgttcatattctacttttgattgagagtacacaaggatgttgtcgataaataatataacacaaatattgaggaaatccttgaacactctattcatcatatccataaaagttgtcagagcattggttagtccgaaagacataactagaaattcgtaatgacaatacctctgccgtctccatggctttctacatggcgaccatcacctcttgcatttttctattttgctctttttgggctgcaatctcggcttcatgatcagcagccttttgcctcaagatcagcaactctgtttagctacctttgtcgtaagcatcatactcgtcaaagttttcttcgtactcctcgccgttagccttatctcactcctcggagtccacgttcactctagaggccacttcctcgttctctgggatttgagcatcctgaggaggacagggctgacatgtattgttacgagtttccaccattgctgatttaacttttcagattgttatttgttaaagatgctttcttcagctctcaatgaaagcaccaaaatgttgatcgaggttttcggcaaccaattaaataatgtataagaagagatgtagaaagtttaatgcatgagatttttacgtggttggggcattcatgagccttagtccacgagtcttttgtattaatgagagtatttattacagagaatgttcttggtggatttctctcctattttctctcttcgattccttaaacgaaactgttcgactccttttcaatttgtgtgtggggtatttatagtgtttttctggggcgatccctaggagtccttctatgttaccttcataggggcacatattcccaaccgatacgaaataggaaatacatgacctataccgtaagtatcttaggagttacgtggatataatcttttatcccctcttgactgatgtgattcctcataatgtagtcgccactagactcatcgattgtagtgtaattgtcgtaaaaaggggcttacgccatctgtcatgtcgtttatggaggtttcaatacgtcttcccccatgcggcattaaatgcaaagtgattgttca

SEQ ID NO: 246431 - DNA, 546 bp, Cannabis indica
cctttgatcgcataaatggacattctatgtgttgatactgtgaaacatgcgagttcctgacaagtcgtcaaacactttagtcatttggaccaatcctatgtagagaaatgatctttactagtcgcaggagagatctacttggtcatcacatataatcggtatatgcacaatcagtatcaaatcctttaggtcctgcttatcattgactatgcgatgcatagtatgcgactagaccctgtctcgaccgcatcatattctccctctagatgatggctattttttgctcatcaatcttgaaccgtatatggctctgataccatgttgagaatcatggggttccatctcaaaatcaattggcaatgagtgaagtagcccatgttcttatatatggctcaattttctaccatttattctatgtgggacaatgtccacaatagttatcaattaacacacctttaccatcgagaactgatccacgtgtcaatcttatatgagtttgctctcgtatttttcaagtgaaaatttggcactataacaacttcgtgt

SEQ ID NO: 246432 - DNA, 600 bp, Cannabis indica
aaaaaatgaaagataaacttgaaagaaacagggcagtacacatacccccgtacagaaataaaaaagagtgcccatgttttttcttcgtatatacaaatttccaaatggatttgtccaaagagtaactgtcatttttagaagacatggatgatagatctatcataaatgacctcgaaatgggtgaatggaccttctcaaattggaacaataataaaatggagttggagatcgaagaaaagaaaatctactctaccctaaccaattaaaaagagaattgcttgtttaattaaagagaaatgcaatctctaatggagatcggtgatgtaaaattataaaatagctcatttaataaaatttctgctctaataatgtgtaaaaaaattatataaatttagcccatagtaaattttatgtcgaattcagcataatatttattatgatgtaaaatttgtgttattataaatgcatcactttattatttattttaatgtcacttttagtatttattagtatttttagctatactattaattattaattatttatattatttttttttattgttttccataataaaattaagggacttttttattttta

SEQ ID NO: 246433 - DNA, 770 bp, Cannabis indica
acatcagcagattcatgacggaagcgaccaaggtatcacgggtaaccgaggatggaaagttatccgcgatactggggggcattgaagtccttggcgaactatggaagaatataaggaaaaacggaccggtcgactcaataagcgatttccttgaccgggccgaaggtttcatcaagctcgaagaagccattcagcgagcagaaggtgagcaaaagctgaacaaaacgaaggctccttctactggaacgtccgcccagcttccccaatattccagcaattcaaatggcaagccttcaggcaacaaccacaagcaaggaaacgggaagaagggaaagttcaccgaaaaacacggacagactccccgtgatcgcatcaaacacactgcattcactatcttaactgaagatacagaaagtgtgtatatagcgacttagtcgctaattccgtacaagaagcccgggcccatgaagaaagataccagcaaaagggacatcacaaagttttttcgattccatggagactacggccacgacaccaacgaatgctacaacttgaagccggaaatagaacttctgatcaagaaaaccaggatctgttgcctccgccaatagatggacacttgcaagtcatcattggaggtacgcacatcgctggagagacgggcaaagctcgagaacgatatgcccgcacagctcaagacgagcaagaagaagtcatcctggacatggaagagaggaagcccaaagttccacgcgcaggagagccaacca

SEQ ID NO: 246434 - DNA, 883 bp, Cannabis indica
tagttggggagaacacttgtcactagtggaattcgcatacaacaataggtaccaagccaatataggcatggctccttatgaggccttatatgggagaccatgcagattgccattgtgttgggaagaaccagatgatcatgtcattattggaccccagattatcactagtaccactgcaaagattaagggaatccaagaaagacttaaggttgttcagagtcatcagaaaagctatgtcgatctccatcgacgggaagttgagtttgatgttggtgattatgtcttcttgaaagttactcctatgcgtggcgtaacgagatttggggtgaagggtagctagccccaaggtatattggaccttttgaggttattgataggattggggaggtcgcttaccgattaaacttaacaagacagttggaatatgttcataatgcgttccatgtgtttatgttgagaaactatactccagatccatcacatgtcattaagtatgaggctatcactcttcaggatgatgtgacttattcagaacaacctgtcaaaatcttggcgagagagctaaaagttttaagaaacagagagattccagtggtcaaggtcttatggaaaaaccacagagaagacgaggctacttaggagttagtgtttgagatgcatatgaagtatcttcacttgtttaattttcaacttgaggttgtaatttgaaattttgggattaaatctctttaaggaggggagaatgtaaggacttagttgactgagtcaaaagtgaaatatatataatgataaatatataatataatatatatgtataaaaaaaatcaaagcagaccctcctttcatatcgcctctatatatatatgtgtatctctctctctct

SEQ ID NO: 246435 - DNA, 518 bp, Cannabis indica
tttttagctttaaatttttattaaaaaataatgaatagtatcaatgctacaacatagcatctatgcaaatttctagaataacatcttcttttctctaatggtatagtatctcaatgttttgccatatgtctacctcaccaagcatcttttaaagtgtttcataggggtcgagatgctcttagtaatgtccaacactttttataggtgtcaccttataattagtcagtgatattctctaaaacttatattcttaaattatatagaatccgctatttaattacactaataacaatatgacactaaaaaaagtactatttaacaattctctttccttaatgtataactaactaaataatgaattattataattgagagttttcttttttttttttgaaaattataaaaactaataaaaggaacaacctaaccttgtaataaatggaagaagaaaaaaaatggcatggtgggcccctattagactagtactcatatttctttcttacatttataagtttgca

SEQ ID NO: 246436 - DNA, 1271 bp, Cannabis indica
gtttcagaaccaccctgacggttgcctcgaccctggttcccttgaaacctcttgttctgacttaagccaccgaggtgcaaatggtaattttcatttgtgatcactggtcgagccactaccacccccaccataaccagaagtaggaggattaggagctctaccagcaattcgagtcccttgagactcctgagtacacccaattgcgccctcagctcgtagtgcccttcctcaccatgtcaacataggtggtgttgtcatcagtggtaatcataagatcatgcaatatttttggattcaaaccatccaagtactttctttcttacccaaattggttggcacaattcccgaggccaacctagctaatcggtcaaattgagttgtgtattcattatcactcatattctccttttggatcagctgggtaaattcttttctttttacacttttgactgcttcattgtagtactttgtgttaaacaactcctggaacttttcccaggtcatagtagtaacatcacaagtcagggataccatgtcccaccaaactagggcatcctcttagaactagaatgtggcacaggccactctgtcattgccagtgacgcccataaaattcaagattattgtaatagtcgtcagccactgctgaactttcattacattgggacctcctagaaaaactagaggtgcctgcttgtggaacctttcatatagtggttccattcggttcactgctgcaactagtcctggctgcacagcaagggtaaaggccacctgcatttttggagtaggcatcgtagaagcacccttttgcctcaagcgtctgatatcttcctcttgttcattgattctagcttgcactgctgcaaacctattttcccattcctgggaaacctacaccgggttatcatctccccgaccacgtgccctacctctagggcctctgctttgaccacgaacatttgggggaatttgagctccctaaccgccactagacccgaccgaattaccctaactcctggtgtttcacttggcatcgatactattagaacaacctaaaaaccaagagcaagtctggttagatcgcgatcaagaataatttacgaattaccgcttattttggaattttaaaacatgtgcctattcagctattatgctaccaacatgcttcctatcaggctttccttaaaacataatattaaaacaaactactaaaggaattaaggcatactgaaccgtgagacgagatgatcgttgatgatgattgtaaa

SEQ ID NO: 246437 - DNA, 882 bp, Cannabis indica
cttgtttatcaatcattcacctcgatcaacaactcttgtgctagtgtatgttgatgatattttgataacaggaaatgactcagccattgtcaatgctctcatcactgatttgaactccaagttctccttaaaagatcttggttccctcaattacttcctcggcatagaagtcaaacacacagatgaaggtcttcatctttgtcaaacaaaatatgctcaagatcttcttgtcaaagctcaaatgcttggttcaaagtctgcccctacacctatggttagtggccttcgattgtctgccaatgaaggagaaccagtggctgatgttcagcactacaggtccattgtaggtgccctgcagtatctcactatcacacgacctgaattgtctttctctgtgaataaggtctgtcaattcatgcaacgacccttatctactcattggcaagccgtgaagcgcatcctcaggtatataagtggcactttgcatcatggtcttcatttcacaacacctcgcacacttgatcttgttgcattctgcgatgccgactgggcatctgaccctgatgatcgaaagtctacctcaggatatgctatattttttggttcgaacttgatagcatggaagagtaagaagcagcagaccatctctcgatccagcacagaggctgaatatcgaagtgtagcaactgtcactgcagagatcacttggctccactacctgttttctgagctgaacatccaacttcctcagtcacctgtcatctggtgtgacaatcttagcaccattatgctcactcagaaccctgtgttgcatgctaggacgaagcacatagagttagacttatattttgtgcgagagaaggtgttgaacaagcaggtgca

SEQ ID NO: 246438 - DNA, 554 bp, Cannabis indica
aaatcacgatatcgcattagtggtgcagatatacaaactcgaaagtgatacaatcactacagtgtagttagtggctccggaaaacatagtgcctaatctagtgatatttagagtctcagtactccttctcatatcgaaatcactaatcggtagtggtgcagatatacaaactcaaaagtgacacaatcactacaatgtagttactggttccgggaaacatagtcgctaatctagtgatatttagagtctcaatactccttttcatatcaaaatcacgatatcgcattaatggtgcagatatacaaactcgatagtgacacaatcactacagtgtagttgttggctctgggaaatatagtgcctaatctagtgatatttagagtcgcagtagttcttctcatatcgaaatcacgatatcgcattagtggtgtagatatacaaactagatagtgacacaatcactatagtgtagttagtaattccagaaaacattatggctaatctagtgatattttgagtcttagtactctttctcatatcgaaatcactaatcg

SEQ ID NO: 246439 - DNA, 827 bp, Cannabis indica
gcaaccaaattaggaagaatgcatttgattctagaacacaatagctttgttgcaatcttataaataacattgcaacaggctattggtctaaagtcttttactgtagtagggcatttggttttaggaaccattgtcagaatggtagtattgatctctttgagaattctccctgattcgagaaaggatgtaactgcttgatacaagtcctccccaacaagatcccagttatcttgaaagaaaaaactagaataaccatcaggtccaggtgctttgtttccagggatgccaaagagtgcctttttcacctcctctttagtaaatttctccatgagcatagccccttgagatgaatcaaggaccggtccctcagctataacttttttggatactttcttcctgttcaacatcttagagccaagcaaagttttataataagcaataaaagcttcagtaacctggttgggttcggaaactcttaccccgtcttctctgacaatagatagtacttgattctgcctatatcgatgtctgagactagcatggaagacagatgtgttgcagtcaccattttgtatccaattggccttaaccttttgctgcaagaaggaattgtaattcttaaaagtagctgcaagtttgtctctagcctctagctctgcagtgtgcaaagtagaatttagaggatcaagttgcaactggtcttgaatcaaattcaactcattctttgcttgagaataggctgcctgaatatccgagaatccctctttattaatctccttaaaaactggtttgagagctttcaatttacatagaatctggtacatttt

SEQ ID NO: 246440 - DNA, 843 bp, Cannabis indica
aatttggggattttaatattgttccaggatatattggattgcttttgtcaatagaatttttatatattggattgatttatgttttgtaagttcatgagaattgaattttgataaatggattttgtatttttggaaagggaaattcttttttgtttgtttttcgtttttgattctgatatatttattttcataattattttcgttttgggtttctatttaaaataggcatttggtggtttggttttcgaataatgtttctttgattgatttaatggaatttgtctctgaccagaagtttatgttttctttttttttagtgtggtgtagaaatttatctttttgaatgagtctactaatttgagactttactgtggttttttcagttgaattttatcttgtggaagaaattatatagagttcatgctacccttttgcaagataatgaagacaaagtatgagtggagtagggtaactctttttccctttcaactttattgtcttctgcgtattatgatttttctgggttaataaatgaactacttgcttctatctgtaatctttagcttagtggtgagggagggatgagaaaaagagaggggtcatgggttcgaacctatgacctgctacaacacattgattaagcttacttgtttctttcctcctgcaacacatttggtttctttggtcccttctgcaagtgtttattaggtgcaaaaaaaatatatttggttttgtttcgtcatctttgtaaattgttaggtactatatattgtttggtctaatatgatagttgtacatgttgctttttctgcatttaatgcagttataacctttagtaggatc

SEQ ID NO: 246441 - DNA, 1158 bp, Cannabis indica
ttagatatcaaatgagcttcaggctacgggtcccctgcttgagttagaacatcagaccaggctttcttttgtcgaagataatcaaccatagaggtgttacctttccttgttgtttgaatggctgtacgggtgtcgtccattttggacttggaatgtgctccatataagttttcgagagccttccaaagtgctgcagcagtggtacatcccataacttcagtggctatagcttcagtcatggagctatataaccaacccattaggagttggtcactcacgacccaatgctcataatggggattgagttgaactccaaaactgacctgtccttctggtgcttctgcagggacaaactctcgagggcacgcacgagtaccctgaacaaatccgtcaaggcgatgtccccttattatggtcgagaccatggttttccagagagagtaattgtttcggtcgagtttaagaggaaagggttggtttagtgtgctaaagggttgtgtgaagttagcaacatagctcgattgagcttgtgcggtattggaggtgatacctgcttggctcgaaccaggggcagggctgttgtttgcagcgttattggctgctatgggagtctgagggaggccagtcgacatggcgtttgcctaggtattgctctgataccaagatagaaaagatggtaatttactaaatgggaaaactcagctcaaggaggctgaggggtttgcattcaatatatatacttaaggatacaaacattgagccactgtgatgaagacagatgacaaaatataataggagaatgcataaccgaaaagatactctagtacaattcaatgattacacaagaaaagcaaataacagaaggaatattctaaatccccaatgcacgatgctgactgcagacaaatgggcagggctcctctgtgatgagtagcaggggatgaatgaaccttaattctcaacaaagttaatatataaagtaattgatacatcatcaattaatgcttttattgtctaatatatttcttttatattaaatatacttagtggtttttttcgtttaatttaatggttaaaagtaataatgttaaattaattaatttttttttgaaaaaaaaaattaggtttaagtatgtaaatataatttatttatttatt

SEQ ID NO: 246442 - DNA, 597 bp, Cannabis indica
tattgacttatactaatagattgtgtaaaattataaattctttccaataaacttgaccctaactccaatcacgccctggacttggacccaaaccccaaaacatccctcgcaaccgaattcgaaccgagaccccaaactcggacccggatcttaccctgaactcaaacttggacagaactccaaccttaacttggatccaaatctcggacccgaactcgaaaccgtgacccgaacttgaattgggacccaaaccccaagccttgggtttgggtccaaattctaagtttgggacacgggtccgatttcgggaacggagtcgaggtccgagtctggggtctaggtccgcggtctggggccgtgtccaatgttcggagctagggtcgaggtttgagtcgagggtctgggactctaggtccaatgtttaaggctagggttcagggtccaagtcgagggtccaggtcttagtccaagtcaaggtcgacgtttgggtcaacgttcaagtccaagtctagagtctagattcgaatccatggtcaaggtatgagtatggatccgaggtccgggattagacccggacactttgtaaacattataata

SEQ ID NO: 246443 - DNA, 4884 bp, Cannabis indica
tgaattactactagtgtgtaaaaattttcagaaaaaatggattagagaaatctaagtacacactttttactaaaattttaaacggttgaatagtttgacgatgttttcgattcaaattatatttatggatttcactattttacaacttcgaaatattaattgctcttcttgttggtttgtatgtacccttataggattttctaaataaaaaaagagacaaaggtcaatcaataattgtcctcccccaaatttattagtgagtctggcaaaataatctttatgaaaatttttattagtaaaatgacttttcaaatatttttatcagcaaaatgatcttgtatggtcgcataaacgataatgatttacatcgtgttaccatacacaatcattatggttgcatggagtaaattaagtgacctttacttgttagtttggcataatttattagggacctttacttgtggtggaggaaaatcgttgtaacataacaaaaaatgtaacatttagatagaaaagtaaaacaaaatcaataaaacagagtaaatgtcttaactaaggagaagtcctaggacagtatacatccccattctctaagtagatcttgaaacgaaaggttatcaaaagcttttgttctataaacccatgttgcaacctaaaatttaatcctaataggattttctcttagtttgttgcataaaggctcttacttatttatttgaatattgttaacatagctatatattgatataaataatctcattgcttttgcagtcagacttaaatcaggccatttccatggtttcttattatgcttcatcttcggagcctgcacaagttcgaggtaaaactgtatatatccagtactctaataggcatgaaattgtcaacaacaagagtcctggagatgttcccggaaatgttctgttggtaaccattgaaggtgtagaagccggcgatgtgagcattgatgttattcacttggtaagtggttgccgtactaagtttacgtacatgtctttagcttttgttgtatttaattgatacaatactgtaacaactaactgattcatatccactttggggtacatcccgaagtagctataatgtatgactatatattgctctatataaatctctgtaaataccatattttctaaccgtcttccttaaaagtatacatagatgatatttattatcatgattctgccaacaattttcaagtgtaacgtatataaaaagttgtttgaccctgtttccttgcaagtataaacctcatttcagagatgaatattttctataaaatttgtgtatttgatgcgtaatctattttaaacaatgtttgaatatggcacgagtaaaagataaaataataaatgcttctcctggttttaatacactcaagaatcaacatactacactgcttggccttttggtctcttctcagtaaatcaaacaaatgagtttcttctcacctttattatgctaagtaaattaagttccaattttactttaattgaaattggttgaatcacagatggtgttgtatcttatttaaattgttttgttggaaacagtttggaattattatcatgttcgtcatacccctttctaaggtcacgcatttatgtacaggtgtcattctgcacttattactcatctgtttggaatttttcataaccctataataaattcacattgaaggtggttcttaatttttgttcctaacatcaatttgatctgctcacaatcacaagtcatttttaacttctattgtaggtgttctctgcttttggatttgtgcacaagattgccacttttgaaaaggctgcaggttttcaggtttgttatcagttatgttggtgttttcttgtagtgcattttcaatatggcatcctcaatttgggatttgcaggcattgattcagttcagtgatgcggagactgcatcttccgcaaggaatgcgttggatggaaggagcataccgaggtacactctataacatacccttcttattatgaaatttattgagatttgggagctgtttgaatttgacattactgcatatccattaacttgagtaataatatgtgctttgtattttattttaggtatctccttcctgagcatgttggttcatgccacttacgcatttcatattccgcccacactgatctaaatataaaatttcagtctcatcgtagcaggtaagactgcaacaagaagatctcttctctcttcttcgtcttttgtgtctaaaatagtgattttctttttctccttttgtatttgtttgttagtggttttgggttttgagatgcttctaattgatgtgtactttttgtcatctagggtgtttagtgaagcctgctagccagaacacagatgtgttgcaatttagtaatttccttgatcttctaattgtagtttaaatttaaagcattaatgtcgttgtaagagcatcttatttgttgttgtagaaatgccacaaatggaattgttacttcttttctagatggttctctatcaacttggtattatattctagaaactttaatgtcattctcttcttgaccatagtttgtgcggtcttgttgctcatatatctcctttgttgactggtgattttatatttttaagttcacaatagacagtaagattgagctgtaaacttatgcacacttatacgttcttttccccctgccttagtttcttccgctttggattgcagcatttgttgttaggtgataccacctagaattttcaagagaatgtgtagtctaatgcaaaatttgaacactaattagagacttttccattcttatccctaatgagttttgaagctaaaagcctctttgctttctgattcaacactactgttgtctgagaatgactaaggcctcattaaatatttcgatgcgacaaatcatctactaaatcttttgtattgtatgcatttcgaaacttaatggaataggactcaatatatcaaccactattttagctacaatttattcctgagtcattgaaatatctttgtaatggttttgcaagttcctttttagctcactaatgtctacagttgacatttggtatttcccttcctaccttttgccatgtcccaggagtttgaattttgaagctgataagtagttctgtattggtgatgtggtgcagtcttattcgattcttgatctactgtcttttttttttctaattgagcatgctattgccttcatggagttattatagtggatggtctttagatgtgttaatcaggagttatattaatacaaccacacgtttctaaagtttttcaaaaattacatgttatatggaaatattttatgacatatgtgaacttttttgtatgttctacagggattatacgaatccgtaccttcctgtgaatcctactgctattgagggtatttctcaggtatatacttcttgttagtatctttctctatttcttggtatgtttgtccccttctcaattcattcgaagatggtttcaatacgactaattcatcatcatctccagcctgctgttggtcctgacggaaaaaagaaagagccagagagtaatgtgcttcttgcttcaatagagaacatgcagtatgctgttactgttgatgttattaacacagtgaggacttttctcagttatgtttcttttgagtacttacagttatgtttctagattgatctatttcataaatttatcatgtttacttggctaggtgttttctgcatttggtacagtccagaaaattgcaatattcgaaaagaatggtcaaacacaggcattggtccagtaccctggtaactttttgcaagttcatttttcatcgtctctgtctgcgatcccttcccatctgtcgtaaccatttgatgattacttgcaaaatttattagatttgattgattttgagctgtaatttccagatatcagtaccgcagcagttgccagagaagctttagaaggacattgcatttatgatggtggctattgtaagcttcatctatcatactctcgtcatactgatctcaatgtaaaggtataaaatatgtgcttttgggttgcgttaatggggaaaataaatataatgtaaagacatccaaagtggatccgttggatggaaaaagatttgttcctgaatgtatgattcttgacactttgaattcccttttacacttgtttttttgtcttaccacaatatcttctaagaatgaaaggttattccctactcataccatatttttctctctatttatgtgattataggcttacagtgacaagagtagagattatactattccggaagctagtctacttgccgcacaacaagctcctggtgcccctgccgcaccaccccagtggcagaatcctcagtaccctggtaacgagtatggtagtgctgtacaaggtcacatgcctccgggtcaaggaccatgggatccatctatgcaggctggaagatcaacttatgtctctgctcctggaacttttcctggccaaaattttgcaacatcctcggttccctcttatgcagcagcaggagtgccttccggttcatctcctcatgcctctacaagaccgtctatgcctggagctccaccgaacatgcgacatgatggtgcttcacctcctggggtgagacccggatatgtttcaccttctggtcaacctacttactatggccaataggttgtatcttcttttctttcaactaaaatgcatagtaccatagcttctatcccatttccttcctttttggtttccttgctatttttgcgaccgagaacgtgtcttggaaagaatccacaccacagattaaattgcagtgtctgatcaaactcaaatgtctttcctgctcagcctgg

SEQ ID NO: 246444 - DNA, 709 bp, Cannabis indica
gaaatgagaaatgtaaagttgtgaatttgacttcttcgacttcatggctcttagtcactgtagaaaaactagacaaacgatcgagacataatcaaaatcaaataagtggaacccaaagcaccaagccagttgtcaacttgggcgctaggtagggtttaacatcaaggtaggttgagtcgggtttcgagtttgcgggtttcgggtcaaaaaattgtacatagactcggcccgtgaaatagtatcaggttcgtgagttttgggcttgtgggatcgggttgacaggttggcctggtcaacttggtcaactctcaattaatatttttttatcacctaaattctttatagaaaaaaaaaatttaaaatccaaagtagaaatgtaaatcaaataatcaaaaaccaaacaaatcattcgtcaaacttatgttcattgttcataaaaatcatgaatgatgaaatgaatgaacatgataataaaaactaaaagtgtcacaataaattgtgactaaaaattcaaagtccatacttcatactctattcatacatttcttactaattattgtccaccatattcaatgcatgtgatatattcatatccttaaaaatgtctaaattaaaaaaatatttataaatttaatgttcacatgatataagacataaacttctataaaataaggattataaactattatagtatacatatacatattac

SEQ ID NO: 246445 - DNA, 635 bp, Cannabis indica
ttttagtaattattttgaatttcagtatgtatgctgatgtgacataacggtaattatgtataaatttttttaatggaattttataaataaaatcaattttgggtaaaatattgaaaataccctttttcatatctatggaagggctggttttgaaattttatgcccgtagaaaaaatttaaatcattgagttcttatttaaaagatatattatacgtatatatttttgaaaattactaaaaacgatgtatatttttaaagaataattagtatttttgtctcttgaatttttagcactatctaatttgaaatttctcttaaaatataataattgcataattatactccttctgttaggttctatttcttttatcgttaaaaattaatatttttacccccgaaactttgatcaacacaaaattttacctcttttaataaaagaattaattttaaaaattataatgttatattacttatgaaaagaattaataaaaattattaaaaagtctgatgaaatattaaatttacttaaaaaatttaaattattcttcaaatttttttaaaaattttattttatttaacaccaggtacgttaaaaaatcaaaccgaaattatttaaaattcaataaataattta

SEQ ID NO: 246446 - DNA, 952 bp, Cannabis indica
tggactagagatggcgccgcccaaagagtgatacgatactaaaactctacctatatggactagaggtagtgccgcctcttatgagaattgggagtattctcttagagagtccatgaattagaattttgcacatggccattaatagtgcaagagcgagacatgcagtctcaagtgagcattagtaaggatgtgtgtgttatcaccggattgtactaaaggaatagtggttcaatgctacgacaaccaaaatttcatcaaattttgtggtaattacactaaggtaaaattcatgtcgaaagacattttacctaatgcacctaagcaagacttctttaaaagtgtgcatttagtcaatcaaagtgggaaaatgttatattttgatataatatttttgattgattaaataaatgtttcagaagttacaagtttgttactaaagagataatatttaatctagtgggggattgttatattatttataataatataatatatagattaaatatgtgtaataaaataataatatgtagcatatgacaatatatattagttgtcatcattttgtaacatttgggggagttacttgttactatgagtaacattcaccattatcaccaatattaagtgtgtaaaaagatgttacgcatcttaatttgaaatttgtaatgctataagagttatggtgtgtgcatgcattacatctgagtccataacatctatggggggttatgagtttaaatttcaaatggtgatatcctaaacactatataaagaggtctaaggtgctcagattgagatgagatgttttctatcaaaaaatcacattgctagaaaacctaaggcttgataatttccaaagctatttcctagagagtgtcctcagtgcttagagataagggaaataagcttttggacaaaggtacaataccttgttcaagtcatggtgatcccc

SEQ ID NO: 246447 - DNA, 784 bp, Cannabis indica
tgatcacagttgccttacaccccatctggtctataaaagccaacattttttctttattgggttactttcgctatctcgccacttcgacccaagaaactctgagaaaatttcagaaaccatagatttcttgctgttgtttcttcgtcgttgccagtctgcattctaccgtcgatcatcatcaatttccagttcattacctttatgtaagttttatggatacattttacttttgctattcacttgcatgttagggcagagtttttggtagagcttttagtcgtatttgatttttgcggtggaataattttggcgaagaccatcgtatggcgtatcttttcatttgtgttctgctactttctttcttattcattttgcgaaaacttttttgcttagggactgttgagagtatgacacggttttcaaacttatctctctcttttcgtcttttcctttttctcctgcttttgctgcctctaggatatttacacccaatgtttgcctaggagaatccctggatttattcctggcaaacatccggagggagcctctttccagcggttagggggaccccattccctcctttcatgttagggtttggtttgggggctaactgctggatttctcttttttcagaatcttactcatctcgagacatgtctatccccatgactggagcaaaatcctcagacataggtgtaatacccggtaaaaatataaatatattttaaattttatatacaatttgtgtgagaataaatatttatttatttctactaatagtgaa

SEQ ID NO: 246448 - DNA, 797 bp, Cannabis indica
accgcttcaaatcaccacatgttgaagtatttgactctacagaatcataatcgaaatgggtatgttaaatttttaacatttggcttttgatctaagcatccatggttttttaaggtaatttcccccttccatgtcgtaccgtatctcaacacccagacttggtttgtcgatctcttcacccacaaatcacagagtaagaaagaagaattacaatagaaaaggatcaataatggtagagaatgatatttgacttcatgtctttgatttcattcagggattgaaaatcgtttatatatgtcaatatatgtcaattcatgaatcaagaacatcaatcaagaacatgataaaattcatgtttatatgactacaacatcgttatttataaagaggttagatgaattgtgatgaagttcgtgcttaccccaccaccacccaacttaagagattggtaatagaaatggcgaagtgattgttgctggtcctaaggtatctcactcctaacagtcggtgggagtgcgttttagagaaaaaattgggagagagagtgaatgatagatagggctacgaaaatggggatgaagaatcgcaattctaatttgtttatcgcacacccattgctacagctggaatcattcgaatgaagaaagaggatgaagaattttggaatcacaattaacaccttttgatagtccttttgggaagggatcggagttgataggaaattaagggaaaaatcggaaagtagttgtagatagccacctttaatatattttttttaagagatacgtgactaagat

SEQ ID NO: 246449 - DNA, 638 bp, Cannabis indica
aatgcacatacataatgacccatccttcttcttgacaaacaaaactggtgcaccccaagaagaggtactcaacctcgtgaattgcagattaagtaggttctgcaatcagactttcaattccttcaattttgtcgatgttattctatacgaggccttagaaacttgcttagcccctggtactaattcaatttcaaagttaatctctctctttggtggtaatcccaataactcttccgggaatatatctggaaattcacatactactcgaacgttttccagttccttaagtatatctttcgtggtacgcaacacactagccagatatcccatacatccttctcgcaataattccttggtcgtaagtgccgatatcattggaattcgagatccctaaactttacccataaaaacaaatgggttctcaccctgtggttcaaaagttaccgtcttcctcttacaatctatggtagcattgtacttagtcaaccaatccattcccaggattgcatcaaaatcttctaagtctaattcaatcagatccactgacaattctctcccttatactaacattgggagagaccttacccacctcctcggagattaccacttctccaataggtaacaaggtaccaaatcca

SEQ ID NO: 246450 - DNA, 1361 bp, Cannabis indica
aaaaaattaatttgaaaagaaaatgtgcagaaacaaactgtgtagttcttcatcctctggaaaatagctctgcttgtcaacactgcacttatgatgacactcaatccaggttcagtgagaacaatgtcagatgcacctcgtgcagcatcagtggcatcagcaacagcaattccaatatctgccttctttagggcaggggcatcattgacaccatcaccagtcattccacaaatgtgcttcctctcctgcaacttcttcacaatttcgtacttgtgctctgaacaggagattttaaaatgttatgagacatgaaaatttccaatttgaaacaaaaacaagaaagtgtgtgaagagataattattgtaaactagccatataattaaattatttaccgggaaatactccagcaaatccatctgctttctcaattaactcttcaacaggaattgcagctatgtttgcatctttgtcttgaccaagtaaggaagaagatggatacatgttcgttcccattccaagtctacggccagtctcttttgcaatggcaagctgatcacctgcacataacagatagcaacaaatgcttaaatactattcaatttttataagtcatcataacaaaaagaagattccatttaccagtaatcattttaacattaacaccaaggttaagtgctctgcggatagtttctgcactgtcatgtctaggagggtcaaaaagcggtaatagaccaacaaactgccatgcactgccagcactctccttgcttttctccggcacttcctgaagatataaaggcaataggtgagcatataatgaagtaacaaacatttaacgaagaatagaaaaaagcaagaacaattcataaacctgtctagaaacagccaacgaacgaagcccacgttcagcaaacttatcaatgacagcatgaacttttcttttgaagtcttctttgcagttgcatagactcaatatctgtttaaattaattgtttaagaaaaagggtcatgattaggaaacaacctttaaaattattttgtactgcacaattttgggctaaggaaacaatatgatgactcacctgctcaggggcacccttgcttgctctgtgccagtttccactagcatcaatgtaagtcaaagcagttctcttgtcaacagggttgaacggcaaaaagtgaatctctcgaactccagcccttgcctgcaaaaatattcaaatacttttagactgtttttatcatggcatggtagtacaaattcgcaaggttaactagagtatgaatcttaaactacttttacctcttttgggtcagctagcattcctacaatggctgcatcaatggcatcctggttctc

SEQ ID NO: 246451 - DNA, 1303 bp, Cannabis indica
tgttcaatgccatgaggtttccggatgagattgaggaatgctctcgcataagtgtattgattctattgttgctgaaaaatttcacaaggaagcttcgaaagaggaaaagatgataagttctcttgaagagcttgaagctttaagtgaagatgaagaaaccaaagttacttgggtagagtcaaagcagcctttcactaagtttaggaggccatttgaatctttggagttgtcagagaacaatttcaagcctcctaagccttccattcaagaaccacccgagttggagttgaagccgttgcctagtcacttgaagtatgtttatttgggagatggagagaccttgccggtaattatttctgctatgttgggtgcccaaagagaatgcttgttagttgatgtcttgaagaaatacaaaagagccattggttggaccatggcggacatcaagggtataagtccttcgatttgcatgcataagattctgttggaagattgttgcaacaattctatagagcagcaacgacgactaaatcccatcatgaacgaagtagtaagaaaggaggtaatcaagtggctggactttggcattgtctaccccatttcagacagttcttgggtaagcccagctcaatgtgttccaaaaaagggaggtacacttgatacctactttgggcagcaacgtttaaacttaaagactctggtttaaatcttgagcaagatcttcattcagtttaccttttcgaaaatattattcccgagagctatttcccctaggcgtgtgcattgacaagataaattgcatcctgttttcgttgagatgttttgttcagtttagttcttttgttttaaatttctgttgggttgtatgtttttccagtttttgtggtcttgttctcattactcgaggacgagcaatgtcataagtttggaggtatttgataactcttgagtaaagagttatttgatatcactttaaacatgtttttatgcaattttgtgtcattttagttattttgtcttttaatttgtgaaatttttagtgttttatgtttatgtgtgtaatttgaggttgttagttaaaaatcaataacttttgtgtataaattggcaaagaaaatagcaagttagtcaagttgttaactttgctgaaattctgtgaagtttttgctgcagcaaataggttagtagcaggttgtgtaaaattgcttggacaaaggatgagttgtcacttcattaaatgtggtggcatttgtggagatgacatggctttctaggagtgctggctggagcaaatacttggaga

SEQ ID NO: 246452 - DNA, 566 bp, Cannabis indica
tagggcgagagaggatcgccttggcgaattcctctggaggggaaaacacggcctgcgatattgccgtttaggttgaattgaaaagtggccgtggagatgcatgagagcaccaggttagtgaatcggggaggaaattggaatttactaagaatagcctcaatgaagggccactccactcggtcaaaagcttttgccatatcaagcttgaccgccatccaacctttttttcccctagttttcagcttgatggaatgcgcaacttcctgggcaataataatgttatccgaaatgagtctacccgggagaaaagcactttgattgggggagatcaaagaattaaggacagattttagccgattagccagcgtcttggagataactttgtagatgacgttgcagagactgatcggcctgaaatcggacagggaggagggtcgtttgaccttggggataagggtgatgagggttgcgttcaaaggggtgatgtccccattcccattaagaaagcttgtagctgctttgaggacgtcgtgcctgacagaggtccagttggatttgtagaaatt

SEQ ID NO: 246453 - DNA, 665 bp, Cannabis indica
agatcctggtaaaataaattccaacagtttaaagatatttcaagttggttagatattccctcaaactagttgggatattctcttaagtggttgagagattccctcatcaaaaataccagtaactgaattcgattataaatatttctttgaataattaaatatgatttaattaattgagaattaattaccataaatagaagcatgatttaataaatcagtctcactcattcccatagctattttcaaaatagagagaaaaaaataaattatttttctctcaaactgttattgctcaagtattgtgaatttaacaagaacaattataaactttatcctagtagtccacactactccttgtgtgtggtggatcgatttagggactacggtgtgaggattaatagatcacaattataagaagtttcgagtttaccctgataatcattaagaggtatagatatttctttcatataatttatttttagatttaatatttatacatatggtgatccttgaggctatggtacaataataatcatataacaattcatccgctgcgtacctgatttagtaccacaaaaccaacaggcacagacctagctcgcctacgctcaaggtcgggcttgtgtacaattatattttaggttatgtgtatttgttatggtgta

SEQ ID NO: 246454 - DNA, 558 bp, Cannabis indica
ccgtcaaggaaatcactcattgagtctaccggcccgttcttccttatatccttccaaagttcaccagggacttcaatgccccccagtattgcggataactttccatcctcggtaacccgcgaaactttggtcgcttccgtcatgaatcttctaatgtatgcccggagtggctcgcctggtcgttgatttacttggaccaaatctcccaaatgcaatgggagctaacgtaaggaagagaattatgcatggaattctgaagaaaaggttttccgtgaactaaactttccaagagccaacttgaaataccattgttgtataacttccgatagagtcgcgtggaagattctgcagcatacatccccccgtacaccttgtaaatccatttgccaaagtacttgagatgggaaagaggatcttctctcccagtatacatcttccacgttggcattttgaacttgtgaggcagtggcaggagattcatctttggtgagaagggagttctgcgagctcggtctaactcaagatcattgttgcgctgtccagctatgccgtgaaaca

SEQ ID NO: 246455 - DNA, 600 bp, Cannabis indica
attttttaactgcataattatcattaaaataataataattattcaatggcgtcaaaaaattaattaaaaatcaccaaaaaatcataaatcaaattctaataatgctggaaaaaagaatagtcgaaaaaggagttaagaaactacctcactctctctcactctccggcagccgcgagtgggcttcgtcccagcaggttatcttcaacctccagcagccccaaaaccagtcaagtccgacccggttaagatccgatcgggtcgggatgaaattccggccaaaaatacgatgaaaccgatgaatctttgaggggttttgcttaaaattctaattctaatccttctattcattcaacttgaagtaagaacaactaaaagagaatagatctaattgaaattcaacccaaaaactaagaactaaaacaaacccgaatatccaatgtatctcatgcaatttaaaaaattaattatgtaaaaacattagaaataattcggtaatgaaatttatccaatcaattttaggcaataatcaatataatcaaacagtctaaaattaatttcataaaaaaaaaatacataaaccctaaaaatttaatcttaaaa

SEQ ID NO: 246456 - DNA, 1030 bp, Cannabis indica
ggaattgagtaactgatcaacatagaaattttaaaaatttttgtattaaacaagttaaatttagaattgagtgtaccgtgtagcatcataaaccattgtcaacaagttgaaggtgattgagactctaaatatcttgcgcaagatttgttgattgctttcactttgataacatctcttacttattcccttgtttgagtgtgggtgacgaagcatgtcatagtcaaactctcacacagtaactaggaaccattgggaggtgtagcctcatgatcgtcaaattgttgacttgataagttgtacctgggaaggtagtcgatggtagagccgtcgactctccgatgcttaagtcagttgagtgattaagataaaagaaattgaaaaagcgtaaagtgtcgaatacattacagattctttttcgtgacctagcttcctcatgatttgatttgagtctgatagtatactgaaaccatggattgattagtgctcacgacttgtgcgtttatgattaggaatgaccgctagtttgtcaatatagattttgaagaatttcttcatctgtatgattggggtgtagtcgacggcatagctatcgactctccgatgcttaagtcagtatattattcatagaaaatataatacaaaaagaaaaggtcgagttagaaatgatactgtttaagatgagtggcattccagctgttgccatttctcgaccatcctctgctcgaagtcgatatgccccttgttttattactttagtaatcttataggggccttcccagttggggcccaacttaccagctgttgtctctttggtgttttgaaatactcgacggagcacccaatgaatctccttgaatgttcgtgctcgaatgttcttgttgaaatgtcgagcaaccttctgttggtatgctctaactctgatcaaggcttgcctctcttttttcatcaagtgagtcgagctcgagggtcatactttgccagttctgatcatcagtcaaatgttcatacctggaagtgggaattcctgtct

SEQ ID NO: 246457 - DNA, 2219 bp, Cannabis indica
ggtgccgtttgcagttttgaattgttaatatgtaggtcaaaccgcaccgcaccgcaccacatattataaaaatatcatttcttatatttatttaggtccaatatgtgaaggcccatcccaaagcccactaattattatatggttgaatcttgaaactttttttcatatctatttttaagccttgtggtatttttgacaagtgttgttcaagctttgttgtatttgtaatagtttaactatgtggtgatagtccaaactgcgaaaatcgcactacactattttttgtagtgcatttttttagtttcacagtgcgggtgcagtttgagaaattagaaaaaccgcatgtgcgggttggtttgaaaaaatggtcaaaactgcaacacccgcaccgcaagcagccctaatataaattgggtcgagcccaagatgcattctacctttcgggaattcaaaaacataactcgcttaggtgaggttctgtcaagccttgtcatattcggaaggtttatctcccttatctagaagaggtcctcaacgtgtatccggaagcctaatatagtttctcattttctatctcgcacaagattaggaattatttttccaaaatctcgggcagagaataatatcttgctaaaaagagaaataggataattgaaaatcaagtaattaatatgtcattaatgacccatgaatacaagacacagtatgaacatttagcttcgtgataaggcctccatgtcagcatacacaaggtgcctcattggctgggctgcactaaataagtccaaagtcaatgtattatttgtaaacttcctattagagggaaaatgataactggtatgacatctataacactataaatactcactgaatctttcacgtaaagggttggaaattcttaacttagttactcaggaaaagaatagagtgctcatactcattgtaatcccttatgcttttctagcctatttcataatttggactaaggcttgttaactccccaaccacgtaaaaaactctgagtgtcttcttcatatattactttttgaattgtattttctttagctcttatatttaataattagtttctgaaaaactcggtaaacatttggtgctttcatcgagagttaaagaaagcaatgataccatcgacgattagatactgtaattatgctactcactggaataaaatttggtcttcattaccatgatgatgctgatccaaataccaaaattggacttgataaagattccactgagacgaccagtcaccaagaagggaaagatctgcgtgatgaaataaaccttcatgatgatcccatcgatgaaggagaagaagaaaacgagtctaaggattcgaatcctatggatccaaaagacaacaaagtcaataagggagatgagcgccacgaactagattctgaggtcgttaagatggcctaaaaactagaagaaaatgaacaaaaattagtagcacaagaagagttttctcaattaatgctagaaaattttacgatgtctgaagaaatatttggaggaaactagaatcgtgatgaaaatatacctaatgatactacttgtcaggataccaggaaaacaaatcataaagatcttaacacctgtaatcctcctaaggatagagaaaggggaaaaaggaaagacctccaaaaaagttgctcccaatgatcgacaaaagagaatgaatcctaacagtcaacctcataagaaaaagaaaagaaccaatgcttcaagacaaggtcatcggagtaattctagaggcagaactacacacaaggagaaatctcatgctgaagcacgaaagtccaccgccaaaaaagataaaaagataaaagtaattttttgggatcaattttgaattatatcataaaatatggactttgttaaaaaaaaattatacttatcaaagacttttgtgtaggctaaaatacatagttttctcatacgttttttgtatggtccaatataggcccgattgttcgttatggccaaattactcagattttttaattttttttaatggcccaatacctatctgatgtaggttcgttgtatggactgatggtttgttatggccaaattactcaatttatttaaaaaaaaaatgaatggcttgatatctgtctaatgcaggtccaatttatggcccggcggttcgttatggccaattactcaagtttttttgaatggcctaatacatg

SEQ ID NO: 246458 - DNA, 622 bp, Cannabis indica
gagaaaatagataagttggcaatgattctttggggtgtttggggagcccgcaatgatttactttggaacaataaagctacatatgtggaaaaagttgtttcatctgcaattacataccttgaactttagaagttttctcagattaaaaatggaggtgtttcatcttcttctagtcagcctacggctggtgttgagcattggattaaaccgtctatgggagagctggaggttaattgtgatggtgctcttttttcaagggagaagagtcatggcttggggtggattggtagaaatcatgttggcttgtgctttgctgctgctgccgtcaaacttcagggagatgtcgaccccattgttgccgaagcattgtcgatgaaggaggcgttgagttgggttaaatcaaaatgggaagaaggaggctctgttgaagagttttgtcctacaatagtggttatggagtcggactgtcctctgttggttagtgccattaatagcaagagtcacgttctttctccttttggtcttattatttcggattgtattaatcttatacggtcctttttaatttttcatgtttcagttcagtttgttaaacatctgggaaccaagcggctaattggtt

SEQ ID NO: 246459 - DNA, 851 bp, Cannabis indica
ttagagcataaaacccaacaaattcatgtgttctttaaaaactgatggtggtatggattttcgctctttcgttcactttaatcaggctcttttggcgaagcaagcatggaggacattggataatccttcttcttagttggcaaaggtcctaaaagttcgctactttaagaatggtgatttcctctcagctcaaaaaggaattttactttccctcacttggcaaagtatctgtgatgccaaagaattgttgttgaaaggcctaagatggaaaattggtacagggcataatgttcagtgtgcttcagatccatgattactagaaaatactacctttaccccttactcctactgtggcgatcctcttttctcagttgcacactatatctctatggataggcaatgggatacacagatcttagaacatcattttggtgctattgacattgatcgtatcctcatcatctcatcgacaatggttgaaccggttttggtctctaaggcttcccaaaaaagttaaaatctttgcttggcgattcataaatgatgctctttctacctccatgaatctagctcataggaagataacttcttctactacttgtacaatttgtatatgcgcgtgggaatcagtaggacatgcaatctttcagtgtgaccgtgctaaggccgtgttgaaaaagtttcaattccaagtatatatgccgaatattagtaacattaaaggctttgatatttttttcccacattgcagctgctcacaatgatggtgatttagaaaatattacatgcctaatgtggtgtatttggtctgaacgaaataaaaaaattcatggtaaaagcctaaaccagca

SEQ ID NO: 246460 - DNA, 1123 bp, Cannabis indica
aaaattatataaatattgggaaaaaaaaaaccattagcatatatatacaattggcaaacccacatagaggtaaggggtgtatatatatttcttacttaattatatataatgtatatttatagcacaatgctaatcgttaagctaatttatatacatcataattcatagaagctaataaggatattttcatttttaacattttatgtttactttttgaacaacttatttattctttgttttttttttactttaatttatatttaatgttataaaaatataaatttgtatcaatatttaacatgttataccttatacgtagaaaccaaatacaccccatccttttttaaaaaaaaataagtcccctacactttaaattctaattaaggttatatatttttatataacaaaaactattaaaagcatattagtacgaacctgtcccccatgaattaatcccattagtcctaaagcagtttgcaccaagatagagtggtctccttcaaaaggtgtgtagagtttgttagtacaagaagtgtagctctctgcccatccaccatcttctctttgtgtttctagtaagaactcaacgcctctgcgaaccgcttcacagttgttgtagtgtcttcctgcagcttccaatcctctaatggcaaaccatgtgccatacacaaaacagattccccaatatccataccaagacccatcagccatttgtgtatcttcaaggtaattagcagcattggtgatgaatttatcaacctctttctttctgtgcctaggatgtaatttcctaaacagatttaatgcctggattgaagaagaggtgcactctatgtacctgtttatatatgtaaatatagatagagagagagagaaagccggccatgagtataaagtgataacattgaaaaagattagagccgattttttatacataattttctctattgatatgtatacacaatattgataattcatgtatgataattttacttactcatattcaataacaaggtcttcaagaaactccaccgggttgagccactgaaaaaagaaaagaaataatattattttttactagttttaataatgaagattgatgtaaattaaaatatgattatga

SEQ ID NO: 246461 - DNA, 583 bp, Cannabis indica
tggtatcccagatgcagaaattcacccaaatggaccaaactggttgaatgactttagtggggtgatgaagaatgtgtatgggcctgttactggggcgaaaacaatttatgaggatgatgaaagctatttgattattattagcttgccttgtgttgatcttcaaagggtaaaagtttcatggagaaatacgctcacacatggtatcatcaaggtgtcctgtgctagtacatctcgcacgccatatattaagagacatgatagggtttttaggcttacagatccgtcatctgagcactgcccaccaggagagtttgttagagaaataccactttcaacccgaatccttgaggatgctaacatagaagcttactacgacgggccaggatctgtactcgagattgtggtgccaaaacttcgatcagagcctgaagagcacgagattcgtgtttgctttcgtcctcaccttggaggcaaaaatgacctaatgtttacttgacaaaagaagcgaagagacttgtaaggatcgaagctgttatgcagaggcttaattgtttgctcaactctgtattatacaatgtatttt

SEQ ID NO: 246462 - DNA, 655 bp, Cannabis indica
aaaggatacaagggttagagaactgagtggaaggagaaatattattccgctgcacccaatgtaatatttctcatactttatatgtgtttacttataatcggtttagaagttcatatttagggtgttaatcaacatacttgtgagtagatctaagatcctggtaaaataattccaacagttagccctaacatgtaaagtgcattgccactagacgagctcgactctgtaagtggttattacttatgattaagtttcttttaacttgtgcatgtaatgttgttattttcttctcatctaaaggtgatggttaaaatgttccttcttgatattttttaggtttgtgtggtttaggagttttaatatgcctcctagaacgttagtcagattgggtggaggtcggggtcgaggccaaggctaagactgagatagaggtcaagataatggagggatcaatgaactaccacatgcactacatggatgggaagagcgccttgctacactggaagaaactattcgtaggaaaatgaagaactttgccagctaagacatcaaccgaagccgccagttcaaataaggtcgccagagccagaaaatagagacccacaagctgtggtggtatatcctgttggagaggctagacatgagattttagcag

SEQ ID NO: 246463 - DNA, 1123 bp, Cannabis indica
ttaacttgctgaattatttctgggctgccacctactttgtattccaaacaagctcattccgagctatccaaatacaataaaccagagcagccataccagctgctagaaccttctttttgaagcttgaacaccttgcttttcgaacccatttcagcaaaccagtgagggcagcagctgtagtgtgccaacccaaccattccttcacttgcttaagacattctgtaccaaaataacattcaaagaagagatgatttgttgtttctgcaacattattgcagaaaatacattcagcaccatcaatgtaaccatgtttgaaaagcctatccctggttttgagtttgtttagcatagctaaccataaaaggaagctatgctttgggatattcaatcttgaccaaacttcattggaccaagaaaccttctcccaattcggattaaaccagttcagctcctctactattttatagttagtggtagagaaggtgttatgctgcacacaatctttaattctttctttgagatccaccattttcctccaataccaacttccactcataggagccttgtattcccaccaagcttgttgttttatgtatacattgtgtacccatttcactcacaaattatccttctttttttaattgcccatacatgtttaaccattgccgcagcattccaataagggatactcaccagccctaaaccccctgatttttttggacagcataacttctcccatgcgactgccccaaccccattcatgaggctcttacctgtccacagaaagcttctaaaaactgcttcaagctctttaataatctgtttaggaatgaagatgatttgacaccagtaaacatgtattgacatcaaaacagatttcaccaagaccaacctaccagcaaaggataaatgcctagtgctccagactctgatccgagcagtcattttctgcactaagccgatgcaatctgaagtagaaatccttctaacacagataggaaaataattttaatacatatatattatattaaaataattttgtttgaaaacgactcatgggttgaacaacatgaaaatatttgtggccactttaaaaatgatagttctctgatagcatctcaac

SEQ ID NO: 246464 - DNA, 1501 bp, Cannabis indica
actaacataaaattaaactcattggttaattagattaataacagaacacaaaaaaaaatattaaacagtgaggctttaatattataggaggagaccagccatatatgggagttaacaacagtttggagaaaaccaacaaaagtagagttttcaatggactataaaccacaacatgagataaccttagccattttacagaattaagaagtacaaaatataagccacaaacttaaaacttatctccaaaattgattaaatacaagtaatgtaaccaatatttgcatcaaaataattagagaaagaggataaacttcattccatattaaattgcagcagaaccaaaagaggaaaatgaaacacaaaacttaaatgagcaactgttaccaaagcctacaactgatgcatgatcaaataatgttaaaacacatattttcaagtatttatactgccataaacagtctcaacctcgttgcttgaggttgccctgctttcggaacagaatacacgacagcttaacaaaactgagttttgtgacaagtacctgaaactgaatgcccatgatttggatgaaatgtgttcaaccattgcagccaccattttcctttttcacaataaggaatgtgcttgctctgtaagattattagccacaataccagcaaacaagctcaattcagttcaaacagccttacagatacaaaatatgcccaacaaagagtcaaagacctaatacaaccacaagaaaaccattatactatatgactatttgaaaaccattatacaagagcagcaaacaagctcaatttagtttttaaaaaataaagtatatatatataatccaaatgtcgaactacaatcattaccctttttctcatgttttctttacagcacaattttgtgccgaaacagggtagcatgtggattggaagattaccaaataatgaaaagtagaatagaaatttcagagtatttaaaacacagaaacagtgcaaaaccattaacgatgtcacatgctaccagctctgctggatggggatttagtaatggaagacttaaatttggctatgtcaacaagatcgtcgaacagtttatcttctggcttgaaagacttgctaggtggcacatatgatgaagtagataccgggcatgagttgtgtatcccattatctctaacagagagaccataaagtcgctgttcaaggtattgtgacccttgctgctgaccgtggccacaataaccagccatttgctgaccatagaaaccagaatcagctgatattctatggtctgcttgcattggctgcagttgcgtgaccatatactgtcctccatgacatggctgaggatgtaaacaaatctgatttgttggagcaacaaggttactgattgctgacaaaggattgctcgtatatacaacaaaaattttaagaatattgaatttagtttatccaaaaataaaaaattaaaaaaaaaaaagaaagaaacgtatatacaacaaacaatc

SEQ ID NO: 246465 - DNA, 1044 bp, Cannabis indica
tccaacccatggagaaggcaatctgttgactaggtggatcaaattgggattgatttggtcaacacttcgtacactgattgtgggcaattaatctaaattaattgcataatattcattgtaggaagtttctcctttaatcttgatacgatgctctgttatgatctgacaactggagttttcttagttatgtgtaggaataaaaagggaaactgaaaaggtcttccaggaacacactgtctcgtctctccagtctcgtgattctggagaagtcttctaggtacggctagttgaaggcggaaggctctgcgagtgcggaaccaagatacgttctgggagggttatattaagatgggcttggcccactttacctttactaagggtccaattgatgggtcttggatgttgacttggaatacacgtatcaaatgctggaagcaccaatatcaatatttaattaagaataaataattaatgttgattgagtcaatcccacgaaatcttataatcttctctgattcttactatccttaaattataggagtgttgattaatttatttatggggaaatcagttgaagagatgaatctggacattttttctcgtgagggtctctggtcggtcatcccttccgtttcgagctattggttacttagaatgctagtagatacgctccgtccaacacctatctaatgctgatcaacctttcttggcatacactgtgggccaatatcttttgcatattcgtattaatattttcgcatccatccaatatcttatatgttcgccacgtgtcacgtcgttctatacaatatcatcagtgtgatttttagaataacaattattaaatttagttattgtattattataaatcttttacatttattttttattgttttatataataaagttaatcctagagtcattaatttttttatatttttaataaaaatattaaattttgaatcaaattttataattgtgtattgggtccgatactaaaatttaatgtaaatatatcataaagttaatttttttttttatttt

SEQ ID NO: 246466 - DNA, 557 bp, Cannabis indica
agttggtgcactttgggtggaacttggagtttccatgcaattttccaaatcttgatctcaaaatcactaatattagtgccctctgcatggtgcatcaatcggtaagcctcctttacagtataaacgccatggagatccatatgccaataccaagtgtcaaagggagtctcctgatcaatggcggtctttaagatactctccttatctcgatcattgaaaatatccgaaaccacctcaatatcccaaacccaatcacccaccaccataaggttgtcaaccgtccaagtcgccataccctcagccatagaagtaacccacgggttggagtcatctgcaagccaaggatcaaactgaacactaacatttgtgcttggaccaacaacccgccgagcccctttcttgatcaaatcttgtgtttcaaaaatactcttccatatgaaactaggattcggcccaagagaagctctcagaaaagacccatgagggtaataacgggccttatacaccctactaacaagagagtgatcttgtgtgactaacctccaagcttgttttcc

SEQ ID NO: 246467 - DNA, 845 bp, Cannabis indica
aaagccaaatctgaagctcaaactgtcctacccaatttttttaagcttgttagcactcaatttggtgctaaaatcaaaggcgttaggtcagataatgctaaagaattggactttaaagatttttttgcctctttaggtgtcattcattaccattcatgtgtccaaagacctcaacaaaattccgttgttgaaagaaaacatcaacatctcttaaatgttactagagctctattatttcaatcttacatacctttggtctattgggataattgtattgccacagctacatacctcatcaatagaacaccaacccccaacttaaagttcaaaacccattttgagaagattcattccaaaccaccagcttatgagcatcttagagcttttggttgccttgcttatgcttgcactttatctcaaggaaggtccaaattttcacctagggcagttccttgcatctttataggctatcccataggcatgaaagcttataagttgttagatttaaacacaaatagagtcttttgttcaagagatgttgtttttcatgaaaagatatttccttttgtgcacactactaatattctacagcagccacatctcctcatttagcagccacatcagaccccatacccaaatctcctactgttacagcagccacatctcctcatttagaagccacatcagaccccatatcagctcccaaatctccacccaaacagcccaaatcaagaccctctcggactgtcatgaaaccttcttacctaaatgattaccactgttttttggctgctaataatgttgttgtttgttctcaggatgcaatgtcagtcactgcacatgct

SEQ ID NO: 246468 - DNA, 647 bp, Cannabis indica
cctataataacaatatcatccacatacttaactaacaaaatgataccagcaaatgatcttttataacacacagaatgatctgacttattttttcaacaaactaaatttctcaacagcctgactaaatatgcctgagcaaacaaacctaagagattactccatatacatttcttcctccagatctccatgaagaaaagtatttttaatatcaagctgatacaaaggccaatgatgattagttgccatagaaataaacaatcgaacatgtgtcagtttggcaatgggagaaaaagtattacaatagtccactccataagtttgagcataacctttggcaagaagacatgcctttaagcgagcaactattccatcaggattgactttaaccgtaaaaacccatttgcatcatatggccaattttcctgaaggtaaattaacaaagtcccaagtaccatttgcaactaaagcattcatctcttctatcattgaaataaaccaaccacaatgagacatggcttcgcgaatagtttaggaatagtgatagaaccaagagaagaaataaaagagcaagaagaagaggaaagatgattataagaaacaaaagaagaaatgagatatgtacattttatgtttacctttacgtagtg

SEQ ID NO: 246469 - DNA, 2930 bp, Cannabis indica
tttaattttaaattatatacatgtaatgctaacataataatggtctaaatagttatattaccattttgtttgtcacttaatatataacaaaattttactaaataattaatttataataagtaaatagtttgaaaaatggaaaatttaaggggacaataatatagagatgaagaaacaaaaaatactatataaccttatattatccgtgtgaaccaaatgagaagagtcgtattgactttttactgctgttagtctatggacattgtcaaaaaagtgtatggttggcccactttgaccacaatcattcttatattataatatcaccttattttggattaaaattactaaaatcctaaaacctataacgtgtctgcaatttgaagcagaaccactttaaatgtagccaacaaaagcagccctgtaacaaaagcatgcatgtcagtcatgtcacactcgggatttttgtttgttaaattatttgttctattttgtttgcttcttgatcatctccattacctgagattttatacacattcccatagtatttatttagatttatatagactattttttttttaatttggaagtatcaattaaacttgaggagagatattgaaaactgttcaaatgtactaaaggtttcatacattacaaacaaattacataattatatttaaaatgttgccccatagaccactgcatacatatacaataaatatatatccaattttaaaaaatgatcatatatataatattgatcatagaaacaaacatgttcagatggattaaatcaggtgagaaataatattttgatatgtatttgattatttgtagcttcaaggagtgctaggatggttagtgctttatctagaactcgactacaagatggttatgtttcctacccaagagaaagaagcaggaaggaactaccagcgcccaacaacaccaccttcttttctcttcttcttcttcccaaagcttctgatcgagttgcttctcgctacaatgaccttgaggacactcttgccagggcaaatgcttggcttaatgcttctcaggcatctggagtccctgttgtcttcatgaacatacagaccgaatccctcctcactaaggtaaaacttcatcaacgcattaatccacatactatgaatcatgtcattttattgtcaccatgtatcaaaactcacttgttcaaacgagcattcattccaaaatatagaaaaactaaaagagattgggttcaaagttagtgcttggaaaaatcctgaatggtatcttaagtaggctaaggctaataataagtgccaatgtaacagatatcaggagagacggcttcttccactgtgaatgcagggtcattatccgatctggcgacccttgctaatgcaagtttatacggttttgaggattaccatggggttgacataggtgttgttcgagctgttcgtctatggtatgcccccttaggaggagaaatcgccattgaaataaagatacaagaagacgataccaaacttggatttgcaatcagccgcactgaagaggtattatatatattctatacaatattcttttcatacaactcatgagtacagagtataccaaatcattgtcttgctcatttcatcatctttttgtgattgataacagggatttatttacgtgtcatcagtcatggaaggcaatgagaacgtaccctcaagccgatcagggctgagagatttatacagagaaggagtggagacatctaggctgctggtcgtgtcaagagtatccaaccaaaaggtccttccttggatggtttcatcaacaggagcaatgcgatgctttgatacggtctcactcagccaaaagctgtcattacatcgacacgccaaggttcctatcttcatacatgtcttcttatgggacagggcattagtatcagctgcagctgcagctgcaagcataaaccagacccggctaagagctccatcttcaccaccacccgccatgccattaccccctgaggttcaactagtgcgccagccaagcgacaggcaagtactacctttgccttctgatactcaagatggtggtggagccagtagtaataggactactgagcaaagactcattcgtgacacagccggggagctctcgtttaggttccatgattttgctctctctagcaactgggtttgatattaattattgagtactgtcttctctattttattatttttgattgttttggatggagggaatttttattagtcaagattgttcatgtgttatagagagtttagaaataaaaggttagcaatgaaaagtagatgttaagtcatggcctggtcctattttcatgtggtttgtatatttaagaaacatgtaaaagaatattttgccttacaaaatatgaaaaatacatattacttttaattgagctgactaattatcatttaattattgctggaaataagtgttcaaatatttataacaacaggatatgtttttcaagatttgtgttctcctttatgagtagataaaaatctcaactatattcttttgatctcattaatatgctcaaaataattttaggatcgaattgtcactgaagttactaaaaatatcattcaagaatatcgcattttatttatattgagtagttattcaaatttgattggaatcaaagatattctaataataatggtataagcattgttattcggtattttaatgtgtttaaaattatattaatgtggggcaatgtaagtatttagtaggttcttatattatttattaaattaaaatgtgtgaaaactaatattattatatttatagcacgccacttcttataatgcttgacatttttgcaataagattagattattctgcgggctacatgtactttggagaaattaaagaatattttttccaatttagag

SEQ ID NO: 246470 - DNA, 620 bp, Cannabis indica
atccaaccatggaaaaactgaaaaagatatctattcgtacccaactctttgatgaaaacacccttactcggctgccaaagtgaagccatcaaatgccgcattgcatcaaaatccaccgccctacccgcaagaaatttccccaccaaacaccaccgatcatcaaataacgtctcttcagcctcatcatccccaccaatcaagattccttcttcctcatcttctagggttatctgagcatactgctcatttaaatcaaaagtatcgtgactactagaaaccatgaagaacaaaagacaacaaaacaaccttaaaaactggagagaacttttaccaacatgtcatacgacaagacctctgtctatactagtatagatattaaatataagaaaaataaacattttgaagaggcatatgcccctttttaaaactatttttaaatttattttaactaaaaaaattaatattctacaccataccattagatcactgttgaatagttgtaattaatttagaaattaaaagaaaaatgaataataaatatcttgtaacttgatactttatttccttataaaatttaattatatttaaaattaaagtactaataattattaattaatttt

SEQ ID NO: 246471 - DNA, 1041 bp, Cannabis indica
cttatgagaacctggaatgacaaactcttttccattggaggtaaaaaaatccgacttaaagctgtggtgcaatctatcccaacttatttaaggagttgtttcaagttaccaataactctctgcaatcaacttgaaacaatgatgtcaaaattttggtggggttctaatgaaaatggaacaaaaatccattggcgaagttggaaacttttatgcaaaaccaaacttgatggtggaatgggctttcggtctttcatacactacaatcaagcgctacttgccaagcagacatggagatttctcgacaacccatcatctcttttgagtagactattgaaaagccgatacttcccacacaattctttcctagaggctcctcatggtcactccccttctctcacatggcaaggtatccttcatggcagagaactcttacaacctgggttacgatggaaaattggggaaggcaaaaacatcaattgtgcatccgatccgtggatcccatgccatatgaacttttaaccatcccattatgagggaccaccaaacactgttgttgccaattttatcactgaagaccggcaatggaacaagcagctgttagatgagtatttttcaagtattgatgtggatcgtatctcaccattccattgagttacttcttggcaaatgatcacctcatctggcaccaccatacttcagggatctacaatgttcattcaggatatcatcatgctgcttctcttgaagattcagatctctcctccacctcaaattctcctacaaactggtggaaatatttttggaaactacagctgccacataaaattaaaatattcgcttggagagtatttcatgatgctttaccagttgctacatccctggtacgaagacatatcatcaccgattctacctgttctgtatgtcgacaagcatgggaatcagtaggccacgctctctttggatgcaaatatgcaaaggctgtctggcaggctacagggtttctttttgactggaatgttgctgcacaaatgaataagggtg

SEQ ID NO: 246472 - DNA, 585 bp, Cannabis indica
tatatatatataaaataaggaaagtcaaaataaaaaaaaaggtgtgataagcatatatatatacatgcacaataataatgtgccaagtaaatgtaggatcacatatacgtatatgtatatatatattaacactattatatagaacctcaatatatgtatgtataggagggtctaacagaaaacttgtggcattaccgaacttgtggcacagacgattatcgtcaaagtttgacagtgggaaactcgttattaaagaaattcgtgagttttcatctagtgctacaacaaggtttatatagagataaatctaagcaatagattatatctcagatttaatttaatttaaaatttaaattgaattaaaaaaaatggtaatacaacttatcatataaaaactaataattaatttaattatttccttttgagaattatattaagttaattaaaaatatcagtcaaataatctttttatttctaaaaataataaaaagattgtaaaactgaattttatcacaaaaaagtggtaaaattctaaagtttataaaagataataaaaagatccccaaactcaaatttatcaccaaa

SEQ ID NO: 246473 - DNA, 780 bp, Cannabis indica
gttggttgcagaagtcattaactaaaagccaccatatgctaggttcagtagtgtttacttcagcttctccaacatcatcttcctctagggcatactcatcttcaacaaagtcggagtcttcttgggcctcatctgcaacttgctcaattaaagcctcatatctagctcggtccagccaaaaattatcgtcattttggccctcattttgacctaaattgcggaccactatctcacctacaagtaacacaacatgaaatcaattcatgaatacaacatatataaccatatacaagaatcagttcatgattttttacatatataaccatataagagaattacttcatgatttgttatctgtaagacaacatggtatcagatcataatttgttacatatataatcatataaaaggatcattattttgtatataaatgatattgcacataattacataaaactttttctttatatccccaaacatcctaagtaaatccttatatgtgactaaactttttcccatcattcaattctaaatctttgggttaccaaactaattcttgtcacaaccatcaaaataactttcatgtcctctctggctctctcatattttttattctaaatggaccaaacctggtgtacacttagtataaaaaaaattagaataatcattcatgaccatacaataaagtcaaaccattaacatcttacctacttggaaaataggtgaaaacaaaacaaaaccccaaaccaatacaaagatactaacaaaaacagtgcaact

SEQ ID NO: 246474 - DNA, 977 bp, Cannabis indica
ataactagtggaatccaatgtttcatttattgaagaagaattacaattgactacagcaggtacttcatgatctttattcatgttggtacagacacattcagaagagaaattaggacaagacacaagattgcattgcaatgtagctgaagtagaggatgcagagtcatctcccaattgataaagaccatctttaaccttccctttgatcagaacttgcccagtttccttgtccttgacaaagcaccagtgtttatgaaattcaagaaagacattgttatcttctgttagtttagaaacactaaccaaattctttttaatggaaggaatttgtaaaacagaatttaacttgagaggacagttattgaaacaaggtaaatgagcagaaccaatgtgagagatacaaatggtcttaccatcggctacagcaagtgtctcagggccattgtaggcagtggcagtgtcaagagtctcatgagtgttggtgatgtggtttgtggccccagtgtcaacaaaccaagaaagatcatcaccgaaatcaggtaataccacaggttgatgatggtcagacagatcacattcagtgagatacgcccttggtgcagacacatttggttttggagtaacccatgatttgtcaaatctgtagtggcacacagcagctgtgtgcccagacttcatacagacttgacaaattaatcgagagcttggataggagccacggccgaaggttcttggttgagttctgaattgattgtcactgggagggtctcgattgtgagattgaaatggtctgaagttgtcatttctggaattttttgaggcaagattagcttgcattttcagagtgagatcagagacagagttgtgatgatctagtcgactttcgtgagccattaacaaggcttggacttcttcaagagagagatcatcacttctggaagtaaatcctgaaaccacagggtcatattcgggtccta

SEQ ID NO: 246475 - DNA, 1074 bp, Cannabis indica
  modified_base (40)..(40): a, c, t, g, unknown or other
gaatggagatgaatgattaagaaataagtagagtaaaaanggtttttgtgagatgagattgaagagttttttggtaattggggaagggatttcagagtgggtggtttagaattaagaatgggtgaatgtatgttgaaaaaaatcgcaaccccctttttatttccgtcttggcactctcgccgcggccatagacggcctcgccacggtgagatggcatccacaatcacccctttttgcctagactatttcgccgcggccactgtgcagtgcctagaaaactttctttttttttcactacacataaaaaaaaacaataaactaatattcagtttacaaattcaatgaacataaaccaacaaaaaaaaaagaaaaacaataagaaagttcaactaaaaagaccattaaaacttgggttgcctcccaagagtgctgtctttatcgtcatatggtcggacattgattgttttcttcaaagaggtgccagaatcatggcggacttggcttggtcaaaatgacctcccaagtagagctttaaccgctgcccattaaccttaaaagtgtctgggctttcgccttttagttccacagctccatatgggaatgctttgaccaccgtgaacggtcccgaccatcttgactttagcttaccaggaaatagtttcaacctggaattaaaaagtaggacttgctgcctgggttgaaattcttttctgattaagcctctgtcatgccatttcttcgttctctctttatagattttggcatttccataagcctcattgtgaaactcatccatctcatttagttgtaacaacctcttttctcctgctgccgccaagtccatattcaatgttttcatgacaagcctgtccatataccaatctataaggagacattcctattggtgttttgaatgctgtcctgtaagcccatagtgcatcatcctgcttcttagcccaatcttttcttgaatgctaaaccgtcttctccacattaaatttaatctccctgttggaaatttctgcttgcccattattatgaggatgataatggagtgcagttctatgacgaatt

SEQ ID NO: 246476 - DNA, 935 bp, Cannabis indica
aatttttggggagaagtgatttcaactagaaaggattattactcaattacacaaaaattaatcatattgatcatatataataagatcaccagtatgtgagttttttcttcatcatcacattatttttactattactaagcccttatattaactcgaagtctaagatgtttagtttacattatgactttcttattaccacatagcgcgcttatctaaattcatagtcatattgattgatttattaataagatacatagtaatttctataacaataatgttatatttatatatttatatctattttaataaaaagaaaagttatagaaagagaagagagcctaacaaaatgtaattatatagacgaaatataattaacaagttgcactatactccgtttaccttgtgaagtgtctcagctgaaacattaaaaatatatatattttcttttgctcatttattttattgtttcttatacgactcatttaatggctttttggctgcacacatgtatttcatgcaccttcaaaaatcattaaacaaaataatatcaaattcatattaattttcacatatcctataccatatatattgcatatatacccacaagtcaccaatcataactattttacttcattaccaagaatatcgtttctcactcttttcctcacaccaaataagtaatcattatcgtataccatgtactatattatgggcatggtaatatgttttaacttagtaaggatagacttgtaaattagtgaatatgtataatgagaatatcttatacatagaatgaactttgacgagtcatatacatgaaaatatcttcatttcaagataggtaaaaagaaaaaatgaaaatatcttacagtgatatatgtatatactatatagttacaggtcatgaatatactaattatggaaatttattactt

SEQ ID NO: 246477 - DNA, 595 bp, Cannabis indica
ttaataaaaagaaaagttatagaaagagaagagagcctaacaaaatgtaattatatagaagatatataattaagaagttgcactatactccgtttaccttgtgaagtgtctcagctgaaacactaaaaatatatatatattttcttttgctcatttattttattgtttcttatacgactcatttaattgctttttggctgcacacatgtatctcatgcaccctcaaaaatcattaaacaaaataatatcaaattcatattaattttgctcacatatcctataccccacacacatatatacatatattgcatatatacccacaagtcacacccaatcataactattttacctcattaccaagaatatcgtttctcactctttttctcacacaaaataagtaatcattgtactatattatgggcatggtaatatgttttaacttagtaaggatagacttgtaaattagtgaatatgtataatgagaatatcttatacatagaatgaactttgacgagtcaaatacattaaaatatcttcatttcaagataggaaaaagaataaatgaaaatatgttacagtgatatatgtatatact

SEQ ID NO: 246478 - DNA, 892 bp, Cannabis indica
tactccaaacccaaaccctaagtcattatgatcatgagacagagctaaactcaactcgtgatcatacactcgacgcaaaacagggtcagaaagtgtctcgtaggctttctgaagctcaacaaaccgtgtggtggccgaggggtcaggacaaacatcagggtggtactgaagtgccatactcctgtaagcctttttaatgtctcccaactccacattcttagtctctagagaaagcaactcataaaagttgacctttttattattctcttgcattgtctcaaaatactgattagatctgcatgaaatggtattagttttcttcaccttcaaatttagtacactagcccctttctttggcatcataatcatgggtgctcttattgttagattcgtataactcaaggaaatatccattttttaatttaatatatatatttatatatatatatatatatgtttttggtgtcgaagcttatattatgatataatcttgatcaagagaagggtaaaagaaaagaaaatgattaggagaagaatatggtatgagtgatgatcagagggtttgggtatttatacataaaaggggttcgtgtggatgattaatattaaaaaatgatttacaggtacgcggtaaggtatcgattagattagaataatttatcttttagacccgagacaccgttgaataaaaactttatatcaagtcttaatttgacttagtaattatatattttgctcgatcgctaatggcagctacttttcaaaaatatataaacattattttaaaatgtagttttttctccactcgtggacatattcttattaattatatctcacacactaactttaaactttcttttaatttacaaattaggtaggtggtacttactga

SEQ ID NO: 246479 - DNA, 1747 bp, Cannabis indica
agatcctggtaaaataaattccaacactggtaggaaacactagaactcttatagatgctgcagctggtggagcatttatgaggaagagtgcgaatgaggcttatgatctgttggaggagatggccctgaataatcagcagtggccaactgaaagaagccagacaaagaaggtaaatggaatgttagaggtggatgccattacaaagctgacagcccaggtaaagaccctaacaaagctgatgcttgtgcaagccaaacaagctcaagtggtctgtgagctatgtggaggacctcatcacttttctgagtgctaggaagatgtgaataatctgccaatggatgaagcaaaagccattggaaattattctcaaaacaacaactttgggttcaaccaaggaggaaaacgaaagaatagtggattctatcaacagcgaaatcagaaccagtttcaaaaccaacaacagattcagcagcaaaactctagtgggaattctggtcttctgacagatttattgttacaaattatgacagaaactagatcttccattaaagatttgcaaactcaaatgggacaactagcaactcaggtagcaacccgtcctcagggaaatttgcctagtacaactgaagttaatcctaaagaaaactgcaaggcaattaccctgaggagcggtaagaaatatgatgggcctgagataatacaacaagtggatgaagagattaaagatcaaccggcaccaactccaacatcaacagaaaaaaaaagtctactgatagtcctgcaccacaacaacagtctccaccaatcagcacagatcatcatgtgaagataccttatcctcagagactccgaaagaccaatctagacaagcagttctcaaaatttctagaggtctttaaaagactatacatcaacaatccttttgctggagattttgcaccaggaattagggtcgatagcaaaaaataattatctttcatacataaccaaggtggtagattataattagccaacaccactggccacatactgtatgcaagactcaggttgccaaatggattaaatccatcagtagctaaccacagtcgaacatttcttgggtcacttgcaaactcaggatgttttgcatcaaagtctttccaagcgagaccatcgaccgggtgtcgcatcaccccatcatcttttgatttacaagtatgatgccatgtcatgctcttcactgtaattctcgaactatataatcttttcagtcgaggtgtcaacggaaagtatcgcataactttgcaaggaacttattttcctttaccgttctcggaagtaacctaacgactagttccacaaactggacaagcctccttggatgcattctccttataaaaataagcaaaaattatacgaacagacatggatagagtcataacccaagcctaatttcttcaatctctttttttgcctcgtagtacgttgttggaatattattttccttcagaaatgaaaattttaacaccttcaacaattcttcaaagatgttattagggatttttcctctaacttttaaatgcaataactttgctaaaaagttgagagacgaaatccaatcacaaccgggatacaatgcagcttcaatttcctcaaataagtcatcaaaatgtgggtttgtggttggttgttcatcttctccatgtacatcctctgttgtcgaaggaaagaattcttctagaataggaatcatttcatcctctgatt

SEQ ID NO: 246480 - DNA, 864 bp, Cannabis indica
ttattttctcatgtaattactaattattttgccaaacaagatattaggaattcatatgtaattaccacctcatatccaaatattgcattttaaaatatagagaaatagtaaaaggcaccagtggtgccaaacaccatcctacgtgtcaatatcgctattggtctaatttagtatcgggtcccatatagtttaatataatagtttttagggagtatcgctaaccaatagtaacgcgacacgtcttaagggtactaggcactactggtgcccaatagcaatgctctaaaatatagtgtaattactagactgtgtaattactaccctagtaattaccctatatagtaattacacagttactttcaaacacactcttgtttttgttgtaggtaagagagataaagagagatgtatgtaataaaatgatatagatgaataaaaaaataaaaataaaaactagtaaagcatatagttactttttaaacctctctctatatatatattcacacacttggcatgacttcacatttcctactctactccgtaactccaaaccctaatatgttctgcaatcttcatctaataataattcattcattaatggtgacaagcttaaccaaaatcattactagcaactcagcttttaatatctctcccaaaacattatattatacccaccactacttcactatcaccccagattaaaccaataattaaaaccctaagtactccctctcaaaccctaattcatttgattttaacatttcaactctgaaaaataaaataaaaaaaataaaaacatatcaaaatgtttagtctaaggctaaagaaaagactgatgctgatcagtgtcaccttcatcggtag

SEQ ID NO: 246481 - DNA, 1791 bp, Cannabis indica
agattagtggggatcaccatgacttgaacaaggtattacacctttgtccaaaagcttatttcccctatctctaagcactaagggaactctcatggaaatagctttgggaattatcaagccttaggattttctagcaaagtgctttcttgatagaaaacttgttctcttaccctcaaatgagcaccatagacctcctttatatagtgtttaggatatcaccatttgaaattcaaattcataagtcataacctccatggatgttatggactcaataaagagatgtaactcatgcacaccataactcctatagagttaagaatttcaatataagatgtgtaacaccttttacactcttaatgttggtgataatggtggaggttactcatagtaacaagtaactctccaaaatattacaaaaagatgacaattgtcatatgttacatattaatttgttacacatatttaatctacacattatattattgataaataatataacagattggacattcatttttcagatgtgatagtttgttgcaaatgaaacatcttctttgaaagttgaattttgatttatctttcccagtgttgttctaacccttgttctccttcttggacaatttttcttgaattagtaagccatttccaacaccttcatcttgcttttttgctttttctattcaattcctttggcattaatgcattttggaccttctctaatatcaatgaatctttaccatacatcatggtgtccactgttcatagctctatgtgggaagagagtttagcacaatgatagtttgatcctcatccgtgaccttaattccattgttctctaagtcaagaatcaccttattgaaatcattcaaatgatcctcaatctcaaataataaaaaactacatatacaaattgacacatattacttccttatttcaccttattttaatgatttacttgcttattgattcctcactttaattgcttttgcttgcactaattacgctataaaattttttatttttagtcacgacaaaacttgtgacaaaaagtaaaaagttgaataattataaatcatcattcctatgttgttactaaaatatcagtgacagggattagtcacaaaaatcacaattttttgtgattaaatgtgtttatagtcacaatactgttttgactaaaattaaattagtgacaacttgtattaaatactatgttttagtcacaaataactttttgttgtgactaaaagtcacatttagtcacagtatttttttgttgttactaaaaagttatcactaaaataactattttttattgtgatattctaaacttgaattgtttttaatatacacattccgataagagaaaaaaaaatagcctttatgtcgagaaatagaaaaaaaaatcaatgtatcaaattaattccatttaaaaaaatatctcaaattaatttagataaatattttactaataataattattaaagagtattattcttgttaaattatatataaccacacggactttgtcatttcactagtattatcttatgacaaaaaaacatatataattatgactaatttatatatgtgcaataaattgatgatttctcattaaaaaaacagagctaagaagtcgagtgcattactagatagctaataaagatggcagaaactgcagttggcttggtcatagacaacttgattccattactagctgaagaagcatacttgttaagtggtgtgcataatgacgtagaagaaatcaaatgtgatctagactacattatg

SEQ ID NO: 246482 - DNA, 629 bp, Cannabis indica
cttggctggacgacggcgggttcgtcgccagtgattggaggcggcggcgtcagccttctgttcagagagaaagtgaagagcaagagagagagagagaagggcgtagtcgtagatgaggatttgggatttgaaattagagttttatttatttttatttatttattaatacaaaagtaaaatctgattattaaaaagaaaaaatatttatttattatttttaattatttataataaaaattaaaatatatgggccaataaaattataccacgtgtatatatgtgtacacagtggcaattctaattggcatttaacaaccaagtttaacaggtgtattagatttgcaaacagaataatactaaaggggattttgccaccaaaaataaagatgagagggttaagtgtgtaacaatcaaaaacataagggggtttagccgaaaatttctcaattaaaatatgaacagttgaattaacatagacttttgggcttgggcttggacttgggcctaaagtagtgcgttttaggctgaggtgtgatcggcccaattctacagattttgaagaaggttttgacacgaacaagggaagagagagagagagagagagagagagagagagagagagatggcat

SEQ ID NO: 246483 - DNA, 586 bp, Cannabis indica
ggggaaaaattattaattagccttaagcattttatatattacaaccatgcataatttaaggctcgaaccccaggacctccaacgcacacgcacgctcctatgaccacttgagctagcctgaagtggttatttgttaatatggttaacttaatgaaccttggtactcagcctatatatataaaggatttgagtaagaattttctataatgttacttcgtaaagagagatgagaagtttgaatttttggtatttgtaaaaagaaatttttaggtgaattgtttttagagaaattatgaaagaaaatattcataaacttatatgtttatttggttgagaagaattaaaatataataataaaaataagaataagaataaaaataaaataaattcaagtttaaaatgcataaaaaaaattattattatttttttttatattctattaaaatggttattccttttaaaatggaatagctattctataataataatagaaaagctattttattaaaataacatttcaatactttaaaatgtaaccaaacaagaaaatataataaaaggtttccgtttcatttcatttcatttt

SEQ ID NO: 246484 - DNA, 1771 bp, Cannabis indica
atagcttggctgtttttagaggcaccaccatgcagacccgatttctttcatgccaaattgcccacatggtacacacaatagattcaaaaatcctgtctagaatgcagagttgataaatggattatataatcaccattatacatattataagcatgtgtatggtctatggtgtacttggtaagcttccaaacctccttagctttgttacaattaaataaggcatgtccaatagattcccaagcattgctacatagtgaacatatagccgaatcaattacttttcttctgcataaaccagtagcaaccggcagagcattctgcataaccctccatgcgaaaatcttaacttttgaaggtaagttcaaactccaaaaagttttccaccaatttgtatgtgagtgagaggcactagtttctcgttcctctgccaaattttctgccaaatgaaaacctgaattcaccgtgtagcagcctgttgtagtgtggtgccaaatgagacaatcggttgatgggaaaaaactgagtggaatggtcacaattctatccacatctataggcaaaaaatattgctccaaaagagcaatgttccattctctttgttctgttataaaattggctactggtagattagatggaccttgataactaatagctttgaaatcattatgtccaggaatccatttatctgagccagcaaggacattgaaaccactaccaatcttaaaacgcaaaccttgtattagcaattccctcccccaatgaatggcttgccaagtgagagatggagagtgaccaagccttgcatccaagaaacaattattggaaaaatatctatgctttaacaatcggcttagcaaagaattgggcatgttaaagattcgccaagcttgctttgcaaggagagctttgttgaaatgaacaaaggatcgaaaccccatacccccttcaaattttgatttacacaataatttccaacttctccaatgtatcttggaaccatctttattagatccccaccaaaagttagccatcatagattctaattggctacagaaagtcgaaggcagacgaaaacaactcatagcataagtaggaattgattgcacaactgccttcaaaagtacctcttttcccccaacagaaaataatttctcattccaagcatgaagcttttgccatattcgttccttgacatcactgaacatttcctttttatctcgctccgagaaggctggtaatccaagataacgctcatgacattcactaataggcatgcccaaagtgttgtgaaagaaatcctgagatgcttgagtggtattaggggaaaatgacatgacagattttgtagtattcaagagttgacctgatgcttggtggtagatatccagaactttcttgatcgcccttgccgaatttgtgtagcttcacagaagagaagactatcatccgcaaataataagtgagaaatcgatggtgaatgacgtgttaagcgcaggcctttaagattccgaatgtgctcttcattctgcaatagccttgatagcccttcagaacaaatcaagaataggtatggtgataaagggtctccttgccgaagacctctggttggttgaacatgtcccacttcttcaccattaagcataaaagagaactttgtagaagtaagacagctcatgatcaaatcaacccatttttgatggaaacccattttgaacataactgcttggatatagctccactcgactctgtcaaaagctttactcatgtctag

SEQ ID NO: 246485 - DNA, 985 bp, Cannabis indica
ctcaaaaatttagtggacatattactagatcacatgtcaaataaatattatttataaaatataatagaaaactaaattaatttatatcaaaaagacttttataagtttaattaaattaggtttttttttttaaaaaaaaaaaatttaattatattttttttaggtatgttcatataatccacaatctctggttgcaaaccatactgaatacggaccaaaccatatgagaccggaccaaatgaatctagtgtgaattttttgaatttcgaactgtttaaaattctctaattcggtcacggttttagatatctcatagcggttcaaattaaaccaatccatataattattttatatatacttaatatatattttttggaaaaaatattcatattaagaaacaactttagatagaatattgatattaatttaatattgttatgataatgattttgtattgctatttatgtattataaactaattaaaagtaaaaaataaaaaattatctaaaaaataacaccaatccctttttgagtttggtttagctttctcatttaattggtctaattttattttgaatttttaaaaaactttcgtgagcactcctaatattttaaattaaaaaataggataaacaatattgttttaatatatggtcgaataatatgccaacatgatagcttgaggtcattttattaaggagattttggcttaaatatctaatctaaataattctttatagaagcatggtaaatactattttggactctatcttttgcaaaagttattaattggattctttatttttttaaaaggataaaatagaccctacattttccaatatggtaaaaataggaccctaactcaattttcaataattttatttttttaatataaccaatttaagacaattcttaccacgaacatatacagaaaaagtaatcagttttgtcataacatctcttcatcagattattattaagtttt

SEQ ID NO: 246486 - DNA, 815 bp, Cannabis indica
tttctcatttcattttttttttttattattatatatgtgtatagtttcttaatttttgaatttttcaatttcttaggaagtggcggttacccttgatgtgatggtggtacctcggaaccatttttcttataaatgccctattaatgccctaacctccctttgtgttttggcggcgcactctcgagtataagaccctcaatttcgaaaattcatttggtgtttttctctctgctgctcgtttcaacttctctgtgctagatcttgctgtcttcaggtatatatatactctgcttctctatttaacttaagtttatttcttttcatcttctctttttccctctcctctttttttgtttatcttcctttcgtcctcgtctctttttcattcatttttaccccttttatatgtgttgttttaattactgtgtatatttttgtattttcgcttttccactatcttccctcctgcttttcttctgagatcttcccctttcttcccccttattctcttacttcccttaccattgatatatttagggcttcctggcatctaggataccatcacagttttctggcctgctttctctccttcgcctatttagttttagcattactccttctacggccctttcagggcggtggtcttgccttttccctgttatgattagatagtaagggctagtttccttcttagggttagtcttttttctcgtgggtaggcttcgggttccgattctcgtttcagctgtggtataaagtcaaatgcagattgtcaaggtgtctctccttcgatttctgattctctttcctcgagt

SEQ ID NO: 246487 - DNA, 914 bp, Cannabis indica
catgaactgcagtggatgaagcatcaggggtgtcatcctcagtgaggactagagtggatctttcctcatcagtgagagaaagattaaaataaaaaggggatccatgtcatttacatcacacagaactgaaagtggttgcaatggaaaggggtagaagaaaggtaaaaggataacaagagatgagaaaaaacccagaaaaggagcggttacataaaggaaactgctttggattgaagggagcaatcgggtaggaagttgaaatgaaagaaaattagttaaaaacacttaactgctatagactcaaaaagggcacatattatataaacagttttctcgctggctaagtttgtaaaaattaattagaaaagaaactaaaatatatatgggcaagttgtattattttcagggctacaatcaaaatatgctattttatagtcaaataacattattttaagagataattaatttttgtcttaatcaaattttgtatagtaaaatatttaattttgcagtttaataattcattaatcattagtttaacacctacacttatataaacacaatatagactcttacctattgaaatctatatatgtagggtagctaaatataaatatgtataattatttttttaatttttttttgttgttataacaagtaatatatctccctttaaaataattatttttttaaaaaaaaaaaaaaattgaacacaagaaagagaaagagaaataaggcgcgtgagtgtgccacgtaactagagtgccgagcaccggagattccgcatcgcaaacactcattttttccagcttgcacgttattcatttatttccttattatcattaggtggcgtttggttggaggtaatgaaatggaatagaatggaaaggaaacaattttcattccattccttt

SEQ ID NO: 246488 - DNA, 661 bp, Cannabis indica
gacctatatgaactatacttgctgaaaactcaaaattataggtcattatgtggacttttggtgaactttggacttaatttcaaacaagtgaacaggtgaatttttgcatatttgactatcttgtgtgtctgtgtttgaacatgtcaaattgagtgtatttaatgcgcttataagttttctttaactgaaatatgcattgaacaaaattggttcgctacttattgattttataggtttttaggcctaaagagtgtttctcaccaaacactcttatttttcaacatttttggattctgtaagtttgtacacctcatatttcacttcattaaacgactggaaaaataatttttcaattttgttgcataaaactcattttcaataaggttctagttttcctagtaatttttggaaagcttaccgtaaatcgtcgttttcaacatttttctatttttgttctttgagaaatttttttttatcatatttgaggtattataaaagatttggggtcatttgggtcaaaaatataactttttgggcatttttgaaaaatctagctggtttctacaccaaccaaaattcttgttgtctatgcacaaaacatccggaatttcggatggcgcaggaactgaattctaggtaattttttgtcttttcaaatgca

SEQ ID NO: 246489 - DNA, 596 bp, Cannabis indica
tttcttaataaatattttagactccgactacatccagacccaaatcctcccccatggccctggcgctgaacctagcctctaacccgaatccgaattctaccctagacctaaactcaacttaaataaaattaaaaaataaaaataaaaataaactttacagaacaaacttttattttctatttttaaaattgaaaaacaaaaataattataaaatgcatttttatttttcaaaaacaaaattttaaaaaaaaaattataattaaaaatttagaaaacaaaaattaccaaacgacactaagaaatgagataaaataaaaatgagctcataaaaaaagtgccacgtctacgttcctgctttatatatatagatagaagatagatcgatagatataaacaaataaattgaatggacatttactattttttgaaaaactgaacagatcatcatgaatggcacaactttgttttcttgtatgatttgttaaaaaaataaatgtgtcagtgcgccggagtcccaatcgtgattataccatatagagccccaagtgaatagcactgcaacaatttgagaaatgaagatgaggaaaggttttttt

SEQ ID NO: 246490 - DNA, 787 bp, Cannabis indica
aattctcgtgagaactcagcccatgaattgaatctccccggggtgagtttaaagtaccacggttgggctgtctccgatagtgtggctgggaatatgcgacaacgcacatcaccagtaaccttttggaggtcgagttgcatcttaaagtactttatgtgagccagcgggtcctcttgtccggtatacatcttccataccagaattttgaacttcgacaagggtaaggcatttatgtatgccgagaatggtgatcctcttgaccgatcaagttcaaggtttgaaggctttgggccagctatgccttggatcatgtccgtgagttggtccaattgtgcttgcacatatggaatagttgctacggcgacatgtttgactggccctccttggggaggctacagattttgaaaagatagggattggctggccataccctaggaaaatttatggtgaagatcaaccatgccctgcaaaccctggtcgactattcccaagtatgggagttgacctaggctggctaggcttacacctggttgttgtgcttggttggccaaacctacatttggtagggtctggtcgtacaatgcttctccatggctggctagactagtaaaaggcagggtctaaccgcctgtgatgcctcattggtaggccagaactgcattgggtagggtttggccgcccgtcactcctcggtcgactggtgttggttatgagttgattaggggtagatcacaccaattactggagtttggtggatctagatgcctaaagtgatcagtttcacttc

SEQ ID NO: 246491 - DNA, 559 bp, Cannabis indica
cccacaagcattgcagggagaattcccaatataaagtccccaaaagatatgccactctgaatagcaataatcagattttgggggttgccaattggagtagcagaggatccaacattagcacttgaggccagtgctagcaacaaagggtgagctggtatgttgttttccctagcaactttcaagataaactcagtaagaagaacacagcaagtatcattagtgaagagtgcacttgttacagcagtgaaaatgcagattctgcataacaagtctttggccccgcgactcttccacgaaaaaagtatgcccaggtacttgaaagcattggctctttctagatagatactcaccaccatagtcccaaaaaggaggccaagaactgagagatcaatggctgcatatgcttgtgatggtgttatgactctgaagatgatcatcaacatgccgccgagcagagagcctgctgttcttccaattggcagaaatggaactgctggaaacactgctagaatccaaaagagcccaaaagcaattgagccaagaacaactttctcaggtg

SEQ ID NO: 246492 - DNA, 718 bp, Cannabis indica
attaacactttgggttaattaataactagggtttattcatgagattaaatattatttataatatgcatattgtggaaatttatttaagttaatatatatttatttattatgctatttatgtaaattgctcaaattctttgactgtgttcgaaaattgtggaaagcgacgttgggcctttagagagtcgcattttgtttgctatagaattttattattatcaaggtgttattgttaggttttgataatgttgaatatgagttgattgactaatgaccaaactacccttgattaccattaaattttgaattattagttaagggcaaatgggtaaattgatagatgattggtttgtcttttgtgggcattggggggctggtttccttagttattgttaagggttgattttactttcagcaagtaaaataaaaagaaaaagaagaataaaggttatagaaaagaaagttagaaccttctccatctttctctctctctccttcgaattccttgagccagcaagggattgggatttttcttgttttaattcaagaatttcagcaaggatttagaatctctaacccaaggtataattttctagaactctttttgtggtctcattgattttagagtgagttgtgattatatatttataattttagttgctatgttaattagagttgtttgattttgtattgtagagctaaattgaagttgattgtg

SEQ ID NO: 246493 - DNA, 578 bp, Cannabis indica
ttttttttaaaaaaatatatataataactttaaaaaatattacaaacgtgacctgtataaaatataataacttgcaaaaatgagcttaacaccacatgatttattttcttattatataaatatttatataaaagtgaaaccccactttgaaaaaatgtgcatagccaagtgaaatcatactgacataaatgtccctttcgaagtgggaacgaaatttattacataataacttggtttcaagtttttctgttatgatttcaatagttgggccttttcttttgggtcaatttcattatcaaaatccagaatggaaatgcttagctaatgtagtgatagggaccctgcaatgcatgaccatataattctgaacaagcgaacccacctatcttattcaaagcctaactttcaaggacaaactatccaaaattaatactgaaatatgcaaattcgttttaaaggttcattgctctctacattctttttgaggagtagtgaatgaaaaatatttaaaattgtagtgtttttaaaagcaccagcttctaattaggacaagcaatttattatcatgggagcttgaa

SEQ ID NO: 246494 - DNA, 1131 bp, Cannabis indica
gggtccacaattaaattaattcacatataataataaaataataaaaattagtactaattgcccttacttaatctaaattactagagcggtcattacaggtatgctttgagagggcagaacaatattggaaaaaggatcgataaggtccttagtggtgttaagtttatgaaaaggatatattttttcatggaagacaacattcctcgaaatgaaaaattcttgattattgatgtcatacaacttgtaacctttgatcccttttggatatcccataaatacacaagttctagcccgaggtgtgaatttgttcctgtgagcagtaagagtgttagcaaaagccaagcaaccaaaatttctgagatgttcatattttgggagttcatcaaacaacaattcataagggcatttattgtgtagattgggagtaggagtgcgattgataagatacgcagctgtcattacacactcactccaaaaccgaataaggagtttggcctgaaagtaaagagctcttgccacatttaaaaggtgttggtgcttcctttcagcaattgcattttgttcaggggtttccacacaagtaaattcatgcattatcccaaattttgcaaatagatctttgaagattaattcaggagcattgtctgatctaaagcatttaaaagtacaatgaaattgtgtttgaacataagataaaaaatcaggaattatgtgaatagcatcagatttttgcttcattaaaaaaatccatgtaaatctagttttatcatcaaccaaagtgagaaaatatttgtaattggaatgagaaggaatgtggtaaggaccccaagtatcacaatgaatcatgtcaaatttatttttagcaaaaccagaatgtttgggaaaaggaagtctttcctgttttgccaaaggacaaacaaaacagggattgtttttatgaaaatcatcaatgctacaatcgactttattgcaaagtaaagtaagacgtttgtgtgagggatgtcccattcgagagtgccaaacatctgctgtcacagtgatattgcaggcagcaatacgaaggtcatccaaaacatacaaaccattcttctctttacctctgccaatcaccatctggagtccgtttttcct

SEQ ID NO: 246495 - DNA, 808 bp, Cannabis indica
ttaagaaattcagaacaatttacgatatagattacaatgttcattacattttatttcacacgtgttgactctcaaaaatcgctaagtgtaatttttagagtcatccgtgttatacccaaaagttcactaagtataaatttcaaaatatgcttaaaaaacatattagcaaagaaacgaaagtcgacccacttaaaggacaagccgacacgaggaggagtcaaggcctgggttgagctcctcacgcgaggagctccctgttgcctcagctgctgctctaccatctgcgtgcgtccaagggagctagaccttcccactcccgtcattccccacacgcaccaaaggagctccccgctcccatcactccttgcacacaccaaagggatccccccgctccactcactccccacgcgccaaaggagctccctactccacttacctctccccgctctctttctctctctatctctcctcacgctcttttgctccctttgtaatgttttaacttctaaggacgccacatgttgcttttataaattagtttataataataaactaacgatttaattaaaatttgtgatttaaataaactttactaagataaattttaaaatagacaaggttatcccatgttacaaaagttttacaaaaagtttagtataaggtttatattcaaaatactatacagccaaaatatcccctaacaactcgactctgtaggttggatagatcgatatgtacattaccgaaaaacactgctgactcatggttgccctaatttacccttgtccttatctgcaccacaaagcac

SEQ ID NO: 246496 - DNA, 1109 bp, Cannabis indica
ttaatacttatggcagtttcaatacatcttctcccatgcggcattaaatgcgaggtaactgtacagataggatttgatacctcccggaggtgctttattatagctttgctctccgggagtatgtgaatctctcataccttctccgggaggcatgctccttactgatccttttgattaagaagacttagtcgaattatctcaaagccttagtccttcaatccacgtgtcacagtcgtgttggtccacatattttggacaaaattaagggcaacatttgtatttcatatattctataatatattatccattaaatacttatttttagggcatacacactaacattagcgaccctaaaacagcgtctgtggcgaattttaccaaaactgacgttgtatgccctaaaaaactgcctctaaagtttaattttctagtactcaagagataccaagcatagcacgagtaagagagacgccccactagaagtacaactaggaaagcaccaacatcagcaacacagtcatgtcgacgaacctctaacgagttccaaccacgcacaaaactcaacaaaaccaacaagccctctaaaacttgaagagaacatgcaacaagccatattaagccctaataacatcggagagaccttccaaaactcaacaaaaccaactagctcacaaccagagcaaaaccgactacaaaaaaaggaagaagatcaaatcgaccatgccaaaaagagaaacctaaaacaaataaaaaaaaaacaccatggcaattggacaaccaacaacacaaccctcaactcgtgcacgacaagcctaaaccaagaacccacaacataagaattcgacaaagaagcaaggttagaaggacacaaactcgtaaactagaaaacaactctggaacctgaatgaatcaacaggttcacccatcataggtatgtcaatgaggggatgatatctatgactttgaaacctagcaatgtcgtgagcataggagtgcacaaaaggcaccgtcgaagaacccacagggatccaagaacaaggtcgaaagctccaggacgaacaacaaaacatgaagtcgacagaggccaggggaaccttgggactggcaag

SEQ ID NO: 246497 - DNA, 947 bp, Cannabis indica
ttcctggaagtaacttgccatctggagcaggtgatcacgaacgttttgatgaggcttcatttgtgcattgatgaaattcttggtcgcctcaaaccgagattgatctgatgccatctcgaatagttcagttaactggttcatgatatctacaaccgtaagactaatagcaaactttgtcttcaaggtgtcgaccatgctagatagcataaagtatcgagctttgttgttagcattctgccaatgctcgaacttttctttaactaccttggtcacattctcacctggctgctcaaaagcctcttcagtcaacacaaagaaggcattttcacctataagagcaatattaatattctctttccatttgacaaagttagctccagagagcttgttgtcaatcaacagtgacattatggagtagttggtcatagtcatattgcgtactacaaatatcaataaatagaaatcaaggtttaatacaaaatcatacacattcaaaaattattaagcatttagcaaataggaatgacaagtgaaaaatcaaaaaaaaaaaaagcaatcctaaataatttcctaggtttccaacaaactgatacagtgattcgtattgggcgagagtcatagatatcattcattgaatagagcagtcaactcaactaaaatggacaccattctagttactttttattcgatcgaaaatcgaattcgacattgcttcattttagttgagagtcaaggtcattcttatttcatgagcttctaccattgtttcatactttgtaagtcctactcttagcagtcactattcggatggacgttactaagaataaaacagttacaataatacttatattttgagattctacggtgttaaattgctaatgaacgtccatctattggggatgaatctcactattacaagaattgtgtagaatcaacaatggagatcg

SEQ ID NO: 246498 - DNA, 647 bp, Cannabis indica
aaataaataagaaaaataagaaaaatagaaaaaatgaaacaaagctcatacaagatgccatgtcacataccttaacaacacaattatataaatatatagatagtcaaaactacttgtattcttccattaataataataataataataataataataataataataaactatttgtattctttgaataaatttattcatgagactttttatcttcatcaaaacccttaacattcttaccatactatgtgtgtacatatatcctactattacttaactaggaaacaaaagccacgcgttgcgtggtgttaaaaaatcttaaactatctacgtaaaaaaagtttacgtttttaaaaaatgttagattaataaaatactatttaattgttgaataaatgaaaactttattaccatttacatatcaaaaaataataatattttctaaatgtgagatttttacttagattataaaaaaaattgaaagttttcaaaaaaaaaaataataaataaaatgcattaataaaagggactttttcattaatttttacactttaaaccagtttttttttttttggtcatttttacggaattctacatagaaatccatattgcaactagcactgcaacctaaattgcaacagaaaatcata

SEQ ID NO: 246499 - DNA, 694 bp, Cannabis indica
taccaaaaagtactaatattataaattttctatcaccaaaaagtactaatattgtagatttatttttcttcctattgcgcaatctctagacataaaagaaagagcactgctatttgacatattatggatttgctcttctgtcttttgaaagttttgaatcaagtaatcaagaaagtgatcaacactagtgttaatgaaaatatgtggaaaagggtacttccttgagtttaaacatgaatattattattacatgttaccatttgacttggcaaaatactaaaagagtcggtttttattcctttgtttatttatttgtaaattacaatagaaggtgatttaaaagagatttgagcaaagctttgaggatgatcttgaatccatgtttacaaacactcaaattgaaattacactgaagctagatttttgttttgttttccttttaatttatacttaagtgaggtattgtccagtagaaaacaaactaatgggatcataaccattatataaaagggactgatcttcgttagtactctgatcaccttcttgtatgaattgctgctgttgttgtggttgatattgaccattgctggattcttcatcactttgttgtatggatgactgtgtttgcggttgttgttgttgtagttgtggttgataataactattgtgccaaatgagttcttcatttgtactc

SEQ ID NO: 246500 - DNA, 729 bp, Cannabis indica
ttgttaatctcatttccgatgcatctctagtgtctctttttctttcctgatcaatggctctgttcaaggaaaagttgtgcctactcgtggtattagacaaggggaccctctctccccttacttatttatactttgtgctgagggactttcacggctgctgcaacatgaagaaattagaggtaatttacaaggcttaaaagttgctcgtactgctccaagtgtctctcaccttttcttcgcagatgatagtttacttctgtgccgtgccaacaatcgatctgctcatgccatcaggaatgcccttgatctctattgtcgagcttcaggacaaaaattaaacttggacaaatctgtgctttcattttctccaaatactctcccttcggttcaagctcagttgcatcagattcttcacatgcctatccaaccttgtcatgaacgttacttgggacttccttcctactctggtagagataaaaagattttgtttgctgacattaaggagaaactttggaagcatctgtctgcttggcaagagcaattgttctcaatcggtggtaaagaggttttgttgaaagctgtagctcaatcgattccaacttatgctatgagttgttttcgcctctccaaatcgctcattcaccaaattgaagttatgatgaataaattctggtggggttctaactcttctaaatctggcattaattggaagagttggtccgctctttg

SEQ ID NO: 246501 - DNA, 560 bp, Cannabis indica
ttttataccagttacttcactcaatcccagtcccagtcgcataccaatcgcagaaattccagttcttttctatattttcaatcgcagagtttcactctcaatcccaatcccaaaaaagaaatccaaatcccaattttaatgagaaagaaccatttgtcttcatcgtccctccttccaacagcagtggtcagtgccataattcattttcaccacgagcaatggctgcaagcagccccgcaatgaaaatcataacaaaactcagtaatgaaaattacgatcaagttcgactcttgcaaaaccctcttcttcccaaatggacaatgaccacggcttggagaccgccagcgatggcaagtttgggggtagcgataacaacgaccaccaccatccgcatcaacaaatagaggagcataattaaactcccaatcggatgcatgggacgaacaaaacaagttgttccctctctttctctctcaatcaaaatggttagaagcttttaatgactttgttatataaatatgtgtatatatttcattactgtatattggtattaatgattg

SEQ ID NO: 246502 - DNA, 683 bp, Cannabis indica
agacagtgataatgttcacaaatgcattgctcgacccaagaatcaaataagtatgtataatcaatgtataatcaagcacaagagaaactcattaaaacaattcaaactctaatgtttttggaatgtgaattcaattaagtgataggttctaaaacgaatggttatcttcttgttcttggaaacagtggactaaattaaatgagagctggggtaaaaatttttttttggttttttcttctcagaaattgcttcttatttattgaaatttctgagtgactttttttgagttaactaacttttgccataaatgagttgcaaatttgtgatatcgttgttgttgcaaagattatgaatgctatttttgttcttccttctcttgattttgagtcattttggactgatccaaggtttgattctcagcttttctggcttttgagatattaagggtaaataattttattttcaaaatatattgattcacatttctaatttcagtgaatttaaggacatatttgactggagacactttatggaagttccgaaagatgatatagcaatagttgaatatttgccttcccactatgcatccatgaagcccttacttaaggctcctgtttcctggtctaaggtatggaaattatgagacactattttagctaaacaacataatattttacttgaat

SEQ ID NO: 246503 - DNA, 953 bp, Cannabis indica
caccaacgtttaaaggtgaaaggatcagaagggccaggagtggagtagctggagttagctaagtggtaagcagagttaacggtgaaacaaccagaggggtgatgtttccagatgaggctatcggggctgtgaggatcaataggcactgagagaatggcagaacacatctcctcatcaaaataagctcttagtttgtctaaatcccaatgtcgattatcagtaaggaaaaaggaaactgtgtgagcgggagggaggatcccaggtttgaaaaagactttatcatgagagggaagccaattggattcagaaatattgatggaagtgccatccccaattttccaactgaggcctttaagaaggagttcccgtccccagagaatactacgccaacagaatgaaggcgagtgaccaattgcagcgtggagaaaatcatttcgcttgaagtacttggcttggaaaagccgagcaaccaaggagtccggagaggtgaagatgcgccaggcttgcttagcgagcatggcttggttatggtaaataatgttgcgaaaacccaggcccccgaaaaacttggaagaacagaggctgtcccattttttccaatgaatcttgttggaatggccaagggagccccaccagaacttagccattaatttgctaaagtgcttgcagagagaaacagggaggcggaaacaggacatagcataggaaggaatagcttgaataaccgacttcagaaggatctctttgccagctctagagaagaggttttggttccagactgacagcttggagctggctttttgcagcagatactggaaggaggaaactttagatctggaaaagcattggggaacgcccaggtatttgtcgatgaaaggcttgttatccaggtggagggtgttcctgaaagtaaggctgtcagagggaggtgtgttaggggagaaaaggatgga

SEQ ID NO: 246504 - DNA, 647 bp, Cannabis indica
tgttcgaaagtttattccttaaacaaataaagtaaaaaaggaaaataagtagggttcctcttattttcttgtcattgcaaatttgtttcataaagtaggaatataatcgtgacttgaatacttgaagatttatataaagtatctctgcagcacctttcgagaacgtatcgataacttgtcgagaaaggtcttccctgacattcggacatccatgtcgagaaccttcgagaacgtatcaagaaccagtcgagaaagatcatccctaaccttgagacaatggtgtcaagaacccatcgagaacatgtcgagaacccatcgagaaaaatatgaacagacaaaatactccaaatagcgagatctcacgatttctgcaaaatttatatcaaaacaaaaaaaagtaaataaacaaacaacaaccacatatatctaacgaaaaaaaactatacatgggtcaaggaagtttacaaaacactttcaaacaaaatgttttacaaaacacttacccattaatccacaatgagagggaggtagggcagacatccttcacgatgagggggggcgattaggctgatgagggaaggttgggcggacgtccttcatggcggttggccgagtatccctgtggctagaggttttttttttttttt

SEQ ID NO: 246505 - DNA, 490 bp, Cannabis indica
ggaaagagggcccctccggacgtttggcagcaagagagccttagaaggctttcctgggcaaaagtcgggtgcaagaatctcattgatggtgacattacgcgtgagcaaataaaagtaaagaaaaagaaagggtaaaaattgagaaagacaaagtcttctctgaacccttgaagatcatcacgtaaagaaaagacgggcctttggaaaatatatgtagtacgcaaaatgaaagtaactcaaaaaccaaaaaagaggaatctaacgtatcacatagaaactaaaggcaacaaaattctcagaaacttcaaacattaaacccaaaaaaagcagatgaacagtaaagcatgccatgaacacaaacaataaagtaagggatgcgaaaaacttacataaagttttggaactgggtgttgttgttgaacgacggtgaaacgttgactggcaatagcgaaggaaggttagtaagaatcctatggtgtttgaaggtttt

SEQ ID NO: 246506 - DNA, 1063 bp, Cannabis indica
agtggtacccctttgtgaaatatcgcccagacccatctcaaaatattttttccactagtcaaaataaatttgttctactaagacgtgaatatgtatatagctttcgcgttaaatttagttaaaatattcacttaaaatctcaccctacacatgtcaaaaaattgtgaaatttcacaaagagaaagataagactgttgtccatcacttttctattagtcacattgggaaaaaacctagttttgaagtactaacaatcattttataatcaaaatagtgaaaatctcactttttctgtattggtgccactttgtgtgaaatgtgtcttgaacccatctcaaaatattttttttcccactagtcacaatgaattttaaaagggttaccattatcagaaaagtaagattttaactattttgattaaaaggattgctagtgcttgaaactgcattttctctcaatgggttcgggtcacaattcataaaggggtaccaatatcagaaaagtaagatttttactagtatttcgatcaaaatgattcttagtgattgaaaactacattttctctcaatttgaccaataaaaaagtgatggacagcagtcttggttttctcctagtaaaatttcacgatttttgagatgtgtagagttggatactaagagaacactaataagtataaagagtaaagaataaaaaacttgttaaaaatttatcttgaaacgaagaacattataaatttttgaattgggggttaattttaactaaatttaatgcaaaacaaatcttcatatacacgtcttagtagtacgaattgattataataaatggcaaaaaaaatttcgagatggatccaggccacatttcactgaggggtaccactatcagaaaagtgagattttcactattttaattataatgaattgtaatatattttctctcagcgtgactagcaaaaaagtgatggacaatggtctttgcttccttcttgtgaaatttcataatttttaatatgtgtagggtgagattttaaaagaacactaacgagtataagagtaaggaaataac

SEQ ID NO: 246507 - DNA, 1148 bp, Cannabis indica
tataacattgatcttttcaccttccatcattaccaaagaaactttggtgatcctcaagcttctgtgcatggacttgtatctgtatccttcatcttcaagcacgcctagggatatgaggtttcgtctaagctctgagatgttccttacgtttattaacaccttgattctgccatcatactgtttgatggcaaccttcccggttccaatgaccctgcaagaatgatcatttcctattagaactttacctccatcaattgatttatcatcaaaaaataactctcgactagaacacatgtgataagtgcatccagaatcgagaatccactccttgttcatagatgactctgagataaagaacaactctccatctatggagcagtcatcactattttctacgattacagcagagtccttcccatggtgatgatgccggatgtccttcctatctctattgtgatatttgttgaagcctttttgctccttgtacttcttgcaaaatctttgcaagtgtccagacttaccacaaaagtaacacttccttgtttccttctctctagactttgatcttgattgagagtgatggtgtttactcttcgaacttactttcttgggtgatctttctcttaccaaatacatttcttctttcttggattccttctccaactgtaatttgaaatctttgacttaagtgcggcaagaacatcctccaatgcaatcacgtctctgccatacttgatggcaccttgacttcttgatatgcaattggaagtgatctcaccaagatgatggcctggatttcttcatcaactttgtggtttatattaaccaatcctacaataatctcattaaatctatcaatattatcatctaaagaaagggaataattcattctaaaactatataacatttctgttgggctttgtgccctaaataaaactatatttcaatgtaattttttctattcaattattaataaagaaatagatttcatttcattacttgtttaatgtgttatttggttcatgtgatcattcatttgtttatttgatttataaattcatccaaatccttatcacactgattttcttgtttattgtgttgtcaacacagtggaaagtatcaagattgtgtgattaaatatattctta

SEQ ID NO: 246508 - DNA, 661 bp, Cannabis indica
aatttcaaatttattaattatttaatttgtcaaataaggtaatttttaatttataatatgcccaatattaaaatagctaatcttataattaaataataatatataaatattaaagaaattaacaatttttgtaaatcttaccataattaagaaataaaataaccaatttttaaatttaaacctcaaaatatcaaaaattaataataatcttttaaaaaataaatattattaatttataattgatatttcagtttaaatatattaaaaataatattttattttgaaattaggatttgaaaattgccaaaatccgaaattgggagaaaatcccacaaaattcgggtgttgtgaggtggctgcccaggaggctgcacctgcagcctaggaaggctgcacgcggccccatacgcacgcgcaaagaggaatctgtagggcctcacgccgagtttcctcggcacctgcaggggatgctcgggcagacgtgcagggtgctgggcgcacgtgaccgaggcttcagacaaggttttatcccttgtccgcgcgcggactggcttgcccgagggcctgtctcgcatggtgttcgagtgctcgacactcaatgcaccaaaaatttcaaaacaccataactcactcaatttttatcagaatcgagttccataaa

SEQ ID NO: 246509 - DNA, 1303 bp, Cannabis indica
gtgtgaagggatatagattgtatgatataaacactaaacatatttttttatctagaaatgtggcatttcatgaacatatttttccattctcaaaactgaatgaagacactggtaatgttgatcccttcatcactattattttgcctactgctgatgtttcaaacacaccagtcaatgattatccctccactaacactgctattcctagtgttgatgattctgtgcaggaagaaaattctggtgcaactgacattgaagtcgagcccactgatgtacccaacacaccagaaattccacaaaatgcaccagcagtggtgcctagacgatctagccgaactacaaaaccccctgcctatctcagggattttgaatgctactcggttttacaggataaacataccacccctcactctattgataaatacatatcctatcataaactaaccgaatcttataaagctttcattcttgcagtgacctctcttaaggaaccacaaacttatcaacaagctatcaaatttcaacattggttagatgctatgaattctgaattaatggctttacgcaacaacaaaacttggattgtcgttccactccctccaaataaacgagccattggatgtcgttgggtttataaaatcaaactcaacagtgacggctctgtagaaagattcaaagcgcgattagtagctcaaggatacacacaacaagaaggacttgatttctttgatactttttctcccgtggccaaaatggtcacatttaaattattacttgccatttctactatcaaacaatggcatatgcttcaattagacattaacaatgcctttttaaatggagatctcaatgaagaggtctacatgactttacctcctagcctaactttatctgcctctgattccacaggtacgaatttagtttgaaaacttcaaaaatccatatatggcctacggcaatcttcaaggcagtggtacaaaaaactcactaaagctctaatacaagaaggctttcatcaatctcaagcggactacacactcttcactcgaggaaaagatgacagcttcattgctttactcgtgtatgtggacgatatagtcattactggtcccaacatcacaattctccaacaacttcaagactctctacatgacaaattcaaactcaagacccttggaaaactaaaatactttttaggctttgagatagctagaaccaaagatagtatgtttctctcccaacggaaatataccctccagcttcttgaagaaagtggttacataggcagcaagcctgctaaggc

SEQ ID NO: 246510 - DNA, 576 bp, Cannabis indica
gttattggaaaatagtaataaatatatatggaatcgatatatgagagatgattaattaatataatagatgtacgtgttttgtgattgtggtgaatgatgatgaaagattaaagtgctagagttcatcattttatagcaaataacacgtgcatataactagttgtgtgcattattatggaaagtctactttgatcaatttgtgatatttggatgaccgattatacattgtcggcgttgcttgccagctagctagctagctaaccaagaaagaatatactataatgtatatggcagagtacttgtttaacaaaaagaaaagattacaagtccaaagaggaatatatagatttattgactctttcatattatataataagttttgttcataatttatatatatatgctagtatatataatggcttgtgtggaattatagtatgttagacttttatttgtattaaataaaaattgattgcatctcacataaacataatatatatgccagttggcatttgacattttatatatagattagggccagcagccaaaatatcatacttgcttttggtgtagatt

SEQ ID NO: 246511 - DNA, 594 bp, Cannabis indica
tcttatttcttcaattttcatcaagaaactttctcaattttggtctccaccatgatcgttctctcacatttctctctacagcttttgccaaacaaaaagtcacgactgtgtgcttatttccaagtttttggtaagtgttgttgattgccatgaccttatgttaggccttaggaaccaaatgataagaaccctgctgtagattaatcaactagtagataatctgatactaaatgataagaaccttgttataatttaatcaattactagccaatacaacacacagccaagaaataagagcagaaaagtatccaaactagtagtaaatagcacaaaacacaacgacaagattattatattgagtataagagagtattacaggtgatgggagccgttaggtcgctttgatgcaaagagagaactctcaatacattgcataaaccttctctattctcttactctcaatactcaactcggtgaatgttaggagcgacaaggatggaggctcgagtggatgatttatttgacaactgttgcaagcttttaggaccaactcaatgaccatggggttattatcgaaaaccatggcattgaatt

SEQ ID NO: 246512 - DNA, 963 bp, Cannabis indica
atcgaaaaccatggcattgaattgaatgttaggccttaggattagttgggtgagctagaaggtattaaaaaaaaaaaagtagtatttgagtcattgtactgggaatgggtttgtgagtgagaatatgttctacatataggtaagtaaggaaataattggggtatgcaatgtatggagagttctctctttgcataaaaggggcctaagggctcccatctcttgtaattctctcttatactcaatataatattcttgctgctgtgtttgtgctatttgctactggtttgaatacttttctactgttatttcttggatgtgtgtgctgcattggctactagttgattaatctacaacaaggttcttatcctttggtattacagtgaaagtttttgatgattgcatgtgactacgagaatagaatcaagagtggatggatctgattcagtattatctacggtgaggtcgatggaggtagtactggatagattggaaactgctcgaaatagagttggtgataaactcaccaattgccacagaagaatcatggatgttggggagcgtcgatctaagttttgaaccttgaaaattaaattactagtgtacgacgctgaagatgaatgggcttacaagtttgcagcaattgacaccgacagaaaaattagaagctgctttgagttggttttatcgagaaaattagagacaccccattcaatcgtggaataaactgaaatacttgttgcgtcgtcaattttgtcccacacatgaaggttcagtgtacaatcagagttttgttcttcatcgagtgaatatcatgtaagggtatcaccaaaagtgtgagattgaagatgatgaagcttctgaacttttggagctctcgaagggtaaaatgaagttattttgctcattatcattcgagctagagcacttaaacaagaggaacaaaaactcaaatgtaaaattagg

SEQ ID NO: 246513 - DNA, 500 bp, Cannabis indica
ttgatagtggaaagtaatcctttcaacacgccttgtttaaatctgaaaagtcgataaaagttctccaagttttgttttgttttgggacaaggacagggttggatatccatgagtgataaaatgcctcgcgtataaagtcattaatcaatagcttatccacttcctgcttgagtgccccttctcttccaaaatccaagggttgtctcttttgtctcttggctgggtaatttgggtcgatattcaagtggtgacaaataattttatggtcaatccctatcatatctaaatggctccaggtgaactgatcttggttttccctcaaaaaacttattagtttctattttagtttttcatccaggttttttccaatgaatacacactttgtgggattctccagatctaaaataacgtcttccaattcctcaatcggtttccatagtttttgttcatcttgaactcgaggatccagatcttcgacctacttcttgccttcctcagtt

SEQ ID NO: 246514 - DNA, 482 bp, Cannabis indica
aaacaaacgcccacctttggcccacaagagctcatcctctacccaaaactgggttgtctttccctttcttgcgagagtcatgatgttctttgtaactgggtcctttgctaggttctccttgatgcgctctttgattggtgtacccacttggctagctgacatgcccgctaacacctttagcgctgccaattcagctttacgactgagggcatcagctgcctgattaagacgtctagcattgtgctcgaagtagaagtcaaattctgccaagaattcctgccatctggcctgcttggcagtcatttttggctgcgtgaggaaatgactaacagccgtattgtccgtcttcacaacaaactttgaccgcagtaagtaatgtctccacgtccgtaaacaatgaataactgccaagagctctttctcttgcgcagtgtaccgcctctctgcttcggaaagcttgcggctctcaaatgccacggggt

SEQ ID NO: 246515 - DNA, 778 bp, Cannabis indica
ccctaattcataaatatcatacggtctatcaaatttactaaagattctggctgccacataggaatgtgtggccccagaatcaaacagcactgagtaaaatgagttattaaccaagagctggcctgttacaacagaggggctggcatctgcatcagcctgcacgatggcaaacaccctatcttgagcgggtctcgccggagcccttggtgcctctgttttgagctggggacaatttctcttgtaatgtccgggcatgccgcactgaaagcatccctgacctctgcactcacctggatgatgccttttacaactggggcactcaaggtaagaaaaccgggtctcagcaccaccctgacgactgcctctactctggttccctcggaacttcttgttctgacccgagccaccggatgcagtggatgttttcctcttctgatccatggccgaaccactacctcccctgctaaaacctaacgcaggaggggtaggagccccgccactcactggagtcctaactaactccgacatacatccaactgcgccactcactggtcttgtcgtccgtggtgatcataagatcatgcttgatcttcgcattaagtccatcagatatttttcctttttattgaaatcagttggcacaaatcccgaggccaacctcaccaaccgatcaaactgagtttcgtactcggacacactcaataaaattcaatattcttgtgatcaccgttagccaatgtctgactttcatgacgtcaggacctcccagaaaaaccgg

SEQ ID NO: 246516 - DNA, 813 bp, Cannabis indica
tttagatagaatcatgatctgcgacccaataagtgtgaatggaaatcaatacagaattaatcaaggtaactaaacctgcaaatgaagatggtttcttgagctccaaatgctgattctttcgtcatctttctaccaacacttcagtttcaacacttgaaagtctcctagtagcaatgggaatgccaaggtatctaaatggcatcttgctccttgtgaaacccgaagcatttaacactctctgaatttcaaaatcatccatcccactaacgtaaaaagctaatttggaatcacttatcatttattattattattattaattattgcccatttaattcttgagtatattatcaataaaaaaaaacttattcattagttaacgaaaatctgcgttaatacttgttgtgactaaaactaaattagtgacatgacttgtatttaaatattatgttttagtcacatataactttttgttgtaactaaaagtcaattttagtcacaaaaaatttatattgtgactagattaccactaaagggagtagttttttttttttgcacagtgaatatgacttgtatctaaatactatgttttatttttattttattttagtcacagtgaagctttgagttggattgcaactcattcctgggacaaggtgttagaaatggatagtttagtgtgtgtccaagtagtccaaagtaatgtgtttatgtcctcgcaatttggtcttattgttcaagatgttaggaatttactttttggctttatattttgtttgagttatgttttgttaaacgatctgcaaacaagttggc

SEQ ID NO: 246517 - DNA, 5427 bp, Cannabis indica
ctatggagtaaaacttgttttctgtgaatgaaatactgaaatattcattcaaggctcgaatgatgtctcgtgtagcagttgaatttcgaatcccattgtcgttactaacaatttctgacaacaggccttgttattgttagcttgccatctggcactgatatgtttatgacgaattgtaaccagtgttgaatatgtaaggctttgaattgttacaataaatctggaattgatccttgggttccaagtaacaactgtcgtcaaggccaaatgggtatggaatttcgaaatcaccacaccagttgaggcagccatttttgtgggttgctatggagctgctgttgttgttgttgatgcaaaattcttggtcaaagataattgcatctatcatcagttgcatatatatatatattaatatacttgatcttttatgtaaacccatattgaataaacgagttgattaatgttttttctctttaatatgagttatattaaactagggtattattcttatagaaaaaatttccttaacaatgaagtgagtagtgtaatttagtttgatttgtttatgtaatcacaacattctattgttgagactatcttaattagaaacttccttactgtttaatgctatgaatttgtttgatctactgatttgatgctacaagtagactcgtatcaaggaacttgaggaagaagtgaagcttttgaacattaatttttgatttatttttgaattaatttaagaacaatttgcagttagattatcaagattttttaaatactaatatattactttcagtattaattaattttaatttgtaacaccattatttagattaattaaatatacgtaaaaataattttttctttaattatttattgtatcatttttaaataatatagaaaacactatacgtgcctcgcacgtagttttctttctagtatcatacatatatatatggaattatcttttttattctcattccaaaatacactatatatttctcattctcatatattagtacactatattgtggaagcttatcaagctaaaccagagtgataaaaaccagagagaaaaatcagagagaaagagaaacagagaaagagatttagctgaaagccttaactcaaaaaagagcacaaagcactttatttatatccagagtttacaaaggctaaaacaacagaagttagttaaggaaactgactaaaaaataactaactaactatacaaaggttagttaatattagttaatatcccccctcaaacgaaaaggggtagcagccattttgagtttgcctttaagatacaaaaatcaatctgtagatagaggctttgtaagagaatcaactacttgatcagtggcaagaacatatcggacagctagctctttggccaaaatttgatctcttacaaagtggagatcgatttcaatgtgctttgagcgagcatgaaatattggattagctacaagggcaactgctccttggttgtcaacccagatgactggtatttgagctggtgcgatgtgtaattcagatagcaaattaaccagccatctgatttctgtagcagtgtttgctagacttcaaaattcattttcagtactggaccttgcaaccacattttgcttctttgcagaccaagaaatcagattgtcgccaaggaaaatcacataacccccagtagaccttcgatcatctaagcaactggcccagtcggcatcgaaataagcagaaatatccattgtagcagctagtctgagaagtaatccatgagagatggtgccttttagatatcgaagtagacgtttgcatgcttcccaatgagtgatagtgggggcatgaataaactaactaagtttattgattatgaaagcaatatcagcatgtgtgagtgtaaggtactgcagagcaccaagtgtgcttctatagagagtaatgtcctgaaatggttccccatcggttagagataatttttgagtggagctggtgggatttgggcagcttttaacaccatcaagctgaagccgaacaagaaaatcagtgacatattttctttgagatagatacatacctgcagcatctctatagatctctataccaaggaagtagtgaataggacctagatcttttaaagcaaaggaagcattcagatcagctatgagttttgaaattaacgctgagttgggtccagtaactaggatctcatcaacatacactagaataattataagatcagatcctgagtcatatataaaaagagaagtatctaatcttgaaactcgaaaaccccattgcaaaagtgtttgccttagtttctcattccaagctcttggagcttgcttcaatccatagagagctttatgtaattgaaagacatgagtcggtttggttggatcctcaaagcctctaggttgcctcatgtagactgtttcttgcaaatcaccatttaaaaaagcattgctaacatccaattgcttaacaggccatgacgaagtgactgctaaagtaagaacagtttgaaaagtaactggttttaccacagggctgaaggtctcttcataatcaataccatgtgtctgtagataacctttggccactaatctagattcataagtgttgagagaaccatcagcattaagtttaatccgatacacccatttgttgtcaataactagcatgtgaggctaatatggaactagtgtccaagttttggctttaattaaggcagtgttctctttttgcatggagtgaaaccatttaggatccttaagtgcttgctgaacagtccttggttcagtaggaaataaagattcagcaagtgggtatcttgtggatagataggcttttggtttgtaaatcccctttgagaccttgtcttcattttatgaattctcgaaatgatgcttgaatcatatgttgatggatgagatttctctccagtagtgggcacattctgattggcagcaggagtattggatgatataggttgctgttgtataccagatatcaaggatgactgttgcatagactgttgtattgatggtgttatagaattttgtatatttggtgatgtaggctgctggatggatggtgagatgctggtgtgttgtaggttgatgtgttttgtgtgttggagactgctggtgtgttgtaggttgctgtgtgtgatgtggtataggttgctgggttgtggatggttgttgtataggctgctggtgtggagtaggtgatatgatatctggtgtagtgtgtatattggttgttgctattgttgttgttggtgctgagttgggtaatggctcaggaatagtggcagatagagttggttggggagggctcgtggtaatgggtgatgttgaggacaaatttgtagtgattttgggcatgggattttgtgatgcagcaccagtagagtcacaacagatattagagttagaaacagcagagggaaaatgatatgtagcacaaggaaaattagtaggagatgttaagtgtacttgtgaggagcagggagtagaaaaggcaggtaaacaaccttcattaaacacaacattccttgcaatatagagtcttcctggtgaattctcacacagataacctttgtgatgagattaataacccaagaatatacactgattaggtctgtactcaagcttgtgattattgtaaggtctcaagtgtggaaaacaagcacatccaaatggttttaaaatcttgtaatctggttgacttccaaacaaacactcatagggacttttaaattcaagaacagcagtaggaagtctatttattgtgaacacaaaattttgaaaagcataccactaatatgataatggaagaccacattgagcaacaagaaccaaaccggtttcagtaatgtgcctatgttttcgttcagctctctcattttgttcatggtcatgagggcaaggatgttgaaagtgaattccttgatcatgtaaaaattgagcaaatggtctgtattcccctccccaatcagactgaacactcttgataggtaaattgaatttcttttcaaccatcctttaaacttaagaaaaacatcaaatgcttgagatttgagaggtaaaggataaatccaagtgtacctagtatggtcatcaataaaatgaatgtaatatttatatccttccctagaagaaatatgagatggaccccataaatcagtatgaattaactgaagaggttgagaagcatgactagtagacaaggagtaaggttgtttgtgacttttgcctttttaacaagcaatacaaaattgtaggtcctttaaggttcctgtatggggtatattttttaaaattctgcttaaaatagcagatgagagatgcctcaatttttgatgccaaatgtttatgtcttgattaaaacatgttaaagaaacagatggtgaagattggaaagagtaaccaaaacaagattctttattaatagttggcatattacatgagttcactgatgaaacagtgaaattattgcaacaattttgacaatgttgaacagaggtgggctgagacaatgtggtaagattacattgaagggtatgtgaggattgactggaatcaccaagaacatagaggccatccttaactagtcctttgagaagaacagctccagtgaatttatccttaacaaaacaataattcttgtgaaaatcaagatacacattattatcatgtgttaatttatacacacttttagattctttttcatagcaggcacattcaaaacagattttaagtgcgaatttgtagaattgttggaaggtaaggaagtggaacttatgtgagttataagcaaagtcttaccatcacctacagagagtgtttcagttccatcatacggagtaggagattcaaaagactcagaaccatttgtgacatgaacgttagcacctgtatcaacaaaccagagatggtcatccccaaaatcaggtaaaacagtagtgttatgtacctgatgctcattgtccatttcaagttcagtaagataggcacgaggaggggcaggttttggaggaacaaaatttttatcaaaccggtagtgacacacagcagcgatatgcccacttttgagacacaattgacaaatcaatctggtctgaaacacaaaagaaccacgagagttgcccctggcaccatttcttgaagatgactcagtggctttcctcgagcaggtggtggaatatatctgagtgagatttattatttccaatagcaagatttgcctgaagtttcatggagatgtcagtcatagagctgtgatgttctaagcggctctcatgggacatgagtaaggcttgaacttcatcaagtgataaggaatcacttcttgaagtaatcccaaaaacaacaggatcaaactcagcacctaaaccatttagaatctgaagaacaa

SEQ ID NO: 246518 - DNA, 991 bp, Cannabis indica
ggttagtattttattccttcatatttaattgtttatattcttctatgcttaatttcatgattaatattttgatcttgtttagacagacgctaaattaagttttacattattctactatcattcttaaaatttctattcacctaatagtctaggattctaagtttaagtgataatttgcttttaatagtattatgacgggtatcgttatttgtgatgtagagtaatactaagttaaatgaattatatgctaaattgatttgttccaaaaaaaaaaaaaaaaaaaatctaaagttaaataaattgcatgcttcgtgggcctactgcttagtaaaaagatttatttattaagcgctttgtattaattgtaatagggagactgggataagtaataatttgtggtgttaatagtttaattttagaataaaatataatatttgctattgttgttcttgattgattgttggaggtggagaacaattcttaattgtcattcgttctttattttctttttatgttatttaattgcaactcaaaattcccctttaatttctatttgatagtgaataataaattaatcatagtcctcgtgggatctacccatacttgcttttatactaaaataattaaaagtattagaataaaaaaattagtaaatttgatacggcatacgacatgcatcaaattttgggcgtcgttaccggggactattgtattattttattattcatatttaatttatgttttactaacgagtttttattttggcaatcttaggtgtacatgtctagtgcatacgatactcaagagagactatcaagggtcaaacaatatcttgagttatcgtctgcttctcgatcatcgaagaatatcctcagcaacccactctttcaacctcttggtcctgttaaagagccattatcagcttttctcgattctaattttgacgactcggttaattctcacagttgcatggctcaaaataggatgttga

SEQ ID NO: 246519 - DNA, 4319 bp, Cannabis indica
taaaaatcagatagccccatgagaaacgacatgatgtactccatgttgtaatgttcttgcaatttcttgactccaccacatgagcacccattgcaagtacagctaggcctgaaattaatcaattgttcccaaatggttttgagtctagtgaagtacatgctcacggtttggctttcttgcttcaagttcatcaagtcttttctgaggttgtagacatgagcaccatttctttgttggaatctcactttgagatcgttccaaatagccgaggccgattcatcatacaaaatactagatgaaatttctttagaaaccgagttaatgatccaagaaatcacaatgttgttatttcgaatccaagcgttgtaaagaatatggttagatatatggggcttaggaatagaaccgtttaggaagccaagcttgttcttgacagaaatggctaattccatcacacgactccaagcaacatagttgtcttgaccggtcagcagctgagacaccaagatatttcctggattatcaccatggtgcagaaaatacggatccgaggggtcttcaatctgacttctcgatctggttagttgagcgttacctcctatatctgccaactgactttgattttcgccattgttggactggattgaagctccatcatcaattctggtttcttggttattattcgacattgaaggagaacaaaagaagaacagaaaagaaaggaaggaaggatgtcgatgaagaattcaaggaagaagggaattcatcaatacggacggtgatctttgccggagaagaagatagagaacacggcaagaaggaacagagtgaaatcagaatcgaaaggaagcaagtcttccttgctctgataccatattgcggaagagataatgaaacgtgaatgaaaatgtttattgaattgattaaccaaaatacagagaaggaaaagagtatatatacacacagctaaaggtcggtcaagaagtccaaccgaaatagtaggacaaccttaactaacttaactaccaaaactagactcaacttaacaacctgaactgatgtaactgatataactacctcagctaatataacagtaatgataaggcagaggaaaaatagaaacaggggacatatcatcataatcttgttaggtatatataaaagtttaattaattagtacttttgattggtcataagtacaaaataactaataatgtgtgtatatacgtaatattgtaatattgtacattttttttttcaatttaatgaaagtactcatcacaacaagaaattgtacatttgctgacatttttttatacaagcaaaagtacactaaatatgccgacaaatttttactgatgcataattacgctggcaaaagaaattagcgatacttggttggttaaagagtttttatcgatataaaggtgaattgtgccaagaaaactagcatgtacacttagtgtagggaaaacttatacatcgagataaacgaagaccctaatcaactcttacccaacttaattagacaacctttgtcggtgcataaggttcatacctttcttcctaattggcgcgaaagtttttgccgacgcgaatattgggcaggcaaaacctttcacgtcaatgttgaatttggcgcgagtaaattcatgtgtaagttttacctgcataataatgcgccagaaaaatatattttttttaaattaataatttaataataattatattttaaagaagcgtaatcaaagaaaacaaacgatatttacattgataattaaaaaaatttcaattgatctaatatacaaaaatgatcgatttgtactaaaattaatatgtaataaaaagttataaaactaatagtaaataaacaaaatattaaaagatgttcggaaaaaaaagtcaagttctaactatgatatcaaatatatattctaaagacgggtaatgtcatcgtcattgttgttctgagtctcagagggatgcgatgacgatcaagcactaggaacggcatggtggaagatccatcgaaggcaagttgaaacttggcacagccggagagagatactcaagctaatcttggaatcgcctgaggtagaggttgttgtgtttcatatagctgcctcgtatacttagttgcatgctctgcgtcctccacatttttctgtaaggcctcgtactgtcccacagtaacagtcggtggggtagaagaattcgtggcaggtgctcttttagcccaactaccttaaatctcgagagatggccaaagcctcttagatgtcgagatcgctccccgagtaattgcgtcataataggaaagtcttggggtattgtgtggaatacaaagttgtctcatcaagctgatcctcagtgggcgctggttaacttggagccaattcaaccattcgctcctagaaaaaaaaaataaaatagttaatttgaatacaaaaaaaaaaaaaaaaattgaaagatatttttagaaattaatccaaaagtaaacttacatatgcttgttgcgcatatttgttgtaccaagtgttgtatttatggtagaacttatgaaaactttctacaacagctggaagttcctctatctcaaggttagcctatatttaagaaaaaattgatattattgtatttttacaaaaaaaaaaataagacttatcgataaaaatatattatataatgttaccccaagagaaaacatgtgaaacaatgggctttgatctccagtctcctcaaagtttcatcttaccctaactttctttattttttgctgctcatgcctgaaattagcattctttcttacaattgattatttattgttgactatataatgtaaagtattactaaaattaataattttattaagtaccttttttttgtctgtacttcagtatgcaatgcaatcacttcacaccccctaagttactccatccggacgtaacatgtatgcactctcatgtccaagctcctcaatatttttgatctatttgcttacaatcgtactgccaggcacgctaccactttgatatcttctactcaccaaagtctaaaagtgcaagattatctcgtgcaagcacaaactctgtctgcaagaaagtttcacattcacattagtacaatatttagaaatttaagaataatatatgaaattatatatttaaaaataaattatgaaatacctcaagtctgttccacaatgcattcattttagctctagaaacatccgaccaattgaatttattcatggggatggacattcgaacaatccatttacacatgttgttaaacttttttctatttttttcgactggggtgcccaattcttcttacaatttaatgtgtagtttggtaaccgatgttttgaaaagcgcttttgctacatttttgccattatatttacgtcttacctcttttttttcgaagagctgccacttagtgtagacatattatatatacaacacatattttaaggtttaaaataaataaccatattcataacatattaaataggaaaatatgcaattattattcctattaaaatatccttacaattacaattcatcatcatcatcatcatcatcggttacatatacaacattttatcactatcactctcgaattctaaccaattgtcgtcttggtcatttagaccctcgttgcatcatcgataataaaatcatctaagttttgagactctgaattcacacgatgaatattggcaacttcaattgggtccacatcatggcaaacgtagtcaacatcatccaactgtggatgttaaacaactaacttagttttagctaaataattttcctgtataaaggatgtatccccatcatcgtccaggaagtcactgacattttgtgggatcagtctttaccgttcttaatatcagggatataatatatcaatttgacttgagatacaattatgaacggtttatttttttctctaacctttttttttttcacacaacgtgattctccacatatagggcaaaactctttgttctcattctccctttgaaaaacggcagaattacacttgcacatatctattgagccgtaactcaaacctagattgcgtaatcaaatctttgactcatattgtgactttggtaattttgtcccctccaaaaatagttcagccaagatagacaacaacatattaaaagattggttactccacctaatcaaaacctttgtagtgtataagcttaccagcgcattgcggggcaattttttgcaacaatgatacaactcacactccatctccttaaacaagtcatcatactgttgttgtcattgatcggg

SEQ ID NO: 246520 - DNA, 627 bp, Cannabis indica
tgccttgcgtgatgaagcatgagcatagaagaacttagtattttaatcaccactttgaagccaattcacacgagatctttgctgccaatacatctcttcttgtgccaaaagatcattaaggatgttctcagattttttaagttcttctatgataggtgcggttctagcagtagcattatttaatcttgtgacttgttactggatatgtgagatttgtttcttcaaatacaaaatttaaaagcatgccattactgtaaggaagaagcacaagccttcaaattgtccaaaaagctatcaatgacagtgcccgagactgcagtcagccattgcagtcagccattgttgctatattatgttcgcttcctcttcatgttgtatccatacttgctcgaatttgaacctattccgtctttgttgctgctaaatgacaggatctttcaaattaacattaactaataaagctctatgatcagaattttagttgttcgaatgttgagtagtgataagatcaaacatcgagttcaaatggtcgtcgacaaagcactaatctaacctctctttgatagtgtacatcgtgtgtcttcctattacccaagtgaagggatctccctcataaggctgttcatt

SEQ ID NO: 246521 - DNA, 885 bp, Cannabis indica
caagcctcatctccatcatcatcttctagttaggaagtaaacttcaaggagctagcaactagcaagttcattttttcgttggtttatacttccttaaatattttctcttcatctacaaacaaactctaaacttttgtatattgtgcttggggtcttgaggaacttggttttgggtatagtgcgaaggcgagaagaatatcaagcttgtgttaagttaggactcaaaaatccctagaaaaagaggtcaaagttatttttataactttcttgatgattcatgtatatatttatggtgtaacaattttcctacactgcatatagtgtttgtaatgtaagttaaattttatcatgcattcatacggtttcatatcttttgttattttatttttgatgtaatatgttgtattattgaaattgtaaaaatttttgggtgtgatctgacttcaaatgggtcagatcttagaaaactattctggactgccttaaaaattatatggttgaaaattactcgaagagtacttgagttttagctttgaaattattctaaaagcttctgtaaaactcaagatatgagtgttcaaagtttggtgtgcaatctgagaaaattttggacaaattaggatatctaaaattttgtcactatttgagcatgttttagtaggactgacaatttgtgtcacaacacgatgacacgacccgaaaataatacgaaacaaatgggtttgggtgacacatttaatttccgtgtcaaaattgagtctacatgtttattaaatgtgtctttttcgggtcaataggcttagcccgaaaaatgacacgactataacacgtataagcatatataagtattttaaaaaatttctattatgtaaaatgaaatataac

SEQ ID NO: 246522 - DNA, 1197 bp, Cannabis indica
gtcaaagtattggttacgactccaaaaaacttggatattggtcctttgaccgacttaggataaaatttaatagggaatgttatattagttatttcgatttatttcggtattaaaaattgtacactcaacgagggaatatcaaaagatcataatggactgtgccggtatgtttttttatggtagttcatctgacagggtaggaaaattagagaaatggcagtttgagttaaattttcttatactcctaagtgcaatataggatatgagtagttaatgggggtaccaactaattaatttggtgaacgaaatattttgatataaagtgatctaatgttaggataagcgggacaatttatgagtattgtcttaaaccctaggtgaattaaatgtggtgattgtgtgggtggatctattcactaccagggggcatgagtcaagctgtgacaattagaccaccgtgatccgcgaaggaaagaccagaagctgtataatccacatgacatggggaagggttgtatgtagtgattttgagattatgtatacatgggaccacatggtgttgaggacttgaatgaattgtttaggactacctatattagaaagaagtattctatttggtagcccatcatgaaggaactccatcgttaagtgtccttgacttggggtgactacatttaggaagtttccccttaaagcgtgcgagttagagtaaagcaagttggaaatacttggatcggtctatagggccagtcggtagtctcggaagtaactaaagtgattcactcttgtataagagccattattttgtgagtgtaagggtcccaatgtaggcttgaaacggggacattactagggtaacgtataaagaaacgccaggaagagtagtgatatcactaagataaggaagattactcagattacatatggtgttatggtaatgatgaaaaatacttctatattggaccggatggtcaatctagtatataaggagactattgaaattctggaaaaggattatcttattaagcagtgatggaaaggcatagtcatccatattaggggaaaggcttataaattgagatgcaatttaatggacatgtattcgactgattggtgaatgtttgatcactaagtaggctgtttattaaacaacggactacataactgagggtaaaatgagtttagagtgattaacga

SEQ ID NO: 246523 - DNA, 591 bp, Cannabis indica
ctttctttttgtagatatagcttccaggctaagagatcttattggagagccctagggcagagcttcaagtcgtcccagggtcaaggtggcctagacaacacgatctggtgatgttgtagggtccttactacctccccatcctttggggcctgcaccggctagtcagccaatgatccttgatcctccactgaggaacacccccttccacgccaaccttcaggcaaggggacccaaagatctagctatggggcatgcacgaccatcagacagagagttgcaaacgttgtttatagctatattggcaaggttctgcccattgttaacggggagcaccaggagctcgaggatgaagatttggaacagctgtgatcaagcagtctccacgacttgattgcgctacgttacagatgtgattttactcaaattgttgcactatcaatggctagcaggctaggtattgaactttacaaagctggtcagccagagctgtaatattcagacgccgaccggccacggaagcactataaagaggctggtcggccaggttcttcttctagcactaactcaatttttgttttgatttcaagccct

SEQ ID NO: 246524 - DNA, 567 bp, Cannabis indica
catgtcatgttcctgtcagctttcatgagaggaggctagcctttgtttgtggagattagcctttggcaaatggaggccagctttgtacactttttcctagtggaggtcaggtttcttagtcgaacagaagctacctttgtttgaaagtcaccttttaggcagctatcttgtgccgagatcctagtcggaatacaaggttatcctagctggcctatagacatcccttggtcagccaaacatgttggtgcagctctttgacggctcgcttaactactttttcttgctacttaacgattttgacataccttgtaaggagatcttgtcttaatattagcaaggttgtgttccacctatactttgtcttggcttatgtggacatgccacgtcaggtggacaaaatttgggataacaatgtggatgtgatgcacatttagaaatatgtgtcagacagcttgcccaatacattgtttattattctttggtggagcaaagatggaatctaatcacaccttcatgtcaacgagttagagattcaaaccaatttacacccacaagttattggtggac

SEQ ID NO: 246525 - DNA, 1135 bp, Cannabis indica
aactataattttttatttaaaatctatatcacagtaaaggaaaatcaaaagttataactcgcatataaaaatgaataataacggttctcgcaagctaggaaagtgctaaatgagacattaatttgtcttgacaaaagtacttgaacctagaaaatgaatacataatctaactattcatacgagcaaattgaaaatatacaaagtgattaaatcatgcttaaggtagattataactgctatcgcgaggcagaattgacaactgctcgaaaatataaaagattgtgaggaatggaaaaaccaaaagtactgtataatatagttgtttacattgtgaataaaaatgcaagaaaacacaattgtattaagttcaaatgaaaaaagtacaaggcatttaagataagaaaaacctagttggttacaaacttgtccttacaaaaatgccactaggggcaaagaattaagtcatcttgctaaacaaagaatgggagggggtcgataaactcgagaagaccatctgcacatagcttggagaaagaccggctacatatatctcgagaaagaccgtctacatgtagagtgccttcgcctctccacataccccattctcatcatcataagatcccatttcctgcaatcgagaccttattccaagccacaagaaactcctcaacaccagagagaggttggcacaaaggtcctctggcccaggtttgggtctcttaggttggttggattctgtgatagaaatcacgccaacttcactcttggattcatccaaaaccacgccaactttcctttggcattccttgtcagcctaaggaggacctctaagatcgctcacaagatctatgtctattcatgtggagacaaagaaaaaagagggtcagtggagcaacaaaaattaataatctgactcggtcaaaacagtggaatataatcttaaatatatgttcgaaagttgattccctgatttgtcagttcactggatttagactgacatgataatcagcgataggtattcttacaccttagataagtgttatatcctttccagggcattggcaaagtttaccagtatcggatgtatggagtatacatcggaagggagcgatatttaactttgattagatatatt

SEQ ID NO: 246526 - DNA, 574 bp, Cannabis indica
cgcttaggtgagattttcttatagtttgttcttgtattttctcaaactaaataatatcactacaagaatttgcttcaataccggcggagacaaactgtcgatattattggagttattaccggtgaaaatggtaatccgccggtattactttttaataattaaaaaaatatttaataaataatattaataccggtagttttagagtattactagcagaaaatccgcctctaatactttgggcgggattttgaccacccaaaatttgaaatggctaatactggtagattattagaggcgggttccgccggtattagtcaagaattctgaccatttttgtattaccggcggaacccctattaataccggcgggtcccgttggtaataaaacactatataataccaacccctaactcaaaaaaccttttccattttttccgccacaaaattcacccccgaccatcttctccgaccctcctcttctccacccatttctcttctcctcctccacctccgcccattgcaccaccgtcaaccgccattacaccaccattttctttcacatgtaatgtttttt

SEQ ID NO: 246527 - DNA, 1330 bp, Cannabis indica
attaagagactttattaagtctaactaataaatatattaaatgataattttatttaataattaattttataattaaatttggcatttaagtggttaaattggaaaaaaaatgccatttttgagaaaataagatgaataattggaaaaatggcaaaattgcaaagtggggcccactatccatggccgggcacttggggagcaatttaccattttattttttctttattttaatgctaaataaatctaacattttattctataaataggtagtgatggtctcaaaggaccttctctctacctatttcgaaatcctctctctctttctctcttcaaaactgaaaccctagagtgattagagtaagtgcccacacacatcaagtggtactcaatgatagtgtctaaggctataaagaatccagattcaagagaaggagattcagacttacatcctggtgatactctattacggacaggatacaagggttagagatctgagtggaaggagacattaaattccgttgcaaccactataaggtttccaaaactttatatgtgtttattttatctcattttagaagttcatgtttaggatgttataaacataattgttagtaaatctagatcctggtaaaataattactacaactggcctcagagccatggtaattaatttacttcaaagaaatttggacttaaaactatatatgtgtgatttggatgtgattcatgttgatctatgtgtttttgctcattgtttgatgtttgtaaattttttatgaaaaataatttgaatctttttcaggaattatttttttttggatagcttggaaaaaattaagcaattcactttttgacagaacttaattttgatttaatttgaattagttatgcatttttcaatattggaaaaatcaagagtggtgtcaccaaacgtacgtgcgcggatccccttgatttcaagggtgcatgcgcattcggacaagccctgtctgagatttctcagtcaggacgggctgatttgtctgaaatttgttccctgcaccgtgttttctcggccaaggtccccatcgtgctcgcgcgaatggtatgcaatgcataccatccgcacccgaatacaaattttttccatttttcatttttttatgttttttcagggaattaattttgaatttttttgtgtaattttctatttagatttttatttttcatatttcaaatcaaattattagaatttaattaattagtattttttaaattaattgaagatattagtgaaatttgaagcttgaaaataggtaaaaaatctatctttttgcttaattagttatct

SEQ ID NO: 246528 - DNA, 1059 bp, Cannabis indica
acacatttaattgcttattttgaatatttgatcagtcaactttaaaattaacatatatataataatttttataatataactaattctatgtttaagatactatttggtaactttataaattttcatattaacatatcaaactttttttattaaataaatttgttattagtatactatatcgtaacttttaaatacaacataacaaaaaaatttatagtaatttatgatgttacttgatatgttaaaatttattaagtttaagattttattactttttgttacaaaatataaaaaagaaacaaaaatgttacttttaatatttggtcgttctttgttctttttcaaagacagtaaaaagttaacttttaactttaaaattataattttattttttagatttttaagttaaattatgttagataaatataataatgttgttgtttaagatacattagtgttacttttaattttgggatttttttttgtggtggcgaaaaaatatatgcttcccacatgttaaaatgatcaccttaaaaaaataggttacaataatgtaatttttgactttaaataataaatggtgtgactaaatttttttaaaaaacttttgaaaataaataaagaaagataaaaaatactataatacaattttaaaacttgaataattatcaaattataaagtggagagagatggataataataagcaagaataataaaataataaactaataaaaaatgttataaaaaaaataataataatgacaccaacaccaaacagacaacaaatgttaaaaaagaggagagagacaatgattaaaaagaaaatgtatgactatttgaatgtataaagtataccgagtatgaatataagatacggtgattctacaatgcacctccttaaaatggatgtattgatgcaccctttacttgtttcggcatctagaaaaattttttagtctaatttttttcatattcatgtacgttatagctatttgagatatcctacaaaattttcaaaaattcggaataattcacaatatagaaaacaatgttcaaac

SEQ ID NO: 246529 - DNA, 628 bp, Cannabis indica
atgcagccgacttcctgtggtggttaaaagatcttatcccaacaaaggacctaatttggttcattggatattcttggttggtttggcaaagaagaaatactttcatgtttcaacacaagccgttgaatgataatatttggcttccttgggctcacgatctgcttgaagagcatctgggttcacaccagaaactccaccaaatctcagctcctaagccgaatatgtcatggaatcctcctcatccaaattcatttatgatcaatactgatgcatctttgatcatgggacaggctggttatagtattagtgcagtaattagagattcggaaggctcgttactggtggcggaaacagaatttgtgaatggctacagttcaattttgttggctgaagcatctgccatactgttaggccttcggttggccctcagccggtccattcttcaagctcaagttgcctctgataatgcaactatcatcaacaatatccagctgaagtcggccaacaaatcggagtggaatccaattgtgcagaatattattcattttagagattcttttcagtctcttgattttttatttgttcctagagactgtaacaaagtggctaatagtttagctaagtggag

SEQ ID NO: 246530 - DNA, 549 bp, Cannabis indica
tttattttccgggatattacaaatagtctaccttcaggactttgacataagtagcccttgtgtgaggatgagtatcctataaaaatgcattgttttgtcttgaattccattttgtgtagattgtatggccgaagataaggatagtaggcacagccaaatggcttgagaatattataatctggtatttgaccaaataaaacttctgttggagattgatgactcaagactggtgttggtagtctattaatgagaaatactgcagtgtcaaaggcatgccaccagtacgagaaatcaagactagattgagcaagaatcgtaagtcccatttcagttatgtgtatgtgttttcgttcggccatcccattttgctcactggttttgggacatggatgttgaaagtggatgccctgagcactgagaaattgagaaaatggcctgtattccccaccccaatcggcatgcactttcttgatggcaaggttaaattgtttttcaaccatggctttgaattttaggaacatgtcaagagcttgagatttttgagtgaga

SEQ ID NO: 246531 - DNA, 1624 bp, Cannabis indica
aattcaattgtaatattataataaaggattcacacaatactttttagaaaacacaaaatagttaccctttacaatatgctaaagaattatccaaaacaatttattttttttttgaaagcattacccaaaacaatttttgtagagaaagtcgttttacttgctgttgctgcaataaaataggataaagttgaagcacaaaataaaaataattttgatcaattttgacttcaaataacatctctccaatcttagagacacaattaacgtccataccttgaggtgaatgaggtgaatgaggattctccgtagcaaccttttcacgaattcctttgcttcgggtgtgaggttttttacgactctccgattttttggggttgtttgctttggacgccggagatgaagaccccaaggagaaagagcctcccatcccgcctgtcttagaagcatcttcgttgccaggggaaggcttggatgtcaggaaaacaatgggggatacattacccactgcttttctcttctttgaattagagtccttgaaaatgggcacttcataagagtggaaccattttggatcatttggaatggacttgtcttcaagctgaagggggttgggctcctggctcagcgtatcaagagacggcccagagattataatgggctcgggatgaatgtgtggggttctggacttgcatatctcatgatggggtagatcaaccatttgggctgcaacagggcccacgttaggcatcatacttaagatgaccctattatcatcagggttcaagcccaaattgttcatagggtgggccacgttttccatattcattccaccaaccaccttaacaggtgtctccttcactaatttgccaggtgtcctgacagtcgtaccctttccattcgtaccagtagtggccgcaccaccttcagcagtaccatgcacgtccctcgctttcgtactcacggcctgaatattcgaatttccaggcagtgacgtcggccggccaccaagttggcggatgagagtcgggcccctagtatcaaagcagtttcgaatcggaatggatgcctttatccagggtccatagagggggacggcatccccaatcggaggatatgcataggctcgatcctttgtacacccattactatcatgagaaagatatccacagttgaaacacaccttgggcaacttacgatacttaaattgaatccattcacgtcttcctctggtgatgctgagataaaacccggccgggagttgaaggtcgattctaatgtcgaccttaagtttcaagccccgcctagctattactctgttatcagccccgtctcctataatgaactctcctaccttagccccaataaccgccgagtactgagctgccaggaaaggggttggaagcccatgtatctcaatccagaaaacggccttgttcatagacacaccttgccagtacccatccgccggccattcacggatgtttaagagttgccccgccactatccacggtctcctattcagtatttcttccttatcagacaagttgtcgaagaagaacccccacaaaccctgttctaaggatttaattctccattttcctgccgtcgaccaaatacccgataa

SEQ ID NO: 246532 - DNA, 1233 bp, Cannabis indica
attggcttatttgagaacaatgagtttggaagtgccattgtcattgccaagtattgatattctaaaaaaaaaatgcttttcgttgcattgtcctcccgtacatacatgctgtgactgtttctgctatgtttcttttttgttctgcaattcaaattttggttcatgattttttttttttgttttctttttggatttaattcactagaagacgtggtgtgaaaaatttggacaatattagggtggcaagattagattcactgcatttttaaagttaagtataattttctaattatgctattccttgatgccaaatttgaatcttggtataatactcagttgagttttgtcaatttgccctagtgaacgaggaaaatttaggaaatatttcctaatctaaagatttcaatgctagttttttggacatttgagaactagtgttatgtagtttgagctattttttttagctcaatcttttggctatgagttagtaaatttttggaatgcagagcaacatacccacgttataacacatttatttacaaatgtaagctagcttagctatgtttatatagtttgagaatatgaacgacaatattctctctttctaatcgtattgtatgtatcatgcaactcttttaaagcttttagctacttcatatttatcattataatgggtttatgacatatttatcattataatgggtttatgaagtaggatcattgaatttgaaattttttcttaactatagaatattaataatattagcttaactttaggtacaaaaaattaaaatgaacgtagtaaatattacaaaaataaaaaatataaaattgcattaaattataataaagtttaaaaaagatttaatcaggaaatccaaataataatttagttctctctaaccaatttcaattgcaatcaattgcctcggttttttgtttcttggctataaaagttgatttacagtcaaactattaataactattttttatcgttttgggtaatccttcaagtctattaaaaagtgtttttccagcttttatatatgaaaacagtaattaaatactcttaacagaaaaaaaataataggacacaaacaaattgtcagctccaccaaaatttcgaagtatggaataaactagattatcaaaagtagtactcaaaacacctaaatattcagtgaaggataattaaactgaaatatttcctcaaaaaacaaaaacaaaacaaaa

SEQ ID NO: 246533 - DNA, 517 bp, Cannabis indica
aatattatattaattgtatttaaattttcaatttatatattaataaattaaggaattaaattgcgcttcacgtggtattacttcatttattatcttttgatgttgttatttatttttattttttatattgattaactagctagtataatataaataagacattttggtgtttgaactttagaaaaaaatcaatataaaaattgagtagtttcgagtctcccgattccacaaaataacatatctgagaactggtgcaactttactagaacaaaggaattgactaagtgatatcaaaatattacttaggtatcaaaaaatacatccccatcacgttttcccactcacccagcgtccagattgacatcatgtgtaacctggaggctggttgtcaacctgggcccttgatgtcaacctgggggtgagtattagagcagtctttagtaaaacattcataactgtaaaacccgcttagttaatttggaaattatcagttgattgtgattaattatgaaattat

SEQ ID NO: 246534 - DNA, 1496 bp, Cannabis indica
tctaactaagaaaatctctttttctatttataaaattttatcaaatagaagaaattaaatgtgttattatcattatttttaattaaataattaatttaattaaaaaatttaatcatatttagttaaaaaaatgtgtcttaataatatacgttatatatgatacattttcgtctctgtctatttaattgctctccctttctgtaattgttctctctctcattacaatttcatccctctctttttgtaattgctctctctatctctctctcattctttaatattagttcttgcatctaatttatggagcagttctatcatcaaaattttcttacgtccagttattgcaagtcgatcgaagttttaagaaataaacgacactattgaatcatcaacattataaacataaaagagaaacaaatgcaatcacatgcaactcttgcaagcttctttttaacaatgaagaagaagtgacccatcacaaatcattttttaaaaatgaatgtgatgggttaaggaaatgtgtagaaaatcatcatcgtccagtaaatacaagacaaaaaagaagtgatgtaagataagaaatgaggttatttattttctgttcttattctttgaaaatggtatattcgttttaataatagtgtagttttgttgtttgtatcccaggatttatatttttaaatataaagagaaagtcttagttttggtctacgtatgattttgtattttgattcctttaatgttaaactttgaatatgtctctgtttaaagattattttgggatcctttaattaattattttggtatttgagggcatgtatgcttgttggtttatcattataaaaaacaataattcaaatcaaaggcaaaagggctctatatatagcctataaaattgccaatataaacttaaaaaatgatgtgggattaaaatccactaaatttttcattcaaacaaaagagttgacaaagtcaactttttccaacaatcccccacatgaatgaaaattgactcgagaataaccaacaaatagtttagaccttgtaaaagagttttacgtttgaaacctgcataggataggtaccctttgaaccttccctcgtgtgagtatatttactttactagctgctccgtagacgcgatgtctttgaactgttctgccgttcatgtaaacgatgatataccacacacatgaatctctcatagcatactttagttctcactaatatgttcgttttggccttgaacatttccctgattttgcaagagatattctaagaattcatccttaatcaattcctatagaagcgacccatgttctctctcatataggtgattacttatttaagagtaactcatattactctgctcgacgtacgcataagaatcattaaaagcatagcttaacctttccttacgagtatcattgtttcaccataggaatggacttgaggataatcccacaatgatccaccatagtctttacagttttagt

SEQ ID NO: 246535 - DNA, 1329 bp, Cannabis indica
tcagctaatggaagatattgtttagttggacatactttacacatttctaaggttatgaagattttaaaagagctctatccggctttaaccgttcccgaaaagtaagttttcgttaccaaaaatttcggctattttgatattgttttctgttattagtttttaaaatcgtgttttcagcgatgataacacaaaataatttttatagttttcacaattttaaataataataataataaagttagtgttttaataattgacagatgtgaagataatatgcctctcataacatcatgccaaatatcaaatgagaaagtaatgaatttggtcaaaaatttcattcctttagaagtgagtctacatgacactattgaagatctcaaggcaaaaggattatttcattaacttaagctttccaagtaatatttaacaatgaaaagggatatcatatacatatgcatataaatgtatatgtttacatataattatatatatatatatatatttatatagattgaataaaagttactgaaaaaaaggcatccttcttctcatcattttcctttatgaacacttttgacttttgttaataccttctttgtggcattcaaattaagaagcttgattagcttattgatgattttaagtagatttgttttgaagatgtgaaaccaccttttactcagctattcaaattcaccttttaccctacactagtattagagtttgtcccacattagtaatgtgtgtaaataaattgtgatatataagataaatgaactactcctctcattgccaattaattttgagatggaaccacattcatcttataattttaaatatttttacgacttttataattttagttgggaaatttgattttctatgcattttctatacttaaatttgttccccaaactaatagttatagctattgaaaaaatggatatacttttccctaaaccctaaaatacccctcccatttttttcaacctctctctctcttcctcctttctctctcaaatcaaacccaaaacccacaaagcctccatgccgagccacctcctccaccgcacaaaatccacgccaatctacctcctccaccgcacaaaacccacgtcgatccacctcttccaccgcaccgctcgaccgccgcaaccaccgcatcgctcgacgccatgaccaccacgaaaaccgaccaaaacaaaaacccacgcgcagtccgattcagtccgattcaggcgtgaatgggttgggaaagacgaagacccgatgggtccgatggggctgggctgggtccgatggggctgggctgggtccgatggggctggg

SEQ ID NO: 246536 - DNA, 1034 bp, Cannabis indica
ttttattagcaaaataattttttgtggttgcagaaatgattatagaattggcgagagttaggccatagtatctagagggaccccagcttatctgtaattatagaattggtgtaggggtactaactactaggtttcttcctgtcttcagatgaatgacgctttacgggatcttcacccacatggattttacgtgtttgaccgagagtaacaagctttgtacttagagggaaacaatgacatggtgcgcccaggagctaagaagaacccttctcagaaggtcagtcgctccctccctccggttgtttcgttggacgtagtgatacaagggtcgatccctcatccacactatgtttcttgtgccaccagttgggaaggtgatgaattgaattcctccttgcaatgtgttcaccagcttaggaggattgtggtgaagaatggaatcgtcgctcgtcctatgaagaagtttttcactagatcgctcgggacaaggaaaccctaaatcataattatgggggctttagcacatggaaccaagcacattggatggtcggggcgacctttttgcttcaaaattatttcatcaacttcttggtttttgttggactacctccctttcaattgatcccacaaggctacaggttgttagccggtttatttattttttataaagacaagccttaactaattatgagttgttgtggtcatgtacagtaatttgctttagaatttgtgttaggctcatgataatctcttggaagacatgtaattcgagggcttggcacctcccagacaattgaaagctttctctattattttccttagcaataggaaaatcactttcgggtgtcctttcactcatagagtccggagtggaataaatcgataaagggtgctaatttgtctatgaatatatctctctttgccacatggagcttcatatgcatgccaccatattttggttaaaaaaccaaaatactaaccaataatatatttataataaataataattaatactcatatgttgtatttattag

SEQ ID NO: 246537 - DNA, 579 bp, Cannabis indica
gctaaggtgtgtcatttagaccgtatcaattcggaccattgtcctctcctcctcatggttaatgacacacctcaaaacactcccaatatagtgaaatggcgatcccggtttcactatgaaagtgcttgggctgaagaagaggaatgcaccaacattgtccaatcggtttggcatgggaaggagccgattcaacatactcaagacttaaaaaaccgactgggagattgtggatttgctctgcaaaaatggaaccgaaggaaaaagcgagacatgacgaaacaattgaatgaatatgcagagaaaattggccaactcacccgaagcaccaatacaaatgaatggcagcagctacaaaggctggaacaaaaacaaaacctattgctagacaaggaagagaaattttggcggcaaagaagtagagcaatttggctaaaggagggagataagaacactaagtttttccaccgtaaggcgagtaataggaaggcaaagaacacaattaaagggctggttgatgacaagttccaatgggtcacagggaaccggaaaatgggggaagttgcttgtgattactttaag

SEQ ID NO: 246538 - DNA, 2263 bp, Cannabis indica
atgactgaaattaattggatcagatcggatggtaaaatctaacatccaatatataattggatcggatctggataggcctaaaaacatgtgatccaatgaacacccctatgttcacatgatatattataaatcccttagcttctatatagatatatatttacaagatgaccatggccactactaataaattggaacatatatacattttatttttttaagggttaaccattgtaggttagagaaaatgatcctaaaaagtaaaggtgaagagtgttcttccatccaaaaaaacttcttctctatccaaaaattatgctaaaccaatccatctgctgcaatattaatgttgcgacttacataagaaagatatgccctcacaaagctagacaacaaaactttaatatcagaaaaaaaaaatccattctgccccaccaacatatctactgttgagaattactcaaacttgatcaaagctcacaacactgattcaaaataaagaagtataaacaatttaaaatagagaaaaagaaaagtgtttcattattgaaagtgtgtcaaaatctgtacaagagttggttctatgtctttacaagattaatatttatagctataggccagaaccgatttttttaggtattggaaagttagttaacaattttaactaactcaactaacattaatagcttagactactaactcataacaattacttagcttaggtacagtaatagaaaaataaggaagagggagaaaggattaagggtcactcctttctacaaattctccacctcgaaccttaatcattgtacctttgatattcatgagccacgagtagttgaagagtagtcgtgattttctactaagagaagcttgagacagtggtagaacttgattgattgtagggtgttgtaagcatgtcaaatcggttattttttgttgtaactctttctagctttactttaccatctgatatacatctcttataaagttaacctaacatcaatatgttttattttcccatggaacacttggtgttttcttaggtgcaatgcactttggttgtcactaaacatagtgatagaactcaggtttatactcttctgttaaaccttttagccaaagtgcttctttgatggcttttgtaaaagtcatatattcagcctcagtggtggacaaagccattgttgactgaagttttgctttccaacttatagtgcatgcaatctttgatttggaatagagaacctacttagacattagtatccaaatctcctacatagtccgagtgtacataccctaatacttctggttttttagtgttggcagaattagttcatacttccagaaatgtctaacatatatttgttggtatcttagtgcaactctacgtacaacttaccaataagctgatatgttaatttgatggcaactaaaacatgtacgctaaacatgtgaatatgtgcatgtgttatactaattttacctcaactccgcaatcaggtgtggcagccaacctgagtagaaatttttgctcgacgattagtggccctaagtcacaatcacataaaattggtaagtaaaacactttttggggacttaaactcaaaactagaactttcctatcgataaatagtgtggaaaactataaatatcaagaaaacatgaaatttcgggtaaccaaaaatcaccccaaccggttacttggatccccaaacggttcaccatttcttggggtcctgcctcaagaatcagtttagtgtttttacagaaatggtggaccgtttcatagaagaaaacaccaacttcaagttttcttctttaattctacctcaaactttaccaaactttctagaatacctaattaaggcataaaaaacattattcgaccaaacatcgtatcatcaaagccctgaaaccaaaatcaccattgttgagcaaagtttgagttcaaaaactcaaacctagctaaagccatgccacaaccaccgaaacctctcaaaactaacacaaacaatcataactcagaccccaaaactcaattctaatagcctcaaatcttaacagaaatgaaatctcaaactcatgcatcaaaaccaacctttttttaacaaaatcaaaaagaaaagagagctaggaaataacttggattagttaacactcttctcttccaaaaccctgctaaattcttatgaaaattgttgattaagctctaataggttgggtttcttggggttttctaggcgtagagagagagagagagaga

SEQ ID NO: 246539 - DNA, 1024 bp, Cannabis indica
gaggtttatcagaggagcgacatgataatgctgcagttaaaacaaaggagagtttgagtgacaagaaaatacaagaacctagtcaaaatccctctttcggaagataaggacaatggctccaccttagtaaagaaattgtccaaatgtgagttagattctaacaaaatagtttcattatcccaagatactgtgagatttgctaaacaagcagagaaccttttgaccatttgttttcttcccacttgactcttttattttctgttttcagaaaattttattcacttaaatttctaaagaaaccaatcaaaatatgtgaaaataattataaaaagtaataattatacatgaagcctaaccattctagtacttggctggcctgcaaagtggcaaaatgtgcaagttgacgaatgacattaaaattattttgggccattgcctctttatcaaatatggcatctgataaaacaactgatgaagctccattagcaatatactctcccactgaatctgcaagaaattggaaaaaaaaaacaaaatcaaccaaattcagaatcaatgcaaaaatttgcaagtaataatacgagaaatctggatggagggctttgaatttgatgcagcagcactaaaaaaaacatgcgcaaacaaatattgtttcccaactcaaatattgttgttatcttctttatgtgcattaattttaacttctacagtaatagattcgcacctatagtaattccttgggaagcaaccattgagatatcaggaaaaggcttcttaagtgctgatatgtactgtacaccacctaatactgaaaccggatatacctgtctccatataagatgtagattataaacttcaatccctataaatttaactaagatgaaatagtaacaatttaattaatctatgttcaatacaccttgataaaacacaatttcagaagtaactacctttaagatatgctacccttgttaaaagagaattaaacaaaaggaaaaaagagagttaaaaacttttacaaacc

SEQ ID NO: 246540 - DNA, 840 bp, Cannabis indica
tttttttttttcttttctttcttattctgttcatctcgctctatcactctcttaatctctcgatctcctcggcacccacctctctctcgatctctgaccaccccaagccaccccggcagatctctgaccaccccaatccaccacccatttgcccctctctcatcatcatcatctccataaccactttctctctcctccacttactctcagacccatctctgctcccttacgaacctcgaacccgacccgaaccaaggctagctcgagcttctgaacccacaacaacaacaaacaatgttccagaagaggaagaagaaggtcctgtagagtttccaatctatagctccgattttcaccacttctgacgaaccctcttctctccaagtcgccaccactgttctactcaccggttccattgctgtcttcctcttccgctcgctccgccgccaagcccgccgcgctaaaggacttgtaaatttctcccctttttatcttcaaaacagaacattgattgaagaatttgatgggtttgggttcaagttactgactttatgaaaaactagggttttgaatttggtggggattggtttcagttattgaatttttaagaaatgggtttttgtttttgtgattttaaatttggtgggtttggttcaagttattgactttttcaacaattagggttttgaatttggtgggattggttcaagttttcgaattttcaagaaatgggggttttgattttgaatttggtgtgtagaaatttaggtgagatggagtgaagaaatcagtgaaggaagaagcacttgaaagcttaaaggcaatgagatcagcttcagt

SEQ ID NO: 246541 - DNA, 507 bp, Cannabis indica
taacactcaggcctttgctgtgcttttgttcttctgtctatttatatttgttttattttgatgctcctatggtttttggcgttttactattgcactctctatcatggcaatggctcatctcactttttaatggcagcttacgtactaccttatgcgttcgatttaagagcgaggtagtagcttgtggggtagtatatgcggctgctcgtaggtttcaagtgtcccttcctgagaatccaccatggtggaaggcatttgatgcagaaaaatcagggattgatgaagtttgcaaggttcttgctcacctctacagccttcccaaggcacagtacttaccagtgtgcaaggatggtgattcatttacattttctaacaagtcatgggattctcattctcagcctcttccgaaggtaattctctttaactttctcggtatgttgattctcaatatattgcttcattagacaatctgttcctaaactgcagtggcatgatttgatggtgacc

SEQ ID NO: 246542 - DNA, 806 bp, Cannabis indica
acccgtgacacgaaaaatttgtaaaacacggacacaaacacgactcaaacaattttgtgtcatttcgaactcgcaaaatctcgtgtcatgttggcggattgtaaactaaattgttatttttagtgtcatcgttttgtgtttttgtcgtgtaaaattcttaaatttattttagatggatgatatgaatacgatccatgacacaaaagatttataaaatacaaacacgatccaaatagtttttattttgtatcgaacccataaaatctcaagtcatatttgtgtcaaatctgcaggtcatgacctgaattatcacccctaaaagtatagataacttagtttaatcatctatactaaatactgatttagtgttagatataaattctaaataatatttaatactatatgtatataaatttttagcaaaaaaataaatttaaataaaatcgtccaccaaattaattttttctatatattttgtaatgtgatacacttcgattattcatcagaactaaaactaattgatctctactctttttttgctaacgtctgaaagtgcagtttgatgtgaccttccctatcttttcttatttcatacttagccttgatgtcatggacataagtggagagcaacactattgaacaccacatcacatgaaaacttaattactttattgatacaaaaataattataccacataataatttgaccacaatactcttaaaatatttagacactttatttggattactcacttataatttctatcaaacttatatgtttaactctctaagacaaacttagaata

SEQ ID NO: 246543 - DNA, 1052 bp, Cannabis indica
atgcggctatttggccattagagtcacttagatacggttgagtatcttagaattaccaggacaagataattagacttttgatatgttgggattattcagtgttgtggtttaagactattttacccctaggcattttagttttcttcatagtaaagaaagggcaaaattgacattttgccctaagttattgaatttttgtcttcaatgaattctagtatttcctttgagataaatctgattatttaggatatatattaagttagtaaattagaaaattatcaataaaataaaaaaattaagtcttctccttctctcttctttgtttgaccctagcaagccaaggaaaaccaaggttttcttcagcatttttagacctaaatttaggggtttttttagaagggaattagatggtttattttgccaaaggataaggtaggctcctctcccttttctccttgttttttaaaggaaaaagctaggtttagatattcaagttgggttgtagtttttgttcatgtttgggatatttaagggttgaattctcttattgttttgagttatttggagttagattagttggttttggagaaagtttgttgttggttacctaagtttgagtttaagagcccaaacttagctcatcaatggcaaaactcaactcagagtcttgatgagctactttattgttgaactatgtttatttgacccaaaatagggattcttgagagttatagaaagcttgggttaattttggagttgaaatggggtttttgggaaatctgcaacaaaaacgacatacccttttctcataagcggttgcttaacatacccacttttaatattgattcgaaacataagtgcgaaacttgtgtagaggcaaaattaactaggttatcattcaaacagttgaaagagagattgaaccccttgatttaattcacattgatatttgcaatttaaaatttgttcaaataagaggtggtaacaaatgctttattatgttcattgctgacagtacaaagtattgttatgtgtacttactaaaaagcaaa

SEQ ID NO: 246544 - DNA, 796 bp, Cannabis indica
aaaaagtaaatttaaaatttttaagtaaaaaaaaaaaataaaatttcattataaatattataattaaataagttaactgttaaaataattatagtaagaatttataataaaaaaaaataaattatttataaatattacttgctaaaagaggcattgttaaatatttaattaattattttaagaaaataattgaatataattaagtaattctaaaaaaaaaaatttacctattaggtcaaaaaaaatataacttatggttacaataaaaatgtgttcattaagtagtcactaataataaaaatatatattttatgcagaattaaaattaataaagtaaagtgcatttataaatttttagagtgcaaactacaaataaaatttccataaaattaaaatagaaataaaataagttacaaaaggaaaagacaatcccaataaaaataggagaaaaatcactctttattttttctctaatttatatggcttcgctagcttttctaatcataaaattttgtaaacgaataaataagaatgaatatcatatcattctcattcgggttacgcaaacgagaaatgctaaaaggcaccagtagtgcctaacacttttctatgtgtcaatatcgtcattggtccaattaagtatcggatcccatataatttaatataataacttttaggaagtatcgctagccaatcgcaatgcgacatgtcgagaaggtgctagtcactagtggtgcctaatagcaatgctctaagaaacatgcctaagtgtcgtcttggtttccaaattggattt

SEQ ID NO: 246545 - DNA, 908 bp, Cannabis indica
aaactaacggctgataataatgtctctgtcgaatttttctctggtttttgttgtgtgaaggaccaaagcacagggaaagtggtgctgcaagggacccttaaagatggattgtatcaactcaactcctcaccacagtcacaacaaactcactctgtctactcggctgttactaccaacaagccacctgttacacatgttaatcatcattccctaaagacatttggcataggcgtctaggacatccttctattaatgttttgaatcaagttctaagactgtcaaatgtaaaatttcctttaaatgaaattccacacttttgtgatgcatgtcaatatggaaaatcacatgctttaccctttcaaaaatcacattctaaagctgctggtttgtttgatcttgtgcatacggatttgtgggggcctgcccccataaactcacacactaacttcacatattatatacactttctggacgatcacagaaggtatacctggttatacttattgaaaaacaagtctgatgctttatcagcttttattcaattcaaagctatggtagagactcagtttggtaggaaaataaagaaactaagaagtgattcaggtggtcaataccaggctttttcgagccttgtaacacaaaatggcatactatttgatcactcttgtcccaatacttcagctcaaaacggtcgagctaaacgaaaaaatcgtcatattgatgaaatgggactcaccctccttgcacaggcaacaatgccccagaaatactggtctgatgcctttcagaccgcagtctactcaatcaatagattgccaacctctgtgcttggtcacagaactccttttgaggtcttgtactctaaactacccgattataaactattgagagtgtttggggctgcctgt

SEQ ID NO: 246546 - DNA, 809 bp, Cannabis indica
gatggattgtatcaactcaactcctcaccacagtcacaacaaactcactctgtcttctcggctgttactaccaacaagccacctgttacacatgttaatcatcattccctaaaagacatttggcataggcgtctaggacatccttctattaatgttttaaatcaagttctaagacagtcaaatgtaaagtttcctttgaatgaaattccacacttttgtgatgcatgtcaatatgggaaatcacatgctttacctttccaaaaatcgcattctaaagctgctggtttgtttgatcttgtgcatacagacttgtgggggcctgcccccatatcatcacacactaacttcacatattatatacactttctagatgatcacagcaggtatacatggttatacctgttgaaaaacaagtctgatgctctaacagcttttgttcaattcaaagctatggtagaaactcagtttggtagaaaaataaagaaactaagaagtgactcaggtggtgaatatcaggccttttcgagccttgtaacacaaaatggcatactatttgatcactcttgtcccaatacttcagctcaaaacggtcgagctgaacgaaaacaccgtcatattgttgagatgggactcaccctccttgcacaggcagcaatgccacaaaagtactggtctgatgcttttcagaccgcagtgtacttaattaatcgcttgccaaccactgtacttagccataaaactccttttgaggttctatactctaaactacctgattataaactactaagagtgtttggggctgcctgttt

SEQ ID NO: 246547 - DNA, 1035 bp, Cannabis indica
caaaaaaagaggaagagggagatatcattaaagatttatgacatcaaccataaggtagcgatgaatacaatatggataacgtggctatcaaactttgttagtagccacagacaaaacatacttaacaaggttatgggcaacaacattaattgtcttagaacaatgagaaagacgcacattatgaaagagagtcatagtacaatgaatatcacaaaaaattaatactatacgtatttattaggaaaatttaaatttatatgcatacatttggtgtatagtaaatttttgaacacgagcttaccaaagacacactttatattaatacatataatacccttctccattatcttctcttctaacttcaccatccatacgttccattcccatccatatcgatggtggtcctatggtagtctgatagtgctctgatggtggcccaatgctacctatttttcttttttatgtttttgtacataaaaatggtagcatcaagccattatcgggtcatattctacatttatagatgttaagctctatttattaagcttgtcaggaaagtattaggccaccatcggaccaccattggactaccatcggaccatatcctatatttataggtagcatcgggccaccatcagacattcgtcttcaacctttactcattttaacaataggaaggtatcatgccactatcggaccaccattgggccctgcaaagaaactagttttttacccaaaactcatatccgaccattttcgatcctaaatctaacatcaactcacagataacagaaattaatcatacaatttatacctttgataatattgtagatggagaagctgtggttgatggagaagttgtggttgatggggaagtcgtagggtctgtggttgtcattgggttcgtggatcgttgggtctgtggttgcagtggtcgtggagagaaaggaccgaggttgtgggtggtgggtcgagtccttggagtgagttcagagagcgagagagagaagggaggaagagagagggtcatgtgtt

SEQ ID NO: 246548 - DNA, 790 bp, Cannabis indica
ttttcacctcaaatcgtatcaataagactgcagcttgcatttctgtcttcaaatctttagtgcccaagggcaaagttcataccgaaaggaaaatatactttggttctgtgtttctattggaagacagtaaaagcttctatcattagtgtatgtgtcaaggaaggaattcggcatgaatgggcttctttcaccagagtattctttctcgagtatttgctctccaacagcctgctttagaatccttagcgtttcaacattttccttttatattcttggcacaagtattgtcattcaaagatacattcaagcacatcaattaatacattgtatattggattgaacgatctattaattaatcaattaatttattattattattattattattgaaattgaaaaatcattttcctcttaaatgacaattgaaacaagcaaattgtcatgtgtaagccatgtgtcgttttatgataacgaccttaatttctcacgttataatgatgtcgtttcctctttagaactaaatactttcttgacccaaagtaagttgcttctgctttgatcctacattagcaaaccacaaagaagccataaatgttttccatgtcaaatatgaaatattaaactaaaagggaataacgaaaatgagtgaataataggaatggaaatgaaactgatcagtaggaaggaaatggaagaagtataggaatgaaatgcaattttgttcattcgatccaatccgtatttttttggtcaaacaacattcaattcgcattaagtgtggatttcatat

SEQ ID NO: 246549 - DNA, 924 bp, Cannabis indica
tatagactcgtggactaaggatccttaacgcctgaaccacgtagaaatctacttgtttattatctaatactttttttcttctttaatctctcaaaatatttggtttccaaaaaactcagtaaacaatttgaattcaaaattcaaattcaaataaaaatatctaataactgaatatcaaaatattagtagatcttttattctaatacttatccttttatttaaaaaaattatcaaataattaatttcattaataataaaatataatttaaattattttaaccaattaaaattattaaaccaaggtaatcatgggcttttatatgtcactctacacatgtagaatgggcctacatgggtgggctatattttcaggtccaaagttgatttcttaatttttgaataaataagatttactatttattctgcaataaacaataattgattaattattattgtttaccaagatttttgaaaactgattaactagagtttaagaaaaatataaattagtaaatgatagacaaataaatttttacatggttcaggcgttaattatccctagtccaagagtctattgtattagccttgtaagcaaatgtttaggaagtataagtgtttacaatggcaaccctgtattcctctcgtttctcttgaagaagaaagctctctaggtatttcggtagagtttttgtaagtaaaattcttcaagagaaactagaggaatacagagttaccattgtaaatacttgctacctaaacatttgccttaaaggctaatataacggactcgtggactagggataattaacgcctgaaccacataaaaatttatttgtctatcatttattgttttatatttttcttaatctctagttaatcaattttcgaaaaatttggtaagcatttttgtgctttcattgagag

SEQ ID NO: 246550 - DNA, 1457 bp, Cannabis indica
gtcacctagtgaaaaagcaacagtgactggaggtaaaaatagaggcccactaaggaatatcaattagattctagggttcaagccagacgacttcccacaaaaagtagcatttaccctcatttatttcttgtaagaatcgtctatagtgaccaaaggtctcatcttgactatttttaaccagatgatccctaattttagcatcatttattttaagaatggttttgggtatttatgttttggatatgcatctaatggtagaattttgaggacaatctgattttaaagattctgggattgtgatttttggaacaaattgggacatatttataaatgataatatcccaatctccaaaagtacaaaacacaaactcaacccaaaaaatctacgaatcaaataacctaaaaatattcctagccctagaattatttagacaaacaaaatcaaaattacctaaacagcaaaacaatgcacacaggggaacactaacctaattatgaagatagaacaaaaaaaagatcattaagaaaagagagtgtgtcacttactgtcttgttgagaatttctgggcaatagagaactttgcgagtgaaatctcaaagattgagaagctggatctcgatgatttctaggaccagagagttgagtagatgtaatacgcaagaaaaatgtaggggacaatgagggcatgaatgattgagaaagggcaatcgaaaaaaaattctgcaggaaggcttgaaggtttgaagaacgaaaatggtgaaatgagtttttatttctaattttatacccaactagtgaacaccggagtaatctgatctaacggatgggaacattgcaaaatgggaacaatcagagcattaaatgctcaatgatgtacctcgaagatctgaaccgccagaactcaaagcatgcaatttttcaaaatagtttaatatgataatacccttgtgatcatttaaaaagttctttttaataaaaaaaaacactttttcgggagtaattgttatactcaaaatttggtcatgtactagaagctgacacatgtcctacaaaaggaatgtgaatcaactcaatgaatataataatgacattgtaacattaaatgcaacgaaaataactcattttaattaaatatatatttaatagagatgttcaaacttgctgactatttagtcttatgcgagacaagaataataactattaaactaagaattgacgagacatatgtttgcctcaagatagatagaataataaaatgtacaagacgagatattcaaggaccttgtaaatcattaactcatgagaaaagtgaaacttatgacactcagccaccttgcgttattcacaacatggtgaccatcttgcatcactaatacaaatagagagatacaacgagatgaagtgcttccaacacttagtgatttttcctattaagatggataagaaggagaactca

SEQ ID NO: 246551 - DNA, 2579 bp, Cannabis indica
aaccaaggatgaggctctcccaacatttatcaaatttaaaacacagattgagttacaactcaatcaacagataaagggtattcaatcggattggggaggagagtttagggcctttacttctttagtggagtcttgtggtatcattcatagagtctcttgtccacactcccatgaacaaaatgggattgtggaaagaaagcatagacatatagtagagtctggtttgactctattagctcattcacctatgccactcaagtattgggatgaggcatatcgaacatttatctatcttattaatagaatgcccactagatttctaaataattttactcctcatgaaaccttattccacaccaaaccagattactctacacttaaaacctttggttgtctatgttttccaaacctaaggccctataacaaaaataaaatgcattacagatccactccttgcattttcttaggttatagtctcactcaaaaaggttacaagtgtcttgccaaggatggtcgaatctatatgtctagggatgtcttattcaatgagaccacttttccatatcagaaaactactgctctcccctaacatagcctttccacttcatcctccacatttgcatctccacctatctcttcatcacaacctgtcatctcctcaccaattcatgcacctgactcataatctcactcacctgaccattcaacatctttctttccatcaaccaacattcccaattccacaccagcatcatcaattccttctcccaacccacctgttcccttacaggtctcacaaacaagaccccaaatacctgatcaccctttacatgttgtgaaccagcatcctatgcaaaccagagccaaagcagggattcgaaaaccaaaagtactcactgcatcctttgttcatgcaacagtaaaacagcattacaagatccaaagtggaacaatgcaatgaacactgaatattatgctctcaaaaagaacaatacttggattttggtgagatcacctcctggcagccaatgcataggctgcaaatggatttttcgaatcaaggaaaatgaagacggcagtcaaactcaatacaaagcaagacttgtggctaaagggtttcatcaacaaagtggatttgactttaatgaaacctttagtcctgctgtgaaaccagaaataattcgggttctgcttacagtggctatcactaaagggtggacactaagacaactcaatttcaacaatgcttttctcaatggtgatttggaagaagaagtttacatgtgtcaacctccgggtttcattgatcctcagcgtccagaattagtatgtaaacttcaaaaagcattgtatggcttaaaacaagctccaagagcttggtttgccaagttgtcatctgctctactcagtttgggattcagtcatgcaaaatcagacacctctctctttctcagaattcaatctcagcacacaacatatcttcttgtatatgttgatgacattattgtcatcaaaagccatgctaaagaggtatttgctcttatctctaatctcaactctctgtttgcactgaaggaccttggtgaccttcattattttctaggccttcagattacaaagatagaaaaaggtttgcacctgtgccaaaccaaatacctgcaagacctgctaaacagaaccaaaatgtagggagctaagtctagcaatacacctatgactagtggccttaaactctctcattttggaagtgacaatgtcctcgattccactctatacagatctgttgtaggagctttgcaatatgccacgattaccaggcctgatattgccttttcagtaaacaaagtctctcaatttattcaaaatcctttggagtcccactggatagttgttaagagaattttacgatatctggctggtactttagattatggacttcacctgcaacgatctaccaactatgacatcactgccttctgtgatgtggattgggcatccgaccctgatgatcggtgctccaccacaggttattgtgttctttttggcaacaatcttgttgcctagaaatctaagaagcaacagacaatctcgaggtcatctacagaggctgagtttcgcagccttgctgctgttgtaacagaaataacatggcttcagtcacttctaactgagcttaacatctcattgtccacacctccaactgtctggtgtgacaatttaagcacagtcatgttaaccgccaatcctattcttcatgcgcgcaccaagcatatcgaaatagacctttacttcgtgagagacaaagtcatgcaacaacagcttcaagttaatcatgtccctgtccaagatcaacttgcagattctctcacaaaggccatttccagcaatcggtttcccttccttcgagacaaactcagtgtggtttctctatccacactaagtttgagggggctgttgtagaataggattagtttctctttacagttgttagttttattctgttatttcaaactgtacctaactaactctgtaactaactcctttcactccattcagctgtatatatatatatatgtata

SEQ ID NO: 246552 - DNA, 814 bp, Cannabis indica
aaaaaaaaaaaagtttgtgttgttgtgctttatttataaatttacaaatagttctcaccaccattcaacccctaaaaaagtctctactcatataattgggccactcaaaccaaaaagaaaaaatcaaaaattactaaaccttagattcgtaaaggacgacgccgttttcagccacacgctccgccaattgccccatttgtaagggggtgactgtactctgtattatttgttagtatgtactactactatgtatattaatttggttaaaactgtccataaaacgattataaacatattgatcgtaaaatcctgcatgacttgacatagaatgattgcataaattattgttagaatgtagaaatgtataactaagctagtagaataagtaagtgtatggtaaggtacattttatatatggtaacaattataatggttcttttttatttcttgatgatcatgcaatatacaagatattcttgacactagtggttcttttgttactatagtgttttattcttcacagttattcatttatatagcacaagttataatatagggtctgttataggagtgttcataaaataatcgcttcaattcaatctgtacgatccaatccaatccaatctaatccgcaaagtgtggatattcgtatttgtgtagattggattggattgaaaaatttaaaatctgtacgtatgcaaattggatgttgattaatatttataaaaagaaattaaaaaaattataaatacaattaatattttataatgtaaagaaaataataattttttagtctaatacatataatataatt

SEQ ID NO: 246553 - DNA, 1607 bp, Cannabis indica
ccgtgggtgtaagggcccaataagcttgaagcagggacgttacattttttttataaatatcagtaatcgaattcagttatatttatttactaaatgattaaatatgatttaattaaaatagcttttaactactataaatagaaacccgatttgagaaatcagaacatacttttacactggtattttcaaaatatatagacaagaaaagaaaattattttctctcttaattgttcttgctcatgtgttgagaacttaatcagaacaaaaatatacactttatcctagtagcccacactattccttgtgtgttgtggatcgatttgaaagacactggtgtgagtccaattgcatcatcctcatcatctggattaagagatacaacatacgagatgtttcgaggataccctaatagtcttcaagaggtatatgttctaaacttactattttatgtttcgatttaatgtacacacatctagagatttattggactatggtacaatgataatcaagaatacaatactctttcgctggatacctgatttagtaccatgaaaactaacaattgatactagaacagttctatgaatgtgtatacattaaatgatgtttgggttttatatatttatatataggtgatatgtatgtgaatggatggttatattattgtgaatgtgtgagaggtgatgaatcgttaattatatggtataattaagtgtaggttttgttattattatttttagaaaataatgtaagccattataaggtatacaatttttttatataattttcacgtttatgaaaattaacttatatgtaaaaatttataaacctatgtaatgctcaaaacaccaccatgcaccgtgaatgtcacgtctgaagccccatgcatggagcttgagatccaagtgctctagccatgcacacgacgcagccaacaaccacttggtttgggtgtcgtctccttcgtctagtctaggagctgatcgcaccaagggactatagtccctgcaatcaacgtcattcaacgacagaatggtggcctaaccaccatatgatagacgaaagaccttcaaggtcactgatatatatcatatactttaatatacatatatatcatatatgagaaggtttcaatggttacattaaatatgtaaccatcatggctatatttttttaaccattaaattactattgaatggttgtgattcatttagaaattaaataaaaataaataataattaacttataacctaaaagtcacttaataatttagtttcttataaaactttaatgaagattacttatattttaaaattaaattaattataattattaattaatttttcgtaatttattagtaaataaggatcttttagaaattttttttgcccttaaattattaaaatttttatagcaaaactctttataatttaaaattatacagatataattttataattaaaattttattatacttataactttaatttaaaattattacacttaattatttaggttttttcatttaaatatttaaaaagtaaaaaatgaaataggttgaatgtattttctaaaaaaaatgactaaactcctccatctttttttt

SEQ ID NO: 246554 - DNA, 588 bp, Cannabis indica
aaaaaacatttaaatccctaaatatccaaatatcgatcccactgttcacataagatgactctgacaatttgggcatctttgatcctctccattgttgaccgctccactctcctctctttctctccattgtcgatcgtccattatcgaccgctccactccctctctcttcctctccattgttgacatttgccccaatattcgaaccctaactctgcgattttgacccaccacgcccaatcgttctcctcgacgaaccatcctctcttctctccccgacgacaacaaaactagtaatttcaattattgattttgttttcctcttccaagttctaaacccgttattcaccagctcatgcttattttttatttttatgtttttgctaaatactagctcatccttattactactcagtactctctcaccttgtaagagcaatgacgtgaagaggagtccctacaaatcatctctcctgatctatggtatacccatttctctgtttttgcctacaatttttgtactagaataggtacctttactttctagcagaacaaaaaaaaggtacctttactgaatttgtaaatggtttc

SEQ ID NO: 246555 - DNA, 806 bp, Cannabis indica
catacccattttaacatttgtaattgcaccaccgtagtgtttataataatacaaaaaataaaaagaaagaaatagaagattggggttcgttggtgattcacaataatgggcccatgcatttaccaggacaccaatttcagagctatgcgcgccttacttctgtttttggttcatttctttgggaattggtaatctgtattggtattggtgttgccactcctctctccactctccattgttcctcctcagccaattaacctctctctttctctcccatggactcttcttctgcaactatggctgtcagagctgcttcttcttccttctcctcttcctcttccacccttttctccatatctccaaagctaaacccaaccaccaaaccgaccctctttaagatccacacacacaaaccccgaatcatcaaaactctcaaatgcatccactcgcctaccaggagaaatggatcgcaattctcctgctccgccgtcaccttttcaccgttacagaccactgacctcgtcccgtctaagcttcagaggttggtcgccgagttccagtcgtttccggaacccatcgacagggtcaagcggttgttgcaatatgcgtctcttcttccgaagtttgatgactcgtctcgggttgactcgaaccgagtcatgggctgcaccgctcaggtatggctggcggcgagtttggataaggaagggagaatgagattcgcggctgacagtgattcggagatcacgagaggattctgttactgcttagtttcgattctcgatggggcggcaccggaggaggtt

SEQ ID NO: 246556 - DNA, 476 bp, Cannabis indica
gcattagtaggtcttggttgttgtctgcttgggcgtccagctgattctgatcggctttgacgtacgttttcacattcgggttatcaggaattcaatttcccgcttcaagtcgttgcactcatttgtgtcgtggccatagtcaccatgaaaacggaaaaatttgggcatatcccacttgtttatgtcctttttaattagagcaggttttttgtacgagaccacaaattgggttgccatgtagattatctctaggtcgtcagttaggacagagaaggtagtgaatttggaggcattttctcttagtgtttgttcggctttgcctgcgaactttcccttctacctgttgccttgtctgccattgttattggaccttttgccactcaaaattaagctaattggatattgttggttctgagcagatactcctactgaggggacctgtggcttgcctgacctaagtttgacatctgctcgat

SEQ ID NO: 246557 - DNA, 723 bp, Cannabis indica
ataaagcttgattaaaatgaacatatgaacgaaaacccaaacctccttccatttttgttttgcagataaatttccactttttccaatgagtcttgttcttatctccagttgaaccccaccagaattgagccatcattgtatctaattgactacaaaaactctttgaaagcttaaaacaactcatagcataacttggaatagattgtactaccgctttcagaagaatttctttgccaccaattaagaacaacttatcattccaagcatgtaaaagcttccatattctttctttagtgtcagcaaaaaggtgttttttgtcatgctcagagtaggcaggaagacacaaatatttttcatgacattcactaaccggcatgcccaaaatttggctaaaagaactcttgacaaccgctgaagtgtttggtgaaaaggacataacagacttatcttcatttaaaagttgtgcagaggctcgatgatatatgtctaacgctcgtttgatagcaccacaagatcgctcattagcacagcaaaacagtaaactatcatctgcaaaaaagagataagtaatagacggtcccgttcgagagatagacaggccttgtagcctaccaatagcctcctcatgttgcaaaagccgtgagagtccttctgagcagattaagaaaagatatggcgacagaggatcacattgacggagccacgttcaggaatgactgaacc

SEQ ID NO: 246558 - DNA, 6001 bp, Cannabis indica
aacattagcactatttttagaaacagaatcagcacctctcccattacaaggcaagtataaatttgtggtttccaaaatagaagaagaaattattatcaataacaacaaccacacttgacacgggatgccatttaactgtatcaccaaccatgacacactttccttttttagaatttgacaccggagatggcttgaatcccgacgcaccaccgccagcaaccctacccctggtcgagagacaactgtcgggctagctcgacttccccacatgcaccacatcaccagacgaagacacccaaaaatcgcatccacgagactttttagaaattgggccagttatcttttcgggatacagaacccgaatccaaaccccatatttcaattgatctttgctgccaatagacttcgagttcaataggcagttcttgatcgggtggcctaagattccacaaaaataacataaatccgagagtctattatactgaattgacttatgaatcaaaggcttatttagcgccaaacaatgtgtaatcacacgtgctagaggtttccgaatatcaacactcacgcgaaccttcatgaactcaccatggcacattccattcggaccacataacacctctaacacctcaccaatcgtctttcccaactaaaaaccccacgacttattcatacaacacactgtcaccttatgaattagatccaaaatggagcaaaataaaaggccatctcagtcggatccaatacgtcatcaggttctttaagcgtaagtaggcaatgctcaaagacctaaggaccaccctcaagtacccgcttacgatccataatttgaatcaaatcaaagcgaaacaaatgcattctttccccatgcttcaaccgtaaatgacccctagattctccaaaaagctattcacaacatagatcaaatcattatgatcgatagaacgcgtctaccacgtcataatcatcatcgacctcatgccatcgtattataaaacgctacaagatcgttgtcgttcatggtgcccataacactgctgtctcaaccaaccaaaaatcgaagacataaaaatgaaaagaaacaacacaagagatagaaacgggacacgaccacaaaccctagtctagtccatagtttttaattggttattagtattttttttaaaaataatttgttattatttgtatatatttttgttttagaatgaataatatatattttattgaatatgttgagtcaccacaaatcacatggtagctaggcctatggtgtattgacacacaataggtgggagtctttccactcatgctataaataaaaataatgttaaaaaaatagagagacccgtcaactggccaaggccaaacccaaacccaatccaatccatctcgttatcgcaaacccttgtttcctttttcttctctctgacttcgattgagtgctctctctctcgcgactcttctccatcgaaacggcgctcgccgcctctactctgtccggtaagcgctatcaataacaccctctctacagttctatctcgcatggcaaccccagaattgtccatcggtttctaggaattctctcgtcgttgttctgtttccccatttctaggttttcggtttctttcttcttctttaatttgatcggggagcttctgaagctgcgtgttactgctttttgtggtctagtctgtattatttgatgttttttgctttatattttcatcttgtactgatttggatctgagatttttggattcgtgctgctatattttttgatttaaaattggggatttttttttctttcttgtgggtttctaattggggtttagggtttgagcttggtgttttacctatcaaatttcgttgcggattggatttttctgcatatttggaactttgaaatttagttatatattcatggcggccggcagacatggaggttatcgcgacaacgagtttagagaaagggagtcgaattttgaattgtccaggcgggatttcactactgctaaggaagattatgagcgcattagaaatggtagccgtgataatgaaaggggtagagttcgggatgcaagggataagattagggctaggcagaaagatgttaaagagagggaaggagtaaatggtgatcgtcgattatcttcaagcaggagtgattcaggcagtagtgggggtggtggtgatggtgatggtcgccgggggcccaagcgatgtgggttctctgttaaggctgtggatagagaaccgggtgaattgtcaagtgagagtgggtccgatgaggccattgaatcagaatctcttgttaaagatactgaggctctgaagatggaaaatgggtcgaggtcttcggtagagcggaaaaggaagttttcacctataatatgggatagagatgacaaattaactaattctacaaaaagtaggacgtcaacagcagttccagcactacctcctccgccccccctgcctaaggtatttcggcagtctgttattcctgatggaagtgtacaaatttctccaattaaacacagtcataatgaggatctacagtcttcctcaccagtggaccagttggaagcacctgagacagatgggtgtgctgtgactgagtcaccggatgagccatcttctatgttggtgaagcaacaattggaaaatgatcaagaaacagagcaacacgaggatgaagattatgtacccaccagaaatatatcatcatccagatgggcagcaggaaatagctctcctggtgatgaaggtgaaattctggatgaggaagaaataccaaaaagaagaaaaatgcctggtccagagtcatcgggaaccagtatacgcaataagtcgttaactcctgagcttggggagtttaagagagatgactctgaaataggaggcaggtcatctgaatcagatgaacggggtgctcatgctcggtcttctattggggatgactaccccgataatgatgcagagaagggtgattccatggaggttgacgatgagaatcgtcagagtaatattaattatagtcattctgatacagattctgaggatgatagtgattctctcgaggcacctgaaaccccagctcctcctcaaagaagtgtaaatatgcttcagggctgcagaagtgttgatgagtttgagagactaaataagatagacgaaggcacttatggtgtggtatacagggccaaggataagaaatcaggggaagttgtagctttgaagaaggtaaagatggagaaggagagagaaggttttcctttgacttctcttagggaaattaacattcttctttctttccatcatccatcaattgtagatgttaaagaagtggtggtggggaataacctagatagcatctttatggtgatggagtacatggaacatgatctgaaggcactcatggagtcgatgaagcaaccatttagtcagagtgaagttaaatgccttatgcttcaattgttggaaggcataaagtatcttcatgataattgggtgcttcatcgggatctgaagacatcgaatttgcttttgaataatcggggtgagttgaagatatgtgattttgggttgtcacgtcaatatggaagcccgttgaagccatatactcatttggtcgtaactctttggtacaggtgagctgcaattgcacatatttcttccgtttttatcccttaaatattattttatttctaaatttaagttcggatagtgggcaatgagtttgatttcatttcatcacacttttccacttcggggctttagctttaattgtggatgtttttccctgtcaaagattctttttttttttcctaatcttttcctaaatccttctctttgccatgtcttgttagtaatttgtcaactgttcacgtttttctatatttaatgcattattttaagagagggatcttcttagtaagctttgttctgggccctatagtttttacagtagtactttagtttctaataatttttccgaaaaagattagcttgtttatgttttaattttattgatttttagggcacctgaacttctattaggagcaaaacaatattcaacagctatagacatgtggtcattgggttgtatcatggctgaactattgtcaaaggaaccattatttaatgggaaaactgagtttgatcaacttgacaaggtatactttagtagtaggtgttggtatcattttcttccaacttttcacattctaataatgtgatttattccctgattttattatgattgcagattttcagaattctagggacaccaaatgagacaatatggccaggatattctaagttgccgggtgtcaaggtcaattttgtcaagcatcagtaagtatcatttattttctgaattttccccccttaactgtgacactgaggtgttcttattgttgctgctgttttcccaggcttccagctttgggtgattctgacttggctaactaccctccattggtggaactgtgtctttctcacttctatgtatgtcttaatctatgatattttgtttcaggtataatctgttgcgtaagaaattcccaccaacatcatttactggatctccagttctttctgattctggatttgacttgttgaacaaacttctgacatatgatcctgatagggtaatttactttgcttatctttatttgatttgatttcagtgttactgtagttacttacaggtttttaattttattgcagcgaattacagctgaagctgctttaaatcatgagtggtttcgtgaagttcctcttcccaaatcaaaagagttcatgcctacctttccagctcaacatgcacaagacaggtattttgatacgtaccattaccaacttttattgtacaagttctagcctgccatcaattttcctaagcaattcatctttcatgatgtaactaggcgtgtgcgaagaataatgaagagtccagatcctttagaagagcagcgtagaaaagagctgcagcagggggaattaggagctggtggcgtgtttggttaggagacactggtcacaaggatacaagtactgcacatctattgtttacaactctgacaaattgtctatggttgaggtgagacatgcctagagaggaagttgcaaagattgtaacttagaaaatcattcgtgctgttttttagcaggcacttcgagaagatttgggtgggagatatgtttctttgactattctcaattctcaaccagattgttgcaggttaactcttttttaatttcagcttttgtcatcatatgaaagtgcatcgctggcactacttcacttgaggggtgtggcatatttgccttttttaaaaaagggatattaagtactgctgaatcttgtgtatgtaacataatttcattggtacattgtaacaattttattcagatttggttttgaatattagcctcagttatattagaacatatttaatattcatattgtgtttgcaagaggcggttgatacttggtgtgatctgaagaagtggaggagacgttcttcgctttacattgcgacgattttgacagtaacaataataccgtgaaaggtaatttatttgatgtctggagtgattttctgggaacactggagcatttaatctggaatgcttctgatcaataaggattacgtttttcttttgaaataatttgctagtaatattaaaaagggggtgctagtttagctgctgtggaaacaaataacataaattgttcatacgtacaaaatagcagaggaaaacagtacatgaacaagaccccaaatgtggccaagtcctcacacaattaataggcagtctgtcattgataaatcaaaatattgttttgtcgtttttattgcaaggttgaatacttggaggttctactgtttttggtcataatatttttcattttcttttctaacatttagctaactgatcattgactttaggcaggccatgataaattacttaaataggtcaatggtaatggatt

SEQ ID NO: 246559 - DNA, 1031 bp, Cannabis indica
taaaataatttccaacaacatcctcatgtaattctccatgaaggaaagcattatttatgtctatgtgatgtaagtgcaaattgttgatggcagcaagggcaaaaaaaagtttgagagtattgaattttgccacaggggcataggtatcaaagtagtcaatgcctggttgtagtgtgtagcccttggctatcaatctggctttgcatctttcgattgagccatctaggctatacttgattttgtatatccatttgttgcctatggcatgctgtccatctggtagagttattactatccaggtgtggtttctttctaaggcatatatttcaacatctattgttgtattccaaaccttctgtttggaggcttgagcataagatgtaggttctaagaattttgttgttgctagaacagctgctcagaacttgggtgttaacctgctataagaaagaaagttggtaagaggatgagctatgctattagttgaaatgactaaatcacaattgtaatatgtcaagtctgcaggtttatgtattgctctgccagatttggaagccatgggaggctgctgtgctggaatagtaggacaaatatcttaaatgttaaaattagatgtattggtgtctgctgcagtggaagacataggatcagtagtagaataaaattgaaataagttgtcaatgctaattgttgtgttagattatttgagtggaaagatagattcataaaaaataacatctcgtgaatgaaaaatgtgattggtttgcaagtctagcaaggtgtatgctttcatgttttcttattaacctatgaaaatgtatgctcttgctcgaggagcaagtttatggtcagaagtgacatgagatgcatatgccttgcggcctaaatttcttaagtgagtgtagtgtggttatttgagatgtaataattcatatgatgtcttgatctttgagagttacggatggtgttcgattaaggagataaacagcagttgtaaccgtgtaacttcaataagaaagtggtaaatttga

SEQ ID NO: 246560 - DNA, 960 bp, Cannabis indica
tttttttttaaatttttgttttttggatattttcacccgatgtttgggggctaactgttggatttctttttcagatgagtgaggttcttcatgatctttacgaccatggttttttcggcttcgaccaagaaatcttagaactttaccaagcccagatcatgtctttccccacctcaatcgaagcaaaatcttcagactaggtgcccaagaaattggcagccttggaagaagtgatgaagggcccggtggtccatgagaaatacacctaccggtccactagctgggaggcggacgagctaaactcgaccctaacatgtgcccaccaactggaaaagattattactattgccgggattaagccttccacggctaaggtttttcatcgcctcccaaggaacgaagaaacgtcaaaccgtaactacggcggcttcgggtcatggagtcaaacccatttgatgtccgaagccgtgctaccgcttcaagattacttcatagatttcttagtttttgttggccttgcgcctcatcaactcatcccccaagcttatcgcctgctctaaggcttgtatatttttttatgttgccaggaactgggctccgcctagtctggcagaggttttgtatttttatgaactcctgtccgtcccaaaaaaggggataaactaaaagatggcttccataaactccaggcccaccctgccaacaagggtcctgtgccttttaactttcagaagaacgtgaaggagtaccatcaccgcaagtccttctcgtccaattttaaagtcgttgagcgtccggagtttctcactgagtgggttagggttcctcctatgtaccgtaccactcctactcaactcttcctacaccatgcaaaagtttttgctaattacaataaggatgagttgaatgtcagggacctggtcacgactgctaactacaggagggcaaagttaatttctg

SEQ ID NO: 246561 - DNA, 878 bp, Cannabis indica
tgtaccgtaccactcctactcaattcttcctacaccatgcgaaagtttttgctaattaccataaggatgagttgaatgtcagggacctggtcacgactgttaactgcaggagggcaaagttaatttctggtcggtggtgacttcaacttatccaaagttcttggcccttatatccccaaccctgagaccgagaaggcgcttcgagaggacatcatttcctccgcagaagacaaatataagaagtacaaattcaagaagaaacaggagttggcctatatcaacgcccaagctgctttagggaggatcctctgggtggaagctgggaaagaacaggcggccatccggcctaagttccctttaccagttcccaactctagggctcctgatgccagcacttttggaacttgtaagtctccattgaccatttgtaacgccctaactaattaggcacgctacccaaaatacttaagaaaccctaattaccgagtccaacctagttatgtcctgaacgcataacccaaaatcttacatattcatatactcatatatatatatatcatggcatagctttcatacaacatatatcagtagggtaataaccctaggcaattaaaccgctcatgctagggtaataaccctaatcccggttactgattaatcacataagcgccaccgcgcataactctatgtgctaactactgtcttacctgatgtcctgcaataatagagattccaaatccccgggtgctcctaaccaggtgccggtaatcctagtcacaatattgggattttacacacgggttaacccctgattccacattcatcaaatatattcatggcatttaaaattcaaacaatcacatagagctcggaacgag

SEQ ID NO: 246562 - DNA, 971 bp, Cannabis indica
tttggtactagaaagacaaatgaggacaatagataagattaaacgctacaaatgctttcttctcagagcaagctagtaaagttatgttgactcccaagcgccgggacattacatttcaatcgacaaatcatgtcttcttgtgggtttcacgaataaaaggaatcaagcgctttagaaagaaaggcaagttaagtcctaagtttataggaccttttgaaatacttgagaaggttggacaggttgcttaccggctagccttacctccaacattgtcagctgtgcacaatgtatttcatgtttcaatgttgaggaagtacatatctgattcaatgcatatcctaagttatgaagcattgaagttacaaccggacctatcctatgatgaacaaccagtacaaattctggataggaaagagaaaatccttcgaagcaaaaccatagcattggttaaagtactctggagaaatagtaaagtggaagaagccacttgggaattggagtccgacatgaggactcagcatccagagttgttcaggttagatttggaggacaaaatctttttaacgggtggataattgtaaagaccgcttaagatcaatattatggattattgaataattagggttaattacaatattgagttattaattatgatttgaatgttttgtggagatttatttaaatttagaatgtattaattatgttatatgtgaaattctcattttcgatgaatgtgttcggtggcagtgttaagcgacattgggccagtagagagtcacatttcgtatagtatagaattattttaatagcatggtattattgttgaatgttgaaggtgtcatgttttatcgagttggtaatgaccaaactacccttgaattttgttttaaccttagatttaggttaaagggtaaaaaggtcctttcctagaggtctctttttctcatttagtaaccatttagatgttgttt

SEQ ID NO: 246563 - DNA, 613 bp, Cannabis indica
acaaaagtaccgccgccttccccaccccgccaccacctccacctccaccgccgtactccgttttccataatctcttccggaagggaaccaaaagcaagagaattcactcggtccctccgcctccgcctccaccgccgagaccaattattccgtcggtaacgtcatcatcgcgttactctagaacgaaaaatcaatcagtatctccgcccgctcctccaccacctcctcagtccgagcattcacgcaggagaaccaccggccgacctccattgccagcgaagtcgagctcttactacgaagataatatgaatagcggttgccagagcccgctaattccgatgcctccaccacctcctccgccgttcaaaatgccggagttcaagtacctggttagtggagactacgttaaaattagaagctctcaaagctctcgttgcggctcccctgagccaatggacgaggctgattcatcgtctattaccaaagaagaatcagagtcagtcaacgtgatcaacggtggagatggtcttgggtcagtgttctgtcccagccctgacgttgacatcaaggccgacactttcattgaaagattgtacgatgggtggaggcttga

SEQ ID NO: 246564 - DNA, 980 bp, Cannabis indica
taagtttattatatctaattcaagttcaatatcgatcccttctgatgcatatgccatacatccaacccaagcttactttaaccaataccatgaaaaggacataatacttattccaaggtgcaagtaaactatattgtagattatcctatcagttcaaccctgtgtactgataaatcataagaatacatttaatcacacaatcttgattactttccattgtgttgacaacacaataaataagaatatcagtgtgataaggatttggatgaatttataaatcaaataaacaaataaatgatcaatgaaccaaataacacattaaataagtaataataaatttgtttctttattgataattgaatagaaaagattatattaaaatagagttttatttaaggctcaaagccaaacaaactcacacttgcactaacataaaactatcagtacatttcaattaattctaaacttagtctgtgcttttcaaatgtagttacagttaaaacttttgtgaatagatcagctaagttgtcttcagtatcaaccttccccaccagtacatcccttcttgccacatattccttaatgatatgatatttcctctctatgtgtttgcttctcttgtggcttcgaggctctttactattggttatagctccagtgttatcacaaagtaaaaccaatggtttttccattccaagaacaacaccaagtccttggaaaaactttctaagccggactagttccttagcaaccttagcaataactatgtattcggcctccatggtagagtctgatgttgcagtttgcttagtacttctcaaacaaactgctccacccctaagagtaaacaccatcccaaatgtagacttcctgtcattaaggcaagcctaaaaatctaagtcggtatagcgtacgggattcaaagtgtaacgccctaatgctaaggcatgctaaagtgtttttcaattacagtgcaatct

SEQ ID NO: 246565 - DNA, 964 bp, Cannabis indica
acttttcgtgaaaatggtgaaggtgtatgggttgattaataaatttttaaggtattaaatatagagttgtggtattagcttgcttattttctatttttgctttgagctatatggctgtattaattgatataatgttgcttgattattgagttatattattttctattatttgcttttagctatattgatgtattatttgtttgttgttctttctattattattaacttagtttcttatcacagatgtatgatcattgcggtgatgatgtggttgatttggaagttgatttggaggatgatttagaagatgatgatggggttggagaagagaacagcagtcagaaaccttctaggggaccttctctattgcctagattaatccaatctagaagtgaaggaaggcgtattttcgttgattataatgtctatggtcaaccaactggtattggtcgagtagatatgtcttcgatgttagggtctacggtacgcaggcttgtgtcaattctctgcaattgttggaaagaagtccccgccgccaaaaaaagagagatatgggaggtcatgaatgtaggtattatttgattaattaatttaagtgtttgctacttctatttttctttttcttacatgatttacttcgttgtattgtagaaaacatttgagttagaccctaaccataaaaccaaaatgttgagtcatgctgctgcacgctttagaaattggaagacttatctaaccaataattgggttctgaaaggcataaaagagagaccggatgagtttcctcctaggaaaccaaaagggtatgagaaattgataccagatgaggattggaaaaaatttgttgaatctagaatttcagatgaatggcttgcattaagaaagaaaatgcaagatgtacgagcaatgaataagtataaccacaaacttggacgaggagggtatgtgcgggctgaggctgaat

SEQ ID NO: 246566 - DNA, 1904 bp, Cannabis indica
ataccaggagattgatctcggacaacgaatggtttcattgaagtcctccattacttaaagcggaaaagaaagggtaagacgggtttcatggcacttaaactggatatgagtaaggcttacgatcggatcgaatggcctttcttggaagctatgctactgaaaatggggtttactcatagatggatcggcttgatcatgtcttgtgtctcttctgcgagctacaaaatcattcatgggtgtcatgaaatgggcccaatcaatcctactagaggcatccgtcagggcgatccgctttctccctatttgtttatcctttgtgcagaaggtctatcatctctcttgcgaaaatatgagcaccatggttatatccacggttgcaaggtcgctaatggggcgccccgggtctctcacatgctattcgctgatgatagttatttgtattgtaaggctaccttggaggaatctcgccgtattcaggaattgctccgtaaatttgagcttgcatctgggcaacaagtaaacttggcaaagtcctcaatcttctttagtggtaatacaacaccagcggttagaagtcaagtttgtacatctctaaatgtttcagaggtggttgaaggaagtttttatttgggtctccctagtactatgtctcgcaacaagactattgttctaggattcttaaaagacaaggtgcagaagcgtatacaaggttgggaaggcaagtttttgtctagagcgggaaaagaaatccttgttaaaacagttttgcaatccttaccgacttacgctatgagtgttttcctacttcctttggagattagcagagaaattgagagaatgatgaccaaattctagtggcaaacctctaagaactctcaaaaaggcatccattggatggcctgggacaaactaagcaagaacaagaaagggggtggtcttggctttcgcgatttgcgggactttaatttggcgatgctagggaaacaaggatggagattagtgtctagaccggactctctagcttcaagagtgttcaaagctagatattataatgatggttcctttctcactgctcaactcggctccaacccaagctttgtgtggcgaagcatttgggaggctcaagatttggttcgaaaaggtataaggtggtgtgtgggcaatggtcagtctatatctgtcatgggtgagccttggttaccagacgaaactaaccctttggttgtttcatctcacccgacccttgctaatgctacagtagcaaatcttatgtccatggacaatgggggatgggataatgaaattatagaagacttatttgaatctcgagaccagcagttgataaagagaattcctcttcaagctcccacggccatggatagaatgtactggactttggagacctctggaatttattcggtgaagagcgcatacagttttttgcaaaaagaaaaaggctactggtatgaggatcaaaccgcttctttctggaataaattgtggagtttgaaagtccctccaaaaatagcaaatctgctatggcgtgcgtgtacggagtgtctcccaactctggttcagctccgaatcaagaaggtggtcacttgtgtactctgcccgttgtgtcagaccgaagaagaatcaaccttgcacagcctcgttacctgcaatgtggttcaacaatgctggaaccgtgtgggaattggaacttcggccacaccagaaacgtcctttctgcaatggtgcagcagccaatttcaagctgcaagtggagatcagcggtgccttattgcagcagtctgctgggctgtttggggcgccagaaacaaccttgtgtggcagagaaaaatttttaaccccgtaaatgtggtcgcgtttgcaacaaagtatcttgatcaatggaagaa

SEQ ID NO: 246567 - DNA, 1721 bp, Cannabis indica
ttacgacatgtgttaccttccctttgacgagaaattccccttgtttgtgacattgatggttggttgtgttctcagctcctccttaacttactcatcatagtatttgactcgatcctttgggaagtagttcgtcgcacaaatagatgtgtcatataacttccaccagctctttaatgggtctcgtggtggccgagaatgtctcaagggtctaatagtaggttgctctagtggaggtctcatatttatatgagaaggctctaaggcatcgagtcgcctttgccttgcatttgcactgcttggattttgtggattttccttgtcaacatgaacttccctagtcctccctggttgtggttcctaagacgtgatgggttatctgtattgttctctttgacagaaacattttgtgtcctttttattcttgatccgagaggccttcctcatggacgcctatgttagagatgcaacattctgggctattttttctgtagcaacttcgcttccaactctgcatttcttcgatttgactcaggaagcctttgccaaagttgacgattttccaattctacaatcgcgaagtacctgttgggatcatacctcccctaatttcttctttctggaatatcttcctcattatcatttctctccaaatcccacatgtttaaaccccttcctgtgttttgatcgttcgtggggtgagtcccttaaggctcatttccatggggatgcatagtaacggtttgttcaatgtgatcggctagagtagtattttccatggtatgatgaatatttaaatatgggagatgtgtttgtttttgtttagagtttaattatcgaaagctctcaatgaaagcaccaaactattaactcagaaatttgttaacattaaatgaggcttaagcaattaatactttgaattcaataattaatataagtaacaaatgtaagatagttaaattttaacgtggtttaaatctacatactacacgagtctgtcttatttctgggaatattaaagaaattctaggaacaatatacaagattggtagtcttttcttttgaagggaaaaaagtagccatcccctttttcattatcttttcccatatttataggcttaaaatagcagttacttgatcttatctttacaataattcatgaatcgtggacaattctcacgttttatttatcctttaatataggcggaaagatacacaattaactattttttatttgaattacaaggaaatgacgattgagtatgatcgatcttattcagcacacattttattcgagcctcaacttcagataacatttgttactcctcagattgtactttatttgcagttttcaatgaaggatggatttgactcgtagtatgaaagatggcttggggcataggataaattacctctaaccttgtaatgaggttttgaataatttttgcacaatcttactcaaattgtatctcttgtgctttatgaatgcagaagacattctgtaataccctggaattaagaaatggattagaaaaaccctaattagataattatgaataattgaagaattatattattatatagttcaatatatgtgaattaatatcaattttaatatgttaagaccccgttggtgagtcaggggcattttagtaattatgacccgagaaggataaaatgatgaaattaatttaattacgtgcttaatggaactatattattat

SEQ ID NO: 246568 - DNA, 914 bp, Cannabis indica
gatgcttctttgcgttcctaattgtatttcctgctttcattctttcgttaattaaatctaatttccatcactcccttcattagaatcttacaattcctcatcagttttgttcacataaccttaagaaattttcattttattatcagcttgaatcttgttcatctccacttattttaacttgtatcattttctcttgaactgacaaaacttttaaatttctcaatcatttacgattaaccaccgttacaaagtaaattgattcaacctatacggtagaggcattattgctcctactgggtacccataactaaactagaactacccatttttggaattcttaagtgataacaattaatcaaagatcattccttgatcttgaagtttcttttcagtgtttggtagaaatcttgataagcttttcaaacacatccagaaatatacatacctcaagtatattctctattttattgacgacccttggtatgaagtaccataccaacttatagtgagtcccccattgatggtgctgattcatcaacatctaagactctcgtattctttttccatcattaccactatggttttactccctagttcatatgctactattgctcccttgcaatcatcactatcttcatactttgttaaccactctaaaaattattttacactcaattatacagttctttgtttaataaacaacctactatgtgatccaacattcaccaaccaattgaatacatgtccattaaattgcatctcagttgataagctttttccattctgggtgagcatacatttttagcattgcttaataagacattctttacttggaattttaatggtcacctcgtataccaatttgaccatcatgttaaatataaaagtattctccatcattaccatatcaccat

SEQ ID NO: 246569 - DNA, 1340 bp, Cannabis indica
aaaataatttccaacatattcaaactcaaccttagcaagattagccctggcagattggttgtttcttggcacaacccagtttttatcgaatctatagtgacatacaggggcggtatggccggatctgagacaaacttgacaaatgacccgttgctgagtgaacctaggatacccacgaccacggccagaggcaggctgattgttatcagctgagttcttagagttggcatatggtcgaacaccaccagaacgtccattgccaaaggtcaagttagcctgcattttgacagccaaatctgtcatagattggtgatgctcaagacggctttcatgagaaagaagtaaggcttgaacttcttcaatggtcagattgtcactccgtgaagtaatccctgctacaacagagtcaaaatctggtccaagaccatttagaagttgtaaaaccaagtcttgatcaccaactggtgaaccagcaacattgagagcatcagatagagattgaatcttgtcaacatattcagagatagaaagactttcctttttgatattggagaactggcatttgagttgaaggcgatgggctttagtttggctcgagaatttctgttctagtgcttgccacactgcaaaagagctttggtagttagcaaccgacgcaagaacaacctctgtcattgaagatctgagccatgaaagaaggagctgatcttttcgcctccattgaacatattcaggattcgttgtgccattgacaagattcattggtggtggtactccggtgaagagaatttcatcaagatcgtgtccaatcacagttggcacgacctgggatttccaagagaggaaattaaggcggtctagtttgagagtgagagaggacgtgagtgaatgagaaaaaggattccatgaggtagcagcaggagctgtggcaagagccatggtgcaaatgcaggatcggttatggaagaagccatggacggtagtcaactagcgattgataccgtgtaagaacaataaccatggaaccacaagaacagagaaagagaaaaatagagaggaacagaaatgagaaggcaaaagctaatccaagagattagcaacatctttatttatagagagagattacagagtctttacacagaaagaaaacttaacagaaaaaatatctacctaactaataactaattaacagagttaacagaaataatagacaaccaagattagttattaacatcgaagactaaagatgaaaagtttcacattcttaacagagaaacaatccaagtacctttcatgaatagtcataatgtttatcatgactatgcatcccttgatgattt

SEQ ID NO: 246570 - DNA, 920 bp, Cannabis indica
agctagaggtggttatgagtactttgtcactttcatcgacgattactctagatattgtaatatttaccttatgcataagaaatctaaaatgtttgacaagttttaggaatttctagcattggctcaaaaccaattgggtaaaactttaaagatcttgcattgataggggcggagagtatatggatatgcagttcaaagagcatttaatttaacttagaattgattcccaattgactggcctagcactccacagcaaaatggagttgtagaaagaagaaatcacacgcttttggaaatggttaggtccatgcttacctactcaactctacctacgtccatctagcgatatgctattcaaatggcagctgacattttaaatgtttttccatctaaatcagtccctaagacatttttagaattatgaaatggtcgtatacctagtttacgccacaatagaatctgggggtgccctgctcatgtcttaagaatgaaagatggcaaactagaaaagtgaactgaagtttgcatgtttgttggaaattgtaaggagactagggctggactattttatagtcccaaggatgataaagtgttcgtttccacaaatgccactttccttgaagatgactatattaagaatttcaagccgcaaagaaagtagtattggaggaaaagctttcagatataactccttctaatgttctatcgtcttctaatcaagtagaggataatcccactccctcggttgaacatttgcacgttgatacaatcgagaaatctaccactaatgttcctaatcagaagatcacggttcctcatcgtagtgggaaggtttccacaaaacgatctcgttatggcttggatggtgagataaatatggtcgttggtgacagtattgatgacgatccattaacctataa

SEQ ID NO: 246571 - DNA, 1317 bp, Cannabis indica
ttaagggttatgttcgggtgtatgggcgccaagttataacccgagttattgatatgttatttgttatgcttttcttactgagtgtgtcgactcacagtgctattgctatgtgtaggtaagggcaaggctaaagctgaggtgccgtgagagcgagcaggtgaagattgtacatgtcggggcggttaggcttggaacgtacgatcctcgagacattaggatttttgttatttagtcgctgggcgacaaatcttttgtaaataaatagcaaacttttgtaaatgtattttgtaaacggatcccagaattttataagtataatatgttatattttaattaaaaagcaaaattttaattattcacgttttttccaataaccttgttgattagcaatgagctgcacagtacgttaaaaatcacgctaacacgcctatgctagttagggtattacaaataatttaatagcatccccaattttcgcattgtattattaaatccatatttagtaatactatatattagtaattattcattattgatatcaatcactttattctctcaagaatatttaatatcaaataattagttctttatttagaattcattatattgtttgaaattaatcacatctaaatttaaatctaaatataataatttgaatgtccatcttatgaagtcaatgaccaagtcatccttctttaaatagatatttatctaaactactcatataccagtttgattaccataatcaatattaatttcataagattaaagtttctcacttattaaaattcatattcaatatcatcttaaagtattgaataattaatgagactatttgttatacccgaaatttggttaccattttaatggaggacacgtgttaagttaaggagaatatggatcgatgcgtgtaacggtaattacatttaatggagtaactcattaaatacagaagtgacagggtatatttacaacttgctgactataaggtctttgcgagataaagatatacaaactgttgtctcatgtgttaacgagaaaccgtacggcacgcacaaggcgacacgtcaacctcgtcacgactgggtagacgtaagcgatgcataatgactgtgaaaacacttagcgtgtaatataaaaactaagtatagccgtcaggcgaacccaaacaactaatagcgaggtgcttatctcgctataggaaggcatgttcctggtactttcaccaattaacttcagacaaggtatgtagtcttgacgaatcagttctgtcgagtagaagctgacattcgaatgatgactgctgaagtactcttt

SEQ ID NO: 246572 - DNA, 896 bp, Cannabis indica
tacataaatccaaatgactactttgagttcgaacatgttaactacgttttggttgcaacaaaagtccaaaatcacatggaatgccatatctgagtccaatgttactcattctttcatacacttgcagcattgttggcctttcatatggcataggatgaacacagtctcttgctattctgagcatatccaagatctcatcatcaaatccttgcccaatcaaggctttgtcaatggcatcattcaatataccaggactagtcgaaacatgactgatccactctaccaaagtgttgtgaagattagagccagagccagagccagagtcagaaccagttatcaactcgagcaacacagttccacaatcatacacatccttcttaacaaaatcagactcccacaccccactattcacaaacaatccagaatcactctcatttgggtacacaaacattactccaccatagtttgaaatgattgctttaccgaaattcgatatcttagcttcgaagtaaccatccagtaagacactccttgagcttattcttcgatggactactcgaaagacacacttatcgagtagaaaatatgaagtctgaactagatttatatttggaggagaacttggtacctaggactgaagagtcatttgatatatgcaattattggaaggtgacgggcctcaaataccctttgttgagtatgattgctaaggatgtgtttgctgtgcctgttagcactgttgcatcagaatctacattcagcactggtggtagacacgtgagtcctcatcgatcgagacttcatccttctacattagaagcattagtatgcacacagaattggttgatgactgacaaaaaaggtaaatatcattaaataaataattatatatattt

SEQ ID NO: 246573 - DNA, 947 bp, Cannabis indica
aatatttccatgctatttaacgatttagtccgtggattctcccctccctgtatcctttcaaccagcagcagacttttattgaatgtccatggcgttccctccaaaactctgccaatatccacctcgtggaagaactgaaacaagaaccgattagtctccaactccttgacatacatccctttccccggtcgccacaaagacgccattacattccttagagagtcaaaatcggccggcctatcagatagtaatttcccgactaaacaccacctcccatcaaactcatcaaccaacacctcctcctgatcaaataaaagccccacttcattttcatcttccacttgtagatcagcccactgatgtcccaaatcttccatagttctgctactagacgccataagatcataaacaaccgtaaccgaacgcacaaaagacaaatactaactctcaaacatgtcacaagacaagacttaatataccaaggactatttgtagaaagtagttatgagaatctcagaaggtgctcttctttagttttacttgttttaattgttttgttttttaatttctattgctattaattattttctttttaaagttaatgtaatcagactagttttattgttttaatgttttgtttttttttttaaaaaaaaattatggcttaattatgacttcacaatccaagtgataacacacatgacaacactaattatggggaattatgccacgattaactctaataataattgagggaaatttagcaagaaacaaaagaaaaatttaaaaaattaataataataataaaaaaaacacacactgatagaaaaataaccatattgtcacgtgcatataaaagtaggaataacagaaaaaggggttattcagaattacaatgatattctcatcattacttctaagacaacattgattccacctgatttcat

SEQ ID NO: 246574 - DNA, 825 bp, Cannabis indica
tgcgccacctccccaggactgagaactgtgaagcacatcaaaatgctcgtgatacacttcggcttgataaggactcaatttggagagtttagttctctctccttttgcttgtgtagctgtaacttggttctctcctccccttgttatttacagtctacaaaaagaattgacattaaatttacacacgtaaatttatgttatatatatttatgttagaggcttttttttggagttcttttttgcctaatattattttcacacgtaattaaatttacattcttgaaatatttttttatgttattttattatttttttttttattttctaaagtgaatgtatacttttgaatatttgtcatttctttaaaaaaaacgtaaatcgtgaattttacttcaaatctagtatatgtcttgttaaaatttgtcatcttaattattttttctcttttcttttccctcaaattgaaaaaaaataaatgaataaaacctaaaacacaaattgctctttatttcctcctctccaccttcttcttctttatagtagtctacgggtactgcacaaaagaattttaattgtatttgttgagtaaactgctagtaaaataaaagaggaacgatattacctaatgaagaattctgggttgagttgctgactaagtcgctctctttaagacattcgcggcactgcccaggagtgtgcaagcagtcgaaaattgctggtcgtcccaggataaaacagcccagtcgttgcactgtatcggaaccccactgcactgtagagcaccgtcgaatacacccaaaaatttgatatcgcagatggaatttt

SEQ ID NO: 246575 - DNA, 901 bp, Cannabis indica
tacctcagttctagttaccgagcctaacctggttatgcctttctcgcataaccctactcatatatatatgtaatccatacattatgttctttcagtggtttatcctagtgatatataccaggtctaacccagttatgttttatacacataacgcttaacatacccgcatgtattcaatatttatcacatcatataaaatcttagggtaataaccctaactcatattttcattggattaataacattaccttatattaacgctttcttactttcatattattctagggtaatatcgcaagaccgcattaaaattaaactcaaggtactagtttatcgagtctagcttaattatgccttgaacgctgattggtggtgaaaactgcatatttattggtctcaaacgttaaattaaattaaattttaattaatattttcaagtaaataatgaaatatttttttacaattgaaaatatttagtttgactttaatttggtttattttgcaggaattatgttgcactcttgtacaagtgaaaaggaagaatcaaagaaagaaatagaaaattggtattattacaaagaaaagcccatgaagtaccaacacaacaattgtttccatttcacttcaagttgctaaagcaagatgatggaattgactctttggtgctagttgtctctccaagaatcactaataagccaacatgaggaagtaataccaatttgttcctctcctcaagcatgaaattgaatgatttaaggaggattatgtattatatgagagtatctaatacgcatgccatcatttatgggttttattatcattagtccaccttttcacaagggaaattttattttctatacttagaaaatcaaaaaaaattttccctaaaccaaaaatttaa

SEQ ID NO: 246576 - DNA, 608 bp, Cannabis indica
gattggatggatctaatcaatccaattaatattgaatggatccaatccagtctaaaaaatattagatcaaaagtattggatggatccgatctaatacagggattcatcaattggatggaaccgatctaattcaatgttttattggatcgtttcggttgagcctacagtattggattggatcggttagagaaatccaacatccaatgtgtagttgaattggatctggatgggtccaaaaacattggatgcgatccaatataaacaaccctagtttcaagggcatgcaaaaactaattaatgaaaatgaaaaatgaagatgcaagtgcacgcctcaaatgcatataaggtctctcatcattttcttttacttggagtaaggtatattcttttatcattattattattattattattattattattattattggtgaaattttctaaggttctatgatttttttacttctcttctgctgttaggattaggattcaaagtgttttccttccaatgatttacataattagtggcatttactttttataccatatttatcataatcttaatatttttttctatattttttgaaaatagccccttattaattgac

SEQ ID NO: 246577 - DNA, 991 bp, Cannabis indica
caagccacatttggtgaaggcgtcggttgaaagcatcgacattgaaatggcgagtagtgagaagtttgacggcaagaaaggcagaaggttcctcctgagattcctcagaggcttcctcaggctgttcagataaggaatagatttgagtttgtatttccgtaaggtttagggctcttgttagggtattagagaggtcgtccatgggatgagaataggggaagaaattgatagatgaaacatggaagagaatggaagaagagacaaagagaaaacacagtgtgatagggaatggtcgaagcaagaagaggacataagtcgatgaaacctgaatggagaaagggacatataagttggttaaataagaaggaataagctcgagtaacattgaaaaagaagctcctcatgtcagattaagcaatcatatacactatatagtctacggtatatcctattttaatttcaataaaaccttgagaggggagagagtaggctacatcagtaggttcgataatgaccgaaggaggtgcaggggataagaagaaataatcgctaaaattggaatgatttgaattagagaaaaggaggagaaagatttggaaggatgattaattatatatagaaagcatttgcaaaaattaaactttgaatagacatattgccgaaagttaattgtgatttgaggcttatctgcttggcaacgagacttaatggcaataggggaatctcaccgtgatttacaattgacaccgttgaagccgccgttagaacttgccagaagctattgccactacggggaaatgcgcaggacggacataaacaccgataaacggtgacaacaacgaaaaatgatggcaaggcacaatggaggaaactctagcatagtgatggttgctgaactgtctagaaggaagttgacccatttatttttcgaaatgaattattaattgttttaagttttaataattattttttataagaatatatgtatata

SEQ ID NO: 246578 - DNA, 665 bp, Cannabis indica
gaatgacgtgggaatccatctgggtgacatgaggaacaaattctacgacctagatagaagattccactcgtaatgaaccgtacagggagatttgatactcaaagtcaaaagaaactgaaacattcgagtgggcatgcaagaacacccaaccaacttccaacatgtgggcagcttgcatgagccgaccagagaatgcgagttggacataatcagagatatatcccatatatcttcgtacttgcaagacacggaaatatccctaatttcatgggatagatacgtagtatcaaagaagaaatgcaacttgcctagttttctattttgcttattgtaattatagaaagtaaagagtttcctcattttatttcttattagttttgggaaacctactgatgtaattcattcctataaatagtggagtcatctcactattcaaagacacgagattcatacagaaatcacacgagagaaatcataagaaagagttatagattcaacagtgcaaaactcagagatcattgtacgaactaaaggagagtaggctattaccatattcaagggggctgaacctctataattttagtgtttctttgggtgcgtttggaagtaactgtgtaattactaggtagggtaattactagggtggtaattacacagtgtagtaa

SEQ ID NO: 246579 - DNA, 754 bp, Cannabis indica
ataaataaatgctaaggttaatgtatacaaatatgtttgaattggaaacataatcttaattttctttcaaaaagagaaaagaaatgtctttttgtcaaaatttgaggacatgtaaacgtgtaattttgtgtattctcagagataataaaggcataccaaggaagttaaaatgatgagattactgctttgtttgctatcatatacatatatataataatgtatatatctgtatgaatattgcagggcagggtcagttttgatagttgggggactttatgctgttctatgggataagaataaggagatgaaattactacaagatgtgaaagcaacaaaggtagttttactaatagaagagaaggatgatcaatatgatgatgatatcagtagtgacttggaattacaaaccacgccctatgttcattttcccaagtgcaaacataataaccaagatcatcatcttgacactaatataattatataattatttagtgattattaattaagaagaagaagcaatactagctagctagctatatagctagatcggattgttaattagtactggtccctcatcagtaaactttttataatttagtttgagatgtatctgctaagggcccagcctcaagaattaaaacataagattttccattcccaccaacagagagaacgagaccttcatacctataaatcaaagacactttatatacttaacacctaatagctaagccaaatgggttcaatagatagg

SEQ ID NO: 246580 - DNA, 1929 bp, Cannabis indica
caaaatacatttataaaagttttctatacgcatatacaaaagttttgtcgcctagcgactatacaacaaaaggccctgatgtcccaaagatcgtacgctccaggccttaccgccccgacatgtacaatcttcacctgctcgttctcacggctcctttgctttagcctttccttacctacacatgaaaatagcactgtgagtcgaccgactcagtaggaaaagcataacataaaacatactaatattccaggttataacctggcacccatacacccaatcataaccttatccccgtaatcccacggtactgagtttagaacattcatacgacaatactatcgaccataatggcagcctatactcaatatgctagtcatactctagccatattaatgtgacaacatcgatcagtatttcagccaacatatatttattagtaatcagtacaactctaagtatactattaccactgtcaatgtaatctaacaggcataaacaacatgtatactaaacatgtaataacatttgcatgacattatactaatcttatcgaaattctgaattcaggtgtggcggccaacctgattggaacaacagctcggcgaattacaggctcctaaatcacatcaataacaacatggataagtgacacgctaaatcacaaccgggacttaggtttttaaccaaaaacctatccactacaacttaatgtggcaataccctaaagtagcagggaattaaccacctagaaattctgaaactagcacgaatcgacaacctgaattttttgggaatcccagttgcaaaaaccggttagccggttttacaaacggttacccggttttctctagaaaacccaaaaaaaatcaaagcttcaccaaattgattccaaactttaccaaactctccagacctgcatattataccccagtaaaccattttcaagaaacaaaacaacaacccaagcttagaatctaaaatcactattaaagctccaagtttgagttctaaaacccaaaacttggttaaatctcctaacagccaccaattcaagcttaaatcaacataatctaacataaataaacctctgaaaacaatctcaaacaacaacagcaacaacaacagctaatacccaaaatcatgcaatttcattaacttgaaattcaagaaattaaaaggcaaagtgttgggaacttacctagagcttgagatcacttagaatttgctggaatttgcttgaaattgagaaagaaacccagaaccctagattgttctatagggctcgagcaagagagagtttagagagagagagttctaatcttttctaacatgaattaataaataataagttaatgaaaaatggtttgttttttgcagaatatcatcttattagtcattaaaatttaggttaaataaacctaacataatctcacaaaatgacaaaccataaattggaaaaatgaccattttgcccctcccacactaaaatcataaaagttcacttagggctattttggaaaactctaaaatctcacctattcccgacattcccaatgtctaattatactgccccgctataccaaaattactaagatgtgattctaattgccaaacaccgccttccaatattaccggcacaaaacatgcaaaattatgaaattctatataacatataaattgtatttcaaattcaaataaatcatcataattaaataattcaaaactaataaacaagttccataattaagccctaattatcaggtaatttccaaatttattctagctatctttacaattatcccccctcaaaaggatttcgtcctcgaaatctaacttgaacaactctggatattaagctctcatgtcgggttctaactcccaggtggcttcctccaccttgctatttctctagagtactttgaccaaagc

SEQ ID NO: 246581 - DNA, 984 bp, Cannabis indica
gagggaagtaagcaacatcttgcaattctaaaagatgtcatgtatttaactatagtctaacagtcccaaaaaactctattttgactttagtatcgtcttccatgtactcttctgaactattcggccttcttcgatttgtcactgcctttcttctctaagtggactataggccaggtcactagagttgttggaagtggactctctcttctgagaattgcttgggtccgttaccatggagatgtttcttgcttttccctttttcaaatcctcctcttccttagcaagaatgacagtcatctcctcaacggtccattgctccttttgagcattatagcttgatctaatcgaatcaaactgagagggaatggtttcacgactacaaaaaaactttttgctttagtttttaagtgacatataaagattttgcttcagttggtgtagctgatactataaccgtagacacaaatagtaatattttttgctttgattatgaactgacgctaattagttttttgcctcggttatgaaccgaagcaaaaaaaaaaaaacagtttttgcttcgatgcataactgaagcaaaatagtagagcatcgatgataatttattttttacttcagttataaaccgaagcaaatgaagcaaaagtaaattaaaaaaaataaaaaataaagaaaactgatcttagcatgaatcttatcagttcatattgattgacaaaactgattcaagataattaaaaacaagtaaacacttcaaaatctggtcatagttacaagaaatttatcaacaaagctctacttgacaagtcactagaataacgcttttatttctgagagcagccatgacacattcttgcatatttttaccaaataaaagtgtataattagaaaaaaataaaaaataaaaaattacatgtttctatgcatgagaaaatgaatcaaatttctactcttacattgaaaaagagtaaaaacagtatgggt

SEQ ID NO: 246582 - DNA, 2837 bp, Cannabis indica
cacgggactactgactgccacaacactcatctatgttaagaaggaagaagctcaatctgaactaaaagtataaaaagatggcttggggaataaacccagctcaagcaatgtagaaacaaacgttgcaaacacaagcgaaagccatgagccacatgggaagaggaaagatgagtccaatgagtcatccaaagaaaaaaagaaacaaaaaaattatgagaagtacgtccgtttacaccgtgtatactgagctgaatgaaacacaaaaaaatatattcctcacgaaggggaatagggttttattttgcaaaccagaacctatgacgaatgcgaagaataaacgggatcaaaatatatattgtcactttcacaaggacattggtcacacgactgaagagtgtcgacaacttaaagatgagattgaaagtcttatttccagaggttactttcgacagtacgtgcagaacaaggggaatgaatagaatcaacgccataaccagaatcaaaaccaaaatatctagcaacctcttgtagaaggtgaggacatctcggtgatctataggggaccccatctcgctggaacaagtaacactacacagaagtgatacataaaccaagtgaaaaatcaatcttcaatttttgcacctaaaatgacaaaacgagctaagactgaggaacccctgataactttcaatgacaacaatgtgatgcacgtaaggtgtttccttatacagatccactcatgataaccattcagctcacaaataagagaataaagcaagttttggttgataatgggagttcaatgaacattttgtataaagaaaccttaaagaaaatggagttgggaggaataactctaaaaccatgcatggtaatctatgtggattcacaatagatagtgtcacatgtttgggaacagttaaactccccctcacaatgggagatttgcctttgtcaataactctaatgcaatagttcttggtggttgaccttccctcagtctataacatgattatggatcgcccagcattgactgaactgggggcaatcagcttgataaaacatttgtcaataaagttcccaactcagaacggggtaggaactataaaaggcgaccaactattagcacgagaatactataggattgagttgaggcaaatagccaagtctcgtcaatgatggttgtgataactaacaaattgagaaaagggaggaagatttggacccaagaatgggtgaagagcaatcctaactcgggtcgataaaggaatcggaagaagtatttcttaacccaaatgaccctaccaaaattataaaaattggtaaaagttgaagtagcaattaatacactttttaatggtaaagcaggattaatttgcttagagccattcagaaatggtcatgactgacccgaatgtcataagccatcaccttaatatcaaccctcaccatcctccaaagaaacaaaaaaaacggcttatcgattcaaagagacagaatgcactaaaagaagaggttaacaagttgttaaccattgacttcatacgagaagcatcttatccacaattggtttcaaacccagtgttggtgctaaagccaatcgggacctaaagaacatgcattgacttctccgacctaaacaaatcgtgtccaaaggattactttccattaccaagaattgaccagctcgttgatgccattgttgggcatgagctcatgtcctttatggatgcttgttatggatataaccagataaagatgaacattaatgattagggacgccatgtgtgtgattttataaattagtttagtactaatagattgattaattattaaaaaccgtgatgatattaaaaacttgactacaataaaatactaaaaacgaacattataacagcataaaaagcgtgttccagacatccctgttataaaaagttttacagcagaactatatacgacgatgcctcaaaacataaaaccaaaatacacaataaatacggcccaaaacaactcctagcaactcgacacacaggccagtggggtcaatatgtacattgctggagaaggtagtcacctcatggcagctctaacttttccttgcccttacatgcaccacatagcacccgtgagtcacaaagactcagcaagaaaatcaataataataataataataatcatatagtttattattcgaatatatcatttatacacaatcaaaatcaaaccagtaagtattgttcataagatgaaattcaaatcactactggcatctaccacgaataagcatcagtatatagatatctagtaatacaaaactattataccaataataggaatcatattcatttaaaaaatataaattatagatatgttacctgataaagtaaccatctttattacatcacattgcctaatcaagcaagtcgatgctttaatttgataattctgtattgcattacctaatcaggcaagcccgtgccatagcctggcacccgtatatcgcataactgcatcacctaatcaagttagcccatgccaaaaccctgcacccatatatatatatcatataattgcatcacttaatcaggtgagcccgtgccacaacctggcaccaatatattgcatcatctaatcagacgagcctgtacctatgcccggtacttatcatatgacactgacacctgtacctacgcccgatacatccctaggaagaaatccaacaatgcttttgatttatgccataaccaaacattttcatatcactgacacacgtacctaagcttaatatgtcgccaggaaaatcacacacacctaattaggtgagcccgtacctacgc

SEQ ID NO: 246583 - DNA, 860 bp, Cannabis indica
gcgaagtgactgttcaagggatcgctgtacctctcggaacttccttagcatgcctctggcctctcgaagagtaaagatgcctcttatgctcttctccgggagagaccttccctgagatactcctctttcatctaagacttagtcgatttgcataagtgttagtttttacagatccacgtgtcagtcttatccaggtccacgtattttgagaaaaattaagggcaacaataactattatacttttacaagtgagaaattttgtgagtgatatttttaatttttaatcatatattagctaataatcatataacaaataaatataaataattattgttatgaaacactatgcatacattacagtttatctataaacattataattaacaacaaaaaattgttaatatattctaatccctttgttatagtgagatttctctcacttagaaactcgagaccagactcctccctaaaggacacgtgtattcagatttccaatgaaggctgaatgtccatgagagacttctcgaagtttagacctcgctcaggataaaaacagcgagatactgtaagtgtgacttaagtcacaccgcataaccataattctcatcatacagggtagatccaactcgcatatgtcagaacatgtgcgagtgtcccctctatatctccgcgacaagtatagagaccaatcccctatggtgcagtttggtcccaacgacccaatagccctgacagaccaatataagttcccatgtccagactttactagctccaacatgcgacgtctacaaagggcgattacctaaaggacgcagacgttacatacgtactggcgatcctgcgagctcaacaaacggaac

SEQ ID NO: 246584 - DNA, 756 bp, Cannabis indica
aagaaatcattctaaaaccgtataacctttctagcaaaatcctctttattgattgagtaagaataggtaacttacagtcgagacagattctctattgagttctctcaaagtgtttcacctctcacactcttaccaaagaatcttcttcgtctatagaagattcttcatacaaaatctaaacccaatctctctctttactcagtacctctatctttacctctcaacattttctctctctaactctcagtctcaatttgaatcgcattcacttcgtcatctcaatcctcctcaaaagcttatgtgttggtggtatttataggattaggataaagatcctatagtcggtggctgcaagaattgaagttgctaagttagttagacaacacctaacttaaccaactctcatatgcacgagatctccatgtcaacattagtctaagtgcatccgagaacatatactagcaactaggatcacggaccaaaggcacttcactaaacaagcttctggataggatagaaccagctggagttgactatccaaaactgccttccacagagaatgacctttcaggaagaataaccttctaggaaggataactagctgttcagaactcctttctgtaggagggctaccaatcttgaaggctgaacccagagtagacatgataatcatccgagaactcccttccagactaaactatcattccataagactcctttcgggatgggaaactaagttgtccgggaacaatatct

SEQ ID NO: 246585 - DNA, 626 bp, Cannabis indica
gtattttgacttgtcattatatataatccttttataaaacttttatgaaagggattcccgacacacaattttagtatcgttataatgtccttttttagtagagtttttaataattaattgatctattaatactaaaataatttataaaattacacacgtagcgtcctcgttataaattagggcgttacataatatctctaccataaaattatctatatatctatataaaagagaagtatgaggcggtgatgtggcggtctaaaatctctccaaagctatttttcttttcttttcttaattctctcaattttataatattttattaaagcataaatttacaaattaatattttactattattttaataaattttctattaaaataactatcttaaattagttattttttgaaaagtacataataataaatataaattaaattaataatattaaattaaataattattcaattatttatatatatatatagatatgtattcataactatatatagtgtgaatttttttttatatatatatatagtatttattatgaattgaaacaaaaaagagaggtgtgagattatgtagaagaagaataggtgtgagattatgaattaaatttttc

SEQ ID NO: 246586 - DNA, 1044 bp, Cannabis indica
tctaatttgattataccccaaatagacgtccatgaagctcaagatctcattctcggctattgcatccacgagccgatcaattcttcggagtggaatatagtccttggggcacgccttgttgaggtcggtaaaattaatacatactcaccacttttattaggcttgggtattagtacggggttagccacccaagcttggtagaaagctttgatgatgaactcgtttttgcgcaatctttctacctcctctttcaatgcttgcgcctgttctttatccagtagtcttcttttttattgaaggggggaaagtttgggtcaatgtttagggcgtgagatattatagaaggatcaataccgaccatatcctcatgtaaccaggaaaaaatgtctaggttgctcttagaaatattattaaagctaattttatttcgagcaacaaacctttgccagagatattcgggttgatttccacctcttccaattcttctaccagcaccacatttgtgtttggttccccagtcggggatcgatgtcctcgtccccgccttgggtgacttcctattgggcaatattttttcccttgcgtgaactctagtcgaaggtattttcctttttgacattagttagggcaaggttatagcattcacgtgcaattccttggctccctctgaggcacccgaccccattctttgttgggaacttgacgcacaaatggaaaaatgacatgacagcttttaagtcatatagggtctgttagcctaacatgacattgaaagttgatgggacatcaactatcactacaacaatttaaccctttagcggcggaccccctccgccgctaataacatgggtattagcggcggagagtggggtccgccgctaatgttggccgatttttattttttgaaaacatattagcggcgggcagtccgccgcaactgctccgccgctaatactagtagcggcggacccgccgcaattgctccgccgctattagtattagcggcggaccccgccgctaataaataggcgggataattcccgc

SEQ ID NO: 246587 - DNA, 909 bp, Cannabis indica
cacaaatcctgaacaaccaatcacacaaccaccaaccataggtcatggtgtgacgtctcctttgaatggaattgcactcggtgtgcaagagattggaaatactagttcagcagccaatctgggtaaacctagtacttgagttctggcagcaacaaatgtatgaacaaccgttagagatgacaccgagatctagaacctccgtgatgctcttggactcatgcaaggccatactaatactctgcatcatgatcaggaagaactccgtactgcagtgaaccttgcatttgaagaacaaaggcatttgttcgctgaatggatggataaagaggtggaaacgttgagggctcaataagcagcaattgacgaccaaacaagataggccaccgtactgatacgaagagtctatcaagctactaagaagcaacctgcgaccagcatcccgctgggcgagtcagacgaagatccagctgggaacgcttctcagactctaaacggtcagtcgcccaatccctggtcacaagttctgcctatgggccaagcggtaggcggccagaccttatctagtaattcgtcaggagaggttgtacctaataactccacccaggttaacagttctggccaagtgatcggccaaaccaatcagtcactgagacaccctaatgcatctgtatttaatagattaggaacaactcatgatcttagagatgacctgaacagaaggagagggttagacgaacagtatgtctcaccaaccactcaaaatccagctcaaagagatcctggcgtgacactggtcggccaagagaccgaacacgttaatccatttgtgcaagaataattggatgaactaaaaacatgttccaaggtctggccggtcaaaagaacaatgatctcgagttggaccgagca

SEQ ID NO: 246588 - DNA, 1357 bp, Cannabis indica
tagctgtatatacttgtggagacacctactttgcttgctattttgtggagacactttctatgctcgtgttgttataatctaatctattaattctgacaaatttgatagcacatattatttagaggccacagtatacattattctagttagcaatacattttacctaaattcatcactacaatgactgctgttttcccactagattccaattctgcattgttataaaatgagctggtttgttaatttgtttgtaaaagttttgttgtgtaatttgactggttgagctctatcaactaaaaatatggtgagaactgaggcatatacaatacaagattgattggtatatcccattgtaataagtccttgtgttgttgtgtactctttcttgcttaagaaatgtataattaaactgtattttatggtaaaataaacttccagttctggtgagatttattgcctgagaaatttagctcacagtggagactctttttaagtgaatgacttgatttgagcattgttcttcttaactgtcttggtgagacttatagaaggtgccaactttgatttaaagaacaattataagttgtgttgtgtggtttgactggttcagtcagctcaatgaattggaaatgtggtgagagaactgagaatcatacaatacaagatttctttagtgaccaaccatgagaatcaagatttgattagtaagttaatgttggtttcaagatgttctgttatgttctttttcttctagaaattcaggttggttggtggtactaagcttaaaatttaaaacagatctttattggaccaacctgaatactgtctttctcatcagaaaacaatatttatatgtttaatttgcttgtgaaaatgattggatagtattttgatactgtatattgttcgtcaattttgatgcaaattatttacaaatttatgacgcttgctagtatttctgtaaagaatgtatgttatttagttcactttagcatgtaacatatattttgatgaagtgtggtgaatgcaaacttcatgaggattaaccacttataattgctcttgaaatattctaaatagtatttgactcagaatggagctaaagtcattctctccagccatttggcagtaaattttggactaaatattatctatttgattcgggatacacatatatgcttggttttttccccatattaaaatataccattgaatcaatatgcagatcgtaatccttcaagaaaaatggagttgttcaattatcgacattagtctttgagaattgtcatcgagtggtgctttagcgtattgaaggctcattttctcattttaaagcaaatgccttcgtatgatctga

SEQ ID NO: 246589 - DNA, 707 bp, Cannabis indica
cataacaaacacccattaggtggggttattggaatgaatgaaaacatagttagaataagaatgatattctaatactttaaaataaaatcaaataaaggaatagaataaaagttgtttcctccaactaaatgctactttagtgtaattcaatattagatcctatttattttaaattaataaaattataaagaatcgctaattaattatagaacgacatcttatagtagtgctaaataaaaacaaggactgtcccttatcataccttatatggtatgtaaaagactaattggagaatcgaacccagcactcaagcttccccatatttacatacttcatacttacaacttttactgtaactttttttatgatatttattaaattaaaatacatatgttatattaattttttgtgtatatatattttaattttttgggagtttccaaaatggtgaggcctaagccccggctgccccactctttggccgatcctgtatatgaggagctcttaatatatataaacaattccacatcttttatatcaatatgtattttattcatattattatatatgaaatgttagtcttgtaaaatatagttcatctaataaaaaatatgctctaacactaaattaaagtaattttaacaattaagaggaggttccagcgccggtggcctatggttggcaaagcatgctctgcggttagacga

SEQ ID NO: 246590 - DNA, 506 bp, Cannabis indica
aattttgttttgcagttctcgtttaagttggagatgtgtagcgcatatatatatatatatatatttatatattaagtttacttttatctcttttattttattgatgatgatgttgttgtaactttgataaaaatttcataatttaatattggatatacagtgatttcgttttctaacaatgatgagtaataacaatcttatctctttctaagcatattcattcatattacacaatcacgtgccaccttatgggaaaatatgttattttttgaattattttttttttcttttctaattgataaaaaagttgttgttgatatatatctccaaccttcttctattacaaaaatttctgataaaaatataaaaattgacgtggttctagccttaaaagattctagtgcgagtctattagagttagtgtttacgcgctattaccttaatattagagaaatacaagtaaatagctttatttttaatttcagtgatagttaatggcttttttt

SEQ ID NO: 246591 - DNA, 1196 bp, Cannabis indica
ttctcacccctctggaccggaagggcaaaggcaagatggtggaggtcgaggtttccaagaagctcaggagagctgacactccggctctcagctctgattcagggctcccacccgaggcggaggagtacactattcttccgagtattgtcctgacccccgttcctggtgatgaggaaagacaacagctccggatttccaagcacaacttagctatagcagaatatacgaaagggaatgcggaggtgaaggctttgaaaaaggtcctaagggaggcccaggacaatttctctcgcagcgagtactccgggaatgcctgggaatttaatatggatcctttgacaggctggttcaaccgcttcattgggcctactcttgctcctgttgcctcagaactaacaagccacttcgtctccaacatgacccaacttccggcgaagagatacgcagcctgtgcttccacaaactcggtctaccagattgtggccatgaccgcggtaagtttctctgttagtgtttttgggccttgccttttggcgattggcgtcgcgtatttaaacatttttcttattttgccagattgctgcagagaatagtcgtctcttaaggactctgattgaccatgggcgcatcatgtcctagtttgggggcatggatgaggccatgaagagtcttcgagactttgaggcacagaggcaagctatctgggaggaggcccagtagcgggaggctcttttagaccggagccatcaagaggcgctaaaggcaaaggccaaggagctgaaggctaaggatgatgcgttgaaggccagggacgcggctgtgaccactacgaggcgagagctccgggacgctaaggagtctgtgcatgaattgactgccaagataaagtctctagaagagcttcaccaagctgatttgtaaatgacagccaacctaactgtagaagtgaaggggcttcgtgaattcaaagagcagacttagaacgaggtggctaaggtgaagagagatgccctcctggccccaattacctgccaacattgcaagaagcgttttgacgacggagtttttcagggcttggcaaaccaatggccaggatcttcagctcgatttctatcgcaagcctgacattaaaaaatagccaacttgtatctttttcattattttattcctattttcaaggacctccttcacctata

SEQ ID NO: 246592 - DNA, 1223 bp, Cannabis indica
ccaatctcttgttcagtcaagtagttcttcacaacctctaggatagagtaagaacagaaatagaacaactaggctctcacaaaacaaagaaagactctcttctctcaaaagataaatgtagaaaatgaataatggaagaggtaattcgaatggttgctctctaggctctatttatagatcatagaaaccaaagaggcaaccacaagttcgaattagcagctgtacaaaaactttccaaaagaaacacgatctgctacatcagattcggatgctgacgcagcagatctgaccagaaacgggaaacttactaaaatcgggtccgatcttctttcaatgcttgattcctgccaaaaacagattagatattctgattgtatcaagatacaatcgaaatcaataaggaaaaggcaataaacaaagtttccctaaaaaagacaactttccaaaagagaattccttctcttttgagaagttttcaacaaaggaaagttcagctgaaagtgcaactttccaaacaaggaaaagggcaactacaatccgaatttataaggtaagaaatcgaatatgaatgcacaccaatcttaccataaatggaaaaattattttgtcaactaacttgccaaaaaaagactttacatagtcaaaggttatttaaaaaaaaaaattgattagcacaaagatcccattactaattttattcttatattatataattgtaaatatatatatatatatatgtcatgtgaatattaatttagtatatatgtatcttctggaaacgaaaagaatttaagaaatttgaaaagaatttgttcaaagtgcaaatcctctcgatcgtcatgatataatatgcatgtatgaagatatatatatagttataatataagaaattatagaataacatgacagtatatatataagaatctagctagatcatatacaatattagttaattaattaagtcgtaatatgttctgttaactaataattaactgcgcacgtaagtgtgaatgtgatcatgaaaatattaaatattttagttatattctattccttcaattttcaaaaacaaaatagtaatttcaatgtcgtatattcactatatattataattatacacatttgatttatatataaatcacaggattaatataagaacaaagtacagataacaacaacaatatagaagtttgagttttcatataataaaataggcaatatag

SEQ ID NO: 246593 - DNA, 845 bp, Cannabis indica
aattcttaaacaaaaccactagaacttatataaaactaatatttacgtagctcgccacgtaactctcatctagtatatatatatatatatatgttaggttaagcatataatatatattctccatgtgatagaaagaatatgtataaatatatatatatatatattttctcagcagaattagttcaatgaatatttaataaaattggttttataatactattagaaattagaaaaccacacactttctctcaatagagttttttcagtttcccttcttactataaaaaatgctacttttagtgaaaaaaatttataacaaacatagatttttttttattaaatatcacttttagtcacaacataaattactttgtcactaaatattagtatttagatataaattatcactaatttagttttaatcacatcaagtattgtagctaaaaatatatatttagtaaaaacaaattgtaatttttatgactaatagttttagccatgaactttttagtgataacataagattgatgatttacgtttagtcacaatccttttacttttagtcacaaatttcattgtgactaaaaataagattttttttgtagtgtctcttctctttctcggctagggacccagccaccagcactgctgtgtgtctagtcttctttgaccgagagggaatgttgatggtagttctaatggccatgggtctttgctctacaagaatggagaagtcggcgcctaagggtgtgctttctcggaggcgttgtcacaacaaaaaatcttacttttagtcacaataaaatttgtgactaaaagtatgaaatttgtgactaattataaat

SEQ ID NO: 246594 - DNA, 1683 bp, Cannabis indica
atagataacacaaacatccatagacatgaggttgagaacatagattaatttgtcaatgctataaatttagacgcatatttaagtacaattattgtaatatattgtatagattaagaccctaaaatcagacacataacatatttatttatatataaagttcgatctgtctttgttgattaaatattagagtttaatttgatttgtgataacgatattacaacaactttgagaattgagagcaacctaagattatttgtagattaataaattgacatacattaagatatataagacaatttcataagcacaaattaactacaaattcttatatgaaaatgtaaaaataagaatgagaatgaaataaaataaaatttaaaatgcataaaagaaattgataaagaaaattattattattttttttttcaaatcttgtattgaaatggtttttctttctatttcaaaatagaataatcattttaccaaaataatgaaaaaattccatcagaatggtatttcaataattttagatgcaaccaaataaaagaatagaattaataaaaattattttctttcctttctattcaattttattattaccttcaaccaaacgccatcttataatgagattatgataaaatatgagatttatatataataaatatatatatatatatattaacatcatcaacttcaacggatattatttaaaatgaatgagttttatcaagtctttcttttttatttatgatgtaccaacaactaatttcaataactggcttatattgaagattaatgtttatgacatatttaatacacattattttacacttaataatctatattaatcaatctcattaaaaatagtgtggtgattgtggtccatactgagaacagctatgaagggccaaggaatttctcatgtcaaatatatagggagtttcttttaaagggactccaaaaaagatcctatcaatggagtgtccgaaatcaatattaaagtgacacgtcatttaagtcaaagtaagtttggagaggtgaaaaagattggaacggaaagtttggaggagtgagaaagtgagtcgccagagactcgacttgaaaccatgagacaatggttgggggaagagagaagttgatgataacagggctaggtcgtagctgacgatgaaggctctggcaaagaggaagcttaagacgatggcgctggggaagagggaagttaacaacgacgacactatgatgatgcatgaaatccaagcattgacaagatcgactgtcgttttcatcttcaactaatgtcgatgatgatagtgatgaatgggtaaggcttccagatcaatgcgttgccgttttggccaactcagcaaacccttgtgatgattttcgacaatcgatgaaggagatctggaagagcatctccaacgacagaagaagattgagtggagtttcatggatgtgtttctgttctgttatgtaccaaaaactaaatgacatgaatccaattcaaaatagtcatgaaactaattcaaaataagctagaaaaacccaccgagggagagggaaatcagtaacgtaaccaacattcaatacaccatacatattttaaattcacaaaattaacacacattaacatggtgagctaaacgcccagtaagaaaattctttaacacacattacattcaa

SEQ ID NO: 246595 - DNA, 864 bp, Cannabis indica
tattttattttataattttacttcattttaaatgaattttgaaaataatttttgaataataatattcggtatactaatataaacgtgtcacatgtacaagagtacgcacataaacaatccatggttgcagttaatcgaatgacaccttaaatttgcaactgattcagtagtttaaagggttttacagctaaaatttgagcttggagaattaaatacaagtgaaataatagttgagagaatttagccgccaaaaacttttaaaaaaatacaaaatcattctatataaataattgataacattaaaaaatgacatatgtttgatgtttcactatttactgtcttgttcagatcttttcatagtatcatcatgatgaaaatatttaaatggataagatcccaacactaagttaataatttgtagatgatccaaaatttgtattcatcagtagaaagagtaaacaaaaatggagagacataaatattgaaaaactaacaaaagaggggtataattgtaagaattaatattaagaacgactaaactataaagtaattattaaaagggtaattactccttgtgttctaaaacaaaaacttgttaccatatgttcaaaatacaaacttgttaattatcttatgtttcgattatgtgtttatttagtaatttttaattagaaaatgtaaatattttgtatatccactgaattcaaatttgatatggccaaaactagtacgacttgagtttatatgaattaaattcatatgtaattacttagttacattataactgatgaaagtttagacaaattaatatatgtttagtgtactaaatatatatataatataataaattattaaaaatataaa

SEQ ID NO: 246596 - DNA, 626 bp, Cannabis indica
gatcgaaatccaatccattaacaaatagttatatatgtttgaaaaaaaaaattataaagcctaaacaaactagatctaaagaaaccataaaaaattataatcgtgatgaacgcaactcacccaaccgcctactcaataatcataaaaaattaatacaatatatattagaaacatataaactcgctaccaaatcaaaaacaagcaaaaaaagtaaataaaaaacaaataaaaagccgcacagaaaagttcatcgaaaattagaggaatagcggaagaagagtttgggtcgatacctgtttaaagtagccgcacgcaaagagaaagtggaaaatgaaatgaagaaatgaagaagaaggaaaagggggtctgatggtcgaaaatgaagaaatgaagaaggaggattatggtttgagatttgaagaggaaaagcggaaaatgggggaagagggtccgatggggtatatataatgcaattagcgacaaactattagcggcggagagtcttttgctaatagtcaataaatgttttttatttttttattttttaattattattagcggcggggtccgccactaatacctcgccactaatagcattcgaactgaatgggcagaatttttcccgc

SEQ ID NO: 246597 - DNA, 3328 bp, Cannabis indica
taattattttttaaaattaatgtggaccattgaaaatttgccacgtatacaactgtaatttttggacggaggtgtgcagagcacaacagaatcagggattaggtagtttagtcgctaaagttgagatggtttagccgtcaatatcccttaaatttaatatattacaaatttacaattaaaagagactctttatactgaggttgcattttgctggaagacttttatgggtggatttagttctcctaccaacgaaaaggaaaactaactccatctcggtatccgaattttattatcttgccgagaataaaactttttgtcgacctcatcgagaaaaatacttcgccgaggctttgccggcccattttgccaatgaaagaaagatgattgtatatatattctgagaaaaaagataattgtacacaaaattcttgatacaaacaataagcagaggtagatcagcaggcacaagatatatacctttctaccaaaaacaataaaacgatagaagaatttgaaatactgatcattacaatatttttaattgcaattctgatcataaaattatgagtggttctatccatgcccaagccgagcagcctcacgaaccaacatacttgtaaaattgttcattgtcctttctaatctttttaatcaaaaaccctccatgtgtacagaattttacacgcacatcataaatattggaagagatcagaggggtcaaaggaagaaaaacaaagacaaatttacgtcaaagtatgattaatgtttatactatatatgtactcctaacaatttagtctactatatatgtacaaaattcgacaaaattaattaactgacaattataacgtagtatatatctatctatataatatggtgtgtctaacatttcattagagacaaaaaccataaatgaaattaagttcttaatgaacaacaaataaggatacaaattaataaatatatacgctatcataacgcttccttctcttttactttccattctaaccctataaatctacatggtgaaaacctaatcttatgctcagagatggtctcaagcttaggcgaccataattgttcttttgatcccactagctgatcatagtgcttttgaagctccggagtgttgcaaagaaatctaccattattgcattgactatcacaacccgaaccctcttccttacctctcataaccaatttggttaagaactctggtgaaaccttgatcaaagcccttccatttgagccctttaagtactcgaacggggaggtattaccgccaaaattaatgggacttgtggccttgttattggggctcggtgaggagccgaaggcggcgagggaagaggccgtgagtacaccgttggagaagctgtctatgggaagaacaaagtatgtttggccactgaggagcgggtcttggatgcctaaggccggaactgggtgacctatgaagaatgaatcggcatggcagacaattctgtcagggaactcgaacatgatctcacctgctatgtgtttctttcctttgagaattctcttagtgccttcccagaatattagtatcactgctgagttagggtttgggttgaagcagcctggagacacgataatattgcccatgagggagagagaaagagaaagagagagatatgttggtaataagaaagagtaaaggtatatgattcaatattgattgaaagaagagtaaagaggataacatacatatacaaatgattttgaatggaattgactttcataaagtctacgttaattaaccagttttgagtggtcggtggtcagccatgccggctcgttgaacgtatctcttgcgtttggctgtgtaattaatttacatgtgtagtgtttctatatatatataaatatatatatatatatatatatattaattaaccaactctcttaaccacttcttggacttaaatctgatgtatgatcatgtctttcgtgaggaataggaggaagaagattccacgattatgtataatatacataaggaccacattatgttaggacttttattttatattttaaagtcaatgacaatataaattatatggagaattatcaatacatatagagagaaatttgtgactttatagtatatactttgttaattgatttaaggattttaatagatgataaaagggatattttgttttctttgatttttgtggcactattttgttttcttttgttaattatatataaacaatttggttataatataaccatgatagataataatttattttccttaaaagaatatatatatatatatatattgagaggaaaaaatatattatttattattatttacttattttttaaaaaacgataattaataaatatttttaagagtaataagagaagaaataaataagaacttgagacaaataattttacaatataagtgtggccaagatgtacaagtaaatgaaagacttagaacagagtttttcataataggtgacccatgatttgggtaagagctttgtgagttcttcaggttatttgctttgggacatgtgtgtaggtcagtacttgtttagaattgacggagataagtaaagcatcttgtgttttaaggatgttaagatcaagagcatgatcctgaaaccgatctgccatctgataatggagtgtggtgcgtcaagagaagttgggtcttgatctacttttactgtctgtacttctactttaaaagcattagtcagtcgatatctttgagagacatgttgaaattgggtaacagagtgacgaccactgttcctgcatttaaggtagtttcaatagtagccatggtggtgcgatattggttcagattgtttttttaaaaaaaaaagttcgtttgcttcggttcataaacgaagaaaaaaactaattagcgtgcgtgcactactatttgctttagttatgaatcgaagcaaaaaatttctctttttacttcgtttcataaccgaagtaaaaaaaaagcattttgcgacggttttaaaatgaagcaaaaaatatgactatttccgtctacggttattacgtcggttacctcaaccgacacaaattatttatgtgtcactttaaaactgaagcaaaaactctttttcgtagtagtggtttttaatgtttgagttttagtgttttactgaatttttaatgtttgagtttgtgtttatgaggtctatttttatttatttatttttatagattttgagaacttgaaatttgatgttgtttctattgattattgggattgaaagtttgatttttcatacacgaattaaagtttgccttttcgtttcattga

SEQ ID NO: 246598 - DNA, 1607 bp, Cannabis indica
ttttttcttttcttttaaaactgctgttatgtgagttttatctttctgaattctttctctctctctctctctaattactctaattacttaattgtactaatgctgcctccttttgatgtgtagactggacaaaagagcttcaatcttagacttaagagtggaatgccaggatctggagaagttctctgtgatcaatcgttttgccaagtttcatggtcggggacaagctgatggggctgagacctcatcaacttctgatggaacgttaaatgctcagagaccatgcccacagaaatatgttactgcacttccaatgcctagaaatctgccagacagggtacaatgtctttcactttgataatttaattaattgatgtttgccctctctcggtcatttgtctccaacgtccccatgcttcctatcttccattttgtttcaacttataaaatggcacatgatttgccacaaagtagcgcacagaagggactgtaggagaaagaatggattctagatgtctccttgaaagcaacggaggcagttagatcttttgattataggccattgatgttattcttgaaaattataagatggcctctgtatactttgaaaaatctagaaaggaatctgctatgccccatctttcttcttttcagtatagggggaggtaaaaatgcagtctggtgtttctaagttcacaatgctataatccccatccccaggtattctgttcctctttttctggagggggcattgactgacttgtgacagtcggcagttgaattggattgtcaacttactgcaggaattaggcaattgaccatattttttagaattaataccaattattggatcaaatcttttgaatttaccgagaagtatatgatttttttttctttattattctacgtttctgcatatcggctgattctaagaaggttaatgatctgtttctttctttagtggatctttcgtttgccatgaattttgcaacatgtattgaacataggtcagagactagtctaatgctgtctggttgacaagggttttgtgcctcagggaacctgcttaaagctaactttaatgaataatatctttgataagttggagtaggatatttgcagagttttgtatattacatggaatggaaacaccagactcttctaacggtattgaatagtatattgtttatttgttcagtcttccctttgtgggacgtgtttcaatgagtcggtattgttatttttgtttcctcatcatggcatgcgtttattgcatcgtttacttggtcattctacgcagacctatattgtctatatatactctttttagcggctggagggggaatgatgcagattttttcagctgttaaattaattgaacaccatctctgggaccctttttcatttgtctttaacactaatatcattcacagcatttattaaagtggagtaattttactttgtggcgtagtcttgtacgttcgtacgttttgggcattaaaaaatttaaggagtgggtcccaacttctaccattaacatgatgagtacgtacaaaacttgcttaaaaaattaagaggcaaccatttaaaaaaataaaatataaata

SEQ ID NO: 246599 - DNA, 929 bp, Cannabis indica
tctcagtgcagatgaagcttgtaaatctttgtgtgttttactgctttattctcaattcaagtctgaaattcatatgttgaaatcaatctacttaaagataatcaactaggtaatctgaatcattaaaatcaacaagttgtactttcaatttcttacaaagtttagcagcagtaaaaggtaacaaaaatgtataattttttcttatgaagaaataccaagcatgaaatgtaaaacctcaacagttgagtcaattaaagcatgagagcccttggtagctgcaaacatcaggtgtttagtagcttcaggtctatcgaaattaaatgtgcccggaacaaacttctctttcggctgtagagccaaccaaatcacagtgttcgtaccttcttcacctgttctaagctttcttgaaaatctacaacaataacagagataaaaaaattcaaacagtcatgattggagatggtgcaactgatcttgaggcaactataaaaaccttaaatctacaaattcagcaaagctgtctcttttcatgctaccatcacatctaatattttgaaaatttgtctggaaaggataaagaaaaaaaagtctataatctgatggcgttgcatgttggttattatgatttgaagtgaacttagtttgtaagattatcaagtgcaaacaatttatcattgaactagtttcatagatacgtaatgattgacataataatatgttattttattttccatgtggaattttaattttttgtaggtttgtgatagacctttactgaaatacacatgttaggaggaagaataagagtgtgtagtggctgaataaattgtagtggtgagagtagtgtgtaatgtagaagagagagaatgtagtttgtgcaaactagtgttcggcagttcccacatttagatggatgggtcaaaatatta

SEQ ID NO: 246600 - DNA, 1974 bp, Cannabis indica
taaaaaagagatctaaaattttttctttggactttatccaaaatatgatcagaacatagtcgaatttaggcttaaagtttcagctttattctttttcaaaattttctctattttatagatctgttttctgaaatttatccaatttatacattccaagtgtagaaacctgaaaccaaagaaaacaagcgtaattctattcaaaaaataataataaagaagaaaaataactataaaatgtgacccaaaacttaggctaaaaatagcctaacaatccacctgctaactggcagcatatgtttcaagaaatgcgaggaatcatattttgtcaggaggaagagttgcatcggttaaggcaaccggcaccggctgttgagcaagtgttaccaccagcacctgtgccagtggtgggtaaccaggggttcatgttgccacatatagattccgtgtttgaacggtttgtgaagctgtaacctccaacttttttgggaggtattgatataattaaagttgagcagtggatgagtacaattacctgtatccttgacaatatgggggtgacgggaacagagagagtaaattgtgcagcttttatgttacaagatcatgcctgtgtttggtgggatatagtggggcagattcgtgatgttagtgtgatgacttgggaagagttcaagagtctgtttgaggaaaaattctataacatcactgtaagaacctcacatatggaggactttgtaaaactgactcaggggaaaatgtctgtggccgaatacactctggagtttgattggttgtccaaatttactggtgatctggtgcctacagatttcaccagaaaatagaaatatgtgaggggactgaatgccacaatcagtcaggactgaagattaccactactcatgacactttgtacaagaaagtggtagagctagccttaattattgaggaggctgagcaacatgtaataaaagagcagacaacaaaggatgtcgccacggcatcgaatcctcctgctagtggtaatattagtaaggggaccgacggtggtaactctgatcacaaatggaaggctaatgcttcctaaacatcagggggtaatagaaagttttggggaaacagaggtgagcgtcagggccgcaaatcttcattcccatcttatcctgagtgtccaaagtgcaagaaacatcatcaaagtgaatgtcgggccaagacttttgaaagctaaagatctgataagcagaggttgtttgggattcatagtcactgtagtggatactagccaacctgtgacatctagacttgagaatacaagattggtatgtgagttctttgacgtctttctagaagatttaccaggatcaccacctacccgagagattgaatttgtaattgagttagttctgggagagaaaccagtatcaaaagcactgtatcgaatggctctaacgaaattgaaagaattaaagatctgattgcaagagttactaaatctgggattcattaaaccgagttactctccttggggtactgtagtattgtttgtaaagaagaaaggcgggtctctgcgaatgtgtattgattaccgagagttgagcaaacttaccatcaataacaagtatcctttacctcgaattgatgatctttttgatcaattgaagaggaagacggtcttctctaagatcgatctttgctcaggttatcaccagctgagaatttaagaggaagatatctcaaaaactgcattccggacacagtatggacattatgtgtttctagtgatgtcttttggactcaccaatgtcccagcgacatttatggagcttatgaatcaggtgttcaaggattacctggatagatgtgtgattgtgttcattgatgacatcttggtttattctgaaccagaagaggaacatgagttgcatctcagatcagtattgcaacagttacaagatcacaagctgtatgctaagttca

SEQ ID NO: 246601 - DNA, 576 bp, Cannabis indica
ccgtcctaacagacagtacagaccccaaagagttctactgacagggcatcttgaaaatataaatgatgatcgatagtcattataaaaacctcgataaggtaaaactaaagatcacctgcaatgtgacagatcaaatgtccctcaagaaaagtttaacgattagacagcaacatgtcatcgcaagaactaggggcatgataagagagcaattcccgcagtatttccttgcataatcgaaacttgcgagaaggtgtgaccgagacagggtctagtcacacactatgcatcgcatagtaaaaagaataaattgataagggagcaattcccatagtatttcctttcatgatcgaaacttgtgacaaggtgtgaccgagacagggtctagtcacacactatgcatcacttagtaaaaagaataaaagtgggacgtagagagaagttagcacagacgcgataaatatcgagtatatgcgatgacccggtatttctccctcgagcctatgtaaagactgcatctttaccagcatttggtccggatgaccaatgtgcacgtcaactcgaccagaacctgcgagt

SEQ ID NO: 246602 - DNA, 1085 bp, Cannabis indica
ttttttttttttttttgttgatgagatgctctgttctgtgtatatatacatcttttatctgtgtatatttttgaagtgtaatatattttttgtgagaataatggaaaaattaaaaaaaaaagttaaaccgctcaagtaaaaacaaagcgaataggcaacagatgaaatatccaacaatgcaagggacaagatcgttggcttcgatacgatacggaatggtaagtattaatcctttaattgtaaaatatgatttttcttaaaatgtattataaattaatttatttgtttatgttcatatagggggggccctcctggagagcatgcagttgatgcatggaaggtggttcatacgaaacagccatctggcaatttcgttaatgaagccgctgcaaaagattatgtaagtgaataaaatattttattattaaaatttaaattttatgttaattatatattctaataatttttatttaaataggaggaacaggtaaatgagcttgatatgaaacgacttaaacgacaatctcagagcgacacatatggtaatgaatttgatgctggttatcagtacgacgttctggaaacagttcttggcgaaagatctgactatcaaagaggcgtgggtaaaagactcaaaggcaaaggaaagaagtcatttactcaaagtcattcgacggtgcctcctccgccatctactgaaatgatgagcactatggcagaaatatcctcaactatgcatgacacatgggggataatttgacgcctgaacaacgtgctcatttatataactcacggtttgagaactttattcaaacgtatagtcaattgcaatcgtctagtggttcgtcttctcagagttatgttgctcctccacaacatcaacaacaacctcctttgcaaccacaatttcagccttctttgcagcagcaattccgaaaaatttcgcagcagcaaccccagtcttttcctcaacatcaacaacagtctggtccgccattaggaaattagttcttatgtagaacaccatcagagtctcctccgctcggctcaaattttgttgattttggattatttgggagttcgtc

SEQ ID NO: 246603 - DNA, 613 bp, Cannabis indica
ccatttcctaccttccacctaaggccatgttgaagaagctatttaccccatacaattcctctccatgtcatagaaggataagacccaagtcctgcatctaagaaagctccatctttgaagtaccgctgctttaacaatcgactaaaaagtgaggaaggattatctaggatgcgccatgcttgtttcgcaagtacagcttgattatagtggacgaagcttttaaagcccatacccccttcacctttagatttgcaaagagcatcccatgttttccaatgaattccggatccatttgcatttgatccccaccagaatttgttcatcattttctcaatttggtcaattaagtttttagaaagccgaaactcatggcgtatgtaggaaaggactgagcaacagctttgagtagaacttccttgcctcctatggagaacaatttttcttgccaagcagaaagaagtttccacaacttgtctttaatttcaccaaaaagaatactcttgtctcgacccgaataagatggtaagcctaaatacctttcatgacatggctgagtttgcatatttaatagttgctgaaatagaactttagccgattcccttgtgttaggaga

SEQ ID NO: 246604 - DNA, 845 bp, Cannabis indica
ggcttggattaattttaccgccaaaaaatacagttgtggctgtcagaaattatatacttcaggtagttttgctactaatatatccctaatatttatataaaaagtattcagtttatttagaccggaggtcttgaatgatataggttttgataaattttaattatatagattttgataaattaatttatatttttttttagtaatttggttctgaaaatatataatttttgacaaatttatcctcaaatattatttttttttacaaattatttcccaatttttttttttgacaaaattaagtcctactcttaaataatagtatttttgttgatttttttttttgtgttactttaaatatttttatatcaatatatattgtcaaatattaaaaatatatttttttattatacatatttttttaaaaagaactaaaaaaagcttaaataaataaataaataaagtgttttaattacttaaagtaaattatgttttaagattagttgttaacttatgctcaataagaaatacatatgcaaaatttaaataattaacaaatataatgtataaaattaaaaaattattcaaattataatataaatattcataaataactgataacatataaatacttttaaatatcaaaataaataatattaatagaagcttaagaatttatatagggctaatatataaaataattacataatttttatttttcataaaaaaaatgatgggcctaatgtcccctttacgtattatgagatttaccaatgtttatgctctttttttttctttttaatccgagtttatattctgtttttcataatgataaatatatatataat

SEQ ID NO: 246605 - DNA, 832 bp, Cannabis indica
cataatctcacacctgcttttttttgttcaattcataatgtttgattcataataaattttttctatctataaaaaacaattttcatatatatagttatgaatacatatatatatataaataattgaataattatttaattctaatattactaatttagtttatatttattattatgtgttttttaaaaaataactaatttaagatatatattttaatagaaaatatattaaaataatagtaaaatattttgtaaatttatgctttaataaaatattaaaaaattaaagaattaaggagaaaaaagaaaaataactttaaagagattttagaccaccacgtcaccgcctcatacttatcttttatatagatatatagatatagatacttatttgatattttatagtttgaaatcgtatatatttggtaattgaaataaaattttatgaaaaaaaaaataaatttaaactattaaatatgtataaatttaaaatacaggtagggcaccctaataaaaatagtatgaagcttgctgtccttaattctctagttgaagaagtttttcatcaaatacacaagaacactaatacaaaatgtataagttttcaaaatgtatatttttttttgtgattatattatttttgttctacatttatgaaaaaaaaatatatatagattagtatcaaaacaagtaaataataaaaaaaaaaaaaaatctattattttataataattataacttatttgtaaagcttttattgctgactatttggagactttaaagtagtgtaacatccccgcttcaagccttcattgggtccttacacccacgga

SEQ ID NO: 246606 - DNA, 1708 bp, Cannabis indica
ctgattaaaatcccccaataaaatctagccacggagaagcttcattgattcgggaacaagtcaagactgagagataagtggatgtctaccacattttactcccgcttctcggacatggaagacatattactactccaaaacctggagtgccccaaactcaaagtctacctaactgataccttgatagatactcaaagggcctatcgcggaggctgactgcccaagggtatcgcgaacgtctatcttggatgcaacctggatcttccaccgatggttataccttttctgacaaagaatcagatcttgtcccctgtgtcagaacatggtcctgtgcacctcacatacctttttgccagacggttattccaggcatctacttctaaaggatgaactttttagcaacatacgtccactatgtgcaatggtcccctattgtccagctacaacaatgcacgtgcacaattctttctaaggggcccaatggtcaactctttcttgcatgtatgttacccctattagtagtaaaaggaaaataaataacacaaagttgttttacatggttttgcagttaaaaattctgcatagtccacgagtctattttattagatttttgatgcaaaatcggggctctttctctaaaggattttccgtccatttttcagtgtaccctacccctatttataattaaataggagggcagttaattacaataagattgatatcgaacaataataatcccctgaaattgtgagatttgattacgtcccacgtgaaaaaaatgcggttattatttgaaaatcacacaactgtgttttattcgctttattgagtcactattgacgtggatttaaatacgcttcaaagtgtatctcgcagagttatctccctgggatcgcaacaataactttgacagtaagctaaagcttttcccatgtctttccgaggtttgataataaaaataccgtcgtttcagttattgaagacataacgctccatctgacaatcgcagttcttggtgacaaggtgaacttcagcagtcaacatcatttgaatgtcagctcctatttgagagagctgactcgacggagtagtggatctcattgaaagatgtctgaagctgataagagaaagtaccatgagtatgccttcctatagcaagatggatgccttgctattcgttgttcaaattcatacaactgttaatacttaatttgtataatgtatattatacgctaagtgtgttttaacagtcatcatgcctcgtctatgtctcttcatgcgtaatgaggttagtgcctcgctttgcattactgatgccgtccttatgatcgtgtcttcatatacgaaatagtttctcgtcaatatgtgaattaatagtttgtacatctgtgtctcactcaagactttacaatcaacgagttataggtatactctatcagctctgcatttaatgagttattccattttaatattctttaatataattaccattatatttgttgattcgtactctcccaggttgacacgtgtcatcctctgaagtgccagccgtatttttagtataacaatttcatagagagttcccttagtacttaaaaatggggaaataagcttttagacaaatgtattatattttgttcaagtcatggtaatactcactactccacacttaagggttgtgagtgtatatatatatatatctttttct

SEQ ID NO: 246607 - DNA, 1345 bp, Cannabis indica
ataaaattaattgttaaatatttattacatttttttaccaaaaatttatttactcctatcaaattgtattttttaaatagtacatcttcttaaaggagtattttgcttgacactcctatttatattggtattaataggaaaaaattataagaattatttcacaaataaacaaaaacaacaaaaaaaattacaaaaatataattttacgaaattttaaatatttttacaattttttaattttatatatagaaaatacggtctttttatattgtactcatgttaatttgttgtttattttttgttatcgtatgatatttattatattttttttatgttatttagatgttattttcgtattgttaatttctataaaaaaaaatcgtaaaaatgtaaaaaaaaaattctttaaatgtaaaaatataattttttttataaaaatagtgccttatgtaactgtcccaaaattttaagcttatttttttataaccgtgtacttacgtagttatttaaaacaattgattaattttcaaaaaaattctaaaatagacattgccaaaaaataaagtacaaataattgtttagcactcgtaactattaaatcacactccaaaaacataattattattattattatacatgtaaccctaaataactaatttggggtaattatcacttgtaactaatttagggttacatgtatattatctgtaacgcttaattaaatcacactccaaaacatacacatgcttaaaaaagtgtaatcaccaaatcaaaatactttaatatcactcaactatttatatttatacatatgttacaatgatcatctccctcccaattatttgattaaaattaaataaataaaaaaaacataatggtacgtatacttaaatctaactctaataaaacaaaatttatatattttttctattaaaggtgtgcttgttaatattttttttagttaatcttttattttttaattataaaagtgaaactattttctaaaaatatatactataaaattgtttttactttttaactttttaattgagaataaaaaattttaaaaatttaaaaacaaaaaaaattacttttaaatttgttttaatctgtttttatttttttttaatcaatattttgaactctgcctctattctattttgaattttgggacttagaatccagccttggccctagtccgaccatgacctcagtttcagattcaaacctagagtcaatttaaataaaattaaaaaataaaaaataaaaaagattaccaaatatatttgtatttttttaaaacacaaattttatgttttgtgattaaaaaaattaaaattaaaaa

SEQ ID NO: 246608 - DNA, 624 bp, Cannabis indica
actctatgaatgataccacaagattccactaaggaagtgaaagctctaaactctcctccccaatccgattgaatggctttgattttgtgattgagttgtaactcaatctgtgttttaaatttgataaaagtggggagagcctcatccttggttctaagaagatagagccaagtgtacctagaataggcatcaacaaaactaatgtaatatcgatatccattagaagagaccataggggcaggaccccataggtcagtgtgtagaagctgtaatggagcagtatacacagtgtcagaattaggatatggtaatttgtgatgctttccaagacaacaagctgtacacaaatcaaaagtatttttattgataggagtgatattacatttggccataacagattgtacaatttgctttgatggatggcctaaacgattgtgccaaagaataaagttggaaaaaggtacagtagaggcattgagttgagattggaaaacagcttttggtaaagacacaggtgctgcatttgaggagtgatcactggattgagaaatggattgaagagattgatcaaacttatagagtcctttgtcaaccttcccaaccaataaagtcttcatagtatcc

SEQ ID NO: 246609 - DNA, 507 bp, Cannabis indica
atgaagttagaaaattctggtctttttcttcctcttggccggccctctctctctctcaaaccctctcttattttcaacttgaaattgatgaaaatctagcttgattgttggtaaaatttgtggtggaagcttggtatttgcttttggttcaagttgaggtagtttctctactaaatttaaatgaattccttgttgaatttattgtggaaaaacatgaaatagttgaaatgttcttgcttatgcatgtgtggaaagattgtgttggttttggataaattaaagtgtaaattccataatattgctgtgatttatgttgtggagctttgaatggatttttagggtattctctagattgaaatacttgttatttttggttgtggctgctggaaatgttagaaatatgttggcttgaagctcaagctcttgagcttgagtgtttgtgggtttaaagctgagttatgagatttttttgtaatctgaaattggggtttaatattgaaattgatg

SEQ ID NO: 246610 - DNA, 736 bp, Cannabis indica
caatatttttcatgatagtgtatatttaacgttttagacatttatgattatttgtatatttttaaaaaaatttaaatgacttagtgacttacaatatcaaaaataatattcaaacaattacttattatacatataaaaagatcataagcaacaaatatttaaattttatttttaatattataaattattacaaaaaaaattaaaatttaaataactacaacatattgaattatgaaaaaaaatcataaacaatttaccaaaccattctttaagaatactaaaaccttacccaataaattaccatatatattgattcaaatgtatacgcgtgtgtgacaataatgcattaaggttttagacgtggagatttatttgtatgtaatcatatatgaaataacaaaaaaaattaatatatgtataagttgtggagcaccattaattcgatcaaatattttggttggtatattggactattaatattattattatttttttcgaaactattattggtacttaatattaaagaattgttaaagagtattattggtgcttagtatttttcttagggttatattaatattagtgtaattaaatagtgggtctcatataacttaagaaaataaattttagagaatatcgctaaataattataaagtaacacttatagaaagtgttggacaccactactactcactaacaaataacaatgctcttaatattattatagtttctttga

SEQ ID NO: 246611 - DNA, 671 bp, Cannabis indica
aaaaaaaaaatggtaattataaccagttcgctgtcatacacgaattttgtcaatttcacatacattttttcagttttacataaacaaatccaacatctcaaatttacaacaatcttaaattttttgagttcggaaagcacaccaccaaaccactaccgcaccacagcaccaccaccacccataccactgcaaacctgaaaaacagccattgataaatgtatattcatctccaaaacttattggcataagaaatatatgcagctgagtaattttagacaaaatatagacgataaaaagaacgattgactcactctatagccaacactgaaataatctttgtgttcaataactccgcaatcaacttgatagtgttgtagccagcttttccttcacatgaggaaggacctgaaccaaaattgaaacacaaaatttaaagttaataaccatgtcacaatatagtgaacctgctaaaacattaaaacaacaattaaaagttaccttctctataaaatcactgaaagaaaatatttgctatgtatagtgatcaacttattactttattactatctatcttgtgacactaaagaacagaattctttgtactagacaaggtttagcttcaaaatttatctaaaagataaataattaggccaagacgataaaatgaactt

SEQ ID NO: 246612 - DNA, 1010 bp, Cannabis indica
tagtaccttgatcgcatgggcttcaagtacggtcttaacttctgtgaagaatttaataataaataggaaagctttttaatcattcgatatatggactctacccccagcaatcttttgcttacataatatactagaagttttacccttccttcttctcacactaagacggcacttatggcatgatctgacactgcaaggtaagaaaataatggctccccctcgaatggcttggacaatattggatctttggtcaaatgatctttaagtttctagatggcatcttcacactcggttgtccattcaaagttgttgtttccatggaggtcattaaagagcaagatatcatttttcattgatttggaaataaacctgtcgagtgctgcaattgttatagttagactttggacatccttgtgcttttagggtgatggcatatctagaagagatttgatctttcctagattcgcttcgattcctctggaactgacaataaaacccagaaattttcctaaggatactccgaaagtgtatttctttgggtttaacttcattccatatttttagataatggagaaagcttcctttagatttttgctatggctcatggaagccttcgactttaccaaaatattgtcgatgtagacctccatattcttctccaagatgtcttgaaacattttgttgactatatgctaatatgcggctccagcgttattaaatcaaaaaggcataaccatgtaaaaataagtgcctttgtcagtttggaaactagtgtgttcttgatcagctacatgcatctcaatcttattgtagcgggagtatgaatctatgaagcttaaaagttcatatcttgaagttgtatcaactatctcatttattcaaggaagtgggaagtaatcttctgggcaagctttatgttagatttatgaagtgcatgtacatcttccaagtttcatttggatttggaacctgttaggttttatgccctaaataaaactccgtttcaatgt

SEQ ID NO: 246613 - DNA, 568 bp, Cannabis indica
gccaaagtgaggagtgtctctccttgactagattgaagagccataccaaagcccatttcattggctcgcacatcttgggcagcatctgtagaaagccgaagtcgataggtaggagtgcgtggctcattcacagtagtcagcaaaggtatctcttgtgttgaactaggagtagaacctcgtgtgttgcagctttggtattgatctaaatagttctcaacccattgcagaacctgtgaaggagaagtagacaacccagaatgtagccaattgttcctgcaattccaaagtttccatagcaaacacaaaaagaagtgatagtctctagcattatatgtagtggcagcgaggtaaagtaaatccaaaaaattgagagaagcatttttatcaataaactcatgaaaaatagttaaattccatacctcttggatagttgcgcatctaaaaagagcatgctccagggtctcatcatgataaaagcaccgacaacaacatgtggtatttaaaactttgcgtttcaaaaggttatggctggtaggtagaattgttggaagttattttaccaggaact

SEQ ID NO: 246614 - DNA, 651 bp, Cannabis indica
tagttaattaaagttaattctattatcaatcgaaaaaggttaatagattacattatgattcttgaaattacaaattattgaataaagtaggaaaatcaataaattgagattcatagtttgaaatagggaaattaatgttctaggtttttactttctgattaaaaattattatttgtctgtttaatttttcaattattttattatttgattcttaatcattatttactttgtatcctctaattaaagtataaaatagaaaagtataataagtagtgaaatttaataatcaatccttgtgggttcgacaatctttttagtattaaagttttgctataataatgttgtacgcttgcagtaaaaaattgtctaatcaactttaaattttagataaatttaatttcagttttcagagatacattgaacactacgatataacttttacaagttgttaatatccatcttctataaatgaatccaaactgtatgttaaatgtatggaaagtgagttttataatctgcgatcagaatccacttgaactattctatgaactatgttgtaactaaacctaggaatcatcaaaaagaccataatgacaatgaatacatctatggcctttacatcttgttaatagttgtttggacaagattatt

SEQ ID NO: 246615 - DNA, 678 bp, Cannabis indica
tcacacagtggcaaaaggcaacaatcaaatatctttgaacttttgaaacatctaagaaaacattgtttatatttctgagacaacaaaagttattttaacttttgaaaaagcaaccagcaacaaatttctaaacaacaattattctttgtcgttcgaaatcgtttaaaaataaacaatacaaatctcattaacagtggcgaaagataacattccaatgcacatttctatcaagtaaatttttcagacaacaaaagcaaacttatttatttaaaaacgcaaccaacatctaattgcataatagttattatacaactgtctatcaagtaaacttttaaggcatcacaagtcaattctaatacttcacaaggtccctaagtaccataagacaaaattcaaatgtatttttcattttgtaacaatggaagaaagcaattgtcaatcaagtaaattattatttatacatagcaatatattttactcccaattatttatttccttaattcaagtagcaaaaaatttacatttgaatgtaaattttacttttgaagatgaggcaactgtctatcaagtaaatttgttagataacaaaagccaattttattagggaaatttcatattttgcccctaataaaatatcctatatcaaaaattagatccctttatttttgtacaaattga

SEQ ID NO: 246616 - DNA, 1484 bp, Cannabis indica
taagccaaatggagcaccatcaatgtacaaagcacactccacatacaactccgctttttctctcatcagtagttgaatcatcatctgcagcaaaagaattaaggactaattaagaaaaaaaaaatattctattttggtagaattggccaattttgatcgaaatggcgtaatttctgactaatacagattgcccaatattgcaatcaagtgctgaatcgcttaaattacacgctgagttcatatcaaagcccaaacgcgaagaatttgagtaaagcggaaaaagagaattagggattgaaatcggtaccggactcaagggatttagaaggaggcaaatttccttccaatttatcgattcggaaagtcaccggaagattgatatcgcaggacaagaagaaccggaactcgttcccattcatctttctcgttcatacgcttttttcaaagcttttgtttttatcatgactagttacgagggcacgtgtaagtataggggtgaagttttttttttttttttttcaaattaaaaatttcttttaattttaacatgtatcaaattatttaaacaaatttagagcattaaaaaatttcttaatttaagagcataattttgtaattgtcaaaactttaagagtacgatttgctacatattaaagttggaaaaatatgttatatagataatcactgtattagtaaaattgaacgaaattgtacataaatttttatatctaattaattttaatagttcaaaagtataatataatacatgtcaaaacaaaattataatcaacaatattattaaatgtgtaattgagctaaaactagaaacatattttagttgaaatttcataacatttctttaattaagggtaaatactatttaaaccgtgtgttttgcaaaagttacatttagattttttattttaccaaagacaaatcacactctgtatttttcaaaatagtacaaaacaatacctcagcttaacttttatcaattttttttaacataaccaaaatgagaaaactaaattctagcacatatacaaaaaaaatatatatatatacataatagttgcagccaacaatccaacaaccagaatctaaatcaaaatgtccagccaccactagttgttggcgagaatattttggtaatttttggagagccccatctcgcaggaacaagtaacactgcttaaaagcaatttgtcaatcaagtaaagaatcaattcccaaccttcacacctgaagtgctgaagcgtgccaaaattgaggtatcacccattatcttcactgaagacaatacgacacacaccgattttctacatacagacccgctcctaataactgttcaacttgcaaacaaaaggataaaatgagtttagttgacaatgggagttcagttaacatcctattcaaagaaacacttacaaaaatgagattagaaaaatttcaactcaaaccatgcaaagtcaacttatccgaat

SEQ ID NO: 246617 - DNA, 1128 bp, Cannabis indica
caactcgattagttgatcgttttacaaaatgtaatttaacattctttaaaagagataataacaaacgacaatcatcgataacaataccaaaagtagaagacatcttttggttgcttcttattgtttgcacagagaaaagactgtcagtctcaagctcaatatttttccatgacttgttctttatccaacttagagcttccttgatccccaaagcttcaatcacttcggcagagtaggtgccattacaatggcatgttttggcctctaagaacctacctaaatgatctctcgccactaatccatagccataagagttatcttgttgataaagggccacatcaacattaatcttgaggtttattgtacacatagtgttatatttgagcatggttggctggctcaattctaaacgacaattctaaattatttaattaatattatttagttgtaattttatatatttttattactatattctttaaaacagtaaaaaaaattaatataattaaaaatatatacataaaaattaaatatgagatactaatagaaatatgtattgttatttgtaacataagaatagtttacacgaatataatgtgtcgggttatggttgggattttttgacacaaaatatacatgaatcggattgatcaattaaacatatcaacccttataacacaaatacgatatgactaacacaaattggcatctctaatccaaagaggagagtgacactgctagcctactcacctcttcaggatttatagaaagaaaaaaaaagtgggaccacaaggatgtaagccccgttcagttagtcctaaaggaccaagtgaatgactgtaagatcggccagttagcttcgggctggggagctcatatggctccaaacacgtctcagcccaactccccaaagccttcgaagttcacccgtttccggagctgcatctctgcagtaatgggcccggggactttcctgggcctttactctatggttagtagaactaggcccattcacttctccttgtggtaaggtatacacaaaagtcaaaagctaacatatatacatctattaaaacctgtatttaacctatgtgggactaagttttaataacaaactgaattatatat

SEQ ID NO: 246618 - DNA, 807 bp, Cannabis indica
gaagaaccatcaaacaatccaagagaaagtccttcaacccaagtccccgtaccgagatattagccctccaactcaacgtaagttccctcaagttatacaacttgattgaacatccgttgagtttcatttagtattattttatatatatatatattgtacttattttaaaactcatctcatatgactgttggacaactttttgttatgcaatttaatgagatttaagaacttagctctattttgaatttactattatgtcaatgtatatgttattatagtagtataatataacaaatctattaatttcattttgaacttagtagttatatcgaaattatttacttaagttttgattccaaaattaattaaaaaggaaagtgaccttattacttcaaaataaatcaaattcaagattttaccaaaaacaggtacaatacataaaagcatgaacaaatacataaaatggaaaccaaaagagtacatcagatactgtttttgggagaaggatccattcctcctttgtctcccccttcaatgtcatctccatttgccttcttgcctgtaaagaccgcttagtttaatttcgaaattagcagttaattatgtttaattatggaaaaattatttatatatatttaaataattatttatgctgttattattgaattctgaaatgtattttatgtcatttagtgattttcataattttacatttccggtgcccggtaacatgaaactcggtgtttggctcagtaaaatcacaacttagtatgttagtattaggggacggtttattagacattggga

SEQ ID NO: 246619 - DNA, 1096 bp, Cannabis indica
cttactgtctttttttgttattaacattttcttgttgcggtcatcaatcatagttcctagactagttatgttcattaattttgccaaactgggagacttcaaaagaattttcacattagaaaagaacaaagaataatctctttatgtttgctgtagaataagttgaggaaacacacactcacttctgtttagggtaataactatgacatttgattgctgctggggttatcataaactgattttgagaagataagcagtttttccttctaagttattcaacctttaagattgggattaggtacttgaacttggtcattgcatttcatggttgtttaggttttatatggataacaccaagcttatttttggaggactggtgaccaaactttccctttcgtcccattttaatttattttattgatcttttgatgtggaggtgtattacctctccttttgatttgttccttccaaaaagaaatctttgtggttgtagacatgctttttggatggagttattgtataatgttaatgatgataaattttagttcttgtttgttatggatagtgtatctttgtagtttaacatatttgcataaagaaacatgtcatggcattggatctaaaggaagttttattgtggtagctacattatgtgtacattgtcaccaacttcacagcaattatgttgtgatggttttttatgaagctggtgtttcaataggttgcatcctgtgcaagtgcagactttctgctggccttgaccagaaaacttgataaaacaaatctgtgtcaagtatctgtatattatgttactaagatatgtatttaagttttcttcttctttttgtggtgttaacggtaattaggttggacaagatgtggtgggtgagctgaccaaagcacttgaaagaattggacttgatatgcgggttacagctttggtacgttcattattttcaactttcctgatattttgcttggttcattgaatcattatattgccatccaactgatagaggataattcaccattgttctgttttaaatgatttctaaattacggctaatacttcactctccattagttattattcttt

SEQ ID NO: 246620 - DNA, 503 bp, Cannabis indica
taaaaagagatatttttgattttttttttaattaagtagttatattaagcatataaattcaaatttgtgatttaattattcgttattagttcaaaattcgatgatgtgatatttttaaaattaatatttataatttatttagtaaccattcatgagtatacccattaaaaagtgttccatatatatacatatacattacgagagattgatttttatccatagatatattctctacaggagactaatcaaacccaaaccatacacacataaatgacttcagcagccaaaatcatcgactcatatgaggaacagagcgagagagaagaaaagagagaaaattagagaaaagaaaagtacttttttattgaataatactctgttgatttacacagtacaaaacatgggtttatataggagtaggaaacctagctgcattagtttaggaaataacagaagcctcagtaattagttataacaatttaactaatcaagattaagctcta

SEQ ID NO: 246621 - DNA, 1420 bp, Cannabis indica
caatttagaaattgtttaattttctttttatcttaccccgtttaagtaatgtttctttaaatattggaacattaatttttagtttatttttagattaacttaagaatatatttaaatcattaagcttttttaaacattaatatattgcattaatatagaaaaaacttagcataaaatttaatgtacgtgcattgcacgtagtttttttgctagtatttatatatatatgagaattgttgttggacactaaatgatactctctataagttattttttttatattatatagaattaaatatatacgtaaatatactaatagttgtttggcatcaagcaaagtactaaatactagtagtgccttttagtattatttctctatatattaaattgtttagcactactaagaagtgattttctataattggttaatggtctttataatatttatcaaaataataaattggactaatagcaacattacaatgcacaaaaagtgctagacactttgagtttacttttaacatttatgtgtgatctttggcttatattgagtaatggctaactttttagaatgtttattggtcttactttagtattaaaacagcaccaacacatgaactcaagtgttttcttttccaaggtgttttcttttccaaggagttagctagctagctagaatgtagacattccttctatgctaaatgtgataacatcttttagcattaacatatttccaacatgttaataaacatatattgtctataattatatataagaagttacggtcgtaataataaaagagtaaaaattcaacaaaacatagtaaaataagaaagattgatatgatcgactttgtcattaacacgagaacaaaaaatgctatataattaattatatatgtagtgttaagattttattttatgatgtcaaataatctctattagatttctatcttactaaatatggatttattttatttgagagttgtcattttttttctattgagattttcttcaattagtttttaatattatcgtgagaaattaattcacttctctttatcttttttgttttgtagatattttatggaacattttaatatgttaatgagttgagaccaactttttggtatgttgtttgaggatgttataatagctttcgtgtctaaattttcaggggtcagtttgtctcatgttcagtggcggaaccagacaaaaacccgaggaggggccaaataagaaggtcaagcgaattgtatttttacctatttctttttagtaaatattaataaaattaggctatttaaaaatttataaccttgaactattacaatgatcgtatcgtaccccttgaaattttttctactaaacatgtcaatgtagttgatgttttattgtcagcgccacatatttaatttaaa

SEQ ID NO: 246622 - DNA, 569 bp, Cannabis indica
gttacttattattattatttaaaatattatatattttaataaaataataataataataattaaacaaatgaaacaaacgaaaaacagaacagaatgcatcacatgcattctctctggcaggaagaaaacaaatgaaaaatatatattcctaaatcatatatacaaaaaattactgtatatatgccacataacttaattgactaacataattattatatatgagattagaacacaaaacttcaatctttttgtctcatgtgagacttattatacgaaaatagttttcgtattcaataaagatccaaaactgtaatattgactttttgaatgatttgcatgcgtacatacaatacatcaacaataataaaacaaagaatcttttcatatatatatacactaaattagatagtatatatgtattccaaaaattaaatggcatatatataacaaacttcggcaacctctatcaatagccattcgccattaatgtatatatatgtaaaacgattatgatgaaaagatatatatatatatatacggacaattaatagaagaatcaaattaactat

SEQ ID NO: 246623 - DNA, 658 bp, Cannabis indica
gaaagaagttcccttcacttcagcctcttaccctccttatataggttgtaaggtttgttagtgttcccccacatctcggggtgtctcactaacaaatcatgcatatcatcttttctaatgaataaaaattacaagaaaataaatatctacaaaaatttccttatttctaggccgaaatcccacaatcattgggaaatggttattttcgactaaggatgcaccagtttaaaatagagtgacaagggatgtcacctcttggcttgaaattcatgacattggtgataagtgttgaaaacatgtgttttggggtgccactgttcgcatagaatgccacatgtgtttgtggaagtatccacttcattactcatgaaattcaccaaagcccaaaatttattgttgcagtcgtggccatctattggtgaagggagaaggatttttttcaaaaaatttcaagacgtttgggaattcaagaaactttagaggtagttgttggaatatatttaactaagatctagatttactaacaagtatgtttttaacatcctaaacatgaacttctaaaacgatataaaataaacacataaaaggaatgagaaaccttacattggttgcagcggaattaaatgactccttctgctcagatctctaaccccttgta

SEQ ID NO: 246624 - DNA, 807 bp, Cannabis indica
atactcgtggtattccgaatccacttctctattgacccttttgtctgatcatcccctttatgtttgaactccctcttcttctatggtttgttgacaagggcattcttacatcgactgtctttcacatattcaggttctcatgccatcttccaccttgatgtacttcttggctcactcatagaagtattctatgttttttgattccctcttaagcatattgttccatagcatgatctttgggcagactcctacaactatggccattttgtgttcgtcttgggttaacttcctgattttggctactttagcattaaaatgttgcgtgtagcttttcaggctatcagcctctccctgcttgatgtttgctaaactcatcctagggacagtgtagtctcaggaggtgtgttgttaggccaataatttatcagtgaaatgcttccataaggtaattgatccaagttttaattgcttaaaccacttgtatgttgtgcccctgagcgtcactgcaaagcattggtatctttccttgctagtgaccctcttcatcttcattatttctttgaaggtgtccaagtggtacttcaagtcggtaatcccctcgtaaggtggcacggtgggttctttgaaatttttaggcagtggttcgacgtgaatttcccttgaaaaaggcgattcatcatcaaaatcgacttcatcctagtttcactcttcagaagcggctgacactatccttcaccaaagatcttccatttccatatcaagctcctgcctgctcttggttagattttcctggaggtctggcggcgt

SEQ ID NO: 246625 - DNA, 642 bp, Cannabis indica
gtagcgtgccttagcattagggcgttacaaattttgcaaaacaatcttaaatgttacttacttgattgtcatacctccgatggcaatttaaacaccatttgacgactttaatttttttgccaagttgatttttccactatggttttgaaaatttaaaagaaacaacgcctgaagattaatgtccttgtgaacaaaataaatttcattagtcacctttaaagacaagatgctattattgatcatttaatgaaaccatgaggaaatatcaaccaaaatatagcataatttcttaaaaaaaatgaaactttattttatcatctgatttccttatgtttttttgttactcctttataaaatctaaaatttattaaattaaaggatcacaaattctatcaaaaataagtctttctattctccattgggagatataaccataatacttaaacaaagtatgatagaattctcatgattcaatttacgttttgtaccaaaagaaaaaattctaaggtttctttatatgaggtaaatttcaataaaattttaaatcaaagaactagtagaaaaaatattggaatattgaaaaggacaaaaattttaaattctaaatgaactagaattgtctaatttattcaaaatagaatt

SEQ ID NO: 246626 - DNA, 619 bp, Cannabis indica
aaaataatttccaacagaggacccctttgtatttgtgggtagaatgtagggatctcggattcctttaatctcaacgcttaaaggaagagatttgttgtgtgagggttgtatcagtttcctagtgaatgtagtggatactacaaaggaaccaccaacgggaccagagcatgttcctgtggtgcgtgaatttttggatgtttttctataggagttactggggttgacaccaaagcgcaaaattgattttgagattgatttaataacaggggcagagcatgtatcaagagctccttacaagatggcacctgcagaactaaagaagctgaaagtccagttacaggggatgttagatttaaagtttacaagaccaagtaccttggggtgcgccagttttttcgtgaaaaagaaggaagaaactttacgaatacgtattgattatagggaattaaacaagttgacagtgaagaacagtgaagaacaagtatcaccaattgaggattcaagaagaggatatccctaagacagcctttcatactcggtgcggacattatgaatttctagtaatgtccttcagatcaacaaatgccccgacaacattcatggatttgatgaaccgagt

SEQ ID NO: 246627 - DNA, 509 bp, Cannabis indica
atttctctaatttttacttgagagttaggtgtcatgcaagaactgatgcttttctaattattagagttttagagtgctgagatgagatggcctctgaaaggtaggtagttgtacattgaagaggatctttaacttgataaagatttagggcagagtaggtaagaaactgtttggatgtgtcttgttgtggtgtaattttattttattttagtggtgatataatgtgagaggctgaactgaaggccatgccatcaccatgcaatgggtattttgcaaactctattgtgttctctcatttgatgtttgatgacaaatgtggaggctttctttgaaaaagtaatagtgtatgatacattgtgctaattaaattctaatacttgaataacgaaagaaagaaatagaatgaagattttaatccattatattctatttattatctctaatcaaaccctacaagtgttgaatgttgcaatctatgaaatggggatgttaggattttacagtttcac

SEQ ID NO: 246628 - DNA, 1441 bp, Cannabis indica
tttttttcctagttgaagctcagcttcaactttgaatagttgaaaggtttttaatgcatcagacttatttttaaggaggtatatccatgtgaacctagtataggcatcaaggaaatgaatgtagtatttgtagccattggtggaagtaatgtgggaaggaccccataaatcagtgacaacaagttgtaatggttcattgtaaacagtttcagatgctttaggaaaaggaaacttgtgaatttttccaagacaacaagcattgcaaggagaaaattgaactttattactaacattgatgttacatgaattgagaacagttttgacaactttctcactagggtggccaagcctattgtgccatactagaaactgtttgctattgttttggctacattcaggttgttcaatgctggtttgactacatttaggctgaggtgaaacagaaacattggcttgaatagattgagattggtgtttggcttcactgtcagactaaaaaggggctgtagataagagatgtaagggctggattgaacactccattggtttgatctgtatcattgagaaactgtgaaggaggagcagtattttggatgaatttgagtagccgattgcctcgaatggctgccattacctgttgtttccacaaaagaaagttgtgatgattaagtttaatggaaatggaatgattaaagtacacaggtgtgttttcatcatgatctctgtttcgattccgattctgagtattggtctgattgccaccattaacagctgttgatcctccattagcagcagctccaggacctgtgctcacaacgtttgccacgagaggtggccacagctctgataccatgtcaggagaattgaatctcctcgccattgttgttcaaagaatgaacatgaaaaacaagaaagaaacagagaaggaaagaaacagagaaagagagaaatgaacaaagaaagattgattgaaagagggaatcaaagattgtattgcattggaagctgagtacaatatatatacaactaaccaataaactgaacaatacaactgaaagggataacagctagaacagactaataacaaactgtaacaaccttcataacagaaagatgacagttggacaaactgaattaactgaatcccttaaacacttattatcatatatatttggaatagatttgttgctacatttgtctattcgattttgttacccaaatgcatctcgttacaccaatggacctcgatggttaatccaggggtagtgatgcttaggtccatcgatgtacaagcaaggcgtattgaggtgcattcatgtacacaaaaaatcaaaaatttctacctcactgcaccatcaaggtccataaggtctgatgaggaggcgttaacaaggtctatcaagaatctcttcattcccacatcctagaaggccatcgatgc

SEQ ID NO: 246629 - DNA, 711 bp, Cannabis indica
atatttagcataaagaaattaaatcgctttctcttctttctgctcttcttgccgctttctactatgttttaggtctctaaatcgcttcccctaattttcaattgcagttttctatttataactaatttttagggttcatcgaacgaaatttcccctagtcgtacgggcgctcgccgcggccacaagattcctcaccgcggccagatgggcttctgaaaactacgcctctgctctgactttatggccgcggggaaggtgtatctcgccgccgcgattgggacttaaaatccccttctctgttctcgagttatggccacggcgacaatgatctagccgcggccagaagtgcgtcaagccgaaatttggcgtttttcttggctccgcttgtcttttattgcagtttagcatcccgaggcctccatgactccgaggatgacaagccttatgttctaattccaccggcagatgacaagccttcccaaacaccaaccgatatggtgcatcccgattggtgttttaaatgctgttttataagcccatagtgcatcatctaactttcgtgaccagtcttttcttgatctatgcactattttctccagaatcatctttatctcccggttagaaatttcagcttggccattactttgttgatggtacggtagagcagttctgtgatggatgccatatttagagaggagtgcttcaaactgt

SEQ ID NO: 246630 - DNA, 590 bp, Cannabis indica
cttaattttcaaccaaattctttttaccataaggatctggaaaccttcttagaaggtagtattctacaacagacatggatgaagaatatgccataacaagagttgctgttgcacttgacacctacacaaacaaattttcacccaagtttaaacctttattgggaaaaattaagttacttgttgtaaccaaaagtttgactttttagcagacctgaggagggattccaagttctagaaaaagaggtcccattatgaaaccaccaccaagaccaagtaacccaccaatcattccagccattataccaagaaaacaacaaatgattagtttctttactctccaaactgtgactacttctccttttgatgcaattactctctttcctttgtaaaggctaattgcttcatataatgttactccaactgtcaccggaatctgaacgaaaagagttcagtttgaaacaaccaaacaaacatagtttcacattatagaagagttcaatgaaattcttgggttaaagaaaagtacctgcaagaaatttagtacccaatacaatactgaacaattttttgtgtagttctgtcatgacaag

SEQ ID NO: 246631 - DNA, 832 bp, Cannabis indica
tttatatattacaatgcataacttaagactcgaatccaaaacctccaacgcacacgcaccctcttaaggccacttgaactagcctcaagtggttaacaataatatggagctagagtattatattataggaaaattttataatgcacccccttaaaatggatatattgatgcacccttatctgttttagcacccgaaataacttttttagtcaaattctttttcatgctcatgtacgttatttaagacatcttgcaaaattttaagaaatttggaaaagtttaacatgccgaaaaatacgttcagagagtgtgttgcacgcgtgactattttattttatacgcgtgtaaaatagacagtttgaacattgttttctatattgtaaattattcggaatttctcaaaattttgtaggttatcttaaatagctataatgtacatgaatatgaaaaaaatagactaaaaaactcttctggatgccgaaataaatcaaaagtgtattagtacattttttttaaaggggtaattgtagaatcacctatattatatatgatcacaagttattatttgtaacagtcactcaataatatatttatatatacatatatgctatgtaagaattaggtcaactatatatttataaaattacaaacaacgtgtactatacggaaagtgcatgcattgattatggattaaactttaaaatattatacgcagcatacgtcatcatcaacttataatcgaaaattaattaacagtaattaatatatatatcaatcttttcaaaaaaaatatatatatatatatcaatgtcaaaaaataaaaaaataaaaa

SEQ ID NO: 246632 - DNA, 1002 bp, Cannabis indica
gagataaaattattccaagtttttattttagagaaatgttaaaaaatactagtggtgcctggtaccactattgtcgaagaaatttaaacaacaccaaaacatatgcaaacagtaaataaataaaagagaaatagtgaatactctacttagtatagggaatattcaaagaaaactgtcaagatatgagaatattgtggtttagtcaaatcacggtctgtttagtccactgttgcaaatgaaatctacttagtttattcatattagatcattcctttatatagaaagcaagtgtcattttagttatacataactaatcggttatagaactgttttataataaataaaaatattaaattagaataaacgtaaaagaataaatgaagaacaatttaatctattctgataagtgcaacaacgtatgcgacctataaggtgtgagttttctgtttatattatcgcacatgttcacaggctttaggtgcattttatattcttaaaagggctaatgagcctctcactaggatgtctgcgttctatctgagtcgcattgacgaatatctcgtgtgtcggcaacatgagacacgcaagtctaggggtgtttataaaaactgaaaaattaaaactgaccagacagtattcgaattttcggttccacgtcatcaccgaatttggcggtcattttggttatgatttttttaacatgacggtcggtttctgtttttgaaataaaaaaaatgattaaaccataaaactgccaaaactgccaaaatccatccaaaactgccaaactgaaaaaccactaaaaactgtatggtcggttttatacggttataatttctaaatggtcggttacagtttttgtaaaataaaaaccgtaaccgactagtcagttataaaattgtaaaaatcgaccgattttcacccctacacaagtccctatcgagtcatcaaacacgttttgtcatttaaatcaatcgttatgtaaagaagcgatctttaagt

SEQ ID NO: 246633 - DNA, 606 bp, Cannabis indica
gcaaaagcaactcagtgagcacacgtgcatcaatgggatgttaataaaaaagtcgaattgagtattaaacaggattctatttaaaccacagaatcctttatactcggtctgattcttatttacctgggaagcattcagattctccccaccactggccatggcaacagtacctgtcttagcatgcttcaaatccagatgaatctcatcactgaaaaaccgagcttgttcaccatataaatatctgaaaagtagaaattgaaatgaaaacatttacacagatttatgtatacctaacataatcatgtatcataaagatagtgtatggacacttcattaaaacaactagtaaaaaacattcaacttttataacttgaagataatacttggtggagaaaaagaaagtagcaaaacagttacacacaaaatttcttacttgtatattgaatcaccaccggtccctgttccggttggatcgcctgtctgtgcagtaaaatccttttgaatggtgtgaaacagacacccattgtaatacttaatcctgaaacaacatgagagaagaagcttaggtataccaatacatttcctcatctatttcaatacactcaa

SEQ ID NO: 246634 - DNA, 515 bp, Cannabis indica
gagaggtagataagtttccctactagttgttggtacctctctttgtcaactgggcttccttcaaacattttcctcttgtctccgagctcaattggagtcttgctgggcttgctaccaagcattcctgtctcctccaagagatcaagagtatatttcctttgggacacagaaatcccttttttgcttctagcgaattccattcccaaaaaatatctgagtgcaccaagacttgacttcgaactcctttgccaacatttccttgattagaataatctcttcaatatggtttccagtgacaattatgtcatccacatatacaatcagtactgccattttcccttttcctgagtgtttgataaaaagagtatgatcagtctgaccttgcatgtatccaagccccttgactacttttagaaagcgattgaaccatgctcgaggagactgtttagaccgtatagagatttgtttaacttgcagactttagttgtattgggagattcttcaaaaccgggagg

SEQ ID NO: 246635 - DNA, 601 bp, Cannabis indica
tattaaggaaatatcatcctcaaaatactcatgagctaattaagaatttgccaatataacatatatatatatatctttttaaaagggtataataatgtttattttgtcaataacagaaaaagaattatatatatttatagtaatgtactcatgtgctgtgttatgtattgtaaatgcacaagcgtaacttttttaatttcattcttgttttaatgtcatataatgatatacttaattcattatttgacacttttggactgaatttaatggtgaaacttttgaaattctacgcggattttggatgatgtctctctccccttgccgtttttaatttctgtgtctttattttggtaatctaattaactagaagtggggaagtggagaaaagaaatgaaatgaatggcgagacaaaagtggtgaagtggagggattcgttccaaaattttctttttaagcccctctttattctttattatggtatggttcacaagctgattttctttaaaatatatattttggaaaaattacagaaaatatcaatgtaatgatatttggcaacactcagatatactcaagtaaaatatgttttggcattacagtt

SEQ ID NO: 246636 - DNA, 585 bp, Cannabis indica
tacggcctcccacaataaaagtgcagccggttgcttaaacgaatttggcgccatcagtcacagcaggagctggctaaaatatcatttcgtgcactttaattttgagaataccatctcatttatatttgatatgttttgagactagttgttttcgtttggctaatcaatagagtttgtttcaaaaaaagtttcatactagatgaacatggtgctatcacagggtaaatttctcactagatatttttccatgtgatggcctagattccacaattttgtcagtcaacccaacactcgattgtacacactcactcatgttcaaggtttgcccagcattcacttaacactcactcgttatcaaataaataaacataaacacacagaatgtacggaaaccccaccccaatgttgttattaatcacaatatcaaagaatataattgttcaagtggtgaacattacaccccgacgactcaggcgcatacaagcaaataaatactcctagtacgattaacaacccaaacgcctaggctttgttggaccaccagcttacacaaatcaacatcacatgttaatcatcactaacacg

SEQ ID NO: 246637 - DNA, 932 bp, Cannabis indica
gtgcaacacactatttgaacatatttttcaacgtgttaaacttttccaaatttcttaaaattttgcaggatgtcttaaataactataacgtacataaccatgagaaaaaatttgactaaaaaattatttcgagtgctaaaatagataagggttcatcaatatatccagttttaagggtgtgcattgtagtaattttcctgagttattagttctattattcctttatattagaaaaaagaaaaaagtaaagaaaataagtaaaaaaaaaattaaaaaaaactataaattctcgtaggaaaataaattatatatcctaatttaacaaaatataccatatatagtaaaaattgtagttttttttttttttttttttgtttctctacacatttttttttcctacatagcctaaataattcatttctccaaaaattcaaaattgtaatcctgatagaaaacttatcagagttgtgatcaccacagaaaaaaaaaatttgttgccaatatacacttctcctatgcttatgtaattttctcatatttttcaactttttagtttgtataaaagccataaaattttgtaatttcccacttaagtttatgcttccttcactagaatcactactcttatgacccttagcctgaaatagatgtttcaacaaatatggcttatcaattagtcaataattggccacttgattaatatgttttcactgtgaaagaaaacaaactgtaaatgggctttatctcaacatagtgtaatagtaaaacaacttggaaagtctcaaagactatataagggtaaaattaacattatttacttgacaaaatgacaaacatcaaagtagtattctttgactcaacacaacaaattgtttcagtattaagaggcaatgttagataaaaggcataattttcatttcatctgcagattt

SEQ ID NO: 246638 - DNA, 701 bp, Cannabis indica
tttttattattatttgggaattttaaataaatttgaacagcatcacatttatttattaccctatccaaaaatttaaaacctattctaaacactctcaaaattttcaaaaacatcacacatttatataaaatacatatttacacatataacattttcagaatattaatatatattaaaaagataaaaatcacacataatcacatataacattttaagaatattaatatatctattataaacattatatattttataaattaatctatttttacatataaagaataattataagaaaaaaaactaacagtgggagtttcgatataaatgggttcatctgagttgcttgttgtgactccgatgtaaatagcacactatagctataagaatttaaacaaaaaaaatataaatataaatacatatataaatacaaaataatatatataaatattaaagagaaaagtatgagaaatacaataatattacctagagatggcaggggtggtggtctggcaaaatctcaggcagtgaagaggaggcgacagtagtggtagtctattgttagagaggttcggacatgaagaaggtttgactataaattttaggttggggttttatttggatatggtaatgaagaagatggtgtagatgaagaggatgaaggtgacattgtttttttagatgaagaggatgaagaaggtgat

SEQ ID NO: 246639 - DNA, 526 bp, Cannabis indica
cgtgtataaaaggaggcgtctattgtggctcaaagcctcaaacttcgtaatttgtttgttgatgttaattgcagaatgtcgctgactgcctctctcaaagatatcatctattttgtgtgctgtgctgtctgctactcttctgcttgtcttgaactaccaccccttgggtcaaatttatggctatacttagcattcatactaattgatgtacattccatttattggcttaagaatatactatattatatatgtcacctttcgagtaaatataacgaagcactagatacagaactttggaatcaattcttcttcttttttgaaaatggaatcaattcaatttaattgttttcttgtatattcatactatatctatatttatactaatataatcttcattcatgtgtgtttttctaaaatgctgattgtatccgttgaaattagggtatagtcagttgcaactggtaagagagttcatataagaaagtttgcataggttgtgttgattttcttttttctaaaaaaaaaa

SEQ ID NO: 246640 - DNA, 581 bp, Cannabis indica
atctccggcactggtggtgttcgtcccaatacgaaattggagagccttggtgatgaagatgaagaggaggatgaagatgatgaggttgagaagttgattaggtgggccaaggacgctgctcgcctcgatccttctccgccctccgatgaagatgaagatgaatacgactatgaagattttgatcgtcctcgtcgtacatagtttgtatttttgctgtcaggtaataacgggttttacttgataagatgtacaatttcaaaatattattgacaccatgcccattgcataacatatttttatggtttataatgtttatacaaaggaaacagacagagagaaatgtgatgtgagaagaactagtttttttagtgtttagttctaccatgggaaaattcccttcttaataagcctcaaatcattaactttcaagctacccgttttagtgatagtaaattggatttgttgaagatatgaaaatcatgtcaccaaagatgattagagctaatatcaacatttgctttctcaacccttgtctccaagagaggaagcaaatcaaagtcctctcatatcatgaggctagc

SEQ ID NO: 246641 - DNA, 3475 bp, Cannabis indica
attttgatattgtattttataaaaaaaaaatcttattaaattataataattcatactaaaaaaaataataaacatttatcttttaataaaaaaaaataacttgtttatttttataaaactgtttaattaattttacgaaattgtttattttgagttttaataaacatagtttattatttaatgattaaaatgaatggtttcagtaataagttttcaaaatatataagtttttaaaataatttttttttaaaatattttttataattatgttatttttgctgtacatttatgaaaaaaaaacccttttaaatttctaagatgtcttaaataataatcataacaaacataattaaactaaaaaattttgtgcataaatgatgcacaattttcacattagaattttccaaaggctattataagaggccaaaacattattagggttccttttagtttcgaacgaaataaagcaaaatccatcctagggttttaaggtttctctttcactgccatcaaaccccaaaacatttcacagaaatggcggaagagacaaactccgagcatcccaacttggctgccgaggagatggacctagaacccgttcaggtttccaaggaaaccgccgttgccgatgagcccgccactaatggagaccccaactcgaagcgagccagggaagaagaaaacgatgacatttcgaagaagcagaaggtgagtgagggcgagaagtctgtggaggaggaacgcttagagaagaagctgggggaaggagatgagccacaaccgagtccggttcaattgggtccgaagactttcagttcatcggttgagatgtttgattacttcttcaagttcttgcactactggcctcctaatctgaacattaacgaggtaactatgcccttttacgactctgttctcgcaaattcgaaatcaggcattgtttttcacttgtcctttgagttcgtactttactttttcagtggggattttgtgctctgtatattctcttagcaaatacttaaccttttgctcttcctaactctaaattattttactttgagaccaatgctaggattttaacgtgattagtgttaagaaacttctgtctttggattttgtttgtttgattcaattaaggaaactagcgaatcactaaacccgaaggactgtgaaagtaatgaataacatgatattatgtgagccaagtaggtggtataatttttcatatcaaaagctttgtcttgttctgttttgagtaataaatctaatttgtgttgaagagctcgttttcatttgtcatagaaacgccaaaacatgcagtgtagtaggtcaatgatcagagcgagtgtaagaactgaagttttcttagcataactactcttcaccattgcggagttttatgtgcataagaaggaatgagaaagctataatatacatgtatagattctcatttatagtttgcttgataaaattgtgttcttctagttttgtgtagaaatcattgataggtcctgcaaactataagtggtaaatgataattgttactaatctatgatgggatgaaagtaaaagcattgtagactttcaccgactgtttgactgaccaatatatcttttatttattggcagtatgagcacatggttctacttgacttgcttaagaagggccacgcagagtcagataaaaagattggtggaggggttaaatctttccaagttcgattccatccaatgtggaagagtagatgcttcttcctcattcgaaatgatgaatctactgatgattttagcttccgaaagtgtgttgatcgtattctgcctttgccagaagacctgaaaattaaagccggtgccaataaagcattaagcggtggcaagggtcgtggtggaaggggtggcggtggacgtggtggtgggcgtggaaactggagaggcagatctagaaactgaagtatcatctcttgtttgcagccccgcatgagctggaattacatgaccttgaaagttttgaagaaggctctttttgtaagaggaataattagctagctgatttttcttcttttactgagcaaaaactgttgtagtatgcaaaattttgaaattaattggtttcttattctgaaatatgattaacatcgttatctactatctgattctagtatgttaaatcttctttgtggtggttttagaatagtgaaaaacaatgtacataattaggttatttgcgatgagatattcaagacctgtgataatgcagttttaacctcactaatactttccagtacatcaatgtgacactgaacacaagagagggatgataagaaatatttagatgtgctaagccaacgagtccaaaattataacaaggaattgtgtaattctgtaagatgtaattcaattgttccaaatgtgtcttattatctaatgatgcaagactgttatggttgtactaatcaatttataacaaagcaacaagtagagaaaaaaaaatgaagaccaccacaaaaactattcaagtaatggggaaagaaccttgcctgataaaatgaagataaaaacatagccaaattttgaataaatacctgccgaaatgcaagcaaaaatgattgatgttatcaaataaatatatataaatctatcttggtttgaggtttgaaacaatagaacattcttacctgtgcctcgctagcccaagttcataagtcaaattcaaaggaatgtgacatattcagagggaaaacaatctacattgggccaaaaagataaacataagtgatacaaatgtctccagagaaacaaaaagagatatagaatatgtccaaatgtgaatacatataaactgaagttcaaatctgttaaaaccaagatgggaaaccttttactctagacagacctataaatggtttatgaaattattatccataacttgcacagtattaactcgagaacaacaacctgaataccagtcaatacaatgagaactaaacaatataaagcagttgctaactaaaattaaaacaccaacaaacctctattaaacattgaaggtttgaacaagcacaattaattgtttctttccttgctttcaaataaaagaaatgaaaaaagcatcaagacaaagacaaggatcaaaccaatgagaaaacaaggcacacccatcaagacaaggatgaatgctgtgcaatgtgggcagagttaaacatgcacagctcagtttctttgttaaactatgaaaatagtgaaagagcttagcaattaattagtaattataagtgatgtgtagaatctaaccacttgaagctaggtcaagtggctatagaagtatgggatatttcatgatttgggaggatcgtgggattgaatcaagatactttttttaaaaaaagcccgtataacatataaatatgtaattgtgtagtgattaataggtatggaatgttaaattaaaactttagttgtggaaattgatcctcta

SEQ ID NO: 246642 - DNA, 2010 bp, Cannabis indica
actagaaacaaagagtgaaaactaaccgaaaatacgacccgaaacttagactaattttagcctaacggtggggtcttcaaagccttctggttgacacatgtatacatcttcttcaagatgcccattcaagaaggcattgtttatgtcaagttgtctaatatctatgttttttgaggcagcaatactcaagacaattctgactatagaggctttgacaactcgactaaaagtttctccataatctaatcttcctctctgatgaaagcccttggctactaaccttaatttacaccttaatttggaaggatccatttgcatttcttatgattttatgcacccatttacatcaaatttgattgttggcttctgatcttggaaccgaaatccaagttttgttcttcttaagagttgtgacctcatcatacatggctctattccatcccttctactgaagagcttcaatcacattccttggttcttcaagtattggctcccacttagcatgtctgagataagtttgggcttaaaaatgccagcctttgccctagtaatcacgttgtggggccaatgttgacaaagggattctcatttgttggagcttctgtacttgaattcgaaaactcaaggtctgcatttatggagccatcacttggatgtacttattgtatatgatactcatctgtactatgaccaactaagatattttctagtgttattgatccatgatcaagtgagtcaaagcttgaatgtgatgagtttgtgtcatttacctattttggtgaagttgctgctgtaggagttgaatcatgagaagcttgagatggtacatgagagtttgtattttggggtgcataactgagatgcttgaagtggatattagggagctgtgaccaggattcattgtgaatgacaagttatttttctaaagcttgagtgtttagaaaaccagactgaaagggaaacatattttcattaaaaacaacatttcgagatgtaaactcatcctgttgtactcaaacatttgtagcccttataagaatcattgtatcccaaattcatacaccttagtgagtgaaattgaaatttatggttttgatatggttgtatgcaaggataacatgcaactccaaaagttttaatctgtttataatctggttttatgtaatatactgtctcaaaaggtgttttgttgtgtaaaataggtgttggcagcctattaattaggtacactgagttttgaaaagcatcaactcagaatttgagtggcatactatcttgagtaaggagtgttaaccccatctcaactatgttcccatgttttctttcatctctcccattttgagcagaagagtgaggacatgagtgctaaaagtgaattccattggttctcactagtttctcaaacacttgatactctctaccccaatcacattttatgtttttgattttagtataaaattgattttcaacaaaggctttgaaatcagtgaaggcatttagtgtatccgatttttgttttaaagaatatagccatgtgaacctactaaaatcatcaataaaatgtatgtcaaatctgaaattagtgtttgatgcaactcgggcaggcccccacagatcagtgtggattaattccagcaccttaattagaggctctataagaagacaatttagagggtaatgcatgagatttgccaaactcacaagcttcatagaaattttctatttcattctttggaatttttacattgtttaactcatagacaagcttaagtactctagtggatggattgcctagacgtctatgccacaaatcattcttggaatgatgaacattggttgtgttaacatcacttgatttagacagactcgaaacactagggaaaaactgagagtgattttgactaagggctagtttgttagtgaattgatagcgaccatccctaagcactccttccaacaacagcttctttgtgatgttttccttcacaaaacaacaatcagggtgaaatt

SEQ ID NO: 246643 - DNA, 573 bp, Cannabis indica
gaatagaaagtcttgtgaaatttcaagaatatgcaagatgtggtaggcaagtttgtgaaatgaaagttaaaatacttaattgcatcagctttctaattaaaggtgaaacagtttatggttggctgatttaagtaggggtgtttatagtctattcagatactatttatgttaaatgttgctacccaattcaattaatttttattatttattgaatgtatttgatgtatatttattaatttaatttaaattcatgaaatattttaaatttactattttttggatcggtatcatccatctaatatattggattggtatcatccatctaatattttaaatgtaatatattggattggtatatactttatggacgatgatattagtttgattagatctatttgcatttttggatacgttatttttatctgtttagtaaataacttaatacaatattatttctgttttatagtttaaatggatttattttttttattgattattttgatttcaattgtagtttaataagcgtgtcattatatcaattactatattataacataataataaaaaaattaa

SEQ ID NO: 246644 - DNA, 765 bp, Cannabis indica
ttctttttattgtttggtatgcctaatgaactcttggaagtttttcgggccagtgagctttatatgcttgaagctttttcttcaacatttttttgacattttttttacaacttccacttctccatttgcttgtggtctggccacaactgaaacatttttgataattttgtgcttgacacaaaaacaattgaactggtcattgtcaaattattttccattatcaaacacgatcttgtggaagaccatgatgacatactattttctttataatgaagtccaaggccttcttggatgttactgtgttcatagcttcaacttcaactcacttagagaagtaaattggactcctccctttctggttggcaacgatcctactaaatatattccccaaataggaaaaggctatggactactcatcagggttatcactgttggtggagctctaagaactttggaatagtgttggcagtattcttattttcgggcataatcaatgcaatatctcttcatagttggcaaaaagtatccgtagtgaatgatcttctaggagagacttggtctggatgtatgatctacagagaatctgtaatgcatttcatggatgaaaacatttttgtcaattccaggtatgcacttcaggtgtggcattgacaaccctcttctacataactttccatctaacaacatgtatcttggagctttatactgaatcctccgggcagctactctatcattcgaaagctctccagcttctaggaacttatg

SEQ ID NO: 246645 - DNA, 839 bp, Cannabis indica
ctgatatgttattctgacggcaactagcatgtaccctaaacatgtatacatatatgcatatcattatactaatcttatcttatttctgaattcaagtatgctggccaacctgagtggaacaactgctcggtgaattacaggcccctaaatcacatcgttcataacatgggtaagtgacacgctaaatcacaactagggacttaggttttgaaccaaaagttttcctactgaaaactaacatggcaataccctaaactagcagggaatcaaccaactaaagctctggaactaacacaaatcgaaaacacgaaaaagtgtaggaaaccggtttctgatccggttaatcggttttatggggcctgtaaaaccggttaaccggttttacccaggtaacctaaaaatttcaaaaacctaaccaattcgaatccaaaccttaccaaaccttctagagctgcataatataccccaataaacatattccaagcagcaaaataactaaacaagctcataatcaagattcaccattaaagagccacgcttgagttctaaaactcaaagcttgctcaaaccttataacaactctcaaaatcagctcaaaacaacatatttcaccataaataaacttcaaaaaataataacaagcatcaatggcacctacagaaccctaaacccccaattcatgcaaaatctcttcacttaaagcttaagaaaacaaaagagattaggtctaagaactttaccttggattgaatctctaagaaccaacaacaaatcaccaaaaacaagctgaggagacaccaattcttgctggttctccaaggaaattcgagagagagaga

SEQ ID NO: 246646 - DNA, 624 bp, Cannabis indica
gaaggagtgttggcactaaagaatattgatgactttgcccggttaacttgttgtcccgaggctacctcaaacaaatgtaatacacgaagaacattatcagcctcattctcagttgctcgacaatagacgtaactatcgtcagcaaaaagcatatgagatattgtaggcgcaccattagcaaccttacaaccccgaatatgaccactcctttcggcccttcttaacaaggatgagagcccctccgcacaaataaggaacaaatagggagatagagaatccccttgtcgaatgcccctactcggagcaataggaccaatttcatgtcccccatgtactatcttgtattccaccgtagagatcgtgtgaaaaatcagttcaatgaaacggttatgaaaccccattttactcatcatagccattaaaaatccccactcaatacgatcgtaagctttacttagatcgagcttcagagccatataaccggtttgccccttgcgttttcttttgaagtagtgcattacttcataggaaaccataatgttatcggagattaaccggccaggaatgaacgctgattgattctcagagattatatgtggaagcacaattttcaaccgattggcc

SEQ ID NO: 246647 - DNA, 851 bp, Cannabis indica
taaaggaagtcgaaagactgtgttgtggttttctttggggaattgagggcaatagatgcaagcttcatatcccttcttgggaaaaagtctgcttgcctaaaaagtatggaggtcttggttttttggatggtcctacctggaatagagtcgttttagccaagtatatctgggctatctctgaaaagcatgatgtgctttaggttcgctggattcatgctacttatctgaggaaatgtgacttttgggatacccctatgaaactagactcaagctagtattggaagaagctttgtgcgttgaggcaaagtttctccaaaactcaaatccttgctgctggttgtaagggtaaattcaaaacttctttactctataatagcaccatagttcaacaccctgttttgtattcaggcacagtctggaatagagttaacttgcccaaacatagatttatgttatggcaagctttaaactctcatcttctcaccagggatcttctcactcgatttaatattcccttggagacgcttctttgtgctgtttgtggtctctctaatgagagtcatgcccacctgttctttgagtgtgacttttcaaggaaagttacagatgctatcttctcttggctgggtttttctgcatggtctagagactttggaagttggactacttggttggctagcaagaagtccggtgttattgctgctctcattacagctacattgactgcttgtatccaccacatttggtctaaccgaaacatttgtatttttgaaggctactttaaacttgttagtgttacagttaaagagataaaaacaggttgttgtatatagattatactatgtttataa

SEQ ID NO: 246648 - DNA, 756 bp, Cannabis indica
aaaaaattgtatttaataaaagaaaatatttaaaaaagagtttctaaatttttttttaaaaaaaaaattgtgctttttttgtttaataaaaaaattgtactttttttgtttaataaaaaaaattgtatttaataaaataaaataccaaaaaaaaagtttcaaatgtaaaaaataataaataaaaaaaaaattgcttaataaatttgtaatttgagaacaaaattgggaaatgtagaatttatatattttcaatttgaggataattttagaaattaatggtatttaaaaatatattgtaaaagggaaaaattattgaaggactaaaatactattggacaattatttttaataataattttattggagaattaatttaaggtctttaattaaatattgtggtattttatttttatatttaatttggggtctttaatcatatcacatttttatttattaaaatacaataaattttgttgataaaatttgaaaggtataaatagaaaatgataaaaaaaaatcctatggcatgtttacttaaaaggcatgggaatgaatggtatgatattgattcccatacaattgtttactaaattttggaaaggaaaaaactagtgggaccctcacaaattagggagaaaacaaagggaaaggttctcctcccatttttatagggaatgtctttccctttccttacttaatttattttaattataattttattaattaaaaatgaaaaagacaaatataccccttaaa

SEQ ID NO: 246649 - DNA, 658 bp, Cannabis indica
tgtaacgagtatggtgtggtatgggattcattcaaaatctctttcttgatagcttcatctactggaacacaaactctacctttgtatctcaataatccatctgatgaaattgagaaatcctttattgatccagcctgaaacttttctttatactctactaatactcaatcactttgctgagaagttttgattctctctagcaaatcaaagtgtaacaaaatgttggctaatttctcaatcacaaactcaattttcgctctagtcatatctctaactaattctagtgagatcttccacaattcattaacttgcctcagacctttcagacttaaagtatcagctaccatagtttcttttcccaaatggtagaggatcttacagtcatagtctttaactagttctaaccatcgtcattgcctcatatttaaatccttttaagtgaaaagttgaggcttttatgatccgtgtacatttcacactttttgccatacagataatgtgccaaacttcaaggcaaaaactactgcttccaactcaatattgtgtgtgtggtaccgctgttcatactccttcaattgcctagatgcataggcaataactttatcggactgtgtcaaaatgtagactaacccttatttagaagcatcacaataaatca

SEQ ID NO: 246650 - DNA, 2892 bp, Cannabis indica
aggtctatcttgatcgcaaagaacccctcttttccttgcttccgattgaaggagtggatgatctcttgcaccaaaacattattatcttgaatactccttcctggaacgaatgcggcttgagtaggacagataagagacgggaggataggcttaattctatttgcaatgattttagaaatgaccttgtacatcacattacaaagagaaatgggcctaaactggtttggtctcttcgagttttgcacttttggtatcagcaccacattagtagaattcacacccttatgcattcttcctttgacgaagaaatcagcaactgcgtcacagaaatcctctccaactgactcccaatagtgtttaaagaataaaacggacattccatcaggtcctggggctttatgattactcatggcaaacagagtatttcttatttcttcacgagatgggcacccgacaacctcgacctggttcgcaagagaaatcttttccttgaataaatgaccacaatctacctgccggtcataattagatccagagaaaacatctttgaaaaaatccaagaattcctgaccaatcaattcccgctcataaatccagacattatgtttattcaaaatgcactcaatagcatttctccttcctctaatagcagcagagagaaagaaaaattttgagcatttatccccatcctttagccacgcaattctcgccctttgtttccagtacaccgctttcctagttctggcttcattcaggttacgtctagtatcacattctaaattccaatctctagaaccagcaggcaactgttgtattctatccagtttcaactccaaagctttaatttcctcatcagttttcccaaactgcgttctcttccactgaagaagagccacccgagtagcacctatctttttaaaaacgcgggcgggagcccaggaatgacccaccgaaacccaggcattggcaacaacaaggttgcttctagcatccctcgtccaactttcctcaaacttgaaacacctcttaaatttaggcacagtccctaccgtatcaagacataacggcctatggtcagaagtactcgtctggacagaacagagagtagctttggggaaaaggtgaagccaggctccattcactatgcctttatcaagggccgacttaacatgtctctcccccgaccggtggttatcccaagtcatcatgtcccctttaatatgcatattgataaggccacgtgactcaatttataattccatttgacttttttagttaaatatgaaataatttcattttcagattatagggaccaatactatagagggttggtaatatgaaagataatgtaaaagagagttgattaatactctcaatttataatagtgcagttcttttagtagggatactttatcaatttagtattacgatcgagtcctttgctttggtaaatgctgacgcatcttcctaatatatacatttctttattttttttttcctctcatttgtccctgattttatttatttatttatttatttgataaatttgccctggtattttgatttcataaaattgagaaagaaagaaaaagataatttaatggtgcacaaaataagaattaaagaatacaacccatagacattttcagtacatattagtaaaataaaagaaaaaattacgttaaaattgggatcaaatatagataaacatatagagctcgaaaagagcattccaaaaatattaggaacacccaaattggagtccgaattaaaaagttatgaacaatcgaaaatggcattcaaatatgcccagatactacaatgggggctgcagcacacaaggagggggtcgcggcacctgggttgaaaaccttcaacccaggatttttcctaggggcgggccgcggcgctctaagagtgggaccggggcgcctgggttccaaacttagaaaccccattttcagcaacgaattcaagctcaaatgcacaccacatacaaccaaacatgcacaaaccccaaattcaactatcacagattataacaatcacaacaaagaactaaaacacataaatcaaactctttccaacaccaatatgagcattaaagtcaatacaccaacaatccatactaagctccaaacttgagctaaaattatcataattacatactcaaggcttaaacaccaaagtcttatatatgacccaaaatttcagcatgaactccaaagaaatcaaacccaattacagaagttaaaactctaattaatcaacctaataaccatacaagataaacaaaatgcaaaacacacaacttccaagctttatcagcataaaaatcatccatttacctcaattcatacaacatgcatccaattgccaacaacactaaataccaacaaataccaccaaaatgttcagtcataaaacacaaagtaaagaggtaaaaaactacctcaagttcttcacaacacaagcttcacaattccaaatcaccaagcacaaatcaatcaagtccaatttgaagagaaatggtaaaatgagaagttgagaaagaaatagagagggttcggccagggttggaaataaccaaaaaaattggtttctaatttttgtaaaataattaattaattggtcaaaagaccaaaatgcccttaggtccaatacaccacatatgtatataatcatgggaaaaattgtcatttcatcatattccacactccaataaatttcagattattcaactaattataaaatgccaaaataaaatcccaaaaatgtaatttagccccgaactcggttcggcccgaaatatccagttgtgactataccgcgccgacttttcagaaaatatctgcagaaggacaaaacctatatactatataataatatagt

SEQ ID NO: 246651 - DNA, 824 bp, Cannabis indica
gaacttgaaacaaaggaaagcaagtgtaaaactgtcgaaaaagtaacaacaaagaagaaaaataactcttaaatgtggtccaaaaaatagactaaaaatggtctaataaattcccccaaactaacttcttactcatcctcgagtaagattaaaaactaagaaaaacacatgaactaataaacaactaatcaagcttccatttaatcaaactaccattgccacctgtgaaacgccaatcaattaacttaactagaatttcaattccaaaattctaataattaattcggatgctctctttgaaaaacaatgtatagatgcaaattaaacttatgtatttgaataaccccatgccattacttagatgtgtaacaaaagaagctacacggctcctgtccaaagtacatgatggattctgtggtaaccacacagcagggcaaagcctatcaaagaaaatactaaggcaaggatatttttggtcgaccatgatggaagattcaaaggcttatgtaaagaaatgtgacaaatgccagaaattttcgaaaatacctcatgcaccgcccaacaaactaactcagatacaaagtccttagccttttgctatttagggaatagacctgatcagacagttacccaacaataagggcagagtacagtatgtagtgtttgcagttgattatttcacaaagtggacagaagccgagcctttggcaacaattacatctaaaaaagtattggactttgtggtgaagaacataatatgttagtttggactcccgcacaaaattgttttagacaatggcaaacaatgacaattacttaaatgg

SEQ ID NO: 246652 - DNA, 1038 bp, Cannabis indica
ttccatttaatcaaactaccatttccacctgtgaaacgtcaataaattaactttactagaatttcaattccaaaattctaataattcggacgctctctttgaaaaacagtgtatagatgaaaattaaacttatgtatttgaataaccccatgccattacttagatgtgtaacaaaagaagaagctacacggctcctgtccgaagtacatgatggattctgtggtaaccacgcagcagggcaaagcctatcaaggaaaatactaaggcaaggatatttctggccgaccatgatggaagattcaaaggcttatgtaaggaaatgtgacaaatgccagagatttttgaaaatacctcgtgcaccgaccaacgaactaactcagatacaaagtccttagccttttgctatttagggaatagacctgatcggaaaattgcccaagggtaagggcagagtacagtatgcagtggtcgtatttgatatttcacaaagtggacggaagccgagcctttggcaacaattacatctaaaaaagtattggactttgtggtgaagaacataatatgtcagtttggactcccgcacaaaattgtttcagacaatggcaaacaatgacaattacttaaatggtcaatagagttgggtcagtacgaaataatcttccaacctcgaacaacagttaaagaacaggccatagtagacattgtggttgagtgcacgggcaaagaagaaagcaacataagggacaacaaggaaccagtgcaatagcccctgctgaacaacaacgaagatagacctacttggaaattgcatgtaaatgggttggctacagaccaactttccagtgcgggaattgcccttgtcacacctagggggaaacttctacacggggtagtcaaatttggatttaaagcttccaataatgaggcagagtatgaagccctcattgctggcttaaaacttgctcgggagctgcatgctgaatacattgaggtctgtagtgattcgcaattggtagtgaatcatgtttcaagagagta

SEQ ID NO: 246653 - DNA, 1066 bp, Cannabis indica
ccacattcctttgctttccattttgtcggtcttagaggaaccccaaggtatttgagagggaactctccttcaagaagattcatttctgacagcataacctgttttccttcttctttcactccaccaaagtagagttgagatttacaattgtttatggctagccccgaagttgcactgaattcatctagcacctctttgattgctcggatagagcatatatctcctttacagaaaatcatcaaatcatccgcaaaacaaagacttattaacttgagactcttgcataagggatggtacctgaattttgactgattcactgctaagtgaagcctcctggttaagtactccattatcataacaaatagaagcggggaaagcgggtcgccttgtctcaatcccttcttgcctttgaaacttccttgaactcttccattcaaaagaatcgagtacgaggtggatctcaaacaagtcatgatccaagatatgaacctggttggtagtttaaaaccattcaaaagatcttccaagaaatcccagttgactgtatcatacgctttgctaatatccaccttgagagtgcattgaggagatatattttttcttctttagttcttcaagagatcttggagaatcataacatcgtgcgctatagacctcccttgcacaaacgcaccttgattctgatctataattcctggaagaacttgagagagcctcagaaacaataacttggatatgcacttgtacacagtagaacaacaagctattggtctgtagtctatagcttttgtggggttctccatcttggggatagtttaaaatattatatattgtttatttatataattttaatataaattttaaaataagttttaaataatagaattagatgttccaatataaatgtattatgtgtacatgagtgtacacataagcagtttgtgacagttaaccagataacaccttaagtttgctaacaatttagtaatttagagagttttgataactctagaaattagagttatttttcacattttttttagctaaaattggcttagttcttaag

SEQ ID NO: 246654 - DNA, 3457 bp, Cannabis indica
ttaaaataagctctcgatctctcggttcaaatagatcatttagaatctcaatatcccactccctaccatcgatcgacaataagttctccaccttagcattcgacagacttggatgtgtagatataaccattggatttacattatcgggcaaccacggctctcctagtacccgaatgtttcttccattgccaacagtccatctaacgccacttacaaccagtttttgggcttccaaaatgctgcgccaaacatagctcgggttagagccgagagatgcagtaaggaaagaaccattaggataatatctagctttgaagatccgcgcaactaacgaattcgtgttaacacataaccgccagccttgtttccctaaaagagccatattaaaatcccttaagttccgaaatcccattcctcccttggttttgtgatggcaaaggcgtttccaagacatccaatgaatacccgaattagatgaagcagatgacttccaccaatagcgagccattaaactctccatttcagttgttatttttgtaggaatcatgaagacgttcatagcataacttggcaaagattgagctactgctttaattagcacttctttccccgctctagagatgaatttggcactccaaccttgtaacttctttctaatcctttccttcaaataacccaaagcagcagtcttgtttcggctcattgaactaggaaggcctaagtaaagacttcccgctggtgcaattcccatagccaaactcgtacaaagaacattccgtaagttatcctctacattggaactgaaaaatatagaggattttgcaaagtttaccttctgacccgaagctagttcaaacttataaaggatttccttgatacggcgagcttcaacttcattagctttgcagtacaaataactgtcatcagcgaacaacatatgagaaatccttggtgcaccattagctactttgcacccatgaatcaaacccctttgttcatatttacgaagtaaagccgtgaggccctccgcacaaagaataaagagatatggtgagaggggatctccttgacggatccctcttgatggtacaatcggccccacttcaaagtttccatgcacaaatttgtaacttgcagacttgacacaccgcataagaagctggacccagttctccataaagcccattttccgtagcatagcttcgagaaacccccactccacacgatcataagccttgctcatgtctaacttcaaagccatatacccctccttgcctctacgttttcttttcaaataatgaaggatttcaaaagaaaccaagacattatcagaaattaaacgtcccgggataaaagcactttgattttcagagaccacgacatccataaaaggcttcattctattaaccataactttagtaatgatcttgtacaacacattacataaagcaatgggacgcaaatcagccataacctcaggattcttctttttcggaatcagaacaacattcgcattaccacaaccattatcaaaaataccttgttcgaagaacttacggacacagtgaatcacatcatgcttcacgataggccaacatttttgataaaaagccggagtcatgccatcaggtcccgggcttttgtctggatgcatttggaaaactgctttcttcacttcttcttcaacaatcggctgccccaactctaaattcatccagtccggaacaacattcgggacatagtcaattatctcttgacaacttgtatttgatgaagtgaataaaacattaaaatagttcgcaacaacctgaggaagaccattttcccaagtaacccaattaccatgctcatctcgcagcgtacttatcaaattgttgctcttccttgtactcgctgccttatgaaaataattactattttgatcaccttcctttagccagaattgctttgcacgctgcttccaatagcactccctctgatcaagagccttgaaaagattttcctttgctgccttataattttggattgaagcttcgtccctaccatgattaagtctcttcagatccgctttgagtctctttattcgatgattaagagttccagtgatctctttaccccaactactcaacttttcagcacacaacaaaagcttctcactaaagcttcggtcatgtccttcttcccaacagtccctcactatctctacacaaagtggttcctttaaccatgaattctcgaaacgaaaccgacgaataggtgtaacattaatctgcggcttgggctcgagaaagatgggcgtatgatctgaggttgagtaatccaaattggtgagagaagcagttggaaagatctggtgccacgttgaagaagcaagcgctctgtctagtcggacttcaacccaattattcgatccctccctttttcccaggtaaatggatgcccatgaatttcgatgtccaccaaatcacattgttgcagagcagtattgaaccccgtaataagaccttgagggtacggctacccctctcttatcctcttgtcttaccacattgttgacgtctccaataacacaccacggtaaatcggattgtcttgctaaagtacgcaacaaagcccacgtttcatgccttctacttcggattggttctccataaacccccgtaagtcgccaattaccaaactgagttgaatgaataaccaaatcaatatgatttttgttatagcccaacaacatgccatcatctttattcttccataaaaaagcaactccacccgacaacccaatagagtcaacagaaaagactccttcaaaacccaaaagattagctaaactaaccactttagatttttgacattttatttcacacagaaaaataaaatgaggtctcttttgagaaacaatttctcttaggaattgaacagtccgttggttcccaagcccccggcaattccagcttaaaacattcataatgattggcgggcttggaaaccaaggcccgccccaacaaagttttttggactacccgaagagcccactgccacttttccactatcacacacaacatccatttcagtaaaaataatgtcttcatgggctttattagttacctctatttcctcttcattcaccagcccactaccatcaaccaagcccattctcctccttttattatcaataaaagtcagcccttcatttgaattattttcccctggcgccaactcactttcttccccattcaattcccttatttcaagggatttttctttccctaaatgtcgtgcacctcttaactccccataaagatttttatcaaaattggcatgattattgggtaataaagagtcacccggatttctagcgattgggatttgatgatgatcggctcctcttgtcccctgagacgaaccaccgcctgaactgttgctggtaaaggcccttgccgccgggataccagtt

SEQ ID NO: 246655 - DNA, 1405 bp, Cannabis indica
ggcattggacacgctgcaactgattgtaaaaaagatggccctgcaaagcagcaatgggtggtcaaaaaagatagtagaaagaccatggaaactgatgctgatggttttactaaggtctcaaaagggaagacaacaagcagtaaggagaaacctcaagaagtggctgctgtaaccgagattcacaatgcttttcaggcccttaatgtcgaagaaactgctgttcctggtgttggaaatttggcagaaggtagaaatgatatatttgtaacagagttagtacatgaggacaacataagagggggggggggatccctctcttttcaatggataggctactatgttggaatgtccgaggagccaacaatcaatctaaacaacaattaataaagcagtttattaatacttaaaaggttgattttgttggtctccttcagactagggtaaaggctccaaaacttcgagccttgtactctaatgtttttgatggatggtgcttctcttctaatatttcttggcatccaggaggaaagataactattgcttggaatccctatagatttactgttgacatcctcaaatatactagtcaactaatgcatttgaagatttcaacagttgagggattcaatagctttctcacagtggtttatgcttctaacagtcggggtgaaaggaagattctgtggaaggacttatgtgaactatgctctgatgaaaattggtgtttgataggagactttaatgacatcttagccaagtaagagagggtggggcatagggtgaggtcctatcctggctctgactttcttacttgtgtgaatttctataaacttgaagatgttaaagctagcgggaattttttcacttggtttaacaagcaatcgagaactgataaaatttattccaaggttgataggatcatggcgaatcaatcttggatcgctaaatatgagcaagctgaggttgtttttctcaatgagggtttgtttgatcactctccagcaattttatctctacatcctcaaatgggtggggggcgggggggggggggaaagccttttaaatactttaggatgtggaaatcccatcctaagtatgattgccaattaaaggaagtgtggaacatgagtgtaaggaccgtcggacaccatctatttctccagtggaatgatattgttcgctttgggccaagccttcacgaattgtttttgggcaccttcccaaaaggcttcattccaatggagatagtgttcatccttatatacccaagatccttcccatttctagccaatgtgggtcttggatgtacaccaacaatgagtatcctggtaataaatgtttcagattgtctctaaatttaagcggttcaaagcaaggcagaggcgataaacaagactagttctct

SEQ ID NO: 246656 - DNA, 848 bp, Cannabis indica
aaaatgttgaaactcaacaccactccaaaagaataggcgctacccacatgatcttttagagtccaagcatcttcaccaatacgaacatgagtcccatcaccataagccaaagaatcccttttatctataaatcccaaccccaaaggatgctttttcttaaaaacgaagctctttcagtttcctccacatgaatcatgctacttgtattaaaatagaagtctttcattaccttagcagccaaaaagtcaagaaagctgtataaccgagcagcttgcttggccaataaagattgattaaagagaaacatatcccaaaagcccatacatcatctgacttatgccaacacaagcgagaccaagtgcatcattgtatttttgtttatcaaggtcctcccccacaagaagcgagcacaaagaagatgaatttcattaataatgcccacagggattcgaaacaactccatagtataagttgggatcgcttgaatcactgacttcagaaggacttcatggccaccaaaagaaaaaaagtttggacttccaaccatacaacttgttctaatattcgaccaagaataggtctactcctagtctactcctcgagtgtatttattttatataatattttttttactggaaaaggagatcacgtggtgtaaatctctttcccaccccattgatagctttaacaatctcgggttatataccttatttaatcttagttgagtcatcgatatgcacctcaagagttctcatcccattaaagatgacgcaaactagtctcctgaaagactaaacataatctgtggaatttaaactcttgaccaaaaataaaaaaaaaaaaaaaaa

SEQ ID NO: 246657 - DNA, 1250 bp, Cannabis indica
tgcctggatagaaattaatcttgagctccttcaaccttgtgtttggtgaaagcatttcgagcacaccctctccatgttttggatcaacaacaacatcattatcactccattccaactgcaatttctcaagttgcttcttctctagtacaataacttgatccagtgcttttgtaatgtttgccacattttctaacttcttaatggaaagctctccatgtagactttgaagttctgccaattcttctattttagcgccactatccttccccacaacaaaagttgtcaaccattggagattcgtcaatttacttatttgacatggcatctcaactaggctatctccaccaataataagatgtctcaaattaatgaggtgatgcatatctttaggcagagttcgaagacaatcataatatcctaatttcaatgtttgcaaattgtacaatttagttacaaattcgggtaaaatcacaattccagtctgagaaagatctaaatagcgaagatgttttaattcaccaattgaatcagggaactcaaacatataaagaccacgaaaagatagaactctcaaacatttcaacatagatagcaaattctgcattgcttccttggaaaaaccgatttcggatgaacttgaacctaataatgttacaaaggttcgcaaacgtgtagctccaaaatcatagctagctatcttattatcattataaagttccctgacacatccaaggtgacgtgtcttctcctcaagcctatcaatgatgtcagtttgctccaacaaacaactgtattttccagaaatagttctagccaaatcaactataagatcatgcatgacaaaacaagacctaaactgcttactcggttgcaaaaatgaaaaagatactaaatcatcaaaatactcacgaccaacttcttcgattctcctattcctcttggaatactgcacaagattttcggccatccacattaacaccaactcatctcttttaaatccatagccttttgggaatattgaacaataagcaaaacaacctttcaagtgtggaggaagataaaagtagcttacttctaatgcagcaggaagactcctgctccttttatcttggagctcccaaagattactattggctatttgtttccatttctcagcattatccgttgatctcaagaggcctccaagaactttggcagctaaaggcaaaccattacattttctagcgatttctctgccgatacgttctaat

SEQ ID NO: 246658 - DNA, 695 bp, Cannabis indica
aacaatctacccaaagtaactttttatgctgtaagagttcacagagaaatttaaagaattaaaataaatgtcatgtctccatttaattgcttagttgtggtctgtctttcggttgtgacctttttggccacgtttgctgcacttattatgttttttttttcatccacctataaactttcttttccttggtcttcctgatctcactttctctattcaggcatcatttatctcgttgaatctgcaacgtcttgatgaacaacttgcgaaggttgtttacgtaagttcaacatacatatacattttcccactgtttctagctgagaaagatgtttcctttgctgctcatgttatccttgaaatagttttattgttcaaatcttcaaattttaaagtagggtataccatacttatcatagtttgctgtacagcgtgcaacagagatatcaaaagcaagcaactctcgggaaagtgaccaaattcctgcaaccaatgatcgttcaacacttaaagaaatatctgaagatttaattaattttttggcgaatatttctgaggttaaagcacctggcagtcttcatccgtctctgggattttgtgattcatcaaaacatattgatgatgccaaatctttaatgatgctacaaaaaattacattttgagaaacagattgtgtcttctaaattttctataagtaa

SEQ ID NO: 246659 - DNA, 670 bp, Cannabis indica
cctacacagtctcagaatcatcccacttgaccttctccaagcggtgtaagattgcacaacttacccggtatttccccttacggctcacgggactattgactgtcacattacctctcatcgcttccaagttcattttcatcttaaagtatttcaagtgagatagagaggatatttgttgcctgtatcgatcttccatactggcattttaaacttgggggtaggtcgagagcattaatttatggtgaaaagggtgatcctcttccccgattaagttcaagatctgtgagttttgggccggtcaggctttgtacaatgcttttaagctgatctatttctgctttgcacaagtagatgaacttggccagcctattcaccaacctgagtcacatgatctcttagaactagacttgggacataattgtttggctggatggtaggtggaacattttgcctgtccaatccccttctacggttcaaattttttctgaggtcgtgtacggtacctagtcagttgatgaccaatgtgccaaggggtttctatgtctggcaaacttgattgacatattaacttgatacgttggtcagagtatggttgtttagctgactatttcctctcaaggggcggtctggtaaaatctgtcggtctactgtttgtcccacagtttaaacc

SEQ ID NO: 246660 - DNA, 520 bp, Cannabis indica
atttcaagtgagatagagaggatcttcattgcctatatagatcttccatactggcattttaaactgggggtaggtcgagagcattaattttttatgaaaagggtgatcctcttgcccgatcaagttcaagatttgtgagttttgggctggtcaggctttgtacaatgcttttaagctgatctatttgtgctttgcacaagtagatgaacttggccagcctgttcaccaacctgtgtcgcatgatctcttaaaactagacttgggacatagttgtttggctggatggtaagtggaacgctttgcgtgtccaatccccttctacggttcaaattttttctgaggtcgtgtacggtacctagtcagttgatgaccaatgtgccaaggggtttcaatgtctgaaaaacttgattgatagattaacttgatatgtttgtctgagtatggttgtttagctgactatttcctctcaaggcggtctggtaagatctgtcagtctgctgtttgtcccacagtttaaacc

SEQ ID NO: 246661 - DNA, 1078 bp, Cannabis indica
agattttcacatatacctcacgtaccgccaacggaactaaggatgatgacctcgccttatccatttgctatatgggggattgatttaattggggaacttcctaaaggacgaggaggatccaagtacgcagttgtagtggtcgatttcttcactaaattgactgaggccgagactcttgtctccataagctgcaagaaagtcctcaactttgttgtcaaaaacattgtttgtaggtttggaattcccagtttgatggcgacttgttcactgagttccgtaaaaggaagaagataattaagagcttctcgtctgtatccaggcctcaagcaaatggaaaagttgaagctgttaataaaaccttgaaggatattatcaagaagaaattagatgctgccaaaggcaggtgggtggacgagcttcctcaggtactttgggctcacagaactaccgagaagacaacaacaggacacacttcgttctcgctggcattcggcttgaaagcaatatcgactcatagaagagagtttatgatcaagaagaaaaccaagaacttctaaaattgtccttggatctgcttgatgaaaaacgaacagagtcgcaagtcactaatgcagcgtatcaacaccgagtcaaaagaaacttcaactaaaaagtcaagaaaaggctattcaatgttggagacttggtgctaaggtgagtatttgcgaacatgagagatgcgtctgcagtagtaggaatcaaagtttacaaattttctcggctaaatggctcgctaataaagaactactggaacgtggaacattggggaccctactacaagtaaattaatgatgtaactagcattgctaacgtaatattttaaactccagttatgaataaagagaatcatttcttttattttagtgattacattacttaaggggcatttgtgtatgattaaccagaattcatctggaaatacatgatataatgcaaacccacaactttacaaatttctttaaagtttttggtcaaacctttctgatgagaagggcataacaccatcataactttttatttaaacctgtctgacgagaaa

SEQ ID NO: 246662 - DNA, 1655 bp, Cannabis indica
ataatttatcctctagggttttgagcttagcttgagatgtgttgtctgtctattttgttcctatatgttatgttagggatagagtttacatttgagtttgactttatattattactatattgagttatgtatacttgtatagggttactatatgtattttgggtcacaaattaagttaccatatgagttccataaataaataaattaccatatgaacattaaactggattttgattaatattgttgtttttatcgaaagagtaaaaaaaaaaaaaaaaggtttttcaaccaaataaatatctactaaagaaattgccattttgtagaatcaaatttaataaaattaacacaaatacttactcattttggaatagtgaattttataatttaactcatttgagaaacataaagatctgtccaaggtcgattctataatttagtaggtcttaagaaaagattttttttttcgaactattttttaaaaattactaaaaaaaatatgtgtatatataaaaaaaaaaaaaaaattggaagtcctgagttagatgggccttaagcgtaggccaagcttctcttaactcagtgtcaatcttaaatttatcaattctcattagaagatcaaacggaaatcaagaatgtatagaagtcggggctacctcttttcatgagcaatgcaatagtgtcacggggaatgagcacttggtaccgccaaaagtgaagattatagtagttgttttgaatctaacttcggcgaaaaattaaaatatcttgtttattacaggttgaatttcaaataagaacaaacattttttttcattttcattttttttttctttcaagttgtaaaaaataaaaataccctttttgcccttgattttttgatacataaaaaatggatttaatttcttgtgttgttgggtgagctgtgatgtgagggttgtctaagggatggggtgactgccatggccacattgcctttcaaacccataaaacactattgagtaatgaagttagtaggaatgaaatttcagtaagataataataactcacaaattagattttacctaatagctatccctatatataactcattattattaatcaatataatttattactaaatacatgaactgtatatatatctacaattacttataaataataaaaaatgtatttactaacacttttacaagtacatctctctatggaccacataacatttctaagaggttttttttttcttagttgtagcttgtagagcccttgtacttgtatataattacattaattataatatatatttatatattgggaagaaaaaaattgagtgatgacattatttttaatcaagaatattaggtttcaataattttaaatcaaaataataaatttaaattattagttgtgttattcgtgtttttagaaggaagagacgtgtaattttaagattatttagttcaactactaaaggtccaatcaaaataatgaatcaaactcgttaccaaactcaagtcatcctgatgatggacaaaagactcatccaggcgagataaagatccaataagacaggtctccagatagtatcaagcagtgcttctgaaagagtaattgatgagtccttagatgtcaaagcttagtgtctcactcatttatta

SEQ ID NO: 246663 - DNA, 589 bp, Cannabis indica
tcacctggttcaaaagcaatcgtgacgttgggtaaaaaaaaaggctttgccacaggaacaaaggacacactggaaggttccagccagactgcttctcccaagaatcgtcatttcccttcgaagatttcttacaagaaacacctgtagtgactagcagtatcttcccattgggttctcactacgtgttccctaaccctatcattgttcaactctaatttagaggtgggttttgaagtgttgggtttatatgggatggctgattttgtaaggaactcaaactctaaaacttctggatgataaattcctgaaccagagtgggacattgctgtaggcaaatagcagtcccaatccctggagagaattttatcaaacctgaaggtaatgagttggagatcttaaaacaacttacatatgacatgaaccctagtatgaacctagatacagtttaaaccctaaaaaactaccaaaaccagatgagatgacaacgatacaaaaaaaaactaagtaacaaatccacaaaatataacaaacatgagaaagaagaaagcaacttacggtttggagttagggctgttgggttttgtgccct

SEQ ID NO: 246664 - DNA, 870 bp, Cannabis indica
gtttagggtttaaggggtttaggggtttacggattaggggtttacggtttagggtttaggggtttagggtttagggtttaggggtttagggtttaggattaagcattaagggtttgggttttagggttatgggtttagagtttaaagtttaggatttagggtttaggattaagcatttagggtttggggtttatggtttaggattttttagggttaatagttttggtggtttaatatttacggtttagcgtgaggggtttagagtttatggttttgggtttaggcttcaagattttttgggtttagggtatagggtttagcggtttagggttaagggtttagggtttagtggtttattgtttacactttagcgtatacggtttaggggtttagtttttactgtgtaggggttagggtttattgttttgggtttaggattaagggtttttagatttagatttagggtataggatttaggatttatggtttagggtttaaggtttgggacttagggtttagggttttgcatttatggtctagggtttatggttagggttttgggttttggatatagggtttagggtttatggttttgcattcaaggtttagggtttagggttgagtgtttaaggtttagggtttatgatttagtgtgtagggtttacggttgagtgcttaggatctatggtttaccgtatggggtttagtgttagggtataggttttgggtttagggtttacagtttagggtttaggatttagggtttgggatttaggctttagggtttaggatttagggtatagggtttagggtttatgtttttgggtttaggtttttttgggtttatggtatagggtttaagggtttagt

SEQ ID NO: 246665 - DNA, 527 bp, Cannabis indica
catggttgtggctgcagtaaaagaccttcactcagtgtgcccttcaaatacctgagaagtttcttacaagcttcccaatgaggaactgtaggagctttaagaaactggctcagtttgttcacaatgaaggcaatgtcgggtcttgttaaactcaaatattgaagagcaccaactgtacttctatacagtgttggttcagcaaatggttcaccatctgttaagctgagttttgtagatgagctacttggatttggacaaggtttagcaccttccatgtgtgttcgaactaatatatccgtgatatatttggactgagacaagtgcataccagattcagttctaactatttcaactcccaagaaataatggacctctcccaagtctttaagtgaaaactggttgtttaattcctttaccaacttagagatcaaaacttgatttggacctgttactaatatgtcatcgacatatacaagtaacacaacttgattatctcctgaaccacggatgaacaaggatgtatctgc

SEQ ID NO: 246666 - DNA, 712 bp, Cannabis indica
tcgtaacttggcaaggttggccctaacctctttaccaacctcattctcttcatccatgacagtcttaatcgcttctaagacactttctttagtaaacaacccttcttcttcacttttctccacttcaataccagccttgaatgtcttcccaagtatccttgcattaaaaatctgatcacctctattgggtattaacacaagctcacatttggatttggcccccaatgcctcaaataaagatccccaaccacaatgtgtgacattgcaaccaatagaagggtggttcaagatttgtggttgctgaatccaacctccataaaccactccccttcctccaattcgctcctgaaatccatctggtaaagcttcctcaatagaattagcccctgaaggtgttcgtaatgaagccaaaaaagcgaacccagaaagctccaaacccaacaacaactcttgaaattgagatttggtcaagatcacctcacttccaaaaccacagtatatgacagagttggggttgaattgacctagaaagtcaacccatttcttttctagaggttcacttggtgggtctggtataagtggtcctgtaagcaaaataggcttcctaaaatctttttcaaggaagtcaacaaatatgccatcaatttctctacaagccttgatacctataacatcacactctgcaagactcatatacaagcggtcaaataaa

SEQ ID NO: 246667 - DNA, 670 bp, Cannabis indica
caaatacaaatggtttttcacttaccgattgaaaagttaccatctttctcatgcagtcaatactagctgcattcttggataagaagtccatccccaaaatgatatcaaagtctgctgaagataactcgataagatcagtacttaactccctatcatccactgtgatcggtacatccctaatccacctcttggagataactaactccccactaggtaaaagggttcgaaaacctaattcataactataacagggcctacctagtttatcaattacttttgatgccacgtaagagtgtgtagccccagagtcaaacaatacagtaaaattagagttatttatgaaaagctgacctgtaacaactgatggactagcctcagcatctgcatgtgtaatggcaaatacccaggcaggagtgggtatgaactccttctttggctctccccttgtcaactgagggcagtccctcttaaagtgtcccatcttaccacactggaagcaggaattcttgttacattctcccaggtaatgtttcttacaacgaggacattctgggtacgtaaatccaccatgacgaccaccactctgaccacgattcccgcggaacctcttgttctgcctaaaattgcttggtctgaaaggagtcttcctttttgaatcaaaaattgaatc

SEQ ID NO: 246668 - DNA, 637 bp, Cannabis indica
aaaaactgagaggcatattagcctgagctaaaagagtaagccccatatccaccacatgtctgtgtttacgctcaacccgaccttgttgttggtgagtatgagcacatgattttctaagggtgatgccaagttgtgaaaacaggttatacagagggagatactctttaccaagatctgtttggacgctttttatttttgtttcaaacatcctttcaacaaaggcagtgaaatgagtgaacaaagtggtaacttcagacttggattgcattggatatatccaaacaaacctagtaaagtcatcaacacaacttagataatatttatatccatctctagaagagtaaaaagagggaccccacacgtctgtatgaacaagagcaaaaggagatttggttttattatctgtagctttaaagctgaattggtgcattttgccaatttgacatgcatcacaaaagaaattttctttacatttgacagaaggacaaactttagctaaaactttagcaaaaactggcttggctgggtgtcccaaccgacaatgccatacagaatcaactttattttatcttgcatagggttactagttgtggtacaattgaaagcagcagaattacaaggaaaagaagagtaattc

SEQ ID NO: 246669 - DNA, 723 bp, Cannabis indica
ttcaattggtagactccggctcttaatggcttgtccgtaggacttggcgcactccatgtgtaggatttcaaaacttgctccaaacctaaccaattgatcccaaactttacagagcagtataataaccataagacaacatattccaagcttcaaaacacaacaattcaatctctaactcaaaatcacatgttcaagtgaagaaaacttaatttttagcttcatccaatgcaactcaagtcaaccagccatggaaaccacccaaatcaattttcagcatactcaaaaatctaaactaaacataaccctaacttactttaactcctacagctactgaaacacaaaaccttactccaaaaccaattaaattcttagaacaaagcatagaacttaccttgattgcttctaggttgtgcttaggttctacaagctacttcaattcaagagaaatggtgaagttttgatcctttgctggctggtttttggttcacacgaagggaagaagaaggagaagaagaaaaagttgtttcttgccttggaagcttttcccttaaatagggtttcttattattttcttttttttttctttttttattttttataatagtgggcagcccacaaagtctagaaagtcaaaatacctattatacaaaatgactaatttaccccccaagaaattaaactttaaaataacctaggggcattttggtaattttctaatccacc

SEQ ID NO: 246670 - DNA, 1473 bp, Cannabis indica
ggtgctctactgtgcaggaaagggtaaagctatgtttgatcaaccatgagtgtaggagctggacgaggaatgtacatgttcgggccacactagaccaaacaggttggggtctaccagtgatgtattttgagactctgttttgccgcttaggtctgctagaggaaacgaacttgtaatagtgttttataattacttttgggatcccaacttttgtaacttttaaattataaggtttagattattacaagttattttcattccgtttattaataaagtttaatttccgcgcttattttactagtaatcccgattaggggattattgtttcataagtttattgggtagcttgcctaattatttagggcattacaatggaggaaatagctggaataccatgttgaacctctttgccattgatgaacaaccaagcaagcatgaacaataaaaccagagaaaaacagagacgaagagatagaagaaagagaatgaaagatagagaaagggaagtttgaaaacaaagagctatcttactattcagtaaagaacattggcattatatagccaatgattacaactgtagtttgttgaagataatagaattagttaagaaagagaataagaataatactaaacacaactaactctctaacaaaaaaattaactgaatagacactcctaacaactacaataattttccaccaactaattgaacaaaaaccaaaataaaaagaaaggcccttttactatattagtaataagagaatcccactaattatagagcaatactgttaaggagaaccaagttgttaagtagttggttatttcagttagttgttagttaggaactatagctaatttcttgttgttagttgcagtcaattatgattgattcctttttttttatataaagcaatgtattgtactattggatctatcattgaataacaaattgcatttcaattactttcctttcttttcttctctctttctctcgactgcatcttcacatgctatcagagcttgatttcattcatcaatggagatccttgtcttgtccaatggcgcaacattaagactgaataatgctcagtcacaaaacaatcagaaagtgcctctaccaaaatagtaggctatttcttataacaattctttgtctatcaagctttatgaacacaactttatatcgtggaagcattaggtcctcgcatcgatcaaaggcaacagactttaaaaatttcttgatcctaatcgagctcgacccatgtttctaactgttgtggatcaaagaatcaacattatcaatcctgaatatgaagaatgggaacaacaagataatcttcttgtttcttggcttctctcgtccatgtctgagaaaaccacgaattgaatgatcgagtatgagaccactgcacaaatctgggaacaattaagaaagtactacatggcttttaatgctgctaacataagtctttg

SEQ ID NO: 246671 - DNA, 1251 bp, Cannabis indica
tcattttgcatgttaatttttttatttcttatattatataattttctgtttatttcttgttgttttttggttttgtttcgtttaattttagggaaagggtaaattccctgtgaagattttgccatcaacaggtgttgttgaggaaattattgacaatagggttgtagaggtgtgtaatttaattcattttgttctatttttattttaccttgttttttgtttttatttaatttatttcatgttgttgtatgtttgttttagtagtgtttttgttattattttttttttttgattgggaatccaggtacacccgatctcaatactaccattctagagtagtaacatctggttattactctgtaattgaagatatcaaaaaaattctaactaaaacccaactagaacttttttgaaaaactgtgtttggatattttctccgaattccagagtatattatccattaccgacttcttcatggtttgatgttgagggaggttcaacaacctaatgaattagagttttaggtttgtgtgcaaggaaaatatcttaggtttagcattgaggagttttcgttagttattgggttagattgtcaaattgattatgatttttatcagtttaagcaagatggtaatacattagttaaacagtgcttaaagggttacaaaaaaattaccaagggtgctattcaaattgccttcattgctgacaatcttaagggtaatgacgatcttgcagtcaagttggctgtgttatattttgttcagtgttatttgttgggtggtctctgggtaaagctgtttcgatagaggaaatagatgttgttgatagtggtcggttcaatgaatttgggtggggtaagcacttttttgatatgactattcaatctttgaaaggtaagattgattctggtcttaggaaggttgttcgcagtgatgaggatggtgggtactataggttattgggttttcctttggcgatacaattctggtttttcaagtgttatccttacgttattgggaaactttctttgtactcaaatgttggcattccaaggcttctgaattggcctaaactaccaaaggataaggatggtcagatgaagatggatgtcatgaacagcctcgtgttcaatcggtcattaagaggtacatgttttgttttttacaatgtttctattgttgttttacagttgttttggtacatatttgttatatttcatgttttcaattttttttgttattttatttt

SEQ ID NO: 246672 - DNA, 1030 bp, Cannabis indica
attcttatatttgttgtagtgtttgtggttgtctgtaaggttactatattttataaataggacttagagagtagccaaacattttcatctcttctagtctcatattttcatatctttctttttgagaagagtgtttcctttataaaaacctagagtgttcaactaggttttggttttcttattatgatctcatactattcttagaataggttgaagagaagctttgaacaagcgtgggtcttcgggagaagaatttttcaagtctcatttcgggagaaagtgagcatatatcttcaggagaagatttgtttaagccttactttgggagggagtaagaacacatcaatagttgaagggagttcactagttgctgtgtttcagagatcatattagcaaggtggattacaaaaggttgcggcaaattactagagggagtctaaatttgtttaagtcaattacttttgtaatctttgatactttactaattgatttcattctctgggcgtggccccgtggactagtagtgtttgaagaacactgataccacgtacaaatctcttgtgtcaagtgattttattttctacaattatttttatattctgctagttctggtttgtttctgcaaaactggtttctgcagttccagaattatattctactgctgcaaacgtatacagttatatatatatatatattatatttttgtaatatttattgatatttgtaaaaactcgatttttcagagagtaacaacaaaagatagaatgatgaggattttgtcaaaaacgataaccaaggagaaagcagattgatttgaggctttgtaaaaagtggagaaatataaaaagaaatttacatttggatagataaatatttgaggcttatttaatagtcttttttaggttgtaaaaattttggtttgtgattaattaatgaattaagctagttcataaaaaaaaaatccactaattctttttggatcttatgattttgtcatgatttatattaattttcattcaaaattaattgc

SEQ ID NO: 246673 - DNA, 876 bp, Cannabis indica
aaaataatttccaacaagtttaacgttggtgagtcacgctagggacttttgccagtacggcctgatcttgagatacactttatcgcctatttggagttccatgtcatggcgtttatggtcagcatgtttctgcatttgttgttgtgcccttagcagatgcattcagaggtcatcaagtatggcatcacgagactccaacaagttatccacgattgaaattatggcagtcctcttttatggggtagcaatagtgggggtctacacccataaagtgctttgaaaggagtgcacttaatggaggtgtgataggaggtgttgtgccagaattctgaccatgcaagccatttggaccactccttggggttctcataagtgaaacactggaggtaagtttccaaagtttggtttagtacctctgtttgaccatctatttgggggtggtatgcggtgctacgtttgagttaagtgccttggagtttgaataattgtttccgaaagttgctaagaaaaatttgatctcgactagaaattattgactgcggaagaccatggagtcaaactatttcagccatgaagcattcaacgactatgtttgcagtaaaggaatgtcgtaacttaaaaaaatgggcatacttggataatctgtcaataaccaccaagatggtatcccatccacctaattttggcaagcctttaacgaagtccatggagatgtcatcccacacctgagcgggcaacggtataagttgaattaagccagaaagtgtggtagtatggtacttgttttgctggcatatggtgcatcgctgaacaaaattgtgtacatcagttctcatgccttcccaaaacagcgctgcttgtaagtgtttgtaagtc

SEQ ID NO: 246674 - DNA, 1247 bp, Cannabis indica
actcattgtcgttggctaaacgcaaagtcaacagtcatgttacaaaaaaagtagcatttatcgaacaaatactttataatcttgatgactatagaaatgggcacctcgagtttaatctgaatatcctacaaacatacacattttagacctaggagaaagtttcccagtcttcagtttaagaacatgagaaggacaaccccaaaaacggaaatgtttcaaactgggttttatcccgttccataattctattagagtattgcttatgctttttgaggatactgttgggattttatgccctaaataaaactcatttcaatataatcagatttactaattaataaaagatcagaaatcattttatgttgcatggttctcatgattactttcatgattatatatttattatataaattctactaaatccaaaatatatagttattaacaattatagtgatgcctttacagtaaaaagtaattgtgattgtatgcttcaaagtctttagtctcataatttatcaatgcactggatttacactgtcgtgataatcagcgataaagtttacttacacaatgttatgtgaaatgtcctttctagggcattagcaaagtatactagtatcagatgtattagttatacatcggactggaccgatattgacacttgaaaagatatcatagacttactgttatgtcttttctaagtcaatatcccttagttgatcttaggtcaatagatcttaatcctaagatggttaggttatggcttaaacatattatatgtattctttgacttgttcgttaaagttgaccaattggatcgacccaatacttataccttgggaacatggtagtgcaattaagtgggagcgctaatcatagatatagaatccatagcttctataactattaacagtgaaacaataatttctttcgagcttagcttaacacgataaatgatagagcgctcatttcagtaattatattagtttactgaaatatcatttacaagtagctaagtgttttaaggataaaatacattgaaggttagaacggtaaatttgtccctactcgatgtaaatcatctatagaggatctttgactatttggattgaaaaaatagataattcatagtgtgtctatatttggtatatagagtgttctatgtaatcacgagtgcaattctgaatttatagtagagtcaggaagaattaatgagttaagaaatttacttggtaaatttcagatct

SEQ ID NO: 246675 - DNA, 1206 bp, Cannabis indica
atttttctttgttatggtatagtgagtagatcgatacgatatagctatgattaattttaatatataatcctaactctagctatgtatgtataatattcaagctagagtttccatatataaacactcacatgcaatagcacatgctatagtttctccttctctcctttcctccatatataaattaaaagggatataaattaactttatgctacaaccgaccttgcatgatcaacctcacaaacattatattattttccaatgcttaatattactaataatatatacatgggatttgatacttttaatatacatacatatattttaaagaaaataaaataaataaacaacctagtatgaacatatattatatatttttgtggcccattaggctttccaaaggataatgtctaaacctttaattgccaaaagtgggagctagcttgggttcaattcatgtatttcacatataattttatacgtacatttagtatagccattcaaatttatataaagcctgtcggtttgtaactttgtcgattataacaagctaaataatgatccctattgcaagacgccaaaaagataaagaataatttgacatgaagagtcctttaatttaaagaatattatatacatatatattctttttatttaatgaaatcaaatttggtaccatatttgagccagatccaagatatgtcaattgactatatccattttgtaactgctctgctctgctatatcaaagaggacaaatatcgttggacaactgcccaaaaacagactccaccaataagggttttgcataggattcccattatcatatcatgttaattaatttgaattcattgctcatattacttataattatgattatacattgtgttgtattcaagtgtgttatataaatatttatatatagaaagagaatgagaaggagcgagctagctcttgtatatatgcttatacgtaacaaaatgttttatctttttcattttctttttctgtaaacatactatcacaaaattaaacggtagaattttaagtatttgatatatatcttactcaatttgatgctaacaacatagtttcacacatttgttaaaaaagaagaaaaaaaaactaacctaagaagcatcaccaaggacaccgcaaatccttgtttggtgatgaattcttatctaaggaggctatatatatgtcgaa

SEQ ID NO: 246676 - DNA, 1265 bp, Cannabis indica
cttacaacttctattttaagaatctagtaatatggatggctggaaacatgatgtacaattatagaatcttgccgtttggggtgttggtcattgttgtcacagctgaggtcggggcctttagcagagttattagttgctctcttccgtaagttatcccatgaggagttttcgctgatggtaatggtatggtggtggatttgatttgataggaattcggtgttatttggcaagaaacaatcgcgagtgaatgtgttagaattgtagcagccattgcgttctggggagctggtgcgaattctggctgtactgggtctggtttgggggcctgtagtagtgctcctgattttggtggtcggggtattggtgggtctttgggtaccttagttggggggggggggtggggactgtgcggtgagagggtgtagtgagaggtaggttgagggctgcttcttgcagaagctggcgtcctccatcttggggttctttctcactttcaattgatgatgcggttaccctgagtcgtggttttgctagttgtggaggcgtggtccatgatgaggaggggactgtttgggtagcttgggctattgcggctgagggcgaatttagtgttgaggtggcagagcttttggcacttcgtgttggccttcaatgggcggacagtttggggtatataatgtctgtgtctgaaacagatttggtgtgtgtttgtaattgggtgaattctccaagctctaattttttatttagaccaattattattgaaattgtctctctgttagctgctgttggtggtggttcgtgtcgtactatttcgcgtaatgcaaatggtgtggccaacacactagcaaagtctgttactagttctatatgagtgaatgtttggactgatacttattctaaatttattagtgctcctataacagttgatttagttcgttaataatatcatgttttcttttaaaaaaaattaatttatattcacattggctttgaaaaattttcaaattgtttaaaactgttaatatttgttatagagctattttgctgtaattttttttttttcatttaatttcataaaattgctgctgtgcaattttagccaatttaattcgggtaaataccattttggaccctctgttttgcaaaagttaccaattggaccatgtgttttgttaaatgacaaaatggaccttgtattttctaaaataatacaaataggaccctgaattaatttatcaaaataaagtttaattataatccga

SEQ ID NO: 246677 - DNA, 703 bp, Cannabis indica
ttttacttttctaattttaaaaacaataaactaattaaaaagtactaccaaacaaacccttagtattatttattatcattattgtattagggtaaaaaatttccaacccaattggagaatggaacactatcactgatgtagtagcaattcacaagttgctagtattagtttagtttgctctgagttgttcttttcattattcaatagtgttaatttaatcgtcatttgtacttaataataataatctaataatatattgcgtcaaaaatagttagtttcacaagtataagaagaatttaatagaatataatgtacatgtaatcaactgtttgagcttaacttactccatttcgatacttaaatttctcaaaatataatatttgtacagtattatatataatataggttatcattataaaaataattaaagtttaaaaaaaaaaaaaaagacacacctctcagaatgtgctgcctaaaaaatttacaatgtctttgttacatcaagttgtggccgaaagttgaaaccaaaaagttgcatagtaaagcctatcgatttgatgagaggtctaaagagagcaaaagtcgttgattttgcatccattcacatctgaacctttacacattttttttttcttaaaaattatttcttagtctagaaattataaataaattatcagtatgcttcactaacacgctttaaaac

SEQ ID NO: 246678 - DNA, 627 bp, Cannabis indica
ttatggagtattaaactggtaaagataatatttaattttacgtattttcttatatttttatgttaatattaaaatttagttgtacaatgtaattgggtatccaattaagaaaccgatctaatcaaattagtaatttgatggattagattttgaggtctaattagattggattggatgatgatttttcaaatccaattactaattggattaaatttgatgaaaagaaaaagtttggattagatctaatgtccactcctaattggtatcacctaaccataaatgggaataaagcaactttaacattgaaataaaagtggagatttgttgattatggttacaatttttatcttctggaaacaattattaggaccttacatgtattaatatgttgcattagaatagcgaacccgatcaatttaatatcatacagacaacatatttcgtcattcaaaatacaaaaataccttaaaattgcaaactcaccattgttgagtgagttcttgagttcttaaactcaattcacccaaccaaagtttaacaacctcaaaaatcttgaaattaacacgtaaatgttagattatttttagcctattatttatgtcacttttagagttaattttctttttt

SEQ ID NO: 246679 - DNA, 1545 bp, Cannabis indica
ttcaagttcgacgaccttggagacttgatcgagggctaaaaatatcacaataattttaattaatattaatagaattattgagataaattgattatagaattaccggggtattttagggtatttggagttgactaaatactctaagattaaagatttcttagtgattaagaaataataaaataatctttattattattattattaatgttgttgttgttattatatgttgttttaaaaacaatatatatatatatatataatttaagaaagaaagaaaaacaaaaagaaagtataacttaaaaatttatttcttttcgtattctctctcgagcaagaaatactaccaccaccatattattttctttaatttttttttgcccaaaaaccagctctccaacctgctatcagcatctaggagtgaagcaatctataggtggaagctaaggtaagaagtttgactattttttattttgaaaagcttatgtttaagggttgactttttgttctggaagtgctaggttaaatatgaatttatggttgtgtttctaggttggattaggagtgttttgaatgcttatttgttagttttgcttgctgtgggaggtgagagtcaagtttaagcttttaagatcaaagcttgagctctcatgggggattttgattgagagcatggttttgatttctgttacatagaaaatgttgtatggattatatatatgtgttatgtgaagtttagaatcatttggttaggtttggagttagtttggaggattttaaggttgaggaaaatcgtgttctgaaccagaattctgaatggtaccaactgaaattccgaatggtaccaatcggaattccgtttggttagtttttgggaaacgtcaaattttgtattttggccatggctttttacttgggtatccgttttagacattctatatactgtttcgaagcttgcgacgagatctataatgtggtctatgttttagagtcaaattatgtattttattttagggtatttttaccataagatttggtacaaaatcttagatcattttatgcaagtattaggtagtgttttgggataaaaacttatcggattaccgttgttgtgacatagggcccgagatcattgatcgttctccatacaggtcagccaacatacttgaattgagacttaaggtaagaaaagtataatgtaccacatgacatgacatgttttgtaattgtcgattgtctgattaggcaatgacaatgtgatgatactattaatgtgatatacaagtgcacctcattaggtgatgtgatgataggctatggcatagacttgcctgattagacgaggcagtatatgaatgcaagattatggcatgagcttatctaattaggtaatgcaacatatggatgccaggctaaattataggctcgcctaattaggcaatgcgatatatatatatatgaatgtcaggctatgtcaaaaatttgcttgagtaggcaatatgatatgtggataccggtattcgatgtgtgcctgtgaggcaaccgatt

SEQ ID NO: 246680 - DNA, 764 bp, Cannabis indica
agcagacacattgagcaagagcaccttgctgtttctcaggctcaaacacatggttctttacctggcaccagtgagaacataccatcctcgagcctgcaacattctgaacttaacccctctgctcttgctggaactgagtctataacagctgctgcaccatcagctccagttgactcttctgccattgctcgatctacacctacatcaactgctgcaccaccaactcaatccactcacaaaatgcagacaaggtcaaggtctggtattcacaaaccaaagacttactctatttctagtattcctgatactcttgcaaaagctttgcagaatatcaaatggaatcaagccatggcagaagaagttcttgctctagctagaaatgctacatggactgttattcctcttcctccagggaagaaagctatagggtgcaaatgggtatatcgaattaaggagaatcctgatggctctgttagtagactcaaagccaggcttgttgccaaaggctttcatcaacaacctggatttgatttcacagagacctttagtcctgttgtgaaacctgtaacaatccgtgttgttcttacattagctttgtctaatggatggtgtgttaagcaattggatgtgaacaatgcctttttaaatggcttgttgcatgagaaagtgtacatgcaacaaccccctgggtttgagatcaaccctggaagcaatatggtttgcaaattgcataaagcaatttatggtcttaagcaggctcctcg

SEQ ID NO: 246681 - DNA, 1009 bp, Cannabis indica
aggaaaataataataataataaatactatttttttttctctttttatgtcattatagattctattgtgtaatatgcttcttttttttttaacaaagtaatataatatgctctttttggtagactacatttttttttttaatttcaacatcattttttaaaataaaaacaaattagaacttacttaccacatagatagctaggttttgttacaaattcatttaataataataatatttttcattttttagtgaagcaagtaagtttcaaagcctaattactaggaaaattaagcatataagtcaatagcatttatttacttcaatatatctctttcttttatatgtgttaatattcttttcttgttgaggttagcccaaactttacactttgcctttttaaaaaataacaaataataaaggagagagagaaagataggttagcaacatttgatttgtttgtggattaaaagaaaaacaacattaacaaataagaataggaatatttacaacgaaactctcttaatatttctagttgttacatatatgatgattttaataaaaaaaaagtgatgataataatttaatcttatgattgtgttgtagtcatactttttttttttgactgttaagtgataattaagctcattaagtgtcagcttaaaaacatgtggcaatatacttctttagcttatttagtacgtggtctaataatttgttgccacatgtttttgagttttattacttttttttttttgatgcaacagaagctttattgaaaacagcaaacaaactaacaaccagtagcaacaaggggtgctacttccccttcagtacagacccgtgagacattgtttacagcagcccaagctgcaagcttgtgagccaccgaatttgtaacgcccttacttacgtaaaataagatgccataaataaactggcgttaagatactaatgttgcctttatttaaaaaaaaaaacacttttcaaaacatgggtacccagttgaaaa

SEQ ID NO: 246682 - DNA, 662 bp, Cannabis indica
atttttgtgttgtatagtgttcaggtatacaaagggagctcataatgtggttcaagtgaatcaaataagtgactatgcaaattgctattcaggacagagtgttccattgacgagtggaaatgatgtaatcccactaagaagttctggagccaaatactttattagcagtgtaaaagatgactgtgccaagggtcaaaaactcactattaatgttaaatgagtaatttaatcacattaattataacaatcaatgtaatttctattatcacatttatgagcttattaataaaattttcaaaatttttgattgggtatataatgtttttcatttttatttagctaattaaaatttttacgcttaaatttaatatatgctaaattatattttctaaattattttagttaaattttttctatgaattattaaaattaatattatttaatttaaaaaaatttgtcagaaaaatttaaattcaacaatttcaataaaacataatttcttatatatatatatacattcctaatttgttattatcataaaatttgcatttaatactattaatacaatattaaaatgttcatatatagctgattattatgccagtttaaatccagtgaactgataaatcgggaataaactttcgaacatataattaagatta

SEQ ID NO: 246683 - DNA, 1323 bp, Cannabis indica
tcacaaataaatatatatgctacgtatctaatatatataatatataaatatattaatatctatatacacaagatacatcatatacacatttttgacctcgtttctagctaacgatagtgagtcaaaataaagcgactaaatatgataaataataaaaagcaaaaatagtaaagtaaaaagaacaccagattttaaagaggttcgacctcgtagaatggtaatagcctactccccttgtatttgtattaaattgagagaaggaataaagtgctctcctctctaaagctcttacaatagatctctaagttatttttttttcttagatcactattctctctcgagtgtttatctggattaattcttttgtccctctcaatagtgagattatgccactatttataggagcttattacatgaagaatgattttccttaatctttaataaataaaataagaaattattttaattctataattacaatgtaaagaaaaagaaactaaggcgtattgcctttattctcttactcaatctcacgattatagggataatcttcgtgtcttggaaacgacaagactaatctctggaatttccaacttatatgccttgcttggtacaaatatgtttgtatcttggtcgaactaccccttgattaacctgttcggacatgtttgtcgcaacagacattaagattaactattaatgggctactaggaatacttccctctacccaggtaacaaaaatgtgggacacgtgtcatccattctccttaccacgtcaaggtgtaaaaaaataggataacatttgccccaagtctgcgtgggaccttcctggtcgcacgtggacttcactcagcttggagtcttgtccggatgggtgactcgtgtctttgatgatggatgctgatctgataggactctaaatgggggtctcttcgatatctgaccatttaatgcctattgaaagctatacctcgaatcacggctcgatgtctgagcacactttgacaattatacttttagtattgagtacttaacgtctacttttgggaggaaacccaaatcttcaaaatttgaaatgattaattttcttttcagattgcttataaatagaactcaattcctttggtgatctttttagccatttcgactcttaaagaactaaagcaaaaatttccaagcaaattttctctcagcttctttgaggaattcatagaaaaactcataacgataccatccgaacaaagaaagaaagcttataatcagtgagtaagttcttcattcctttctttatgtacttgcaatgaaattcatgcattatttctg

SEQ ID NO: 246684 - DNA, 651 bp, Cannabis indica
cataaaacccaacaatttttacaatggatgatgaatttgttggttatgcaatgttgtgatttctcgtgttatgcgttgtttgtgtttcatttgcttttcttgctgagtctttatgactcacgggtgcttcgtggtgcaggtaaatggaaggggaaagtggatctaccatgagttagaggtctcccagcgatgtacatatcaatcactgtgtcttgtcttccagtggacaggatcaccttttgattatgttttggaaatgtaactcaattttgtaatgccgattttgaaacctattataaaagtttgtaaacaggcgattcccgaatccaacagtattttgaatgaaaagttatgtttttaatttaatcaaaagttttaattaaacaacacttttcctaaactatttaattataattatagattaatttataaaagcacgcacgtggcgtccctgtaagtcggggtgttacattttccttcttgaccttagatagagcaaggttatagtattcccgtgtaattaatttcctttaagacagcctaccccacttttagttgggaacttgacgcacagatgaaaaattaatgtgatagcttttaaattatatagggttggtcggcctaacatgacattaaaagttgacgggacat

SEQ ID NO: 246685 - DNA, 5068 bp, Cannabis indica
attaatactaatttcaaaatcaatataaatacaaactttttttttaaacagatacaacttggattatggacacaataatttacttttccacctactttcataataataattatattaatctacacaacattttgcagctgattttcccctttttgtgtttcaattgacaaccttaaacatttaaatatctctgtgtattttgctagtccctgtgtacattcccatggttgtcccaaaagtcttggggattttctttatattacaaaaacaaactccaaccgaaatcaaagccaacggggctttgattttggcggcaaaataactaaaaatgactgcaattatttattaacattagttagcttaacaagaaatgtcaatgctagtggaaagaagacttacatagcaacagtaaagtaactttctgctagagccatggtaaaaaccatttctgagagatgcttctcggcaacctgcatttattgaaaaaagaaaagaaaaatgaaaaagatcactaacaaccaacatgattcaactatgtttaattttagggagaatggaactttgcttggttgttcttcatagtagaaaacatatcacaagatttgtgtatcacttttcgtaaatgaaaaaaaggcctagtgctgaaacctggaaaattttaaaaggcactgacaaacctgaatattcagacaaacaagctttggagtgtccatgaaaaacacacacgttcgataatcttctgttttggatctatagctactttgtcacttaaggaaccttcaaccatgttcttctcatcctcatatgaatcccaaagagctgtcaattatcttaacctccatggtggttagttgtttccacagcaccctacaaagaatagatatagctcttatacttgtcttaccaaaatagacagttctagttctagtatgtcatataaacagctaacacttacatcatttgaataaggtcagaacggcttggcttccacggtggaaattagagggctggattgcattatgtggcaccacaacaccacaattaagtgccaacataatttcattgaaatctgcatgcagattttttcgcgaagaacaccaaataatgcagaggcacaaaaaggcagagtcaccttttatcgaaaggcagtgagaagggttttatatgaccaaaggaatctcgtatgttgccttaaacgagcaaattttaaggtactcaccgttaactgaataatacctgaataagccaaagctagtattaaatcttgtatttctgttagaaaataaatatagatacacaacagagttaagatgacctactctacagaacccaatttcaggactacacactactacgacagtggggttccggtgcaaacccccaccaatgtcatcaaaaatgttaggataagttatgtaatgtgaaaaaatccaatgttcttatgatttttcatgaaaaatcatctacagtagacatgctttatcgcaaatcaaacaaatgatttcgcaagatctttatgtcaaatgtcaatatggagacaaatagtcacatcacatcaaatcatcacagttgaatcaaacatcaccaattgcatgaaatacagaaagagaacacaaaaaatggggaaattctttatgtaccttcaattcatgaactttaggcttatcagttgtctcagcttgtaacaaatatcctctctgtttcattgttccatgctcgccctctttcaagcatagaatcaaacacaaagcgagcctcctgcagcttgttatttttgtataatatacagagcaaccagtgacggttaaatgagcgagggatataatgaaaggcaatcatctcttgatatatcttgaaggcaccatcatctaaattacaagcacagaaacagttcagcaaacattcgtaagaaagcttgctcgggaaaacacccctcttgcgcattgcataggaaagtgtcaaggcatcgactggtctcccagctttacacagtcctctcaacaaagtgttgtatgcaattttatccgggtcacaaccatctgctttcatcttgttgaaaactccaactgcacaatcgatatcgtttgattgaacatgtccactcatgagaatagtgtaagtaacttggttgggacataaaccctctgtttgcattaattcaaatttatcatatgcctcttgcatcttctgcccccaacaaaacccagaaattataccgttatataggtacaaatttggcatgaaccttgtattttctattgtctcaatcagcttgatagcaaagcttttgatttctttcgaagttctgacaggaacttgtagatagttttcatttggaagcagattactctgatggagcaaacgaaacaacatttgccaagcttgtagggactgtctacttagaatgtgctgcttattctgaataacaggaatatttctacaaacaccactgaccagtgcaatataggtgacaagatcaaactctatccgactgtaattcatcaagtcaactaatctaaaggcgaattcgaatttacctttcttcaaggaatgagttattagagaggtgtataacacaacatttggcaaaacaccatctctcagcattctagcaaggtaaatgcatcctttatcagtcatgtttctcttcactaatccacttataagggcagtgtaagaaagcatacttggctgtatcgaattctccatcattttctcaaacaactgtcgggcttcaataactctttcattgttcaggtatgccataatcattgttgtataaacaacctcatcaggatccacaccagcctctagcatcctcttaaacatattttctgcttctacaacacatttctctctacctagacaagctataattgagtcatatatagcaacaccaggtctcatccccatatcctccatgtgatccagaacaccaagggctgattctacatcaccttgtttacaaagttcatttatcataatcaaatatgttgttaggtctgccataatgccctgctcttccataatggccattaaggattcaacatcctcaaaaagtccctcactgcaaagagacttgatcaaggagttgaaagtaaaaagcaaaggtctgcagccaagatttgccattctatccaagcaatttaatgcagcatctgttttactatccatacacaaggcacatatatacacactaaatgccacagaagctacatttaagtctcgttttacaatttccccaagcaagatttcaatttcttgctctaggtcaccaggaggaaacatatcattggaagttgagagcgtagaaaggtcaatcccgcaaccattctttccaattgcctgcaaaatcataagagcaagttgaagctcatgtcccttgggatagtttttcaaaagggtaaaataaagcacatgatcaggaacaatgccatttttaagcatgttcttgtacaattcatctatttccgtaaatcgtttctccctgttaagtgcattgatcaacactgtgtagcagtgcacgcttggaattaaactgcaactgatcatggtgtccaaaagcatcaatgcagagtcacatttaccttctttacagtattcactaatcataatgccataactaatcacatcaggctgcattccccaatctaccatctgtttgcttatgacccatcctttgtcaaacaaacccaacttcacaaatccgtgaatcaacgtattacacgtgcgattatcaggaacacaaccggtcttcagcattcgcagaaaaaacccgcattgccatcttcatttttttactctggcaatattcatgaattaaagaagtatacattgtcttatctatgtacacgtcgtgagactccatttcgccaaataacaactcagcctcaacgacccgccctctcttacaaaaaccataaaacaatgacttgtacatgtgaactgtaggtaaatatccaattctctcacgcattatatcaaacacttgaatagcttcatccatatagcctctaatgcataatctatcaatcaaccgactacaccaaaaacccaggaatactttagcattactaatccaaacgaaaaaatcaaaagcatctaaaatcatttcacgttcatacaattccttaagaaggctgttacaagtagctttacaaggaacagaattcttcacaagaagtttatccaaatggaagcttgcctcttctaatttccccaatttacaaaagcaaataatcatatgagtcaaaatcaaggagtcaggatcaatacctctaacacacacattgtcacgataaagagcctcagccagttgatgctgacccgaatcaaccaacttcttaatcaatgcaccataggtacccaaatcaaggtccaacccacgttcaataccgaaattgacaaccgaaatcgcatccgaaaccgaagaagaatgattgacaagtctctgcatcacttgctgagctgagcacaacaagccacggcgaatgagctgttcagccaaggtgagacagagagatttatgatcattggcaatagttgagaatgaagtatctgaggtttccattgggagagcccaagaagttagaggccgtctgcttttgcagaagaggtacaaagaattgagagttttcttcttcatgttcagattaacactacagagtaaatatcacgaaaagacatagccaagcgaacccagttgaaaaagctgggaaatttggctgacccagaagagagaaaacgaaaagattacaaacccagaaagcaattctcattgctgacaaaacaatctccattaacagctgggaattaaagaatctgccatttgaaacgaaaccaaacccccgtatcaaaacagcccagaaaaccagagaagaaaatgggtaagggaaaagtgtgttgcgattgaaaaatccaatacttgaattgagtcgcataccaaatgggcaagtgcaacagggggtcgtaggaagagccgcagggttttagtttgatagagtaacaaagaaagaactgcttaaaccctgtcttaggttacttggccaaaaccaaaaaaaaaaaaaaa

SEQ ID NO: 246686 - DNA, 523 bp, Cannabis indica
agagagagggaagagagagagggaagtttttttagtttttaacaaattttttttttttttaaaaaaaaaggctaaatgggaagtttatgtaatcaatggaattaatttgtacaaattagtggagggtctaaattttgatattgggggttttattaagggcaaaaagtgaaatttccctaactatatatagatttaatttgcattgttgctaaaattagttctgtagatttaaagtctttaagtaaacttcagcaactcattccatgttagcttcagtaacacgttttttgtacgtacaatccagatgagtcgatccgaacctgataatctggacgagttcaagcaccccgaataagcgttttggaatctaaaagtttcgtattgatgacaagctatttggaaggaccatccaaactagccacaactttctgaacaagctatccagaaggtcactgagttttgcgtaatatgttttcgaattaatatctagcttttcgtatgacaaaacttataactataataa

SEQ ID NO: 246687 - DNA, 919 bp, Cannabis indica
catattaaagtataattaacattaagaaaaagtatacattttttaaaaaatcaaaaaacgaaaaattaattaataattaacaaaattatataaagttaaaattaaaataaataaattattttttttcaaattaattactgttgttgacatgacactgatgtgtcaactgtctaagcaatcatataattattttatttgtcacatatgacaaaatttgacaaaaagactaatttacaatattataaatagttcatgtattatttttaatggactaaaaagttcaaataacacaataatacataaattacagtttaaaggcaaaaatcttaaataaccttataattaaattataattaaagcaatacataacttccactcaagaaggaatgtttataataaaaatggaaaaacacactattgccaaactctttatcttttctaataatgagacttaaatctcctatcaattatttaagtggcaaaattatttgttcaatcaacacaaatttgggcagcagcaccacgatccagtaaaagaaaatatgaactcacagaaataagacatgtaagcatgcacaaaaatattttaatttcatatatattcttttaaaaataaaaatttgaaagtttataaatattttcttaaaaaatttaaattaattaaaaaaaatacaacaataatattatttattttcaaaaaataaaaatttgtttgaagaataggacagaagtaccatttttttttccataaactcatattataacccatgtatttttcaactaccataaatttggctccctcataacactaatttatattctagtaccatccaaagtcaatttctcctcactcctctactcttaaaaaaatgcaattagtatgacaaattatttactttgaaaaggcaaatgcaaatta

SEQ ID NO: 246688 - DNA, 748 bp, Cannabis indica
acttattgggaaaatgctaaaatacaccaatgctattattctaattaactatccagttccatataatttaattaaagacacgatctttaagtaactcccttgaaccaactcatcaatcatacaaatagaagactgctggagctggtacaggatcacgacacaatggagattatttctacaacctggctccctcctccaaccggttgttatatgtgcaacactgatgttgccatgggcgaaaactgatcagttggtgcagctatattcagaattgatgatggaagtatcacccatattcacacaactcgaatcatgcagtgtgatcctttagcgggggagctctacaatctttgctggggggcagtggttgctgccaagttggccctcaaacacgttacttttcagagtgattcaaaaggcgcagtggaagcaatcaagggtattaactccaaagattttggcttgcactataacattacagatttagtggtaagattccatacttctgctaagaatttagatctttgggatgtctgctggatcccgaggaagttgaactgtgtggcacatgatgtggctatatgagcgatccgttcttgccatttcaaggagattgaattgtccaattttgacagtttcctgcgtgctactgcagatggctattgcgagttcttaacgtagggtagtttatttattaatttttgttcagacttcttttgatttaaactgttagtttgttcaagctgtt

SEQ ID NO: 246689 - DNA, 594 bp, Cannabis indica
gacaatctgagtcttgttgggtattcagatactaactgggcatgttgcccagatgattgataatcaataggtggttaccgtgtctactttggtgaaacacttgtgtcatgatagtccaagaaacaaatatttgtgtctcggtcaagcaccgagtcagaatattaagcttttgctcaagtttctgttgaaatatatggcccgagtctctgttgcaagaaatgcagttcactccaacacttcaatactagtactttggtgtgacaacaccagtgcgagctggacattcattttgatagaatcttgcgaaagaaagcaagtattcaatatgtaccctcttgtgaccaaatagcagattgttttacaaagggcctatctcattcttggttccagtttcgctgacaagctcggtgtcacaacatccatggggtgattttaagtaactgtaaccttatttgctaatcaattcttattccctcagcctcaattttcttgagttgagttttcaaactttgtttttttttcttgaaagtctttttctcatagttgactccacatcgaactgacgcacagaaatggcggatttaatatgatgta

SEQ ID NO: 246690 - DNA, 581 bp, Cannabis indica
tgtgttgggtgagattttaagagaatactaacgagcgttagagtaaagaaaaaaccttttaatatttaccttaaaaagaataacatttttttattttttaattaggaggacattttgagcaaatttaacacgaaacctatttacatatttcaatcttagtagttcaaattcattctgcatagcaaggaaaaatattttaagattaatttgtagcacatttcacaacagggtacatacagtgtagtactattttgcatagaacatagtataatttaatgcaatctattattacatattaatactaaatataatattattttaaaataacataatataatacaagtcaacacatagtgtaccaaacactccatacacgtatatatgagggaaagaaaatgtgaagaacataaataaacatttttctttgtaaataaattaaaatgaaagaaaataaataaaaaagattcccatttatttttgtaaaaaagatctttttttattattattattattatatttttatttcgtatatatatatttctctctcatttcttcgaaactacccatttatatttgttggt

SEQ ID NO: 246691 - DNA, 725 bp, Cannabis indica
gtcgggtccaacccgaaaataccccacacgggtttcgggttcgcgaattaaaaatatatatttttttagtcgggttctaacccgtaacccgaacaacactaaataaaaaattaaatttttttattacattaaaaataataacattaattattaaaatttataacttaaaatttaaaaataataatattcacttttactgtactatacactataactatttactattcattcgaccaaaaaagcttagaagaattcaagaaactcccagcaatggcagctgcttcttctccagcggggtctcatcctagcagtcggctcaatccggtgagcctcatccctaacatctaaagctttctctaccctcttccatttttctgaaatctgacagcccgtgttcgcctgctcattgctcattgactgctgagatatgcttctccgttcttgactcttgctaatgttatatggttttataatttatattttatatacattattgattatttaattaattttatataataattatagtattatactataatctggctattcactactaaaattattcttaaggtaaaagaagtgtagaattattgagtttgagaatgagtaagtcaatatataagaaagagaaaagaaaatcgtaagttacttgagaattgaaattgggtttcaaccaaattcattattcatgcccataaatatgtttattataaaagaaaaaa

SEQ ID NO: 246692 - DNA, 1095 bp, Cannabis indica
ctgctatcacagaatccagtcacaaatttgcacaagaataagtttagattacagagctttagatacttattataataccacctctgtggataacatacatgacagaacaaacccttcactaccgctataagcaacatggaaagtttaccaatcttgacaacatttaaacaacaaagaaacgaaaaagatagactatggccttcattcacgtagtatcaaatagtcttgatactcaccttccactatgcgtttacgtgcttcacttaaggtctgccaatcaggggattctcgaatacttttgaatgcattgtagatgggcttactttgtcccaaccttagcaggaacttgaccttctctggctgcaaaccacaaacaaacaatcccatcgtataaagaagatacacataatcatacactttcacttcctatgctttcttattttcatcgtaattgcagaagctaaaaaagcatcatcaaaagaaagcacattcacgtgtatttaaaagtgcatacctggacttcttcaatggcagaacgaagctcggtggaatccttgacagatttaagatggttgacaactccccaaacgacagtcaatttgtccacgatcttctctaaaggctcaaccaatttaggccaagacggttcaactgttagctccaattcatccaaatcagcctcctaaagaaaacaacaaaaaacacacccattatcacaaccaaaccaaacccaaaaccccacaaaatgaaatcgacaaaagcttctctcttttttatgttgcgttccccacaaagaagggatttcaatccgtacaagttttttcaacagggcacgaatcccaggcctaacgtgggtggcatcgacggaatcgaagggcgggaattcaaactcttgaagaagtgggttggcttgaagcgaatcgtcaagagcagcagaggcggtggcggcagcagccatggatgaagaagggcgaacagagcaagagcgagagaacggtgaaggtgtaacggtggtgatagtagatttgtgtagacaaaaggagaaggaagaagaccagagaggacaaggatgggatttgagtaaatgtttatgcg

SEQ ID NO: 246693 - DNA, 887 bp, Cannabis indica
ctcactttgcttcttcattcctaaaaaaaactagagccaaaacgcccaaaccccaaccatcaccaactaccaccattccacccccccccccccgatttcaccatttttaactattttaactcaattttttaaatcttttattttacatactgtactgactgcatacttagaatatagatttgtaaagtaattaccattaagtatttatattttatgattatacgtgattatatatgttgtaggccctatttttaaaaaataggcattagggttatagtttcttaatttcagagattttactaaactctaagtgtattatatatgctataagtaaaatttattatttttataatttttgttcagtaacgataaaaatgcaacgaatggttgttatagtcacatgggatattttagaatcttttatctagcgggacaatcatatgtgatattttaaatatcaagtttagatgaagttgtggtgtttgatcattttacccttaaatcttgagttaacttaaatgggaagtgaagggtaattttagaaattatctatgtggttaattttatctttagtggaatcttagggttttctaagtgtcttgagttgcataatgcattattaaaattaatcaattattgattaatattttttttttgtcaagttaattaaaagaccataaatcatctcttctcgtagtctctttctcctttggccaaaagaaccagcaaaaaagaaggttattcttcatcaatttcttatgatttccagcagaaattaagggtggagatcaaaggtaagtctaaaaactatttcttttttaattatgatagttcaagtttagttcaaccatgcaaagtttgaaatttagttctgtccgaaccctaac

SEQ ID NO: 246694 - DNA, 573 bp, Cannabis indica
taatcaggcaagcatgtgccatacctcgtacctatatatcacatcacataatcaggtgagcttgtatatcacattcacattgtcattgcttaactagaaaattgataatttcgaaacttgtcatgccatgtctcttttcaaatctttctttcactcactactccaaaaatgagtttcactgacacactataagtgacactaaaaaattttagtgacccttcagtgcgcgtcactaatgtaggtgactggaagagtaatatatggtgacccttcagtatgagtcactaaaatattttagagtctctccgtacgcgtcactataccttttaagagtcccacttggctaaactctacaaataatagcaacatgcaatgggcgtcactatatttattatttcttttttaaaaaaattatttttctcacattaatcgaaggtcatcaatgcataaatatatatttttaattactacactcaaaaaattagaaaaataataaaaattacaattccttttaatcttaaatagaaaaaataaaaaaaactaagtattagttcacaaagcaataaattccaa

SEQ ID NO: 246695 - DNA, 539 bp, Cannabis indica
ccgaaatcagcaatcttcggtttgtaattgtggtctaacaagatgttttggggcttaatatcaaaatgtagtattcgtttatcgcaaccttggtgaagatactcgattcccttagctgtgcctataacaatatctagtaatttctcccaactaagggaacatatattaatgtcatcagttgaccctcttactgatatgtacttattcagagaatcatttggtaagaattcatatactagagctcttctaaatccatcagcgcaataaccaaccaaacgaaccacgtacgttaatatggtgaatttggcctattgttgccacttcgttgatgaaatcctcaccgtttcccttggaaacactgttcagaatcttcacagcaacaaatatgtcattggaaagcttccctttaaatacttgtccataggctccttctcccaacttgtctttgaactcacttgtgatttttcttacatcggcataggtatatctcgacggcttgaatgctatgcactcatgatcatcatcaggcctggttgctt

SEQ ID NO: 246696 - DNA, 1136 bp, Cannabis indica
tgatttcaacccatctggccattcacgacttgcttcccaggtgaacggatagccatgcaactcaaaatccacaagataacaatcaccaaggagctcattaaaaccatcaataagagattgggagtaaggtcgacctctccattttttcttttgacaaccaatattgttcgaatccttaatgagacactaatgaagctgtgactccatctttagactccttatcagagttcatgtgtgatcacaatgagtacaatttggttctctataaaacccagttaggcgctagacttccatccccattacaccggacctcaaggttaatgtggtgatttgagaaactaagtaaatgggtctcatctttatttttccaaaaataagccaacccaccttttttcctacaacatccacattgaataaagcctcaaaccccaaacaggccctaactctatccacaacctccttagaacataaagtttcacaagaaaaaacaaagttggacttcttttgaaagacaatgtctatcaaaaattgtgtagcccgtgggttcccaagcctacgacaattccaactaagaatactcataattctaagtggacctatacaacaggaaccatcccattcatattttttgaaaacatgacctaatcacatccttgtccattaacatggacatcattaagctcctcctcaccatcaaacccaactctacgcctttttaatttaataatagtcaacctcctttcttagacaaaaagaactcttcaaccttaattgtatcaactgtaccagaatcaatacatcctaagatggtggtatctttttggatttttacatacatgttctcatcaacctcattctcatgcactaaaggagcattacgtggcatcctataatcactgccaagattattcctcgcctagcattatcggctatttcactagctttgcttgatcgcagccactatgatcatatcaactaatttgcacatcatggttgagctttcataaaaaggccataaggctaagcaagtgaatgggagtatcaaatacttttgaacaaaaatgatctaaatagcccatgattccatataagaaaaaggctaattaataatttttccccttgaactttgacatgta

SEQ ID NO: 246697 - DNA, 1229 bp, Cannabis indica
gacttcactctaagtttgaagttcgtgtgtgaagtgggtgggacgtgttcgatgcgcctggttggtgatctgatgtgtatttgaccaaaggtctctttgatattcggctcataaatgctgattgattcgtacctcgaaatcctcctgagatttgctatgcttttgacggtttgctcttcttcaggtacttgattacttgatttcccaacgtttactagttgggggaaattgaggcatttaaatttcaaaacgattacacttcttcactaatttgcttataaatagcgcaaaaagtcctaataaaccatttttagcatttctttctcgacgatttcagagcaaaaaatcttttccttaaattcttcgaagaattttcagaaagtgtcaatcagcatcatccaagcaatcccaaagcttcgaactgtgagtaagttcttcatctttttattctttaatatttgaatctatgattttctggatttcctttgtagaaaattcaatagtcttgaacttgtttaaggaaaatcggagagaatctaggttttggaatatgaaattttgattgtaatggcattctgactttaatttcacgataatccgtttcacttgcccatttggggtttagtgaagattaacccttaatctgaagtcttgaaattctgggttataaacctaaatcatgcaaaatttccccttttaattctttggtcggacctagtctgtatactttatttatttttgttcgatatcccagccaaatactcatcttgtgtcctaccttttgtagatgaaccctggtgagttttgggaaggagaacatcgtattgaccaggatcttctccaacttctgtatgaggattaacctcgtctctgtgcttgtccgtcttcatcaagcgactgtctttctaattcgagtttcgaggactaggaggtaagtagtgaatgcccacttccctaaaactcaaggtgcaacatcatttctatcctgaccagatagcgggtgaagattacgaatgcttcatttgggaactcaagaaggggtggcgacgatatttgtcgtctagctagacatacatcgtccggccagatatagttgatattatactcgtgggtcgaccaaatccttctgccgttggtatacctattgccacctttgctgtgaccgttgctaggcacaccaatcaaatgtcgtcaaaggataggattatggcccgcactaaacaaacaat

SEQ ID NO: 246698 - DNA, 583 bp, Cannabis indica
tactttagtattggaaaggttaggtgtcgcacatgacctcaggacagacctaaatcgaagaaggggcctggacgaacaatacgccccacccccggtctctgcattcatgatctagttcaaacagatcccaatgtgacataggccgatcaacaagccgaacaagttaatccatttgtgtaagcacaactagatcaacttaaaaacatggtacaaggcctaaccagcccataactcaatgacctcgaacttggtcgagcacgcagatcacccttctcccctgagatggaagtcctcgaattaccccgaaagttcaaaatgctaacctagaaattgtatacgggaaaagaagatcctttatcacatcttaagtattttgtgatgcagatggatctacaaggggtataaaaggtgatgtccaatgtaaaatatttcctaccacactcgcagaagccgcccagcagtggtatttcaagttccctccagcgaggtttaactcatggaatgccttctcctcagagttccacgcacaattttcctcctcccgtcaacttccctcacatctagaagacctggttgaagtaaa

SEQ ID NO: 246699 - DNA, 1428 bp, Cannabis indica
aaggcagaattaataagttagggaatttacttggcaaattctagatctatttattggaagctcggttatgtaggcccatggtcccctcactagttgagataatactacttgcagactcagttaattggttttaattaatcaattataattctaaaattagactatgatcttatttatgaatttttactaagcaaatacttaattgtgaagaaaagaggttttggggtcattaagagactttgtatggtctaattaataaataatataaatagcaattttatttgataattaattataattattaaataaatagttttggcatttataagattgaaattagaaatatggtattattgaaagaagaatgactggttgaaataaagtggcaaaattgttactagagaatggtcccttttagtggccagccttaactgtattttttgcccaatattttattcttttttaatccatatagttcaatcctaagccgtagttgaaacactataaaaggaacatgatgctctcatcattgtcttcaactaaatttaaacctagttttcattctcagacaactagtagatgagagacttccttctatagtgattttttctccttcattgttcttcatagtcgacccttagtgatagagtgtcatgcccacacatagcaagttaagtactcaatcatatatagtgggtaagacggttgtaaccaaacccaaaggagagaaagagatccaagctcagatcttgatattactctgcgatagaaagaaacaagggtaagagatctaagcggaatgagtcattatattctgctgcaatcaatgtaaggttttctaaactcttatgtgtttaattttattgttttagagatattcatatttaggatgttaattcaacatacttgttagtaaatctagatactgataaaatattcccaacacttgaaaactaggcgcacgggtcaacaaaccgggtcgacaggaccagaaatcaattttttgtcctctatcaatttttaacatccatttcatctatattttacaaaaaaacattacccaaaagcataaacccaaaaatgggtttcctccattgatgaacacctctaaacttggtattctccaatagaaaatataaaaaagaccatccacaaatagatataaacccatctaaaacaataagtttaatatttattcattatgaacacattaatccgtaaaaaaatgtatcaaactttcaaattattgtttgggtaaaaaattattttcatcaaaaagttaagggtgcgtttgggatagcttttaagaaagctagaaacacttttttaaaaagctatcattcaaaatgtgtttggtaaaattagaaaactagcttttttaagaatttaagaaaaaatttcagctttttgcaaaagttggccaacacc

SEQ ID NO: 246700 - DNA, 1981 bp, Cannabis indica
gccaagtctcttgtttaagctctaatcttgccaaatctgtcaatcgtgatatctaaaattgtatgtcactccttgcagagcatagagcaggatgtcttggaccttcctacattgattgcatatgtaagctatgcaagaaagcatattcatcctcaattatctgatgaagctgctgaagacttgactcgaggttatgttgacttgagaaggagaggaaatttcccgggaagtgggaaaaaggtaaaaaggattatactttatcaatagatacagaatcgttatgcacatgtgtctatggcataacagtctcttcaactcctaaacaccattactggttatgcatgaatgtttgatacgtctttgtgccatcaacggtttctgatttggtctattaacaggttataacagcaacaccaaggcaaattgaaagtctgatacgtcttagtgaagccttggctcgaattcgattttcagaagtggtcagtaaacttttccatctttggattcatctaacagcacgtaatggaacactaacaagtagaatgggggactgaacttattctcctttttgctcgtgcaggtgaaaaacgtgatgtaactgaggcatttcgactcctggaagttgcaatgcaacagtcagctacagatcactccaccggtatgttctccaatcaaactgaaccattctttctttcaccttctttacaaaatctcacaagtctctttaaatcattctcctatttaaggaacaattgacatggatctcatcacaactggagtctctgcaagcgaaagaatgagacgggagaatctgttgtcggcaactcgcaacttgatcatggaaaaaatgcagctaggaggaccctcaatgcgcttgttagaggtacatatatgtgctttaaactattagttaggaaatgcaaaaccatttatcttatcaagaaacaaacacttcaattcactttatgtttgctctatctagatattggaggaactgaagaaacagagctcaggaaccgaatttcacctcaatgatgttagtctctctctctatatatatatataaagatatatatatatatatttacagaaattgggttggaattgaatggtgggtctaataagggttggtttggtacagctaaggaatgcagtttccacactttcaagcgaaggatttgtatctgttcatggtgacagtgtaaaaaagagtataatttgaagaagaagaaagggaatcacaagagacaaacccaaatctgaaattatatttatgattattctataccaccgtatagcactaaaataccattcaaattcctactttttttttttaactaattatttagttgagagatgtattagtttctgatttttatttttatttttaactttttggatggcatgggcagactctaggtttactataatctttatgataaaattttgtgatgttgtaaatgcttttgttcttttagttatttatatctaattttactattttgaatcacaaattcacaattaagtacggatgccgaagtcgagctacataacttctgattttacatgacttggtctgagtgttagttttagtttaaggggtaatattgctatttgacattctatatggcatttcaattaaaatatggtgtttgtgaccataaagaagaaacttggcacttgatgtatgggcataattaaacgagaaatttacaaaaaatactgaaatttgagttaattattacaaaaatattatcacacgaattttttttttcaaaatattatatttttaaaaacaacagtggaatacaaaacagaataattccgtccaatagcatagaagtaaaaaagttagaaattttagtatgttgtataattatccttaattaaacaccgtttatttttagattgattaggatttttacttttaaactttaacatatatcaaaataatgttctttgaatattttatattgttaat

SEQ ID NO: 246701 - DNA, 692 bp, Cannabis indica
tgatgagctaattactaaaatatgtatgcattttatagttttgtttacttttacatcttttttcagtcacacacaattatataaaaaaataattataattattaaaattaaatattttctcaatatatagaattttaatattactatcattttaattgataaataaatatttattattgttattattattatcaaattattgggcctttcaaagtgtcgtgctttttagttattctattcgtgtttatgcattgtgctttcaaatttatcgtgttgtgtttaagtccatatttttcataccatgtcatactaattcccaacaccacaccatgtcatgcttaaattcaaatttcatgtcgtatcatgtttaaccacatctttttgtgccggtcgtgctcgtgtcttaggtttgtgtcatgtcaaaaagtcccaacccatatttacacttacccaagattcaaatccataatcctcaatgttgtttggttgtttgtagcttccatattcggataacaagctcatttttgcacattcagacaatcttagtatagaaaattgccttcgtcaataactaatatcaattgacataacaaaaaggaaaatttgaacatcagtaaggtcgggcctagacagtaaacataggcgggctaggcccgcgcttgagactcgcttattttaggggctcaaataaa

SEQ ID NO: 246702 - DNA, 703 bp, Cannabis indica
gtacaaatctcttatgtcaagtgtattaattttttgcaattatttgtatattctctctgttctgttttgttgctgcaaaactgatttttacagaaacagaattacattctacttctacaaacgtatacatttttatattttcgtatttattattggaatttgcaaaaacttagtttttcaattggtatcagagcgggacactaaactcttagtgtggtccttttaacggtttcatgtgtttttgtgtaaaatgtcattttttgcggaaggaagttcgatgctcaatgattctaatcatccttataggaaaattagaataagggtcttcatcaaatctcaagatgagagagcttggaggatggtcctatcaggttggtcttctccagttgagacagattccgaaggtaattctaaaataaaatatgaactggaatagtcgattgaagataataaactttctacctacaatagcaaagcattgcatgctatatttaatggtataggtgaaggttttattaagctaatatcatcgtgtgaatctgctaaggaagcttggcagatccttcaaacttagtttgaaggaacatcagatgttaagcgctctagatttattatgcttcaaacaaaatttgatgagcttaggatgtttgaaaatgaaatcctaactgaattctatgaatggctatctgatatagctaatgaa

SEQ ID NO: 246703 - DNA, 596 bp, Cannabis indica
ttgtcatctaatttgatttaatagaattcttttattaaaaaaattattttttgaatgaaaaattcaattttattaaccattaacttctgctaccaaacaaggtagcaaatctgttggaacacacgccaaactgaaacgacaatcaagaaataaaatagaaactctagcaaagttatgaacgactatattagctgaccattttacaaaataaacagagacattgctcaaggaaatcaacaatcttttacaatctttagtcacatgaccaaatagagaaatcatagtaaagttgctcctcaaagcttgcacaacacaaagacaatccgcttaaagagtaacaaattgccaatgataatccttgatctagctaagggcctcacgaacccctatagcttcagctagctcgggttccactattcctgaaaaagtgcagtgtattcttcaatcaaaataccatttgcatcacgagctacaatacgccaaaattgtggctgtccccaaacaaagttgcatctacattgacattactattcaactgtggtgaaattcaatgctctgcaccatcacgtacttgagttttgagcattcttccattg

SEQ ID NO: 246704 - DNA, 839 bp, Cannabis indica
ataacataggaatgataatttataattagtcacaatttttttatttttaatcacaaattttattgtgactaaaatcaaaattttttatagtgatatttcattttttgtggtacttataacaattaacaccttaaagtatccaatatcatatacatatatactaagtgtggagacgtacgaggcacttaaccctatcaaagtctattaattaatcatatgttttacttttatcaataacgtttaaattaaagataatttgataaaagttagcttcttgaagataaggtgtatcatctatcgtattatttaaatgtaagtctatgtaattttctcaaccataatctattaataaaataatacaaaaagattaatatcatagatcatatttagtttgatgtaattaaaattttaataaaatcaaaattattgttataatctttgattttcttttaaaaggaatgtaatgagatagaatacaatataattaatagtaattattacattatgtattagaattttattaaattgaagaagttatgtaatgagaattatatcacaaatattaaaaggtgaatttcattctagactccgtgttttgtaaaaattattgattggaccttctgttttgttaaatatcaaattgaatcttgtatttttcaaaatagtactaaatagtacccctaagttaattttatcaaaataaaacttaataataaaatgatatataaatgttattacaaagctgattacattttctttatttgttcgtggtaggtattattttcaagtcggttatattaaaaaaaaaaattaactaaaaattgagctcaggatcctat

SEQ ID NO: 246705 - DNA, 684 bp, Cannabis indica
aatgagatagaatacaatataatagttattattacgtattagaatctttattaaattggagaagttatgtaatgagaattatatcacaaatattaaaaggtaaattccattttagactctgtgtgttgtaaaaaattactgattggacattctgttttgttaaatgtcaaattgaatcctgtatttttcaaaatagtactaaatagtacccctaagttaatttcttatacaaaataaaacttaataataaaatgatatagagatgttattacaaagctgattacattttctttttctgttcgtggtaggaattattttaaagtcggttatattaagaaaaattatctaaaaaattgagctcaggatcctatttatactattttagaaatacaaagtccattttatcatttaacataacaaatggtccaatcagtaatttttacaaaacatagtgtctaaaatgatattaatccaatattaaataaaataaatttaaaaaaggctcaaataccctttttatgtaagaacaaattaaagtggggataattttgtaaattcatcacttattctaatatttattttagcaagaaactaaatattttaatcaattctcattaccattcttattccactggattactaccattactaatatcattagattccaccaaactaaataatatc

SEQ ID NO: 246706 - DNA, 985 bp, Cannabis indica
  modified_base (913)..(913): a, c, t, g, unknown or other
gagcgaatattgttatcagagaacatgcagcgacacacagtagagcagcccatagaagaataacaaaaagtcccaagctaatttagcaacattagtccattgaggcatttttgcaaacacataatatgcatcacaaaagaagaacccaatgaataaattacttacattattctgactttccgatttctattctgagtttgctctggtttggtggttaacggcggaggggtctcggtggacgtcgccgatagtcctggctaagtctcgctcgggtaaggggtggtggtgcagccggaacagaatgggatttagtgcttatttgagtttcagaggtttggctcttgggtcggatctgtgggctcgggtcagtggttgggggccgggctatagcttgtgaaggtggtggtgcaaaaatcggttccaatttggggctttcttatgaaaccaaaaaaaaaaaaaaaatcatcataggaaaaaaaaaataaataaataaataaataaaggggtacctcttttttttaacgtacaaaacattcattcaaaataatttgagtgtaacacatatcatcatagaaaaaagttgagatttcatccattcatattagttcattatctattgtgagtgctctaattcatgcatattagaaacttgagatgtctcaaaaaattagataactaagaataaaatctaagaaagatttttataaaaaaaaaaaaaaaaatgatctgtaagagaatgtaatagggagtccgcatgcgagttgaagaacagaatttggtttatgctaattttctaagtgaaaattgctccaattctatcaatatgtacacataatttgtgtaaatgacaataagtgctcttaagatttctccaatagaatactaaaattctaaaaatagtagagtttggacntaaaattgttttcaatgaacactaaatgttatcttatgtatgtgggagtctatagtattctattatttttag

SEQ ID NO: 246707 - DNA, 628 bp, Cannabis indica
cgaacctcaaaaacaagactccttatgagattttatttggtaaagctcctgaatatgataacttgaggtgttttggatgccttgcctttgcttctactattgcttctcacagaactaaattcgaaccaagggctaggacttgtgttttcctaggatatcctagaggtgttaaaggttacaaattatatgatttgaatactcagcaaattttcatctcacgaaatgtgatttttcatgaacatgtttatccattttacaagctgaatcaaaataatcataatattgacccttttttaccacttgttcttcctcatacacatgttactcacacacacatcaatgattatcctacactagacaattgcaatgcttctcctaatccgattttgcaggaaaatcatgctgtgcaacaagaatctaatgatgcagattttcttgaacaccaacagcagcacgattccacaccagaacctgttgttcaaaatgaacaaaataatgcagatctggctgcaaatcaacagcagcagacccccaggccagatcctactccgctgccaagaagatcaaatcgagtctcacgggctcctagctacttacaagacttcgaatgctataacttactacagga

SEQ ID NO: 246708 - DNA, 1816 bp, Cannabis indica
aatcagtgggaacattatcctcactaaaaatactatctgggtacaaacaagagctacgagcaagccaatgtgcagctttgtttacagaccgtttaacaaaagtaattgtgactgactgtagatcggccagaagagaacgacaagccgccacctgaagaccaaaaggcgaaggaatagtaaccgtactttgaattgcctgaacaacaaccaaagaatcggtttcaacctcaaccggaccccattgcttacgctttatccaactcaaggcctccttaacacctatcaattcagccaaagccgaatccacttgtccaacccacaagactgtgaacccttccacgaaccggccctgataatcccgagccaccccagccgctccaaattttccgtctcttgcaaagattgcaccatcgacagttatcttaatcttccccataactggtttcacccaatgctccaattccatatttgaccccgaagggataagtagagaactcattctccttttttgagcatttctctattgataaagtattttgttcactatcatattacaattactaaattagtataattaagtatgaaaatttttaataatttttatattgataaccaatcatataaaacaaaaattcttgccacctctagattatacccgtatcaatagcaatactcttttccttttcttaatcgtttgcatggttcattgttatccataattactgagtctgcaccactgggcggaccccactggggtaataaaatatttccccattcatcacgataataacaaagagagattaatatatttttctttgctacaaaagagaaataatattattataactgaatatcaatattgcaaatgtttacttagcagctgattaaaattttcaatctttcatatttacttttgcttctaatttttacttatttatttatttattttgaataattaaggttactagattaaaaaaaatatttaatttcattttatcttattaatatgtacttaacatagattaaagtttacaaaacataataatttaatacatgttacaatttagaagacacgattcaatatatgaacaactaccactttaaacgtttattagtaaaattattataattaagtgaatactcataaattcaacaatcttagtaattaaaaaaaaagtgagagttaagattgagggagagagtcacttacagttttttttgttaggcatgttaagtgtgttacagagtatatttaactaggatcttacttttactaaataagtatgttaactaatctaacatactaaacatagattcttaaaacaatttaacttaatcacataaaagtttaagaaaactttatagtgattgcagcaaaattaaatgtcttcttctattatatgttctctcactcttgtttcctttatgccgcagactgtaatcatgaacaaaacttggatttttcctctttcataagtatttatcataatcttccataaaggtttgagtatcaccttgaatagtgtgggctcatactcaaacaccattggaagaaatttgagagagttatttcttgtgaatttcaaaaaataaagagaaagaagaagaagaagtgacattaacttttttcaattctcttttctttctttatatacgcattcacatagggctaggtttagatgaatatgactaaaataaggactttggctcatattaaggccacatatattatgggctttagagttagatttttgccactttattttaactaatgatcataaagtgtgttttcatattttaccacttatctcatcta

SEQ ID NO: 246709 - DNA, 539 bp, Cannabis indica
aaggggatgagatttcttgccaaaaatacatttttaccaattatatgtcaaaaccaaatgaaaaaagctaccaagtggtgtggaaaccagttggctgaccactgccacacttttgggacaattggtggcagtggtcgaccgccacataggaggaggagtttcattggccaaattgtatttccaacatccatatatatcaaatacaagtgaagtgagaaaagtcatccaagacttcataaaccccttacgcgaccactaccatttttttggcaaaaatggtggtagtgctctcctaagcaattgaccaagaactaatgtgatcaaattagttttctagcacccatacgactgaaataagcaagaaacaccatccatgtctttccataagccatggccaaccactgccatttttcagctccaactggtggcagtggtttcccgttaggattttggacatcaaaatgaggttttggagtcctaagactcccaaaatatgactcaccataaaaaaaagtcaaaacacacttcgagaggtccga

SEQ ID NO: 246710 - DNA, 1626 bp, Cannabis indica
tcaatagacacaagcctcaacaacagtagctgaagcaaagcttcgcaaacattgactagatacatagttaatgagattacttcttaagataaagcacagtatcagtactactgttaattacttagtctgtcttggaagcaagaagattattctcaaacgcagcttcggcagtggtgatacttggtggggggcagacttttgggcatgcctgaacctcataggagcaccaacaacgaggacacagagaatagtcacaggcgcaacctccactgcagcttgatgggcacttcccttttctcgaatcagtacgaacacacaccaacttcccaccttcttcgttacactcacagtttacacattttgttggtcctgaatgtaaaagaatatatattaattaacacattatataatatcaaaactaaacagaataagaaaactcaccaggtggtggacaatagggagaatggccattaacaaaaagccccacaaagtccacacgagcatgagttgttgcagccacaagtgccaatagtagcaacaccatcagagcattgttgaaagccatggatattcgtttggattggaatagcgtggagtgatagagtgagacctggagatatttatagccaagtgcctgcaagacaatacaccatttcatttgtggcttttatctaccaatcccattaatgcacattttttaattaataacgtggatattttattttaaccatgcatgttaaaatcgtttccacttttcaccaacttaaccaacatctttttttttatccttacaataacacgtgctatttaggtagataggttaggaactaatatattatcctaaaactccaaggcattatactatgagcactcacatagtatggcattatcctaaaaccctaaagaattaagatggtgtttagtttacattgtaatagtaatagaaataataatagactgtactagtaataataatgggaatgctattagtatatttggtttattttggtaatgaatattgtaatcaaaattgaattgaaaaaaatattcttgctttatttattatttatttatatttttaaagtattattacaatctaaataaaatattattcttttaacccatattttttggagaatcaccttgtttacccttttttctaatttattttttatttttacgacttttttttaggttttttatttttatactttgtttttaaactgttactttaaaaattcttttctatttcaattttacggtgtcttctttctgtttctccaaattcttcaattactcacttctttattattctttgtcttcttccacgctctggtttcgccaaagaccaccagagaccaaatgagaccactagaaaccattggtgaccaacagcattcacaaaccttgagcatctcttccttgtgtattttttattatattattgtgcctattctcttattcggtacccatatattagcaaaaactaaatcaaattctcaaacattaaaacccaattggcaaccctaaatcctcatttaatcctaaaattgaattcaattcgcattatcctttttttttttttttaagaagtaaagtaagaaaatgtttttattctaacaaacc

SEQ ID NO: 246711 - DNA, 1349 bp, Cannabis indica
tttctgggcgggtgtgcccaacatcacccacctgttcagatggtgaagttgtggaagcaggaacaaaatcattatctccagacctggctcgcttcagctgtgaacgaagagagccaccaacttggacttgctgagagtgaaaagtaggcctcttgacccttgaagcacaagcaagacctttccctttgaccctagtatcgggagcagcaccaggcccttccacattggttcccaggtcaagagaagggatggcatcagcaagtgaccttgcagccagcaggacctcaggatgctgaaatttagatgtatcagagacaatagtagaatccgttggtgcaatggtcatctggacagggacagggacagagccataaggtgaggcattaacgtactcagtaaaatgtgaggaaataggattggtgaggttcgtattaacaggagtaggaatcataaggacactagtggtaataggcgatcctaaaaacgaactaggtcctatagtagagtttaacagaccagtgaaagcatacgattgggccaagaatgggttcatcacccttggatcataaggaagagagtgcgatggcaactcagacatggtaaaggcaggaggatgaggataatcaaaaggcccaggcttatccattgatttttccttcccccgaagaaggatggtataaggactaggaggtggaactggattttcatcacagttttgcaaataagcttgacaaaaccttttggtatgatcaagcttaccacagtaaaagcaaaaatcagggagtcactcatatttaaaatctaaccacttggtaaattctctacccatcttaaggaaacgaatgttaattcccctccgaataggtttattaacatcaagaaggtatctacccggcaaataaggcccagtgccctctttaatagtatcctcatcaacttgaataagatcacccaaactcgaagctataagtatagcaaggtcataggacttgcaacgaaatggaatgccatacacttgaacccagaaaggtatgtagtgcaaaagatcagcagtaatgggaaaggaatgatctggggaggcaaaaatagtaaggctttgagcgaaatgccaaggctgtccatcaaggatcctctttttgtctccttcacaaccaaatgtaacaaggaacagaccctcagagtgttcagaaacaactacaggaaatcgacactgggaggtccacatttgagacagagttttcatgagagaaggacaattaaaaggacgaatagtaaacaaacgcaggaggagactaatggtatggtgagaatcatcagaaatgtcaagaagagtgaaaacatcactctca

SEQ ID NO: 246712 - DNA, 1336 bp, Cannabis indica
gaatgtgatgtagggtaataattccttttcttttgtttacttttatttaataataggaatgctttatgggttaacataaatttaggagaaattaagagaatacttttcctcttattttgttcaggtatgccattacgcgtaatgaggattttattattaaaaatttattttatttttcattattaaaaattaaatgacaatattgccaacatataaaaccatctaccctaaaccttaataattcatttttttaaagcttgactgtcgcatccctattctctatcgtttctctattctcaattggttctctttttttttttttcaaaacaacctcaatatctctcaacaacatatcaagtaagttttctatcattttttctaatactaggtgtgtgtaccacgtgcattgcacgtgtatagtttttcctgttctatttcatttatacttttatttgcttaatttttattttataaataattttaataaaaatttatataatataaattttacatcttaattgtagtacaaattataaatacatattttatttttatattgaagatacgagagtaagaacaaatctttaaagtcagcattgtagatttttgaacattattttctttttttaaaaattcttttttatttttaaaattttatagtatgtctttaataactataatgtgcacaattataaaaaaaaatgatagttaaaaaattattctgaatgttaaagcagtaaagggtgtattggtgcacccatttttaagggttacaccgtagatactttctacgatatatactactactaaattcttaacatgtaattatttaaaataaaaaatataaaattataaaaacttagagaaaatttgcagtacacccctaaatgagtgttttggtaaacctattttttatttcggtattttggagagttttttaattagtctatttttttcataattatttatgttgtagtcatttaagactatcggtaaatttttaaaaaattctaaataagtttacaatgtcaaaaaataaagttcaaataattgcttaatacatgtataaaaaaataatttcatgtgaggtgcaacaaatatatatatatatttttagaatcgtaaactattcgaaattttgtgaaaacttagaagtgttcttaaatacattattaagttttataaaagttgtgtctaaattacatcgaaaaaatagtgcgtctaaatttgtataataacaattataacatttttaattgcacttttatcatatattattaatgttaaaattttgatacatatttctttttatcacaatattatctttaataatttt

SEQ ID NO: 246713 - DNA, 679 bp, Cannabis indica
ttttttatgataaataaacccccacaaagtaaaaaaatcatgggtccgtcactgctcctcaccaccgaaaaatggatgtatagtcaccaaccccaacaccctaaccgccttcaagctcgcacttggacacgattgcatcgaggcttaggaatgcgaagccactgccgtggaagaagatgaagacggggagggatttagggcctgaggcggaagctgagctggggacgaagatacgtgaggagaggacggagtcggagctgcggctgagatcggtgttggctgtgggtggagctgggaatggggagttggtgacgatgatggggctataatagatagatttattcgctgttcgattgttttgttgcttattgtttttcctaaccgggttttgtcccgtgaaatgttctggttttctaggtaattttcagttcgactctctctgcgaaggaatcctatattaagggatcgtttgtttgctgctgttttggctagggtttttgagatggggacgatgatggggagtggctagggtttctaagatgaagaagttagagggagaagaagaaggaggcgtgaggatagaagaaaaagaagaaagaaaagagaaagaaaagaaaaagaaattttttattttttattttaaaataattaattttttattttaattttaaatatttat

SEQ ID NO: 246714 - DNA, 731 bp, Cannabis indica
atatatttattagtactaatttctttaaactcatgttttctaggagtgtcaaataccatgagccagaatactggaaatttggagaagaagggaacaaatacttccgacatgctactgggcagatctatgcaatctccaaagatctagctacatatatttccatcaaccagtaagctatatttcagttaaaaatattatgtggtcaaaccaattttagacttatttttatacatatattcttggaatttgtatttatagtattggaactaatcaaactgtattctgtaattaaaatttgacaagcgtttagggtgagaaatctgattatatagctagacaaaaaattaactctataaactgttgaatatttcatgtggtcgtcactctttgaaatttcatggtcaaagttctgagaagctgtttttacctgcagacctatattgcataagtacgccaatgaagatgtatcacttggtgcatggttcattggcctcgaagctgaacacatcgatgatcgtaatatgtgctgtggtactccaccaggtactgaatttagaactaatatttattacgaatgtctggtaaccatacctaacaaaaactttatagtttgcaagtctaaaaggtaatcatgcatacgaaaaaatgttcaagatctagaaagattctatggcatcatattctacaattaacattaaatatcaagttcacacctaagtcttgtacagtaa

SEQ ID NO: 246715 - DNA, 658 bp, Cannabis indica
ataacacacgcattaacagttgagcctgtcacatacatttaaaaaaacacaattataatttacaacaaaaatctcaccgataaaaactaaaaaactattttttgggccctattggacccaaaaaaaacttaaaaactaacattttagggtacaattggacccctataggggctccatcggaccccatcgggctcctcccaaataaataaggaaataggtggccatcaaaccactatcgggggtccattggaccccatcggacccgtctcaaaaaagagaaaaaaaatatgttctacaatgcccatcggaccttatcggggggtccatcagaccccatcggacccggctaaaaaaaagacaaaaaaatatgttttacaagcccatcggaccctatcaggatgccatcggacccggctaaaaaaattagacgaaaaacattttagggcgacaattggacccctatcggggcccatcagaccccatcgggctttcacccctgtcagccattttcactatgcatcgggccaacatcggaccccatcgggccatacgaaaaaaattgcagaaactaggaaaattccagtttccacacgcagcaaacaatttaacagaaaaaacagcaaaataacagcaacattccacagatcaagcatcaaaa

SEQ ID NO: 246716 - DNA, 630 bp, Cannabis indica
atagcctggatcgccacaaggcaatcagactccaaagaaacatattgccaatgcatgtctttgatccaactacgggcctccttgagacctatggcttcggcaagggggggatcaactggaccgtgagagagcacagttctggcttcaataagcacaccgtcatgatttcgggccaccattcctataccataagaatttcctccattaaataaagccgcatctacattaaccttgagactagtttcggttggaggtgtccaatgctcattcccatcacccatctgaacttcagaccatgatgaatccaaattgaattttctagcattcctccattgctcaaggtactttgttgcaaacacaactacattactaggattaaaaacctttccctgccatacaaggttgtttcgggcaccccatattgcccaacaaacagctgccaaaatacatttctgctcaccatctgaccgcagaaagctgctggtgcaccactgcagaaacgatgaacctggtgcaacattcgtgccaattcccacacggttccaacactgttgaaccatattgcaagtgacaaggcagtgtaaggttgtttcttcttcagcttggcaaagaggacataaaacacagctc

SEQ ID NO: 246717 - DNA, 911 bp, Cannabis indica
ttttcttctctgttgaaggactatgagcggcgtcatcaaatatcaggcattagagtggcgaggggggctccaactgtttcacatatgctcttcgccgacgatagttatgtgtactgcaaggccaatgtggaagaggcttctagtattctacagctgctacatttgtatgagttggcttcgggacaacaggtgaatttctctaagtcatcaatttttttcagcaagaatactctcgctgatactcggtctcaattatgtaatatgctacacatgactgaagcttctgataatagcttttatcttgggttaccttgcataatgggtcgaaagaagaatgcgattctcgactttcttaaagaaaagatgaaaaagaagatattcaattgggagagccggtttttatcaaaggcgggaaaagaagttttgattcgttcagttgcacaagctcttcctagctatgctatgagtgttttcttacttaacaaggaaatttgtgccgaattggagggtttgatggccaaattttggtggaagtcgcaatctaattccacgtctaaaggagtgagttggatgagttggaaaaggttgactaaacacaagcatgctggtggtcttggcttcagggatcttagagattataacttatcctttcttgccaaacaaggatggcgtttgctaactaatgagtcatctttggttagtaggatgtataaagctagatattatcctaatggtagtttcttaacagctgcattaggacaaaatccaagctttatatggagaagcattttcgaagcacaagatgtggttaagcaaggagctagaaggtcaatcgggtctgggcaaacagtcagtattttgaatgatctgtggttacctgactcttctaacccgtatgttcaatctacaca

SEQ ID NO: 246718 - DNA, 642 bp, Cannabis indica
tcacgtgagatgagacagatcttcgggaatatgaaactccagaacaagtacttcaacgagttcgaggagttccttctcaagggaacttagaataagttggtctaaggaattgtaaatcttgataagtttataataaaaaaatgcttatattttttagatttgtcatgaataacagctataatattcgtatgttatgttcttaaaataataaatttttagaatactctattctattccactattaatttggtctctcttggaacaatcattgtatatataccttctgatatgttttacagatatagaacttgttttattatggttttagttttctaagtttttaaaattgtgtttttaagagtgtgaatagaaaatagttttttatcattttaaaaatttaatactgtttagcacaagttttttaaaacaatttttaattttttttactaaaaaatttaatattttaacaccataccataatatgaatgtattctgtctgggtctaggatctaaatatataagcaacaatataaaatataatatgttagacaaaaaaattgtttttaaaattgaaaacaatattttgatattatatattttttagtttttttaaaactataatttttaaaaaattagttttta

SEQ ID NO: 246719 - DNA, 658 bp, Cannabis indica
tgatgatgtcatactcttttgtcatggtgattacaagagtatctattatatgctccaagggttaaagctcttctcagcctcttttggattgaatccgaaccctaataaatcagcttttactgttgtagtattgatgacaatgaggtacaacgtattgttgattgttcaatctttagcgagaaggaagtacctttcaaatatttaggtattcctatatgtgctaaccgaatttcggggaaagaatgtacggtgttagcagacaaaatgacagcccgaatcaaagtatggagctccaggaacctgtctttagctggaagggctattcttgtaaactctgtactaatgtcaatccattcctattggagtcagatcatggtattgccaaagagaacaattagagatattgaggctatatgcagagcttacttatggaaaggacatcatgtgacacaaggctctggaccaattgcctgggattctgtatgtcaaccaaaagcagtaggggcgattggtttgaggaaaatagcagagtggaacactgcagcaatgacaaagtatgtttgggcaatttcgaacaaacaagataacatgtggatcagatgggttcactgtgtatacatcaaacatgagaactagtgggattaccaagcgccaatgc

SEQ ID NO: 246720 - DNA, 2040 bp, Cannabis indica
gttaaagctcttctcagcctcttctggattgaatccgaaccctaataaatcagctttttactattgtagtatggatggcaatgaggtacaacgtattgttgattgttcaagctttagcgagaaggaagtacctttcaaatatttaggtattcctatatgtgctaaccgaatttcagggaaagaatgtacggtgctagcagacaaaatgacagcccgaatcaaagtatggagctccagaaacctgtctttagctggaagggctattcttgtaaactctgtactaatgtcaatccattcctattggagtcagattatggtattgtcaaagagaacacttagagatattgaggctatatgcagagcttacttatggaaaggacatcatgtgacacaaggctctggaccaattgcatgggattctgtatgtcaaccaaagcagtaggggcgattggtttgaggaaaatagcagagtggaacactgcagcaatgacaaagtatgtttgggcaatttcaacaaacaagataacatgtggatcagatgggttcactgtgtatacatcaaagatgagaactggtgggattaccaagcgccaatgcagctggtattggaggaaattgattaatgtgaaaaatcaagtcaaagctactatggatatacaacagtttgctgctgctaactacaaaatatccaatggttacaaagcttacagccccaatcctcccaaagttaattggagccatgacgtatggaatagattgaatatacctagacatagcttttgcttatggatagctatacaggataggcttagaacaagagacaggttacacagatttaagattattgatgaagatttctgtttgctttgcaagaaccaaactgaaaattctgaacatcttttcttctcttgtcctttctctattctttgtcttccctttgtgaaatcatggttgggatggaatgttgaaacttcaacacttataagattgataaggtggtggaaagaacaaaattcagcaagtttaaaaaagctgtgtacacagcttcagttgctgctctcgtgtaccatccgtggaagaaccgaaatgatgtattgtggaattcaagacaacaaacaccagaacaagtagcaaactcgatcaaggtggctatgaagaaccgaatatcctgcacttggccaaacaaagtgcagccggcggatgaagatttgtttttgagattatagaaataattttgtaactaatataggtgtttgaaaaagttcacaaagaaaatgtattagattgatattcaggtcttcatttgaaagtcctaataggttgtaaattgttatttggagtaataaaattcatgattgattgaacaagaaagaaaataattagttaaggttgctataatagttgttttataattgaatcaaacattatatatatcggtataatcgaaaaatacgtacaaaaacacaagcaaaaaaatatcatataataccttgtctcaaacaaatatagtaaaatttgtttaacataaatttttgagtgatctatttaacactacaaaaacaagtgtcaataatttagttcaaatcttgagtgaaattcattttattacaatcccccatacaatcaaaactgataatcaaagtgaactattcaacactaaaatgaatgtaatgactgttaggttttatgccctaaataaaactccatttcaatgtaatctattttattcaacatcaataaagaaacagaagtattttcattcatttgtgtatgttttggttcactttatcaattgcttgtctatttgatttataaattcatcttaaacccttttcacatacttgatcatgtttattgtgctgtcatcacattggaaagtaaacatgactatgtgaataaagtttcctagatttatcagacacatgggttttactgatatgataatctacaacaagagtttacttgtatttggagaaatactatgttctttccagaacatggttaaagtaaagctcaggttggatgcatggactatgcatc

SEQ ID NO: 246721 - DNA, 2146 bp, Cannabis indica
tttatgccaagaaagtaattcaatgtccctaggtctttaagagcaaaagacttgtgtaacctggttatcaaggcagagactagagcatcattagaaccagttatcaaaatatcatcgacatagataagaacatacaaacaacaggaggaatctatcttaacaaagagagagtgatcagattttgctgaagtaaagccaagagtgagtaagacaaatgataattagtcaaaccaagctcttggggcctgcttgagaccatagatagccttctgaagtttgcaaactttgtgaggagcagtgggatctacaaagccaggtggctgaaccatatatatttcttcttgcaaatcaccatttgaaaaggcattgttgacatctagttgcctgactgtccaacctttggtgagagcaatggttagcacaattctaatggtgacaagcttgataacagggctaaaagtttcattaaaagtataccattcttgttgatgataacctttggccactagtcttgctttgtattgaatgacattgccttcttcatcttcttttattctggagacccactaacaacctataggttctctgccttcaggaagatgaacaagaatccaggttttattcttttgtagagcaagtctttcatcatccatggctttaagccatttttcattttgcatagctgcacgtactgtttttggattaagagaggccattaagaccttgggtttccaaataccagactttgctctagtacacataggatgcttattttgcacttcttgtgtactgcaagaacccgatgcaatagtagcatcatttgttgtgttattaggaactgtaggaattgtagcagtaggtgaagaagtgacagtacctgcagactgtccaacggttgcatttgtttgctgaattggtgcaacaaggtcagattgaagtactgatgatgggacagtagcaacagttggtgggatgggaatgggaggggtaggcacgggttgagatggactgacattgggagtgacaattggctgagaaggagtgttgaccgtgccatagagagtattttgtggaaaagagtttatgacagatgagaaggcatgggagagtgaaaagtagaaaaagcatatggaaagatgtgttcatcaaatagtacatcatgtgatatgtatagcgtaccatccttagagagacatttgtgccctttatgagataggctatatccaagaaaaacacaaggtgtagacctataattgagtttaactctattgtaaggcctaagatttcgataacacaagcatccaaagactcttaacatggtataatcaggtttgacatgaaaaagtaattccaaaggtgtgctgaaatttaatttgggtgtaggcattctatttatgagaaaaatagttgtacgataagcctcatcccaatatttcagaggtaaagatgcttaagctaaaagagttaaaccactctccactatatgcctatgctttcgttcagctaccccattttgttcatgagtgtgtggacaggccaatttgtgaatgatcccatgttcatttaaaactttcgtaaaggcttggtactcccctccccaatcagattgaagctttttgattttgtagcctagttgtaactcaacctgtgccttaaatgtgataaaggttggtaaagcctcacactttgttctcaacatataaatccaagtgtgtctagaataaacatctataaaattgatgtagtacttataaccactagatgaaacaataggggcaggaccccataaatcagagggcagtaattgtaaaggttcagtatattccatattggaaataggaaagggaacttatgatgtttccctaagcagcaagaagcacaaagatctgaaaaattagcatcaattttattgcttattttgatattacaagtagaaagagcactttgtacaattttagcagtagggtgccctagtctattgtgccaaagagaaaatagagaatttcttggtggtatggatgtactgttacattggtctttatgattatgcctaagatcagtagttgactcggtttgggacatggggacttcttttggttgtaccaagactttcaatttgaatagagtcaaatttgtatagaccttg

SEQ ID NO: 246722 - DNA, 1453 bp, Cannabis indica
ttaactatttcattgaagtctccccacaaatccaagcaccatgaaacatggtttttatcctttttaaaagcttccaactttccaatcttcctcccggatccggacttccataaaaacccgtaaaacgccaagtaaagcccaagttgtttttaacaagagcatcaatgtgagaagccgtaaaagacttaatctgaaccgagtaatcatctgaccaaagcaaagccaaaccaccacttttgcctttggcatccaccgtaaaacaccccacatagcctaattgaatacgaataaactccattcgaatactgttaagccgagtttcagataagaatatcatcccgggatgatagtctttaacatgggattttaaggaattttgagtccaagggttccaaagcccttggacattccaaaataaggcattcatggctctcggcgacccagttctactgagttcgccgctttcatagtttcatcaaaggtcaaatcggttgctgtcgaaaattcctttgggtctttcctgtgtcgtatctgatgtatctccttagaaggtatcatcttagaaccattactcccattgttcttagttcttttcgggatcaccttccttctcttagctggcccttccatcttcatcaaagcttccaagttgctatcataagttagggatatatccataagagtagagttgtctattattggggattcaagggaagtttcttgaggacatggtggatgaaccttgttaggaattgataagttatttagagtcaccatacactcttctctccaatcgccattccgttttgatcttccctgatcatcacacttcatttgatcattacagcctgctatattcccagcttccagaaccattggaattgctttcgaaaaaaccaggggctcatctattatcttgccctttcctttctccaaaatcttcgacccatgaatgtgagaaaagatgcctgaattttgagaagcctccatagtgacactagttctgaattcagttatgggattgttcccttttcctcccccagtatgaattacttccgaagtcgatgaaggtttttccttgaatccaggaggaggaaattttgatataaaaacaccagagggaatcttgatttgtgaagaaagataatccttcttttcattaatctttagccatgctccataacccggaagttggtttccaagtccatcttcaacgaatttcattggttctgcacaaacccgagtatcatgccccacaaaaccacaattaaaacacatataaggtaatcgatcgtacctgtatgggagccatagttttcgaccttcaaatggaaagaggaagcctgggcgagatagggcgttggtagtatatcatacatgactttgaaggtgaagaaacctttaggaaccatcttggtatatcaatctttgtaatctcgagcacatcaccagc

SEQ ID NO: 246723 - DNA, 617 bp, Cannabis indica
tttggcaccaaccgagcacttacgaagaacaaccatgtcttcgccactgggtttaattcacaccgatataggatgtttggcgacccctcttggccatcgttgtcgtggaacctcaaccctggaaatcccaccgtctcaaccacatccaccatatcaaactgctcttcctcctcaataagtcggaggcgttgctcttccctagaataatccaggacagaaaacatcacattaaaagcatcagcagtagcgggaaccttctttcctcgcacctttacctccccattccggcgctcgggccaattggcaagaaattcacaggccatagtcacattagcccggccccgagcatccacaaagctcccccacttcatcctctcaatttgggctcgaattgtctcgaaccgtggttgacgtctcaaaggattttcagggaattcaataccccggtcttcaatgtaagccctatttttcagcctcataaaacgattctgggcctcctcattaacaaaccgggttctatcgaaacccgtagttggtgggtttgatgacgaaccctcctcaacatgcctagttctcttaggtgccattttcttctcttttttctttcttttcctttt

SEQ ID NO: 246724 - DNA, 1039 bp, Cannabis indica
atatatatacatagttatagtgagtgattacaagagatgctacttctatcttttttcttttttgggtttgatttcttttcttttattaactcacttttgaagcaaaaaaactttagggtttcaaaaaggttaacctttcagtgccattaaaaaacaaagagtagtaaaccagcttgtgggtacttactaatttactcatataaatattattattaattgaaatatatgaaaattttgataaaaagtatgtatagaaacaatggaatcttttaatataaaacttgaagattgtggttcatcaaatatggtgcacaagcatatcttagaagatccaaagtactccactttgaatatgcgtatacaaatttatatatataaatataaatttatataataaatataatatgtagtgtagggttcagattccaaccaagtataatgctgtaaatatatatatatatatatatatattttgatcagtataaaataaatatttgattaattataatacgatcatttctaacgtcttaatcttttttttccttttttttcttatatatcatgtaaattaaatgagtaattaactagatatataaaatatggtatatttatatatatacatatgtcgcatcattcattacacattcatttccaagagaatgtttgcagaaaatgtataggagatattattcatcatgagatagaccttttgcagctatatatatatattatatcttctataatgtatatataccaactttattattacaataagaaaaaataaaaaatcaacgtgtattatttaagccttgtcacacatagttgctatagcttttgtgtaacgtttccgctttaaatttttattgagcctttacaccgacggactcatgactcttatacactagtatgtcactctgactactttatggattgatgactaaccctacagacgaacaagagtgtttccagcgtgctttgtcctcactcgcacgcttcctgtgaaaacttctcaggaggtgagttctttcgtgatgggcta

SEQ ID NO: 246725 - DNA, 782 bp, Cannabis indica
gagatgactaattctccgccaggcagtagggttccaaaccgtgtttcgtaactatcatgcggtcgatccaatttacttaaaattctggctgccacatacgaatgagtggccccagagtcaaacaacacagagaaataagagttgttgatcgagagctgacctattactagtgaggggctggcttctgcatcagcctgagttattgcgaacacccttgttggggtgggtttcgctgcagtctttggtgcttcagttctgagttggggacaatccctttcgtaatgccctgacataccacattgaaaacacccctgccctttacactcccccagatgatgctttttacaactgggacactctgggtaagtgtatcgggtttcggtgccactctagcgattgcctctaccctggatcccacggaaccttttattctgacccgagccactagttgcagttgatgcctttctattctgatcagtggccgagccactacctcccctactaaagcctaatgcaggaggggtaggagccccgccaacaaccgaagtcccacgagactctaaggtgcactccactgcaccctcaactcgtagtgccttatccaccatatcagcataggtggtgctgtcatcagtagtgatcatcaagtcatgtttgatctttgcattcaacccgtccaagtactttctttcttattgaaatcggttggcacgattcccaaagccaaccttgccaagagatcaaattgagtcgtgtatgcagtaacactcatgttttctttc

SEQ ID NO: 246726 - DNA, 292 bp, Cannabis indica
gttataggaatattttctgtttttcttactgaataaacaaagtaaaagtatattctttctttttttttttggaaccaggtagaagtatattctttaggcggccattttttctatatatgtacagtatcgtacgctgatacgaaggtttatttggaaaaaaaaataggtaaaaaggagacagaaaattaaatttacggatgagagaaaaggaaatagatagaaaatctaaatgttggaaaaattagattttgggagatgtagaaggagagagagattagggatatatttaagg

SEQ ID NO: 246727 - DNA, 662 bp, Cannabis indica
aaagatgtggttttacccaaaaatagtcccaaccaacattgattaaagagaacatgtgtcagtgaatgaattgctctctaaagattcaaagatgacaaagtacagcctgaaagagctcaaaactaaactttgggacttggtgtcactctcaacagaaaaattggacttctcattgaattggtatccaaacatgaaaattcccaattttgcaaagattattaaggactaaagcaaaagccagcaggaagtgcataaaggtgtagtcctaaacttcgtatctttattatcatggtctagacttgagagcaaccgtaaattgcaataaaaccaaaggacagcaaagtgtgtctgcagtgcccccttccccttcagagcagaaaatctatcttgattcttcccacccctatcccactcaggcctacttcataaatagaaatctactttccttctcaaataaataaatacataataaaagatagatgtgctagccttcgtccatagcttcgtatgctcatgcaaagaagaatagaaatttaactctatagatttgatcaataatttcttaccatgaaagcatacaaccctttagatttgataattaacttacagtgaaaacatacagctatgccaatggcttaaataatgaatttagaataaagaga

SEQ ID NO: 246728 - DNA, 672 bp, Cannabis indica
gtaaaataaatatccaacaatttcatattgtattcttgagagcacgacttccacactttgtattggaagttgtttttgattgcgtagtagctgaggacattcttcaatgtttccttatccttgtatagctaacctttttcaacttttggatgatgtttgtctgttattagcttcgcattgttgtgtcaatttctggatctagttttttactgttgttttcaagtttttctaccatttatttagcaaccagattcgcatagtcaactatgtcaaatttgtcgttttcaaattctcttgtttttgactctcctccttcttctgattggtgttcgagtgtgtatgattctgttgttgttgtgttgttttcaagcattgccacattttcttgatatggtgttgttgtggttgtagttttttgggattgcagcaggtgttgtgttgtttttctgttggttgatgcataatggatatgtggtgaaatctgtttctttgatcttcaattgcaagtaaaagaagaggagggcatcgttgaatatttttaatcggtggtattctttctttcacttggtattgtatttgcagagttgttcttgtgtttttgcaccgcaatgaagtaagtagtatctgtaatagctctttatacttacaatcttttggtatgaattctccact

SEQ ID NO: 246729 - DNA, 504 bp, Cannabis indica
tagaagtatatttgtattgtgaggatagacattattttagactacgtattttgtaaaaattattgattagtcattgtattttgttaaattacagttttgactgtgttttacaaaaagaaacataatgataccctgaactcgattttagtcaaacttattttgggtgtaggagttcaatataacttgaactatgattgttagagtttgaaaataagaagttttaggttaagaagacggatttttaaagttgagataaatagtagttcgaccaaaatcaggcttagggtgtgttcttttttgcagaacaaaaagaccgatcggtaacttttacaaaatacaagattcaaaattttttcttaagaaaaaatattttataataacatttcaatactttaaattgcaactaaataaaatactaatatagaaaagaagaatttgcacgagaaatatttcgatttgttgtacttaggtggtatttggttagaggtaatgaaatagaatgta

SEQ ID NO: 246730 - DNA, 541 bp, Cannabis indica
aaaaaaatatatattttttaaagatattttttttatttaggcccctaaaatgggtgggccctagactcgggcctacctcgccttaactagagttggctctaggttaaggcaggctaggcccgcacttagggcccactccaattaggggcacaaatgaaaaaaaaacttttaataaatatacatatatttttaataatttttaaaaatattatttattattataaaaaaagcccaaaaatatttttttagggctcaaattagctcagggtcgactctaaccttaacttagggccgaccctgataatatggtaaatttttagagtttcatagcaatttttgtttaaataattttgagtactaattataattattatttgattaatgataggttccaaatgtgattgggacaatcttgggagttgttcaattggccttatactactacattagtagaacatcaagagaagactcaagactacccttgatcaacacatatgtagtttgactaatttttgtcaaataataaatgtaattttttttt

SEQ ID NO: 246731 - DNA, 600 bp, Cannabis indica
gcggtattacttacattctgcgaagagacaatggtacccacacggcgttgcagtaatgccaacatgtatccaaagaaaccagcaccaagaagcattgcaatccctgcaatcaaccaataataatgaaaataagcacctacaatattttgtgcaaaaaagttgaaaagacaaaaacaaaattctagctggaaaatagtacataccaagaggaaaaccagttccatattgattagcacagtcatcgaaatggaactgaatctccctgatagctcgatttcctctgtcaattacaagcaatgagcaactacttccaatgtaaaccacatcaaagtcatcagagaacttagcatcttcgctcggtccatcaacatgacctcccccgcgaccccatttgccaccaacaatcgttgtaacacctaataaacagcacacaattttcattcaaattcaatatatataccaaatcaaaaaaacccaatttggcaaaggaaatacacaaacaaacacaacaaattgtctaaatggaaattaccagcatcactaagcttcctgattgctatatttgcagtgtctgcactataaatgttgcctctatcatca

SEQ ID NO: 246732 - DNA, 1207 bp, Cannabis indica
tttgatcttgagaaatttacaaggaagaacaattttggattatggcgtgttaagatgcgggcattgttggtacaataaggattacaagctgccatttcaggggagaaagaattaactgcgagtttaattgagaaagagaattctgagattcttgaaaaggctcacaatgcaattattttgagccttggagacaaggttcttagggaagtttcaaaggagacaattgcaactggtatttggctgaaattggagagtttgtatgcccaagtctttggcaaatcaattgttcttaaagcagaagttgtattctttcaagatggaatcgggaaagaacattgaagatcatttagataatttcaataaggttattcttgatcttgaaaacattgacattaagatcgaggatgaggattaagcaatcatagttctgaattcacttcctagtgaaaactatgagcattttgtggatacaatgatgtatgggaaatattctcttacattggaagaagtagaaaatgctttgatgtcaaaggaaatcttaacttcaagagtgctacaggagaaggattgttggttcgaggcaaatctttcaagaaagagaataaagatggaaacaatctggaagtgtgttggtggagttacagagttgagacgagttaggcatgtccttgagattaagaggaatctcatctcagtagacatgcttgaccaagaaggatatttatcaaaattgaaaagggtgttatgaaaattgtcaaaggctcaatgattgtcatgaagggaatcaaggaaaatggaatttacttattgcagggtcacacagagaaatcataagtgaatgcaacaattaaaacatcaaggaatcctaccttaatttggcacagaagactttctcatatcagtaatggtggaatgcaagtgctcaagaagaaaggagtctttggaagggatcaaatccaagagatggagttctgtgagcagtgtgtccttggaaaatctacaagagtcaagtttggaaaaggagttcatgtgtcaaaggcaatattaaattacatacattcagacttatggggctcttcaaggacagaacccagaggtggagccaggtattttctatcctttattgatgattttaccagatatgtttggattcatatcttgaagaataagaatgactcatttaaggtgtccttggaaaatctacaag

SEQ ID NO: 246733 - DNA, 773 bp, Cannabis indica
tattattttttgtctattttatcaaatatgccaataaaggattttacaatcttctcttttagcaatttgatagacaaaaataaaataaaaacctgcaacacacatgttagaaataagtaaaatgaagaactccccctgcaaacatatataactcatatcaaacataaaaaagaaactaaaacgtaactccccctaaaaaaagaagatccagagttacacacaataaaataaaacaggtttttgagtatctactctccctctttgcgtctttcaaagcaaccaaagtaccaaaagcataaaagaaacaaatatgtcaaacctaagactaaagaaagtatcaatgatcctaggaatggagacaataaaataaaaaacaagaaaaaaaaactaatcttatgggaccttggacaaggctttaacaacatcaagaactgagcattagagtccctcaagagtcatcactcgagcagtcaaggaatcaagtgaagctcgaacaccagagagttctacagagacaagtgctgaagcagttggaacaggagcttctgcaggaaagtcatccaaagaaaacacaagagattgaggcttagatttcctagatgatgaggcttcaacagtatcaaaaattgaagcagatgccttgtagatgcagtagcggaaggagccaccgaatcttcttgctctgtcttgatatcacttctctgcatactcaaaattttgtacataacttgatgaaaaggaagattcaaatttttcttattgactttctaaaa
